United States Patent Application Publication US 2019/0348154 A1 - sequence listing, part 51

SEQ ID NO: 188608 - DNA, 648 bp, Klebsiella oxytoca
atgaagaagaaactgccagaccagcttaccagggaatgcattattgcggctatgcgcgcctatgatgaaggtgtacgccaccagttcagcgaatcccggctgtatgatgtggtctttgaagggcgcagttatccaccgaaagcgatagtcggtattgctgcttcaaatatgaccggcgttgagttttcccctgaagattttagtggtggtatcaagtcgaaatgcgtcaagttgcttaccgatcaagggttccagatcgttgagaaaaatttgggtaacgagcagcccggcatcagcatttttcctgatgaactaccgccgcatagcgtatttactgaaggtaccgctacgcaggtaacggttaaccgctatgaacgcgaccgtatggcccgacaggtcgcattagcctggcatggttgcctgtgcaaagtatgtggtattgatatgatgaaggtgtatggcgagatagcaaaaggttttatccatatacatcacctgattccgctttcagacatcaaagagaattattctctggatcccaaaaaagatcttattcctgtctgccctaattgccatgccatgttacatagaaaaaaacctccatttactccagatgagttgaaggcctttcttcttcagaactattag

SEQ ID NO: 188609 - DNA, 1077 bp, Klebsiella oxytoca
atgaactggaatcccgaagccccttacaacgatctgccaaaactgccgcctgatctgcagcagatagaaacacgtaatgtactaaaagcgtgtataaatgcgcgcgcggcaattgcagagctgaaaacggcgggtgagttgatccccgatcagggattgttgattaacattctcccgatgctggaagcgaaagattcctcacgcattgagaacatcgtaacgaccagcgatcagctctttcagtatgctgatcgtgcagacggagcagatccagcaaccaaagaagcattgcgctatcgtacggcgctttatgatggttatacccatcttgagacctatccactttgcacaaacaccgcaatcgctatctgtaccaaattacgcgcagttcagaccgatataagaaaaacaccgggcacggtactgcgcgatcagaataacagcgtggtgtatacgcccccggtgggtgaagatactattcgtaacttattggcgaactgggaacagttcatacatggcgatgatgatttagatccattagtgaaaatggctattgcgcactatcagtttgagtgcatccacccttttccggatgggaatgggcgaacaggccgtatcctgaatattctttacttgattcaaaatgaattgctttcactgcctatcctgtacctgtcacgctttatcctagagagacgtagtgattactacacgctattgcgtagggtaacagaggaaggagactgggaatcgtggatattatttatgctggaggccgtagaaaacacgtctcgatggacgactgacaagattgcggtcgttcgggcattaatggcagaaacgaccgagtatgtacgtgagaagctgccaaaaatttatacctatgaactcatccaagtgctctatgcccaaccgtattgccggatcgataaccttgttgaacgaggtatcgctaaacgccagacggcatcagcgtatctcaaacagttagtcgagataggcgtgctggaagaaatgagcgttggtcgcgaaaagctgtatatcaataccaggttggtgcaggaattgaatcagtaa

SEQ ID NO: 188610 - DNA, 471 bp, Klebsiella oxytoca
atgtcgataggggatctagcggtcaatcacagttttctgcacagtgctattaacgatgtcttttgcgttgattcagcgagatgtgggtacgacagtgaaattgtgcaaaagaaaaatgttaccacctatcaaggattagattttttatcctccatagaggatagatttaaaatttcccctgaagcggatatgctcagaatatctgtcatgggggataaaatgaacgtaacttcacccaaaattctggctcaggcagtgaggaatgctcgcaagcaatgtaagctgactcaacgcgaaactgcagcaagtataggcatgaaacaatcaacggtttcagagtttgagaatcatcctgaggggatccgcataggtacgctctttaagctgcttgccgctctggaccttaagcttcaggtcgtaagccgtaggggcgaacataaatcgtctgatagctgggaccagcagtggtga

SEQ ID NO: 188611 - DNA, 921 bp, Klebsiella oxytoca
atgcatcaaatcaaagaacactttccgaacataaagtttaacatagcgtcttcaatctatttaataggagtaattatagttaccttgaatttctccttctttaataaagatagttttttttcaatccttagcatattgatatctataactttccttttttgcgcttatcaaaataaaaaaatggaagttaataaattagttggaaacggcataataaaatggatttccactgtgtgtgttttttcactttgcttatggtactcaaaacatagacttaactttgactatgatattgaagtagaatatttaaactactcagtttatggctatgctttcgctatagcaattcctctatgtttattcatttatggattgtgtatattcatatatatgtatataggaagagttacagcctaccaatctttctatgcagctatcatagccatacctctttgctatctgcttaaaaactatatacacggccaacatggcattaacttcgttcttaccatggggttaatcctaatattaccttatggctttataatgttgttaaaaaacatcaataacgccaataacaatatctttattattttcaaagagatgccctttgatataaagaaaatgaaatcattattaagtatgtggtttaaaaaggctctgacaaccacgaataactatatgaaaatcacagatttattatctatagcttcagcattgatatatatcggttcattttcaattgggatcatacctgaacatcagagatcatttcttttacttgatgctttctatagaacagactgcaatgataaaaaagattcatttttatatctccgtaaatcaaagaatgagtgttatagaataacaactaagggacttgaagttaaaaaaatggagtcatttcactcttcacattga

SEQ ID NO: 188612 - DNA, 1719 bp, Klebsiella oxytoca
atgcccgaaaccaccatcatcaaactcaccctgaccggccttaccgccgcgaccgcgcgcaccgactcccagcttaacggcctgaccaccgccactgtcgcaggaaccacctccgtgccgttaatccttgataccgtgctggcgacccatctaacaacaacgatcaacaatgccgactatgacgggctgattgccgaggcgcgccagcttccggcgaccagcaacgccgatcgctatcagtttgtgctgcgcccctggctgtggtggctgacgctctccagcaacaaccgcgtttttcagaacctcaacgcgcaagaaattgtcgagaaggtgtttaaggacggcggatttaccgactacaagttccagctgaaacgcaaaccggcgaagcgtgaatactgtctgcaatataaggaaagcgacttcaattttgtctcgcggctgctggagcaggaggggatcttctggttcttcacccataaagaaggcaagcatacgctggtgctgacggatgataacagcgcctgcccgcctattcccggcgagaaaaaagtcaagtatcaggcggctcagaacggcgggcgggaaaccggaatgattcgttcggcgcagctgcgtttacaggctaccgcgcagggggctcaccccggcaatgataaatctgagcagccgaaacagctgatcggcgaaagcgactgcccagcgctgatggcagggcactggtttaccctcgccgatcatgacgacaaagcaaccaatatcgactggctcatcaccaccgtcagccatgaatatgacggcgaacgctaccgtagccgttttaccgctatcccgaaagccaccccgtatcacccaccgtgcgccacgccgaagccgtttatgcctacgcaaaccgcaacggtggtcggcaaaaatggagaagaaatctggactgacaagctcggacgggtaaaagtgcagtttccgtgggagcgggaaggcaaaaacgatgagatcggctcctgctggctgcgggtcgccaccgcctggagcggtaacggcttcggcgcgcagtttatcccgcgcattggtcaggaagtggtcgtgagctttatcgacggcgacccggataagccgctcattaccggctgtgtgtacaacggcgcgaatgccctgccgtatgcgctaccggcgaatcaaactcagtcgggcattaaaacccacagcgaacaaggctttaacgaactgcgcttcgacgacaaaaaagatgccgagctgctggcgatgcaggcgcagaaggattttcaggtcaccgtgctgaacgacagtacaaccatcgttggccatgatgagatcctgagtgtgaaaaataaacgcagcgtaacggtgaagggcgatcaggaacacgctatcgacggtaatgagacgcataaggtaaaaggcaactacacgctcaatgttgacggtaatctgacgattaaggtcagcggcacgctcaccctcgagagcggcaaaaccctggacataaagagtggggcgggtcttaacgccagcgcgtcaggcagcatgaagctggatgccgccagcatcgccagtgaagccaaatcctcactgtcccagaaagccgtaaccatcagccaggaagcaagagcgacgcttaccagcaaagccagtgccacccagaccgttgacggcggcgggatgctggtgattaaaggtggcctggtgaaaattaactga

SEQ ID NO: 188613 - DNA, 354 bp, Klebsiella oxytoca
atgattcatttaactattgaagatcgggaaaacgcgctgatctatatcccgcttatccgccgccattttccccatctcgctatcaacgccatcaaacagaacctgaacgcttcgggttacgtcacgtcatttgatgaagacacgatctgcgcagacattctggaagagcagaaccccattggaaattttcttaatctcatcaaggtattaaagcatcgaggcgcgcggcttaaattcatcgagcaaacgggagatgaaccgggagatgaattactcttgagccaggtgttgaactatgtggaaagaggtctcgaaatcgcccgtcagagagagcaagaggatgaacaggactga

SEQ ID NO: 188614 - DNA, 291 bp, Klebsiella oxytoca
atgagagaattaaccgcaattgaaatcgacgccgtaagcggcgcaggctggttacaggatagtctcgcttctataggtgcaaaagctggcgccgccgtgtggtcgctcagcagcgatatgttgaacattgaactgccgattataggcactatcaatctttcaactattgctcccgatttaggcaaaaccgtaggcgagacggttggtttcaccgttggcggagccattgagagtaccctggcaggcctgccggtaatcggcggtctgctcaataaacttctcggcaattaa

SEQ ID NO: 188615 - DNA, 1176 bp, Klebsiella oxytoca
atgaatggtaacggttttttgtttgttatcttctgcgtttttattatccccgcgctcatcggtgggggattcctgattttccttattttatggagtaaaggtagggttattgggaaaaacatgtcagtagcctatgtttttctgttttttgctgcgataatattgtgtgcggtttataagtatttaggttttttatatacatttacacttgaccattttatttattttagttgggctgccggcgccgcgttgattttagcgttaatactttttagcactttttccgtaaaaaatgcgggatttattcatgcgttgactttgctgacctttgcgcttatcgccaataaatttattggcccatcaatggaacaggtcgacatgtcttttgccgaacgggaccgcgcgaacagcattgctgagttcaggctgggtaagtttacagtgcaaaaattacccgagtttgaccgcttgtttaaaagtaaatctcagcaggaacaatacgaaatctatttatttgccatctatgataaatcattgccgaaagagttatatcaatattttgtacagcagttgggtagcccattaaaaaaccggcaaggctcttttgattacgttgcgaatcagagtgattattataccattccctttttcgaggccatccattctcaaaatttaacggcgctgcaggtttttattgacgctattcaggcttcatctgccgcagagcgcaagcaggctcaggacattgtttatgctgctcctgcacaatggacaggactggagcatacctttgcccagccgatcgatgtttattataaaagacccacccaccccgatagcgttattaagcaagccgaactgctgctttccgcatttcctgaattagctaaaacccaaacgggtgccgctattattgatcgtaccattcaaaacgcggatgttcgcgctatgagattatttgcaaagtattttcaaccaggttcagaaatattaactgcggcgagctatgttcttggcggagaaatggagaaatttgttgatatattaaaaaacaaccttccttattacgtcagcaaattgatattggtaagtattattccggcagtactaatttattattctacgtcgttatgtttggcaaaaaagatatcattcagcaggtcatttcgcgcataa

SEQ ID NO: 188616 - DNA, 426 bp, Klebsiella oxytoca
atgtttggcaaaaaagatatcattcagcaggtcatttcgcgcataaactggcaggatcctgaattgcattataataaaggtaatagccttgttttagcctacgcggcacggcgcgttaagaacgctttctataatgcctcactggagacaaataaggacgcagttgagatttttacccttttgctgaatacgcagttacgtaaccaaccgaacatccctgatcgacaattgtgggatatcgccgctgatgacttttataggagtcactggcccaatacaggcgagacatttaatgatgaggcgatacggtccatttgccattcggatattgggccgcagtttttacgctatattgatacgttagataaaaatgataacgagacggtaaaaagccgggttagcggaattaaaaaagcgtgccattaa

SEQ ID NO: 188617 - DNA, 1710 bp, Klebsiella oxytoca
atgaacgggaaaatagctaaaaacttcaattcggtatcgctggcagcagtgtttgtgctggcgctatcgccggacgcctttgcggaaaaagatgcactgataagcgtcacgacgagttcaagcagcgacgcttcaggccctgcatttttaaattacgctaaagagcagcaggcgcaggaaagtcgtgagcctgttaagcccgtggaggaaaaaagcaataaaacaaaaacaaccaataaaaaaagcgttcagagtaccaatgatatctcccgccaggctgcaataatttctcaaaaagataaactcatccgccagcttcgacagcagctggaagctaaacctgtgacgattaatgccgcagcagataaccaaaaagagctgactgataaaattcagctgcttgagaaaaaattagcggctgctgtagccgaaaaacaacgattaatagataaagagctaacggccgcagctgaaataaaacagagcgtgggccagcgtaacgcctccgaaaataaaatagtgcagcaagaaaaaaggctattattagtagaatccgcaaaacaaaaagccgagctgcagctgactgaggcaaccgctgaaaaacaggcactgataaagaaagtcgccgcggcggaaacggaaaagcaagatacggcctccaggctcacggctgctgcatcagacaaacaagcgctcattagcaagctcgctgccgctgagtcagctcaggggcaaatgcgcgcaaaactcaccgcggctgacgccgcccggcaggcgctacaaacgaagctggaggcggctgaaacagaccataaagtcgtgctcgcgaagctcgccgcctatgaaacgaaagaaaaggatttaacgacaaaactggcggctgcaggggtagaaaaacaggcgctcacggctaaactggattcctttatcatcagcaagcagcagtcatcccttcaggaggatgccgccgataaagataaagcccaactgcaagccagcgcagatgaaattacccgactaaaaaccatgttagctgatgccgaagctaaaaaaccagcggctatcgaccttgcgaaagcgcccctgcagcaggcttacgctattggcgtatcgatgggcgctgaagtgctacagctcttatccacccgggattcccagggcgtaaaaatgagcaaagataccgtactgcaggggatccaggattctttttccggaaatatcgcccttgatgagaaagcgcgcaataaagctttgttcgatgtatctaaaaaagtctttcagaacctgaagaagatcgaacagcaaacgcttagcgaaggaaagaaatatcagcaaaagttcgcgcagcaaaaaggagtggtattgaaagatggcgtttacagtcgcatagattatgccggtaagggcaagattctcgatagcgacatcgttaccgtcaccatcaaagaaacgcttactgacggaaccgtcattaacgatatggaggcggagggtaaagtgtggtctcagtccctgaaatcttatcctccactgttccttgggcccataaagcggctgggaaatcacggcgctattacggtcgtgatccctcccgagctcgcctacggcagcgaaggcaaaccgcctaaaatcccgccgggagcgaccatggtctattcgctcagaatcgttgacgccactgcagcacaaccgcaggctaaaaaaccctga

SEQ ID NO: 188618 - DNA, 1584 bp, Klebsiella oxytoca
atgcaacgtcgtgagtttcttaaactaaccgctgcggtaagcgtagccagcgcattgccgctatggagtcgctcggttttcgccgccagtcgtccatcgttgcctgtaccggagctacttaccgccgacgcgcgcaatcgcatctcgttgatcatccaggccggaaaaacgcagttcggctctcatcttgcgaccacctggggctataacggtaatctgctgggcccggccctacagcttaagcagggggagcaggcaaccatcgatattcataaccggctggcggaggagaccaccgtacactggcacggtctggaggttcccggcgccgttgacggcggtccccagggcgtgattgccgccggaggctcccgcacggtgacctttactccaacgcagcgggcggcgacctgttggttccatcctcatcaacatggcaaaaccggcagacaggtcgcgatggggctggcggggctggtactgatttctgatgcggaaagcgaaaagctgctcttgccaaagcagtggggaattgatgatgtcccggtgattgtgcaggataaaaagttcaccgcagcgggagagattgattatcagctcgatatcatgagcgcagccgttggctggtttggcgatacgctgctgactaacggggcgctttacccggagcatgccgcgcctcgcggctggctacggttgcgtctgcttaacggttgtaatgcgcgttctttgaatttcgccaccagcgataagcggcccatgtacgtggtggcaagcgatggcggtctgctggctgagccggtgaaagtcaacgagctgccggtgctgatgggggagcgtttcgaagtgctggtggataccactgacgggaaaccctttgatttaattacgctaccggttaaccagatggggatggcgattgctccgtttgatcggccgcagccggtattacgcgtgcagccactgactatccaggcttccggtaagctgccggatgttctggccgctatgccagcgctgccctcccttcaggggcttactcagcgtactctgcagctctctatggatccgatgctcgatatgatggggatgcaggcgctgatgcaaaaatatggcgaccaggcgatgtccggcatggaccatggcatgatgatgaatcatggcgatatggggaatatgaatcacggaaacatgaatcatggcggcatggcgcagatgaagcacggtcatcaaggttttgatttccataatgcgaatcgaatcaacggtaaagcctttgatatgaatgttcccctgtttgcggcggcgaaagggcagtatgagcggtgggtgatttccggcaaaggcgacatgatgttgcatcctttccatattcacggtactcagtttcgtattttgtccgaaaacggtaaagcgccggcaccccaccggagcggctggaaagataccgtcagggtggaaggcgatgtcagtgaagtgctggtgaaatttgatcacgatgcgccgaaagagcatgcctatatggcgcactgccatctgctggagcatgaagatacggggatgatgcttggatttacggtgtag

SEQ ID NO: 188619 - DNA, 480 bp, Klebsiella oxytoca
atgacgctcgtctatatcgcgattggcagcaatctggcctctccgctggagcaggtcaacgctgccgttaacgcgctggcggacatacccgatagccgggtaataagcgtttcctctttctaccacacgccgcccctggggccgcaggatcagcctgactacctcaacgtcgccgtcgcgctggaaaccgcgctgaccgcagaagcgctgctcaaccacacccagcgtattgaactgcagcagggccgcacgcgtaaagccgaacgctggggaccgcgcacgctggacctcgacatcatgctgtttggcgatgacgtgattaacagcccgcgcctgaccgtaccgcactacgatatgaaaaaccgcggttttatgctgtggccgctgtttgaaatcgcccccgagctgcgtttccccgacggtacggcattacgggctgttctggcaaatctcggcgcagaaaaacccgccctctggtaa

SEQ ID NO: 188620 - DNA, 759 bp, Klebsiella oxytoca
atgaaaaatagactcactatcggcctgctgctggcggcgatctatctcttctggctgctgctcagcgcgccggcgcgtctgctggccctggcgctgccggacggcgcgcggctcgcgcaaacgtcgggcaccctgtggaagggagaagcccttcaggccagctggcgcggcgttgaattagcctatttacgctgggagtttggcttctcgacctggcttcccggctggcatatccgttttaacgatccctccggcctgcgcggccaggcctggctgcacggcctgaacgagtttgtggtgcgcgagggacggctcgtgattccggcccgtttaatcagccagcggctggcgctgggtatgccgctggaagcccgcggccagctggcgctgacgctgccggaggccagctttaacgccaacggctgccggcggatagccgcgagcgccgtgcagtggcaagatgcggcgctcagctcccccgccgggttgctcgaactggcccaggtcaacggcaaattaagctgtaccccggcgggtgcgctggctgtcgccctgacccaggactcccatcagcttagcctcgctggacagggcgttctggcgcccgacgggcgctatacgtttaacggtacgctgcaacctcgtcaggcggccccggcgctgctgacgctgctggtcgcgcaaaacggccgtaaagatgagcagggacgcataccgtggcggtggcaaggagagtggctatccgaggagaaaaaataa

SEQ ID NO: 188621 - DNA, 513 bp, Klebsiella oxytoca
gtgcgacagcgcggctttacgttgctggagatgatgctcattttgctgctgatgggggtcagcgcgggcatggtgctgctggctttccccgcctcgcgcgacgatagcgcggcgcagacgctggcgcgctttgaagcgcagctgcgctttgtccagcagcgcgggctgcaaaccggccagttctttggcgtctcggtgcacccagaccgctggcagtttctggttctggaggcccgcgatggcgccgatccggcccccgccgacgacggctggagcggctatcgctggctgccgctgcgcgccggacgcgtcgccacttcgggcagcatcgccgggggcaagctgaccctcgcttttgcgcagggcgaagcctggacgccgggcgacaatcccgatgtgctgatctttcccggcggcgagatgacgccgttccggctgaccctcggcgaggcgccgggtatcgcgtttaacgcccgcggcgaaagcctgcccgaaccgcaggaggcgcaatga

SEQ ID NO: 188622 - DNA, 708 bp, Klebsiella oxytoca
atggccctcgcgctggagcaccggaacggacgagtaagggacggtgaagacctggctgctgccgtcggcctctttgatggtcacctgcagatcgccgccgctgccggcggagtagagatcgttgatggtgaacggaccgggcggcaccgtgctctggtaaatctcatagccgttctgcttcaccgacacctgagcggtgccgcgggcaatgccgtggatcaccggggcaaaccccttctggctgtccggcagcatattgtcgtcggaggcaagctgcgcgccgcggaagttgatgccgtcgaagacgtcgccgttggtgtagctgtcgccgagggtcaggcgcgagcgcagcagtgtaatatcacgttcaagccaggtattgatgtgctgccacttgttttcactggtcgacgagctgccgccgctgctgtagctccaggtggtgttgtcgcgcaggcgccaggcgccaaggttcagcccgctctgcaggttcaggtacgcgtaattgctgctgccgccaacgtcgttgtgcacgttgttgccggtgaagttgtagttcagcaggccggcgttaatcccgtggtcccagagctcgggcggaatatagccgcgggcgcggttgcccataaacgcctggggtacggtcagatacagccgctgctgcccggcatcaaagcgggtcgtcgcgtctttaatcatctcggttaa

SEQ ID NO: 188623 - DNA, 609 bp, Klebsiella oxytoca
atgattaaacttatcggcatgatggattcgccttatgtcaggcgcgtggcgatttctcttgaactctacggcgtcgagtttgaaagtcacccgctgtcggtattcagcagctttgacgcgttttcccgcatcaatcccgcggtaaaagcgccgacgcttttgctggataacggaattcgcctgatggactcgtcgctgatactggcctattttgaaggccaggcctccccggcgcgcaagctgctgccggtcgatccactggcgcaggcaagcgatctgcaaacgctgggctttattctcgccgcgggtgaaaaggcggtgcagaacgtgtatgaacacaacctgcgcccggcggaaaagcagcataatccgtggatagagcgcatcacgattcagctgctggcggcctgcagggagtggaataccctgctggaaaaccgtccggcggccgcggtccccgatcaggtggcagtaacgagtacggtaatctggacatttattcagtcgatgatcccccacgtggttcatgcgggagactttaatcatattcaatccgctgctgaattatatgaagcccatagcgcatttaaaaaacatccctttggttaa

SEQ ID NO: 188624 - DNA, 768 bp, Klebsiella oxytoca
atgaagggtaaagcgccaacccgccgggcgcccgcgctcgagccggatcagaaaaaacagctggtaaatgtgcagcgccgattactcctgcgatccgggctgacgctgggaggcgtggcgatgctgaccggatgcaacatgcaggatggcgatcaagtcgacaaagtgctgtgggctatgtcgcgctggaacgatcgggtccagtcctggctgttcagcggccagcgcctggcccagacttaccgtccggatcaaattacccacccctttccgtttaacgctttttatccgcaatataacgcgccggaagtcgatctgttcgactatcgtctggaagtctccggtaaggtggagaaaaaagcgccgtggacgctggaacagctacagcgtctgccgcaacagagccagatcacccggctgatctgcattgaaggctggagcgcaattggtcaatggggcggcgtaccgctaaagctattcctgcaacatgtcggcgccgacctcaacgcgcgctatgtcggctttaagtgcgcggatcgctattattccagtattgatatggccaccgcgctgcacccgcaaaccattctggcgctggattttgccggtaagtcgctgccggcggagtatggttttccgctacgactgcgggtgccgaccaagctggggttcaaaaacgccaagcatatcgccgccattttcgtcagcgataccaaccccggcggctactgggaggatcagggctataactggtttagcggtatttag

SEQ ID NO: 188625 - DNA, 609 bp, Klebsiella oxytoca
atgaaaaccaacgcgtcgcggccagtacatcgctggccggtcaggctcacccactgggtgaatctggtcgccatgatcggtatgttcatgagcggctgggaaatctacaacgcttcgccgctgttcgacttccgctttccgccctccctcaccctgggcggctggctgggcggcgcgattggctggcacctggcggtcatgtggctgctggtcgttaacgctgtttgctacctgctgtggagtctgttcagcggccatctacgccgcgacctgctgccgctacgtctggccgcgctccggcaggatatctggctgaccttaacgctgcggctgaaccaccgcctcggccattacaatgcgattcaaaagcttatgtacctcggcgttatggcgctcggcctgctgctggtgctctccgggctggctatctggaaaccggtacagctctactggctggtggcgctgtttggcggttttcctgtcgcgcgctatgtccacttctgcgccatggcgggcatcggactgttcgtcgttatccatgtgctgatggtgttaatcgtaccttccaccctgtgggccatgctgtcaggaggcaaacatgaagggtaa

SEQ ID NO: 188626 - DNA, 627 bp, Klebsiella oxytoca
atgcatacacgccatcgtattgccggtttactgttgtctaccctgatgctctgcagcggcatagccactgcggcgcagacgccggctaaagctatcacgccgctgcgcggcaccatcgatcaggtctcggataccgctctgcaaatcagcaaccgtcaaggggaaaaggtcgacgtaaagctcaacgacaaaacgcaggtttttagcgtcgccaaaggttcgatcgacgatatcaagccggacagctttatcggcaccgcagcggtcccccaggccgacggtagcctgaaggcgctggaagtacacgtgtttgccgccagcctccgcggcacgggcgaagggcattctccgtgggagtccgcggacggtaaaatcaacaccatgaccaacggcaccatcggcaagctggtaaacgccaacggccgcacgctaaccgttaaatacggcgatcggcaaaaaaacgtcatcgtccctgacgatacgccggtagtgaccatcaatcccggcgatcgcggcctgctgaagcccggtacgcatatcgtgctgttctccgccactaacgataaaggcgaacgcgtcgccacccgcatttccgccggaaaagacggcaccgtaccgccgatgtaa

SEQ ID NO: 188627 - DNA, 669 bp, Klebsiella oxytoca
atgcgcatattagtggtggaagatgatatcgggaccggtaattacctgaaaaaggggttaacggaggccggatacggcgttgatttggcgcgcgacggtaccgacggcttatttcgggcgctggagtatggttacgatgcgatagtgctcgacgtcatgctgcccgggcttgacggctggcagattattgatgttttacgcaagaaaagcgatgtgccgatactgtttcttaccgcccgcgacgaggtgcaggaccgtattcatggcctggagctgggggcggacgattacctggtcaaacctttctcctttaccgaactggtgctcaggttgcgtacgctgttgcgccgcggaaccgtacgggaatccgatcgctatgaaattgccgacctgcatattgatgtgctgcggcgcagagccacccgtcaggacaccgtgataccgctgaccaacaaagagtttatgctgctgcatctgctggtccggcgtgaaggagaggtgctgtcgcgcaccatgatcgcctcgcaggtatgggatatgaatttcgacagcgacaccaacgtggtggatgtggcgatcaaacgcctgcgcgccaaaatcgaccggccgttcgatatcaaacttattcataccgtccgcggcatcggctacgtttgcgaggttcgttga

SEQ ID NO: 188628 - DNA, 1419 bp, Klebsiella oxytoca
atgaacgtgctggctcgccgttggcaggcgacatcgctgacgttgcgaagcgccgttctgtttgccctggttgcagcgctggtggtcagcgccgctggcggatacttatatcacgccatgcgtcaggagatgattcaccgtagcgatctgcaggtgaccgggcgcatagaatattaccgaaacgtactcagtaaacgctttccgctggagcggctggtggcgaacactgggatgttcgaaaacatgttgggcaacgagcaggacgttttaatctttcgtattccgggacaggcgccgttaattaatgtgaatcctgccagggttcaattaccgtcggtgacgccgacgccggcggatcgtccgcagcgcctgaatgaggtacagagcggaatgaccgggcagggggttccgctgcgtgtggcgtcggggctggtgacgctggaagatggcagggtactgcaaatttctgtcgcgcatgtgatggtaaatgaacagaaaatgctggcgcgctacctgtggcgcgtcatcgcggcggtggcggtggcctttctggcgattgcgctgctgggctactgggtgatgcgtcgcgagctgcggccattaaggcgtatggccgcagaggcggcgatcatcacgcccagtacgctggcgactcgcctgagcgaacaggacgcgccgcaggaactgcagcagctgattgtctccttcaacgccatgctcgacaggctcaacgaaggctatcagcgcctgacgcggttttccgccgatctggcccacgagatccgcacaccggtaggggcgctaatgggccagtgtcaggtggcgctgtatcagcctcgcagcgtggaggagtatgaaacgttgctctccagcaacatggaggagttggaacgcatttcacgcatggtggaaaatattctgtttctggcgcgcgccagccatgcgcagtcggtgctgaactgccgggaactggatattgctcaggagctacagcgtgtcgcggattatttcgaggggctggcggaggagcgcgatattcagctgatttgcgaaggcgaagggcagctgtgggccgatgcgatgctgttccagagggcgttaagcaatctggtggccaacgcggttcgctatgccgatgaagcgagccaaatcatcttacgagccggcatggaagaaaaccgacagatcatccaggtgattaatcagggtccgccgattgcgcaggtacatctggaaaagctgtttgagcgtttctatcgcgcagacgccgcgcgcagtagccatgccagcgggctgggattgtcgatcgtacgcgcaattatgactctgcacggcggtgaggctcgcgctcagtgcctgtcgcagcagccgggcgcgcaaatcgttttcagcctgactttcccgaaacgctcagcgtag

SEQ ID NO: 188629 - DNA, 348 bp, Klebsiella oxytoca
atgattaaaacaacggatacgtttgagcgctggtttacctcgctcaacgataccgatagggccagcgtgcttgcagcgttgttggtcctgcgagaaaaggggccgggtttgtccagaccttatgccgatacgctgagaggctcccgctacagcgacatgaaagagttgcgtattcagagccggggcgagccgatacgggcatttttcgcttttgacccggcccgtaccggcattgtgctttgtgccggtaataaggttggcaatgaaaaacgtttttacgatgagatgctccctgttgctgagcgggaattcacgaactggctgaagacattcaaagagaaggagtaa

SEQ ID NO: 188630 - DNA, 945 bp, Klebsiella oxytoca
atgttaatccgtaagttttattctgcttatccgcctaaagggcggatttgtatcgccgcgctggtctgcgcgttctacggcattaacgctgacgccaaaccggatatgagaccgttagggccgaatatcgccgaccgcggctcagcgtattatcacttcaacgttgcttatttcgattcgcttgacggcgaacggcattataaggtctggaccgcgataccgaacgcggcgccgccagcagaagggtatcccattctctacgctctggatggcaacgcggtgatggaccgggtgtccgactcgctgcttgcgcagcttacgcaaaaaacgccgcccgttattgtggccgtgggctatcaaacgacattgccctttgatcagaacgccagagcctatgactaccggccgaccgtcaaggagaattctgccgatagcgggcgggactcgcgcaaaagcggcggtagcgaggcatttcgccagctattacagaatactatcgtggaaaacgttgagcgcgggatgaagattgacccgcggcgacgggcgatctgggggcactcctacggcggattatttattattgattcctggctggcgtcatcccgcttccggatctatttttctgccagtccttccctgggacgaggcaatgcctcgttgttagataagatggccgaggcaaaagccgatgcgtttagccagaagtccctgtacctgatggaaggggcggttgcgacgcagcgggtctcttccgcaggggcagaagagacccggggcaacgtcctgcagacggtttctctgctcaagaaaaagggcgtggcggtcaactggtggccttatcccgggctgtctcacggggagatgtttaacgcctcgttgcaaagcgcgctgcttgaggtagcagacggtacgcttcgtcggcgaccggctccagccattcgttag

SEQ ID NO: 188631 - DNA, 366 bp, Klebsiella oxytoca
atgtcccttaacgcctcaaaaacagaaattgagtaccattacaaaactcttctaagacagtcttaccgccactcgctcatactggtcaaacgcgcctcatggtttcataacgatgcggccaagcgatttcgctgtctcagcgaatttatgggccgcggcagcgttagcctgggggaagatgcggtcaatgacacccctgatgcgccctgcagctacagcctgcaacatgtcgtccacacgtgtccgaactccgtgcctttcaaaaaggggtcctatgaatacccccatgagtgtctggttagactgcattggcgaccacagatcgacagtcagactgcccgcggccgcgtagccgacgacccatga

SEQ ID NO: 188632 - DNA, 888 bp, Klebsiella oxytoca
atgtttactggcctctgcgcttttcctctgactccgttcaatcatcacggcgttgatgaaaccgcttttgctcgcattgttactcgtctcgttgacgcagctgtcaattctctcggcgtgctcggctccacgggaagttacgcatacctcagccgtgagcagagaatgcaggttgtccgacaggcaaaatcgcatgccggctcggtgccgatgatggtggggatcggggcggtgggaaccgatcaggttcttcgtctggcagacgatgcccagcgggcgggtgcgaacgcgctactcctgccggtgatggcttatcagcccctgtcagatgaggaaattttgactttttaccagaccgtttgtcgccatgtctctgtacccgtttgcgtttacgacaatccggttactacccatatttctctgtccgatgagctcaaaagcgcgatagccgcgctgccgggtattgcctcaatgaaaatacccggacccgccagccatgaagtcgcgcaacgcgtgcagagcctgcggcgacagctcccggccggggtgtctattgggattagcggagacgcctgcgcggccgatgggctgaacgccggctgtgcggtatggtattccgtgtgcggcggacttttcccgaacgttgcccaagagatagtggctgccgcgaggcggggcgaggcccagcgggcgacggcgataagcgccaggctggagccgctgtggatgctgttccgcaagtatggcggaagcctgcgggtcactgccgccgcggcgacgatcctcggtatgtgcgctgaggattgcttaccgcgcccgctgttaccgctctcgccggaggcctttagcgagattgctgagacgctgcgccgtctgaaccttgagtag

SEQ ID NO: 188633 - DNA, 504 bp, Klebsiella oxytoca
atggtcgttccacgaatggtccaaaagctaaataaccagatgaatcttgaattccatacctcaaatttatatctgcatttaagcgaatggtgtactcagcaccggttgaacggtaccgccacttttctccgtaaccgagcgcaagccagcataacgcagacgatgcgggtctttgattttatgaaaaaatcaggcgcctggcccgtggtcaaagcgcaagatacctatagcgctgaatgcacatcgcttgaagacctctttagcaaaaccgttgaggattatcagcagcgcagcagcatactctccagcctggcggaagaggcgaaggcgcaaagcgatgcgccaaccctgcgctttctgacgctgcttgcggaacaacaggatcgggatggcatgctgctggagacgattcttgacgaagtacgccatgcggaaaaagccgggaccagcgaacaacaaaccgatcgttacctgctcgatctggtcagcaaccagcgcggctaa

SEQ ID NO: 188634 - DNA, 654 bp, Klebsiella oxytoca
atgtatcagcgcattaacggttccgcctggcgtaatatctggctggtgggcgacctgcacggctgtttcgcatgtctgatggcggcccttcgcgagcgcaggtttgacccttatcaggacctgcttctctcggtgggcgatctgatcgatcgtgggccacaaagcgcgcaatgcctggatttactgcgctatcgctgggtttgcgcggtgcgtggaaaccatgagcagatggcgctggaggcgcttgcgggcggcgacatgcggctctgggagatgaacggaggcggctggtatacgcaatctccgcagaaccagaggcggcgccttgcggagcttatcgcctcctgccgcgacctaccgctgattatcgaactccacagcggtgggcaggtgcacgtgattgcccatgctgattaccccgccgcggtatatcgctggcagtgcgccgtcgatgagcatcaggtgttgtggcgtcggcagcggcttaccgaccatttcgccgggcgacacggcgcgattgccggcgccgatcatttctggttcggccatacgccgctccaacggcgctacgacagcgataaccagcattatatcgatacaggggccgtatttggtggagagctaaccctggtggcgctacagctggcgggctaa

SEQ ID NO: 188635 - DNA, 222 bp, Klebsiella oxytoca
atgcttcgactggataacaacgatatctcgtataacggcgcccatgcctgcatcgatttcttgcgaggggcactggcgctaaatagcgataaaatggatggcgccacggccatgctctgtcttacggtaaacggtgtcgattctctcccggaaagctatcgggaatataaagatttgattgctccggtaagctatatctcttcgcttcgcacggaggattag

SEQ ID NO: 188636 - DNA, 852 bp, Klebsiella oxytoca
gtgaatgcagtcgtcagttttatctccgatttacatccattatcctttatgggctatcacgttttatccaccacggttatatatatcgtggccaatatcattatatcgatgactcgccctactgagaaaggcacgccgataccgcccccctattccatccccccctcatttttagcctggctgcatgataaagcgaccggtattattcagttggctacgtttagactattaaggaaaaattacgtcaccatcattcattcagcccagggtatcgagctgcgcgcgaatcagcagtacgcggagtgtaaaatgacgtgcgtagaaaaaatcctctttaaccacttttcttcaccaaaacccggcaaccagaatttaccccttgaactttacgtcgcccagaaaaatcactggtctacggatacccgctgcgcgggcctgatgctaagccctacgcaacaaacgtggaacatgatattagttgccgttccttcattgtttttaatcgccatattaggctggaaaacgttattcgctaataacgctctgcttaatttcagcgtatttagctggcttgcgatgtttgtcgtttccggtctgtggtggctgttaatgttactcatcaccttaaatgttacccggctggacctggaaggtatctcgattaatattcttcgtagttatgttgataaattaaagaatactcttgtcgccgataaggaacagataaccgatgaaacggctgattattgcgtcgctatcggcaaaaccagcctgctccccgagcgctatcgcgaataccgggaaatcatcaaatcgataaattatccattttctgtgcaacggcttgattaa

SEQ ID NO: 188637 - DNA, 564 bp, Klebsiella oxytoca
atggtattcaacgaatatatcattaataatgaagttatttttgatacaaatgtgaataagctaaaaccattaggtgagcacggtgatagcgttgctctaaatgcacctaccgcgcgttgtcttcaactattgctggaaagcaatggaaaagttatatctcgtgaggagtttttagatacagtgtggaaaacgagaggcgttgttgtctcgcaaaatacgttctatcaaaatatttcgctattaagaaagtcactactaaaagctggattatcgcaagatatcattgttactgtacggcagcgtggctttgttttggcagcagattcccacgttgattttttgtccagaaccgatgaagaagagtcaggaaatttagaaaacataccgataataagcaatgttgctcctctcatggcggaaaggaaggtgcttgataaccccgcaaggcctccagagttacatataaatgataataataagcagccagctttgagtttgccaggctggtttttgctgctactggtagccttaatagcaaccaatatactttctttaatattatga

SEQ ID NO: 188638 - DNA, 561 bp, Klebsiella oxytoca
atgaaaaaaacaatcgtagctgtaatggtcgctgcatcagcagttctgagcgcacaggctttcgcggcaggaaacagttctaacctgactattctgggaaacgtaactgataaaggtgaatcctgtaacgttactccgtcagcactcatcaatggcggctccttgacgctggatgatgtccaggcttctaaactggaaggcttagcagtaaacactccgtatatgagtcttgctaaagatattgagtacaccattactgattgccagaaaggctctactgattacactggtaatatcaacgtcagcgttactggcgattacatcagcggccaggataacgttctgaccaacactgctgtaggcccggctactaacgccgctgtaaccctggttaacaccgacggttctcgcgtaagcttcactggcaccactgctcagaccatcgactataagcctagccaaatttcttatatgcgctttaaagctgcatatgtaaaaactgcagctggcgttaaagatggtgcagttaagggcgtagcgaccttcactatcagctattaa

SEQ ID NO: 188639 - DNA, 693 bp, Klebsiella oxytoca
atgtttaagtctttattgaaaataatggcagttgtttctctaaccacaaccttcactgccaatgcaggtgtagtcattgactctactcgtcatctttacaaggaaggggtccgtgaaataaacgcaaacctggagaataaagacaatattccatatttgataaagtcatggatagaaccccgcgaaggaagtagtacatcttttttcatggtaaccccgcccctttttcgtctggaagcaaatcagagaaacactttgcgtatatttccaaatgccaacatctctggcgcaccaaaggatagggagaccgtttacttttttaacgtaatgtctatcccgccaaccaacgatacagatacagaaaaaaacaagatccaattggcagtgcgccatagaatgcgcttaatctatcgcccattggctttacaggaactttccattaatcaggaagccaaaaagttagaatggcggagaagtaacaataagataacagttaagaataccaccccattctttatgtattttaaatcaataaaaattaatggtgcggaggtgagcaacttaattaataacatcgacgcatttactactagagagtttacgttacctacgggtattaatggttcccaaatagaatggaaaattgccaccgacaatggcggcatgggtacagcctactcgtcaactctttaa

SEQ ID NO: 188640 - DNA, 2544 bp, Klebsiella oxytoca
atgtctatttcaataaaaaaaaatgattgtattttttgtggtgcgccccagtttttattcgttctcattcctgcgttagcccttggtttatgcaatagcgtttcggcacgtgatttctttgatcctgaatttatgaaatcagtaggtcaaaccgacccatcatcaattccggacttatcaatatatgctacgcaagatgctcaggctccaggaaagtatcgtgttgatgtgattttaaatagtgaaatgaaagagacagcagatattttgtttgtcgaacaaaaagactcaactactggtgacaataaactttccccatgcctaagcattgcaaaacttgcaagctatggattgcgaacagaggcatttccgtttttaaaagaagacgcaaatggatgtgccaatgctagcgatatacctgatttctcagctaagtttaacttcaattcgcaacagttaattatatccataccgcaagcggctttatcgaacgctgtacaaggttttgttccgccagaagaatttgatgaaggcattaatgcgttgttggtcaattaccaattcagctcaggtaaggattatgaggccgataatgaaaactacaacctcaatttacagtctggcctgaatattggcccgtggcgcctgcgtaatcttggcacctggaataaatcagcgggtggctcaagtgattgggattcagtctacctttacgcccaaagaagcattattccactaaaaagcacgctagtgatgggtgaaagtagttctttatccagtatttttgatagcgtaccgtttacaggaattcagctggccactgatacagatatgattcctgatagcctgcgagggtttgcgcctatcgttcgcggtatagcccgaactaatgcccgcgtagtcatcaaacaaaatggttatcagatctatcaatcttttgtcgctcctggcgcctttgaaatcactgatctctactcaaccggcggcaacggtgatctgtatgtcacagtagaagaatccgacggttcaaaacaaaacttcatagtaccttatgcttccttaccattaatgctcagagaagggcaaatggagtatgagattaccagtggtaagtatcgtccctacagtggggatattgatgagaaaccatttactcaggccacaatcagctacggtatattaagcaatacaactctttatactgggttgcaggccgcatcaaactatcaagcactggctcttggtgttgggcagaacttgggtgatattggtgctgtatcagctgatgtgactgatgcatggtctaagaaaaaagattcagagaaaacaaccggtcagtcctggcgcattcgctatggtaaaaatattcttgaaacaggtactaatataacagtagctggttaccgctattcaacttcaggatacaatacactaaccgacgtatttaatacctataataaccactatggcggctattcatcccgttctatacgtaacagaaccaatatcactgtaagtcaaagtttgggctccgggctcggaagcctttctgtatccggtatatttgaagattactgggatagcaatcgccataacaactcagtaaacattggctataacgctgggttccgtcgcttcagttactatgccggttacagctatagtcgatattcgtggggaggggacggcggaggccgtaccgtagaagatgaccatgtcttctcgtttaacatatcggtacctttaagcgagtggctacctaatacatatgcatcctatagcattaccaatagcaatccaggctttacagatcagtatgtatctttgaacggcactgcactggaaaataacaatcttgactggagcgtccagcaaggttatagcaatcgcgaaaatgccagcggtgctttatatggtaactatcgcggttcaatggggtcagttaatgcaggctatagttacaacaaaaatagtcagttaatcaattacggccttagtggtggtatgttagcccatgccgatggcattacttttgggcaagaaatatcggagagcgcggccttaattaaggcgccaggattaactaatgtacgtatggaaacggacccaacgatttcaactgattatcgtggatacgctatttatccttatttgacgccttatcaccggaccatgttgtcgcttgataaagcgtccttgggcgatgagatggaattatctgaatcgagtaaaaacacggtccctacaagaggtgcaattacacgtgttagttttgacagtagtattggtcgccgtgccttcatcaaactcgtaatgccatctggcactgtggttccttttggagcaacggtggtcccaacatcaaaacttgatgcgccagcaggtatcgtcagcgatgatggcttagtttacctctcaggtttaaaagataccgggcaattggctattcaatggggtaaaaagtctgagcagcaatgcaaggctgattataacctgtccgatacaaatggacagttaagacaaaccaccgcggtatgccgttaa

SEQ ID NO: 188641 - DNA, 1026 bp, Klebsiella oxytoca
atgaaaaaacacataatattaattattggcatgctatttttcagttcgcaaagctttgctgactgtaaatatctaggcagcacgaaaaatcttggtgtgcctttcagtccccgaattttagcggatgacacgttacctgtcggcagcattctttatgcaaaaacagtgggtataaacactatgaaaagtgcttatggctgtgatatcacatctacagaccccgatatgtatcggattgacgtaggcgcacatccagaagtccctggtgtaaagggtatgcaaggaaaaccggtatatgaaacaggtatagatggtattggctttcagatttcagatggattaataggtgtgcccgggcgtccggtagtagctaccgccgggatgactcccatgacaacgactaccactactccagtaaagcagtggactatctggttgataaagacaaaaccagtcattgacacgtcaataaatacaattcctcaaataagtgtcatatatgcagtaggtagagcaggacaaatcaataccctgacatctaatactgtcctgctaaaagttgatacaaatattggcccaattacctaccgttctacatcctgtaatttgacggcaaagggggggagtataatcaaactcagtgacatttcagttgccgaattgaaagcaataacacctccgaactccactggaaaaggaaagaatgtcactctggaaatgaactgcccccgggatgtattgggatcaagctataattattggtttaacgccatatctggctcaacatcaaccgatggtgtgttaactaattcgactagtgaaagcgctggcggcgccaaaaatgtaggctttattgttaagcagggcgtatcacctgtcaaattttttgattacgacgattattctgttaacaatgttaaagctacccaagaaattaatttcagcgtggactactatcggttttcatcaactatttcgcagggtaacgtgagcgccttgcttgaagtagtattacaagagaaataa

SEQ ID NO: 188642 - DNA, 327 bp, Klebsiella oxytoca
atgaaagaacttaccgtttttgaaatggaacaaatcgccgccggcactgaagagacactgttgacccgcatcgcagccgcagcgctgagcggaatcacagacgccgtctggggtactctgattggcggcacacagtccggcgctaacggtggcctgctcggctttggtttaatcggtaacgctgtcggggctatctggggtttcatcgccggcggtattactggcgcagcatcaggtttcgccatgggctgggataaaaccctggccttcgttgaaaaaacgtttaataacgctgcggatggccagttcgtaccttggtcacaataa

SEQ ID NO: 188643 - DNA, 327 bp, Klebsiella oxytoca
atgaaagaacttaccatttttgaaatggaacaaatcgccgccggcactgaagagacactgttgacccgcatcgcagccgcagcgctgggcggaatcacagacgccgtctggggtactctgattggcggcacgcagtccggcgctaacggtggcctgctcggctttggtttaatcggtaacgctgtcggggctatctggggtttcatcgccggcggtattactggcgcagcatcaggtttcgccatgggctgggataaaaccctggccttcgttgaaaaaacgtttaacaacgctgcggatggtcagttcgtaccttggtcacaataa

SEQ ID NO: 188644 - DNA, 948 bp, Klebsiella oxytoca
atgagcaaagccattgcagataaaatatccaattccgaggatatcattaaaaaaatcactgaaaacaaaactgaaacattaaatgcgttaaatgaacaagttcgccagttcagtagtgccttagttgaaactgaaggtatgctaaaaaacgcgaaagttggtctggatgaaatgcgtaagaatttaaagagctatgataattacttacgccaggggttaattactaaggatcagtataactatcaacactctttatactttcaacagcaaagtacttatcagtcgcttactagtcaaagaatgcagcaggaatctcagttgatacaactgaaaagcgatattatcaccaaagcagcagacttcgataatcaggtagccagtcaacgcaccaatataagtgactttaaaaaccagatggttgaatcaaacgccagtggcaatatggtcattaaagcaacaacaagcggtaaaattgagtctgtttctgtaaccatagggcaaatggtagataaaggaagcagtcttttgcaaataaaaccaacgggaaacgtaaaatattatcttatcctttggttacccaacaacagcattccatatgttaaatctggagatactgtaaatatacgatacgatgcttttccttctgataaattcgggcagttcccgggaaagattatatctatctcatcagtaccggcctcccgtcaggagatggcagaatacaccaacgtgaataatgtaaatgcgatgaaccaacaggaacttgctctgtataagacattagtagagatcaacgataaatcatttaaatacaatgataaagagctgaccctttctaatggtctaaaagcacaagctatagtttttcttgagaaaagaccactttacatgtggatgtttacaccattttataaaatttcacagagcgtaggtgggccgatccaatga

SEQ ID NO: 188645 - DNA, 2133 bp, Klebsiella oxytoca
atgactaacgaattattcaagtcaattacttccagactgaatttttccctgcgtaaaaaaacgccggtaattttgcaatcagaatcatcagagtgcggcatcgcatgtttgtctatgatctccagctatcatggtctggaaatagatttatttaatttccgccaacgtttcggtagttcgtctcaaggggttaatttactcgaactcagtaaaattgctgaacaggcagggcttaaaaaccgctctctgtccctggacttagacgaaataaagcaactgaagcttccttgtattttacactggggaatgaaccactacgttgtattgaccaggattaagcgttcaacctttgttgttcatgatcccgcgctagggaagcgaatgattggcttgcaggagatgtcaaatcattttactggcatagccatggaactctggcccggaagtaacttccagcaagaaaaagttaaaagccggttgcgcctcatagacttgacgaaaaacatcaacggcctaaagccagcgttgctcaaaatatttgcgctgtcagtcgttatcgaagctattaatttattgatgcctattggcacacaactggttaccgaccacgtaatcattgcccacgatcatagcttactttctgtgatttgtatcggtttagtggtctttaccctattccgtacctttgtgagtatgattcgcgcttggacctcattgactcttaatacgttgacaggtatccagtggaaaacgacgttgttcgatcacttaagcagtttaccgctgagttttttcgaaaagcgtcacttaggagatattcagtcacgcttttcatctctcgatgttatccgttcaacattcactaacagtatcgtcaccggcatcatcgatatcatcatgaccgttggcctactcgtaatgatgttcctttatgggggctggttggtttgggttgttcttggattcacgctctgttatgcgctaatgcgttttggtacatatcatttttatcgtcgaataacggaagaacaggtgataaaaagcgcacgttcaagctcgcattttatggagtctttgtatggtatctccaccattaaggcactgaaccttaaagaaagacgttcgaaacactggctcaatattaatatcgaagcatgtaatgctggtattaaacagacccgtttcgatatgatgtttggcggctttaacgcctttattaacagtgtcgatcaagttgctatattatggattggcgcaattatggttattgataacgacatgacgcttggtatgttcatggcatttaacgcttatcgtggccagtttgctcagcgtgcatcaagtcttattgatctgattatgcaattacgtatgctttcattacataacgaacgtttatcagaaattgtgtttagcgagccagaagctgaaatgcctcagcgacgtgtttttgaaccgaataaaggtgttgttcttgaggttaaagacctaacctatcagtatgatcctttttctcgaccaatatttaacgatctgaatctaaccattcaaccaggtgagtccgttgcgattataggcccgtctggcgttggtaaaaccacattgctgaaagtcatgtgtgggttattacttccttccagtggcgcagtcctggcagatgaactcgatatttccaaaataggcttaaataattatcgaatgagcactgcctgtgtattacaggaagatagattattctcaggttctatcgctgataacatctgtagctttgaagataatcctgatcaggatcgtattattatttgtgcgcaatactgcaatatccatgaagagattatgcgtatgccaatggcatatgagtcaatagttggtgaattaggtcttggtatttcagggggtcagaaacaacgtattttgattgctcgcgcgctctatcgccagcctagtatcctttttatggatgaagccaccagccatcttgacctggcaaatgaatcatttattaataaatcgatctcaaatcttaaaattactcgtgtaatcgttgcgcacaggccttcaactatcgcctctgcagatcgcgtgattgatttatcccaatatgggaaaaacactcaaacaattcaggcataa

SEQ ID NO: 188646 - DNA, 849 bp, Klebsiella oxytoca
atgagtaactatctgaaagggttaaataccagtattctcttgcacgaagagaattttatggccctgacacttaaggttaagacgagtaatgcccaaactcatctctttcatttacagggtgaagcgcttagggatctgatgatgattctgcaaaacaggttactaactctgcaaattaacagtgcgaacgaccagcatagtttggcagctcttattgaaaaagccagtcaggaaatggcgaataatcttcccttaatcgaaccgcaggatgttgagcagccggatgcaggtagccttgtaagcaatttatcagtaatttttaacgagcatgattttaaactacttttgatcctgaaaaatgaaagcatgcatcatattagagtttctgacgcacagattcaattcattatggtggcgattgccagagctttggataatgttaaaaatactaacctgatcgccttactcgccgccggtaataattacgcgccagtttacgatgcggaattcaatgataatggcacgatcgattatagtgtgattgaaattgagcaatggaaacttgacttatttagtcaattctttctgatcatttatggtattgaaagcacagatggtcccgagatgaaatttggtgcagtaattaaagctcatgaagcgatcaatgaagagggaatggacattattgcgcatcactttgcatcaaaaagcaaaagattaatgccgtatagcaatgagttaaaaagcattaaaactactgctctggctcttaatatagccggaattccatcaccgaaggatgcactgcaaccccttgcggaattctataaaacattgaatatgaaataa

SEQ ID NO: 188647 - DNA, 441 bp, Klebsiella oxytoca
atgaataagaacttcactcttttgatttctcgcaatatcgcgtgcagcctcaaaagcttcttgctgcgtacgatgatgcgacgtatcgcgagtgtttttctcaccacgtacagcccaaccatcatcccgtttcactacatgttgatttttacccatgctaaggctccattctttggtcagataactaccaaatatccccagagaacaggcagggatacaggttgtgactccatccataacgtacggctcaacctatatgaattccctatcgaaattgtggtattacgtttcaatttcaacccccttctcatcagtattttcaacatgccattggatgtggcagcccggatgcagcatcaccagattctcaagctcgtcaccaccgcccagatgtttctggtgcttatggtgaacgtgccagcctgtttccagagtaattaa

SEQ ID NO: 188648 - DNA, 1767 bp, Klebsiella oxytoca
gtgatttctccctcgggggaatccacgtccgtcctcagggtgctctgcacgagcattcaggaggatagcaaggtgaataccgaaacgcgagttgaatcgcaggcggtatctgcatcttcccgcccggaaaggtggcacgccattaactggcgcaaaacctcagaagcggtgagaaagctacaggtacgcattgcgaaggcggcgcaacagcaggagtggcggcgggtaaaagcgctgcaacgaatgctgacccgttcgctggcggctaaggcattagcggtcaggcgagtcacggaaaaccggggcaaggatacccccggagtggatggaaagttatggaataccccgaaaaccaaatgggaggctatcttcgatatgaagagaaccggatatcaccctaaaccgctgcggcgggtgtatatcccgaagtcgaacggcaagttgcgtccgctcgggataccgaccatgagggacagggccatgcaggcgttgtatctgctggcgctggaacccgtgtcggaaacaacagccgaccgcaacagttatggttttcgtccgatgcgttcaacggcggatgctattgaacagtgctttgtagtgctcagtcggggcaactcggcgcagtgggtgctggagggcgacatcaaagggtgtttcgataacatcagtcatgactggttactggcgcatatcccgatggataagcaggtgctgggtaaatggctgaaggcaggttacatggagtctggtcattaccatgcaaccggtgcgggaacgcctcagggcggtatcatctcaccggtactggccaatatggcgcttgatggactggaagcggtacttgaatcccgatttggggtgaagaataccaaagccagctacaagaccaaggtcaactatgtgcgttatgcagacgactttatcatcaccggtatctcgcaagagttgctggagaatgaagttaaaccccttgttgaggcctttatggcggagcgggggctgcaattgtcgccggagaaaacggtgataacgcatattgagcagggttttgacttcctcggtcagaacgtgcgcaagtatcgcgggaaaatgctgataaagccttcccgtaagaacctgcgaacgtttctggcgaaagtgagggacatagtgaagcgtcacccgacgcaaacgcaagactggctgatacgccagctcaatccggcattacggggttgggcgaactatcaccggcatgtggtggcgaaggagacgttcagctatgtggattaccgtgtctggaagctgctctggcgctggtgttgcaggcggcataaaaaccgctacaaacgctgggtgaagacgaaatattttcacacagtgggcaaccggcactggacgtttcaatggcgggaggataaggagaatccggtgactttagtctatgcaaaagacaccgtcattaaacgacataccaagataaaggcggaggctaacccttatctgcctgaatgggaaccgtactttgagcaacgccttgagcgtcgctggaaggaaaccatgcagggcaggaagaagttgctggcgctctggctcaggcaggagaaacgctgcccgctctgtaaccagttaattactctggaaacaggctggcacgttcaccataagcaccagaaacatctgggcggtggtgacgagcttgagaatctggtgatgctgcatccgggctgccacatccaatggcatgttgaaaatactgatgagaagggggttgaaattgaaacgtaa

SEQ ID NO: 188649 - DNA, 396 bp, Klebsiella oxytoca
atgtatagcgataataaagatgatggctgggtctggcgttataccaaacaggaaaatgatcttatctattccagggaaatggataagattcattacttgataaataaatttaagaacagccttgctgatgaaaataaaatttttgtcgtaaaaaacaatggcaataatcttgatgatatagtatttgctttagcaaaagagtttaagaagcacggtaacagtaaaatactttacgtgaaaagtaacgtggaaagtgcagctgtaggcgaaatcaagaaagtgactgataatctttttattggcgcgatcgataaattcgccgactatagccgggcaaatgaatactcgcgtgaaggctggcaggcaataattgataatgctgtaaaggtgatgtga

SEQ ID NO: 188650 - DNA, 1533 bp, Klebsiella oxytoca
atgctcacgccatatatttcaatggcggggatcggcaaatcctttggcccggttcacgcattaaaatcggttgatttaactatttacccgcacgaaatacatgcgttattaggggaaaatggtgccggtaaatcaacgctgatgaaagtattgtcgggaatccatgaaccgaccaaaggcaccattaccattaataatgtcaactacgacaagctggaccataaattagcggcccagctcggcatcggcattatttatcaggagctcagcgtcattgatgaattaacggtgctggagaatttatatattggccgtcatctgacgaaaaaagtctgcggcgttaacgtcatcgactggcgagagatgcgcgtgcgggcggcaatgatgctgctgcgcgtcgggctgaagatcgatttagacgaaaaggtggcgaatctctccatcagccataagcagatgctggaaatagccaaaacgctgatgctcgacgccaaagtgctgatcatggatgagccgacctcctcgctgaccaacaaagaggtggactatctgttcctgatcatgaaccagctgcgtaaagagggcaccgccattgtttatatctcgcacaagctggcggaaatacgccgcatctgcgaccgctacacggtgatgaaagacggcagcagcgtctgcagcggaatggtcagcgaagtgaataacgacgacatcgtacgcctgatggtcggtcgcgagctgcaaaaccgctttaacgccatgaaagagagcaccggcaatatcgtccgcgagacggtattcgaagtgaaaaacgttaccagccatgacaagaaaaaggtacgcgatatctcgtttagcgtgaatcgcggcgaaattctcggttttgctgggctggtcggctccgggcgcacggagctcatggactgcctgtttggggttgataaacgtagcggcggtgaaatttatctcaacggcaaagcgatctccccccgctcgccgctggacgccttaaaaaaagggatgggctacatcaccgaaagccgccgggaaaacggctttttccccaatttttccatcgctcagaacatggcggtcagccagagcctgaagcgcggcggctacaaaggggccatggggctgttccgcgaaggcgacgaacgcaaaacggcggaagagcagcgcaagctgctggcgctgaagtgccattcggtcgatcagaacatcaccgagctttccggcggcaaccagcagaaggtgctgatttccaaatggctgtgctgcagccccgaagtgatcatttttgacgagccgacgcgcggtatcgacgtcggcgcgaaagccgaaatttataaagtgatgcgccagctggccgatgacggaaaagtcatcctgatggtgtcatccgaactacctgaaattatcgccgtctgcgaccgcattgccgtgttctgcgaagggcgactgacgcaaatcctgaccaatcgcgacgacttgagcgaagaggagattatggcatgggcactaccacaagagtga

SEQ ID NO: 188651 - DNA, 1986 bp, Klebsiella oxytoca
atgaataactcgcagttattccgtttgaacaggacttttattgccattgccgccgcaacagggttattagttaacacttcttttgcgaatgaaaaagcccagacagccacgcaatatacgcagaaaattaaccagcaatatacccagtcgctaccgtttagcgaccgtcaggactttgatgatgcgcagcggggatttatcgccctgcttctcaatcaggggatcctgaaaaatgccgagggtaaaatctattaccggggggaagattacaaattcgatattaatgcgccagcccccgaaacggtaaaccccagcctgtggcgacagtcgcagctcaacggtatttccggcttgtttaaagtcaccgatcgcatgtatcaggtccgcggccaggatatttccaatattacctttattgaaggcgatacgggtatcatcgttgttgatccccttgtcagcccggaggccgcaaaatccagcctcgacctctactatcagcatcgcccgcaaaaacctattgttgccgtcatctatacccatagccacaccgatcactatggcggcgtcaaaggtatcgtcagcgaagaggatgttaaaacaggcaaagtgcaggttattgctccagccgggtttatggaagaagccatcagcgaaaacgtgctggccgggaatattatgaaccgccgggttctctactcttatggtctgttgctaccccataacgctcagggcaatatcggcaatggtctgggcgtcaccatcagcgcgggcaacccaacgatcatcgccccgaccaaatcgataaccaaaaccggtgaaaaactgaatatcgatggcctggaatttgactttttaatggcgccgggcagcgaggcgccatcagaaatgcacttctatatcccggcgcttaaagcattatgtaccgcagaaaataccacccatacgctgcataacttctacaccctgcgcggcgctaaaacgcgcgataccagtaaatggaccgattacctgaatgaaacgctcgatatgtggggcagtcaggctgaagtgctgtttatgccgcatacctggccggtctggggtaaccagcacattaacgactatatcggcaaatatcgcgacaccatcaagtatatccatgaccagacgctccatctggctaatcagggctatacgatgaacgaaatcggcaacatgattaagttgcccccagcgctggagaataactgggccagccgcggctactatggttccgtaagccacaacgcccgcgcggtttataacttctatctcggttactttgacggcaacccggccaacctcaacccctacggccaggtcgatatgggtaaacgctacgtcgaagcgctgggcggcgcaaaacaggcaattgagctggcgcaaaaagcttatgacaagggcgactatcgctggacgtcagaactgctcaagcaggtgattgccgccgaaccgcaaaaccaggcggcaaaagacctgcaagcgaattcctttgagcaattgggttatcaggcggagtccgcaacctggcgcggtttctacttaaccggcgcgaaagagctgcgcgaaggcgtgcataaactcacccacaatacctcaaattcacccgacaccatcaagggtatgacggtcgaaatgctgtttgattacatggcagtccgtctggatagcgagaaagcagcaggcaaaaatatcagcctgaatttcaatcttgatcgaggcgaaaccctgaatctgacgctgaacaatagcgtgctcaactatcgccaggcttctcagcagaagcccgatgcatccttcactatcagccgtgctgacctgcacgacgtgttgaccggccaggccaaaatggccgatctgctgaaaacagggaaagccaaagtcaccggcgatgcggcaaagctggatgaaatcttctccacgctcgatcaatttgaactgtgggtgaatatcgttacgcctaattaa

SEQ ID NO: 188652 - DNA, 276 bp, Klebsiella oxytoca
atgcaaacggttaaatccagtattgtgatgcagctaaaaaatatatgctggctcactccggccgcattgttgacgggatgtacattatctccggcaattccggtcattggcgcctattatcctggatggctcttctgcattattgccggagtcatccttacgctcatcacgcggcgggttgttctgctcaaatataaaatgccagcgcttgcaggcgttatttataccgccctctttgctctctactccatgctgttctggctggtatttttctaa

SEQ ID NO: 188653 - DNA, 1032 bp, Klebsiella oxytoca
atggaaagttcgtcgaaaaaaattcctcgcaataaattaccggctctgcttctggtactactggccgtcgtcgttttactcgttgtcatctggcgactggatagcgcgcccgctactaacgacgcctacgcttcagcggatacgattgatgtggttccggaagtcagcggccgcattgtcgaactggcggttagcgataaccagcaggtcaagcagggcgatctgctgtttcgcatcgatccccggacctatgaaatgaacctggcgaaggccgaagcttctcttgccgcgctggataaacagattatgctcacccagcgcagcgtagacgcgcaaaaatatggcgctgactccgttcaggcgacggtcgccaaagcccgcgcggcggctaaacaggccagcgataccctgcgccgcaccgagccgttgctcaaggaaggttttgtttccgcagaggatgtcgatcgcgccagaacggcgcagcgcgccgccgcagccgaccttaatgcggtattgctccaggcgcaacaggccgccagcgcggtcagcggcatcgatgcgctggttgcccagcgagtcgccgttgaagcagatatcgcgctcactaaactacatcttgaaatggccacggttcgcgcaccgttcgatggacgggtggtcgcattaaaaacctccatcggccagtttgcctccgctatgcgtccgctctttaccctgattgatacccgccactggtacgtcatcgccaacttccgcgaaacggagttgaaaaacatccacaccggtacacccgcgactattcgtctgatgagcgacagcggcaaaaccttcgccggtaaagtcgattccgtcggctacggcgtactgcctgacgacggcggtctggtgctgggtggtctgccgcgggtttcccgttcgattaactgggttcgcgtggcccagcgcttcccggtaaaaatcatggtggataaacccgacgcagagatgttccgcatcggcgcatcggcggtcgccactctcgagccgcaatga

SEQ ID NO: 188654 - DNA, 2046 bp, Klebsiella oxytoca
atgatgaacgcgcttaattacctgccgctgccgctggtcaaagcgctggctttttttcgcgaggaattaagcgaagagcgccccggcagagtgccgcaaaccatgcagctttgggttggctgcctgctggtggtgctgatctcaatgaccttcgagatcccctttctggcgatttcgctggcggtgctgttttacggtatccagtccaacgcgttctataccaaattcgtggcgatcctgttcgtggcggccacggtgatggaaatcggcagcttatttctgatctacaaatggtcctacagctatccgctcgtgcggttgatcgtcgctggcgtaattttgctgggctgtatgtttatgatgcgcgcccatcgcctgggactggtcttcttcgccgtggcgattgtctcaatctacgggcaatctttccccggaatgctggactaccccgaagtcgtcgttcgtctgacgctatggtgtatcgtcgtggggctctatccgacgctgctgatggtgctgatcggcgtcctgtggtttcccgcccgcgccgcggatcagatgcacgaagccctgtgcgcgcggcttgatgacgccgccagccgcctgacgcaatccaccgaaccgctacccgaaaagcgcattgaacgggaagcgttggcgctgcaaaaactgaacgtcttctgtatggccgatgatgccgactggcgggcaagaagcgcatggtggcaaacctgcgtcacgacggtgacctatctttacgccacgctgaaccgctacgacgacgccgcgtttgccaaaaatcaggcaatcgactctctacggcaaaagctgcaaaatgcaatcgccgacctgcaaaacgcaatcagcaacggggaaacctggcatagcgagtggcaactgagcgctgaagagaccgcagcggcgcgcgaatgcgggctggagaattgctgtcagcttctgctacagcttggtcatatggatcccgagacgccgcccacgcctgccgctaaaccgtcctccatggcgccggatgctttcactaatccagactatattcgctatgccctgaaaacgctgctggcgtgtatgctctgctacgtcttttattccggcgtcgattgggaaggaattcacacctgcatgttgacctgcattatcgtcgctaaccccagtctcggctcgtcgtatcagaaaatgaccctgcgtttcggcggcgcattctgcggcgcgatcctcgccctgctgatgaccatttttgtgatgccctggctggataatatcgtcgaactgctgctggtgctggcgcctttttttcttatcacgtcatggatcgccaccggctcagaacgctcttcatacatcggcacgcaaatggtggttaccttcgcgctggcaacgctggaaaacgtcttcggtccggtttacgacctggtggaaatccgcgatcgcgccttcggtattatgattggcaccgtggtttcagcggtgatttacacctttatctggccggaaagcgaagcgaaagcgctgccgcaaaagctggcgggcgcgctggggctgcttggcaagttgctccgcgttccgcgccagcaggaagccgccgctcagcgaacctatctgcaactgcgcgtcggctttcatgcggcgttgaatagctgcgaagagatcttcgagcgggtggcgctggagcgccagcttgacgatgaccagcgtctgctgctggtgaaacgtagccaggcggtcattcagcaagggcgcgaaatcctctacgcctgggatgccacctggaatgacgcccaggcgctggataattcgctattgcaggagcgggccgggcgttttgccgatgccctggaaaaatacgccgccgggctggccgccgcagccagcactcccccggtcatcgagcttatcgacaccgccatttcacccacgctatatcaacaggagcaacgcgtcatgcagcaaatggcccgtttaccggactggactcgcccggcgctgacgccagccgaagagcaagtgcaaggagccgctcaactatga

SEQ ID NO: 188655 - DNA, 1464 bp, Klebsiella oxytoca
atgacccgtaacctttcacgcttactactctgcggcctgctcggtagcgttacggcgctttccggctgcgcgctggtgcgcaaagattccacgccgcatcaacagctgcagccagagcagattaagctggccagcgatatccatctcgccagccagggatggccgcaggcgcagtggtggcgtcagttcaatgacccgcagctggacgccttaattcagcgctcgctttccgggtcgcacacgcttgccgaagcgaaactgcgtgaagaaaaagcgcaatcgcaggccgatctgctggaagccggtacgcagcttcaggttgccgccatggggatgctcaaccgccagcgcgtttcaaccaatggtttcctcggcccgttcgccgaccaatccgacagtcggctcatgccgatggacggcccctactataccgagggcaccgttgggctgctcgccggtctggatctggatttatggggcgtccaccgttctgccgttgctgcggctatcggcgcacaaaacgccgccgtcgccgagacagccaccgtagagctggcgatctccaccggcgtcgctcagctttactacagcatgcaggccagctatcagatgctcgacctgttgcaacaaacccgcgaagtcattgagtatgcggtagaagcgcaccagagtaaggttgcccatggcctggaggcgcaggtgccttatcacggcgcccgagcgcaggtgctggcggtcgataaacagatcgccgcggtaaaagggcagatcgtcgaaactcgtgaaactctgcgcgccctgatcggcgcgggggctggcgatctccctgcgatcaagcccgtatctctgccgcgggtgcaaaccggtattccagctacgctctcctacgatttgctggcccgacgtccggatctacaggctatgcgctggtatgtccaggcttcgctgaatcaggtgaacgccgcgcgcgccctgttctacccgagctttgatatcaaggcgttcttcggcgtcgattccattcacctggataaactgttcgaaaaccgcagcaagcagatcaactttattcctggcctgacgctgccgctgtttgatggcggacgcctgaatgcgaacctcgagagcacccgcgcctccagcaacatgctgattgagcgctataaccagtcggtgctcgacgccgtgcgcgatgtcgctatcaacggcacgcgcctgcaaacgctgaacgatgagcgcacaatgcaggctgagcgggtcagcgctttccgctacacccaggccgccgccgaagcggcctataaacgcgggcttagcagccgtttgctggcgaccgaagccagactgccggtgctggcggaagagatgtcgttactgatactcgattcccggcgtgtagttcagagtattcagctgatcaaaacgctaggcggcggctaccaggcgccggtagccaaaaaataa

SEQ ID NO: 188656 - DNA, 1104 bp, Klebsiella oxytoca
atgtttaagactattttattactactggcgttaggcttccctatttatggctggtcatgcgatacgggcactaattatggcgatgtgtcgatgacgaatctacctgaaaaaatattgattaatgcgggaagctactcggcaggaacgattctttatgattcagggcaaataacgcgttcgcaaaccagcgtgcttaactgtcaagggaatatatacgctcaatttgcatggtcttccgggaatatcgtctcatctgttagcgatggaatatattcgactaacgtaccaggtatcggtctgcgggtaaaagtgtggttaaatattaccggggaatataatggcgattctgatgattttaatgccgattatagccaacattatatcggtgatgcagacatgtatttgggaaaaccaactggatttcttgatagttgggccggcacaaattatacgccaaaatatcagctgcagctggttgctactggcggagcgatagccagcaatagcgccctgacgttgaaggaccccgtctcatcggtttcgattagagatggcaataatacgatggttatttctcaactgcacgtgagcggtacgacaaaaatccagctgacgccgatgggctgtacagcgagcacaaccgcgctgaattttccgatgggctcagttaactcgaacgcgttcaatctctctgctaaagccggttttgctcagcaaacgcttaccctgagctgcgagccaggaaccaacgtgacgatgcgtattatggcgacagaagcggaaggtgataaccctgatcataccgtgattgcgttaacgcctggcgacaatgtcgcgaccggcgtgggggtgcagttgaatatcaacggcgcgccgctatccgtaaacaattctacatacagggtcttcgatgccgtcaacagaacgacggtgacgaatccaggcgcagagtctagctatacgatattttctaaccctgataatccgggtggcgcggcggcatcgaattcattaacgtttacgactaactattataaaaccggctctgaaataacaccgggaacggccaatgccagcggaacgataacctttagctataattag

SEQ ID NO: 188657 - DNA, 594 bp, Klebsiella oxytoca
atgaatagacaccctattttaacggcgggaatgaagtacgcttcacgggcgaggaatatcgctcttttggtattatgctgtactattcagctcttcgtgagcgctgcggcctgggcctatgatgccaatagcaccgtgaattttaatgttaccggcacgatagaagaaccctcctgtgaggtgtcgataaaaccgtctgaaaatatcgacttaggtacggtatcttatcaacatatgaccggaaaagcgggcgctaatagcgaaaacgtccctgtttatcttcagtttgaaaattgcgctcaaggtacagcctcggtcactattaccttcagcggctcggggtatgatagtacttattcaatgatatataaaaatgcccagaccgatagtagcggagcgaaaggcgttggtttacagctatttagcctcaaggattcaaagtctctggggccaggtgatcaatatatctacacattcagtgacggcgagggcggtcacacttttgacatgattgccagaatgtataccccctatggccagataactgccgggggcgtaatttatgccgcgacatttaatgtgtcttacaaataa

SEQ ID NO: 188658 - DNA, 2592 bp, Klebsiella oxytoca
atgattatggtatgtcagggccgaaatataccgccatcatccaataacgtaagatggaatcatgcattttcattgaaaagcagctatgtcgccatcctctgctgtcttggcgcatttccgttatcgacttccgctggggaatattttaatccccacttacttgaagtcaatgaaaccggcgcatcagtcgtagatttatcctatatttcccaggcaagcgtgcctcccggtaaatataacctcgatgtctatattaacgaaaaatttattacctctgaatctatcgtttttaagccgcaaaatgaaggtgatggcgcttctgctcagccttgtatcagcgtagcgcacctgaaagattggtcgattaaagttgaagactaccctgcgctcacggtggcgggctctgaatgcgcaaaattgtctgcgatcccgggatgggagacctcggtcttgcttccacgccagcgaatcgattttacattaccgcaggtcgccctgcggcaccgtccgcagggttacgtcccggaaagcctgtggcagcagggtatcactgccgggctgctaaattacaacatttccgggcaaaaaaccgatccgcggcacggtggtgaatcgacatccagccagtttgtcagcttgcagccggggctgaacgtagggccgtggcgtttacgcaattacagtacccttaatcataatgaggacggcaaccagtgggactccgtctatagctatatttctcgcgatatccacgccctgaaaggccaactgatattagggcagacttatacttcatcaggcatctttgacagcattagcttcagcggtttgcagttgaactctgataaagagatgctgccggacagcatgaatggttttgctcccgtgataaaagggatcgcccgtactacggcggacgttacggtctatcagaacggatacagcatctataaaaccacggtctctcctggagcattcgagataaacgacctttaccccaccgggagcgcgggcgatctctttgttaaggtgaaagaatctgatggtagtgaacagagctttgttgtgccttttgcctcgctggcgattctgcagcgagaggggcaggtagaatatgctttcagcagcgggaaaactcgctccggaagctcaggcggaaaagaattcaatttcctgcagtctaccgtcgcctggggggcattgagcaacgtcacgctgtacggtggttttcagcagctggaagataaatatagcaatgcgctgctgggggccgggtttaatctgggttctgtcggcgcgctctcatttgatgcttcccagtcttgggctgagataaaagaaaacccggaagcggataaaacctcttccagcgaggggcagtcttaccgcgtgcggtttagtaaagactttccattaacgggaaccaacttttccgtcgcagggtatcgctattcaacgcatggttattactctttgcagaatttcatcgataacgcgacagctaatagcagctgttgttcatcaaacgggcggacgaaaaatcgctttgacgcctcggcctcgcagattctctcaggctttggttcactctccctgtcgctggtaagcgagtcttactgggatgattcacgtatggagtcactgggtgtcagttacagcaatacccttgggcaggtgtcatatttcatcaactactcctataaccgaaatgtgcaaagctccagccagaacagcgacagttcgccatccagcgataatattatctcgctcacggtgagcgtaccgtttggcgcgaatacctcagccaactacaacatgaacagcagccggatgggggacactacccacagccttggtttgagcggcgcggcttttgcggaccgatctctgaactggaatgtgcaggaagggtacaacgccagcgacaagagcacctcaggcaacgtcaacctgaactaccaggggtctaaaggcgaggtggccgccggatatggctatgacagctatagctctcactataattactcgctgcgcggcgggatgctcgcgcactccggtggaataacgctatcccgttatcttggagagagcgtggcgctgattgaagcccccggcgtcagcgatgtggcggtacgcggccagaccaacgtcatgaccgattccgccggatacgctgtcgtgccttttgtccggccctatcacgaaaatagtctctcccttgatgagcagcaggtctcaggagcggaaattgataacatcgtcagaacggtggtaccgacgcgtaacgctatcgtcaaggttaaatatgatacctggattggctataaggcaatgatgaccctgcgctttggtaacaaagaagtgccttttggcgcgatcgtttcactgagtgatgaaagccaggatgctaaagagagcagaagcgctattgtgggtgatgccgggcaggtctatctgacgggtctaccagaaaaaggccgcatgttggtgaaatggggcgatgaacagaattcccaatgccgttttaattatgatttttcaggcaataaatcaaccgacgatattattttttatcaggcgaactgtcgatga

SEQ ID NO: 188659 - DNA, 687 bp, Klebsiella oxytoca
atgaacagattattatgctttgtcttattttttttctgcatttcagtatcgcaggcgagcgtggtcgttggcggtacgcgagttattttcgatggaacaaaaaagaccacgacggtatctgttcaaaataaagataatgtaacaaatatagtgcaatcctggatctctatcgttgatgatacctcacctgcgaaagattcatttattactaccccccctctgttcagattgaaagcgggcgagcaggggtttgttcgcattctccgctcgggtaaacccctaccggaagatcgggaatctatgttttggctcaacgttaaagggattccggctatggacaacgaaccagacaaaaacatggtgcaatttgcaattaattcccggattaagcttatttatcggcccgctgccctaaaaaacgtgattccggaaaatttctctgaaaaactgcagtggtccagtgaaggaagagaaatcaaggtgaaaaataactctccattatatatgaatttctccgcaatttatattaatggcaaggcgctacctgaggcgtggtttgtcgctccttattcaacaataaaaataccggtagcaagtgcaacttcgtctgggaaaagagaagtcacatggagtgtgatcaatgattatggtatgtcagggccgaaatataccgccatcatccaataa

SEQ ID NO: 188660 - DNA, 537 bp, Klebsiella oxytoca
atgaaaaccaatgtgaaaacgttagctaaaatcctggccttatctgcaggatgctctctggttgcaatgtctcatgcggataacaccataaagttcaccggaaccgttgccgatacgacttgtaccgctactatcgataatggcgttacagctattgaaatgggcactgtttcggtagcagatttaaaagctaacacctatagcgcagcaaagagtttctctttcactttgaccggctgccctacggatgctggtgcactgactaaagccaaaattacctttggtggtgaagcagattcttacaatagtgattattttaaaaaccaggcttcagtgtctccagctaccaatgttgctgtcgctatttttgataacgccggaaatttacagaagaacaataccgaaggttctgatgtggatatttccactggcgaagccaccgttccgtttaccgtaaaaatggctaagtctggcgccgccgacccaactaaaggtccggtaagtacaacagtaacttataacgtcacctattattga

SEQ ID NO: 188661 - DNA, 1128 bp, Klebsiella oxytoca
atgaccgagcattgcgctttaccgggatcgtttaaggctgccgttgtccgtcagccgggcggcccttttgaactggaaaccgtccagttaaattcgcttcagcctcatgaggtcgttgttcgtatcgtggcgacggggatgtgccataccgatatggttgcccgcgatcggctctatccgatcccgcagcctatcgtgctgggccatgaaggggcaggagtggtggaggccgtcggggcggaagtacaaaaagtggtccccggcgatcatgtcgtactgacgtttttatcctgcggcgcttgccgtccttgtcttgagggcgtgccggccagttgtcaaaactttaatgccctgaatttttccggccagcgtagtgatggcagccatgcgctatgccaccatggcaaccaaacgctgcacgatcgctttttcggccagtcatctttcgccgcgttctccgtggtcgatcagcgtaatcttgttaaggttcgcccggatgcgccgctggagctgcttgggccgttgggttgcggtatccagaccggcgccggagcggtgttgaatgcattaaaagtagcagccggaagttcttttgccgcctttggcggcggaacggtgggattaagcggcgtcatggctgcctacgtcgccggggcaacaactatcatcgtcattgacgtggttgaggagcgcctggcattagcgcgtgagctgggtgcaacgcatgtgattaacagtaagaaagaagatcccgttgaagctatccggcatatcactggcgatggcgttgactttagcctggagtctaccgggcggcctgagattgtccgcgccgccgttgaggcgctacgcccacgtggtatgtgtggtattgtcggcgcctcaaaaaccgggaccacgttcgcgctggatatgaatgatgtgatgcaaaactgcaaggtattgcgcggcatcgttgagggcgacagcatcccggatatatttatcccgcagctggttgagctgtatgtgcaagggcgtttccccattgataagctgatacgtttttatcccttcgaggagattaaccaggctgctcacgatagcgagtgtgggaaaaccattaaacccgttattcgaatcggataa

SEQ ID NO: 188662 - DNA, 1710 bp, Klebsiella oxytoca
atgcaattaattaatatatctgccgcggaaatgatactatatcgtttgcaggcgcttggcgttgaattcatctttatcaattcaggaacggattatccgccgatggttgaggcctactctcgcttaaaaagcgaagggcgtttggttcctgaatttgtggtttgcccgcatgaaaacgccgcgattggcatggcccatggatactatctggcaaccggtaaagtgcaagctgtgatggtgcatacgaatgtcgggttggctaatgccgcatgcgggattattaatcttgccaatagtaatataccggtaatcatttttggcgggcgcacgcccatcagtgaacattctcatttcggctgtcggaatacgcctatcggctatggccaggaaatgcgcgatcaggccgcgctggttcgtgaatcggttaaatgggattttgaattgcgttatgccgatcaggccggggaacatgtcgatcgcgcctgggcgattgcgaactctttgcccaaaggaccggtttatttaagcttgccacgcgagcctttgtgcgaaacttttgccaccgactcggccgccctgaactgccggccctcccagcagccgataagtttttccccggctccggactcgctgtcaatggctgccacgctgattgccaacgccaggcacccggttatcttctcgcaaagaggcgcaaggacccggcaagccttcgacctgattagcaccttcgtcgaacagtgggcgattccggtggtggaatattgggggaccgaggtgaccatttccgctgcccatccgatgtatgccggcaatgagccagcttactggttgtcaaaagcggatgtggtcatcgtcattgactcgcaggcgccctggatgattgagagtatgaacgttaatccggactgcaaggttattcaaattggtcccgacccgctcttctcacgctacccggttcgcgggtatcaatctgatgttaacctggccggtgaaacggatacgatattcaaattactggataatgcattaaaaccttatctggaggagaaaagcgcgagcgtcgaggagcgctattcccatgtcgctgcgcataataaaaaagaaagaaccacaagagataacgttgttgattccgcaaacgcagggcctatcggcaagccatggttaagctattgtctgggagcgctggctaataaatacaacggtaaaatcacatctgaattaaccacattaccgcagttcgccaacttcattcagccggaaagctattatcaggaagcgctctccggcggactgggtgaagcattccctatcgccctgggattacagctagccaatcgcgatgaattagtgatcgccgccgttggcgatggttcttatctgttttccaatcccgcggtatgccatcacattgccgaggtaatgaagcttcccgtgctggttgtcgttggcaataacgctggatggggcgcggtggccggtggaacgctggcgctatatccggacggctatgcggcgaaaatggataaggttccggcgacatcatttacgttatcgcccgatctggcggctatcgctgcatcaagccgcgcggtcgcgatgaaggtagatcgcgctgaggacttactcgataccctggaggaagccgtcaatattattcgtactcagaagcgttcggtgctggttgacgtcattctcgggaaataa

SEQ ID NO: 188663 - DNA, 939 bp, Klebsiella oxytoca
atgacaaataacagtattctcttaattcttggtgccatcttacctgtaatagtaaccgttttgcttggttacatcagcggtaagcgaaaagattttgcgtgggagcaggctggcgcgataaataaactcgtcatgctctatgctctcccccttagtatttttagtaatatggtgatgaccccgcgtagtattgttatgaatatggggcccgttgccgccgcgattatcgttgcgctaattgtaagttttttaattccattgcttgttgcgcgttatatctgcaggcgggatctctctttaagcacgctgcaggcgctggcgattggttctcctgccgttccttttattgggacatcggtgctggcttttttatttggcacggtaagcgcatcgctgattacggtatcaagcattacgcaaaacgtttttcaacttccgctggttatgatattaatgtcgtatgcttccggcgacaaaaataatacatcgtttatctctagcgtgattaatgctattaaacagccggtagtctggtcgccggttctggctcttattatcgtgataatggatatccatattcccgagaccgtggccatgtcgttaggattattgggtaaagcaaccgggggactggcgctgttctcggcgggtattgtgctctatgcgcgtagtgtagtgattacgctgcctactattattaccgttatagccagaaatattatcgttcccggactgtgttatttcgcgctggtcggcctcggtttctcaatggagcaaattaaagaagtcgtattgacgatggctattccagtgggatcgattgctatcattattgcaatgcaatataaaacgggtgaacaagaaatggcctcgaccatggcgttgagtattattgcctcgatcctgaccatgggtggattcatcctgttaaccttttaa

SEQ ID NO: 188664 - DNA, 888 bp, Klebsiella oxytoca
atgtctataaaaatgaagcaaatacaggcatttatcatggtatcctcagagggtaacctcactcttgcggcaagcaaacttggaataacgcaatctggcctgagccgactgttatccggccttgagtcagatttgaatgccacgctatttgaacggcataagcatggggtctcactgagcgagctgggcacggcctttttacctcatgccattaccttaatgaacaccgagcgaaaagcgcgccaggaactggatcttattaatggttcagggaaaggaatagtcagagctggctgcgtatccagttttctatccagccattttatcgagaaagtaaacaacttccatcaggcctttcctgatatttatattaagatccaggatcgcatagattcagagctttttaaatcattattaactcatgacatcgatatcgccatatgcggcccgttgccgcataatgataaaatcatcgagcgtggaaaaataaacttcacggatagcatacagattatttcgcgtagcaaccatccgttacagggcaaaaaaaacttgaaattacaggacactgaagaatattcgtggattatgccgccaaacgatagcacccctatgcagatattaaccgaagtctatcatgataataacatgacgccgccaaaaccgattatcgaatgctcctcatcatccgcgataaaatccctcatatgcaacagtgatttattaacctcgatgccagccccgatatatcacctcgaacttaccgccggcctaattaaaccgctagcaattgaaaataccattttcataagagatttctttatttatactcattttggcattctttctgaaacctctaaaaaattcatccagtttctaaaaagataa

SEQ ID NO: 188665 - DNA, 225 bp, Klebsiella oxytoca
atgtatttacagcctggagtttatcgcctgcccctcgccgcggcgctgtttttgatgaccgcctgcagttgggttgatagctacagcagcacggcatatcagcagctgctggcgctggaagaacttatctgcagttcatcagcgatgcagcggccgcgccggtcgaccgacaatgactcaggcaagaagatcgccagattcgtcagcaagttagcctggcgttaa

SEQ ID NO: 188666 - DNA, 246 bp, Klebsiella oxytoca
atgggcagtataccaaagagaaaaatcccgcctcccagcgtcgcgaaggggccgaagaacgccaataaaaagagcggtaccggcccccaggcacgccacatttcccgcgggcggcatataaagcgcagcaaacaggtgagcatcgctccgccaatcagcataaaaaccgcggccggtatcgtcagcagcgcggcctgcgtattaacccaaatgccgcagaccaccggcaccagcagtgcgatatag

SEQ ID NO: 188667 - DNA, 780 bp, Klebsiella oxytoca
atgcaccagcggcaaagcggcctccggcgccggagcgtcggcaaggatcgaccgaggccaggtatagaccacggtcagtccctccccccgcgccagaggccgcagggtgcggacgctaccgtcaggaagaacttgcgcattgtgttctttcgcccctgcgacaccggtataaacatcaagcgatcgcagtctggcgtccttagcgtcagcgttgagatttccaacggcgtccgggagttcaagatgaaagctggccttgctgataggccacgcccagtcgttgcccgtcacgttccagtaaagctcatcccactcggggaagcggctgaaatggttgctgatttgatagcgaatttcgtagttatagatcccgggtttcaggacccgttcgccgctgccaatgcgtaccgtcagttttttttctgcttcgtcaaggctaaaaggctcaggcacgccatcgcgcgacaccgactcgatcacgtaatacacgcgaaagatcttgccgtcctgacggttccaggtcagcggcagcgtacggaaaatcccccgccgaatctgcctgcccagagaaagtactttgatattttctcgcatctccatactaccgtccgggttaaagcgcgcccgggcatcgaaagagaggatatgttcatacgctggaatagcgtcagcgggaagctgggaggcatccttgatgatgatcatgtcgtcggcggcaaaagccgcactgatgttcaaaagcagcagcaggacgagggtgcgccccccctgaaaaagtaa

SEQ ID NO: 188668 - DNA, 240 bp, Klebsiella oxytoca
atgaaggggatgatactgatgctgccactggcgcttgccggatgcgcgcagactcagccgacacagcaagcacatccggtagggatggctaacccggcttcggtttactgtcagcagctgggcgggaaacaggttcccattcaaagcccgcagggcgtgcgcagcgagtgcaagctacccggtggtgaaacgttagatgaatgggagctctggcgccgcgatcatccggctaagtcatag

SEQ ID NO: 188669 - DNA, 153 bp, Klebsiella oxytoca
atgcagtggttcgaagctgcagacctgatcgttaaaggcaccgaaggcgcaatcgccgccaagaccgtgacctatgactttgaacgtctgatggaaggcgctaagctgctgaaatgttcagagtttggcgacgcgattatcgcgaacatgtaa

SEQ ID NO: 188670 - DNA, 492 bp, Klebsiella oxytoca
atgtcgaattatcgccgcagcgttattcccggcggcacctggttcttcactgttaatctacaaaatagacaaagcgatcttcttattcgtcatattgagcgattccgcgctgcgacgatcttcactaaacgcaaaaagccttttctgattcaggcgtgggttattttacccgaacatatgcactgtatctggacgttgccggagggggatagcgattattcgggacgctggcgggatattaaaaaaacgttctcccgcgatttggcgatacgccaggtctggcagccgcgtttttgggaacatgcgatccgtaacgaagatgattatcgtcggcatgtggattacgtttatattaacccggtgaaacatggctacgtgaagaacgttattgactggccgtattcaacgtttcaccgcgatgttcgcgcgaggttgtatcccccggattgggctgggaatgttgccgattttgacgccggcgagcgtagataa

SEQ ID NO: 188671 - DNA, 306 bp, Klebsiella oxytoca
atgaaaaaaatcaaatatgcgccacttgccgctctgtttattttaccctgttttgttagccccgtgctcgcggaaaagaccgtggccggcgtcattcatttttacgggcgggtggtggaagcgccctgtcagcttagtactataaataaccagattattatggattgcccgagggcggaagcgattaaaatttctgctcaacagcttgagaaagggaatatacacaacgaaaatatccgttctgcgcaattaagatatattaacccgcaacggaccctcgctattctggatgttgagtatcggtaa

SEQ ID NO: 188672 - DNA, 180 bp, Klebsiella oxytoca
atgcagggggagattaacgacggggtaaacctggcgccaaaaacggcaaaagagcccgcagggcccttttgtgatgtcaacggggatacattaaaaaacgatcagctgctttggttagcaagaggtttatttttctcagcccgggtcgccagccacagaccgctatttttcatagcgtag

SEQ ID NO: 188673 - DNA, 1386 bp, Klebsiella oxytoca
gtggcgggtctttctcccgccgccgccgcatccatctttgcgatcgccaaaatttgggatggcatcaccgacccgatcatgggttatatcaccgacaatattcgcacgcgctgggggcgacgccgactattctttattatcggcgcgccgctctctttttgctttgccctgatgtgggtaagcggttttggctatgcctggtatcttggcacttatttgttattcagcaccgtttttaccctcttgatggtgccctacgatacgctgcccgcggagatgacatcgcgttacgatctgcgttcaaaaatgtctggcgcgcggatgctatttgcccaggcgacagcgtttttatctgcacttatcccaggacaaattttggcgcacgtcgccgataaatcgcaggcatttttatatatcggcctggtcttttccgtactcttcgccctaccgtggatcttcgtttggcggggaacctgggagcgggagaatctgccgccgccttcggctcagcgcgggatgggaaaaacacttatctcgctgtatcgagagatggcttcaactttccgtttacgtacttttcgcattcacatcatgatgtacgtgggcggagccgtcgccctggatattttcggctcgctgtttatgcactatctcacctacgtacttcaggtcggcgcatccttagcttcccaggcaatgagcctgatgacgctatttcaattttttgccatccctttctttacctggctttgtattcgcatcggcaacggcaacgcctataaattggcgattggattgattatgtgcgccttattgtggttcagccagctttccgcctccataagtcatttgtcatggctcttattgggtggagccatcgtgatgggtatcgcacgcggcggaacctatcttatcccatggaacgtctacaactttttacctgatgtggatgaagcttataccggcgtcagacgtgaaggcatttacgcgggcgtcatgatgctaacgcgcaaattttcccaggcgctagccctgtttattgtcggactggcgctggaggcgtttggctttaccaaaggcgctgaatcgcaagatgccgccgcgctaaacggcatctggtgggtattccttatcggaccgggtttactcactctgctggcgatgtacggcgcgtttcgctttcgtctaagccaggagtgtcatcagacgctgacctgcgagctagagcgtctgcggtctggcggtaaaccagaagatgcatcaacgcaggtacgacaaaccgtagagctgcttaccggacatccgcatatgaatacccactggcagcacattgctgaaacgacaacacaagggaatcactatgtcgcagaaaataagccatcctga

SEQ ID NO: 188674 - DNA, 183 bp, Klebsiella oxytoca
ttgcaagtcgaacagggcacgaacattccgggcggcttgtacaaaattaacgataataaagtgaaatacccattcgactacaaagaggttgagggagtaatcgatactgagaaactcaccttcaccgtgaatggtcaagcgtatgcaatgaagaaaatgaaaacaaatccgtgggatgtatag

SEQ ID NO: 188675 - DNA, 558 bp, Klebsiella oxytoca
atgaaaaatgaaccgctttttcacgctccctgccccatcgcccgtagtcttggccgcatcggtgacagttggagcataatgatcctgcgcgacgcctttgcgggctttacccgctttgacgagttccagaaaagcagtaacgtcgcgcccaatattctttcgcgccgcctgaagtcactggtagacgatggactactggagaagatttgctacagcagcacaccgcctcgttacgaataccacctcacgcaaagcggtcgcgattttcgcatggtgctgctggcgttggcggaatggggtaaccgcaacttcgcacccgaaggccgtcagatgcaattggtggaaagtgaaaccctgcggcacgttgagccgatcctggtcgataaagcgaccggtgaagagattatcccggataaatacaccatggtgccgggacccgcagcctcgccgatgatgaaataccgtcacgaatatttgcagcgcaaacgcgaaggttatagtgggcaaaaattccaacccgagtcttatagagatgccagcgacgaatccggccagtaa

SEQ ID NO: 188676 - DNA, 1272 bp, Klebsiella oxytoca
atgggcgtttcagttaaacgcattgtcataaccgggatggggattgtcagccctctggggtgcggcgtacagcatgtctggcaatctctgctggcagggaagtcaggtattacaaagcttagcgagcagttggtcgcggatattccctgcaaagtggctggactggttccgtccatcgaacacgatgcgttgcacggcttcgatccactagcgatcatcccggccaaagagcgcaaaaaaatggatcgctttatcgagtttgcgctggttgccgcgcatgaggcgctaacgcaggccaggtggtcgcctgaatcagcgacagaacaagaacgcaccgcaacggtcattgccaccgggatcggcgggttcggcgagatcgccaatgcggtacatacgacggatgagcgcgggccgcgtcgcctgtctccgttcaccatcccctcttttcttgccaacctggccgccgggcatgtgtctatcgcccacggtttccgtggccccataggcgcgccggtaaccgcctgcgcggcaggcgcgcaggccattggcgatgctgcacggatgatccacagcggcgaggcagatatcgccctctgcggtggtgcagaagcggcaattcatcgtgttagtcttgctgggtttgctgcagcaaaggcgctttccagctcctccaacgaccatccggaagccgcttcccgcccctttgaccgcgaccgcgatggttttgtaatgggagaaggtgccgggcttatcgtgattgagtcgctggagcacgcgctagcgcgaggcgccacgccgctggccgagcttgtcggctacggcaccagcgctgatgcttatcacttgaccgctggcccggaagatggtgatggcgcacgccgggccatggaaatggccattcgtcaggcggggatctcagcagaagagattgaccatattaacgctcacgccacttcgactcaggttggagacaaaggtgaacttgcggcgattaaaaaactgtttggcgcacatcccgtcgccattacctcgacgaaatcagcaaccggccatctattaggcgcagctggcgggattgaggctattttcaccattcaggcgttgcgcgaccagatggtgccgccgacgctgaacctgcatcaccccgatgaaaacgcggaaggtctgaacctggtggcgctggtggcccgcccacagaagatgcgttatgcgctttcgaacggttttggttttggcggtgtcaacgccagcctgctgctgaaacgctggtaa

SEQ ID NO: 188677 - DNA, 696 bp, Klebsiella oxytoca
atgagtcattccacagatatatcaatcggtctgctcctgttccctgctcttactcagcttgatttgactggtccatatgaagtctttacacgggctccagatacaaaggttcatctcatctggaaaaacctggaccttgtggtttcagatcgcggtatggcgattcaaccaaccaccacattcaatgcgtgtcccgcactggatgtaatttgtgtccccggagggcctggccagataaacctgatggaggatgaagaagtcctttcgtttatccgggctcaaagtaaacaagcaaagctgataacctctgtttgcaccggagcgcttgtgctgggcgccgcagggcttctggatggatataaagcgacgacgcactgggcttcactggggcagttggagttgttgggcgcagagccggtaaatgagcgcgtagtacgtgaccgcaaccgtatcacgggcgcaggagtgacttcaggtatcgattttgccctcaatgtcgtatcagaaatattcggatctgatattgcacaaaatattcagttgcatatggaatatgacccagcccctccctttaactgtggctcgccccgctccgcatctgaagaacaactaaaaaaagcccagcaacaagttgcgccatttattgaaaagagactgcaagctacgttgaaagcagcagccaaacttcataaataa

SEQ ID NO: 188678 - DNA, 369 bp, Klebsiella oxytoca
atggaaagagactggcgttgtgatatacctgaacaacggctcgtatgggcgcaggttaccagcgaagccctgaagattattgaaggtaaatggaaaacaatcattttatgccagcttttcgccgctaaagttccactgcgcttttctgagcttgaacgtaggatcgagggggtaaatcaaaagatgcttatacagcagcttaagcagctggaaaaagatgggattatattgcggacgctttatcctgaagtcccgcctcgtgttgaatactccctcacggaactgggaacagcactgggcccatctatggcggcattgattgaatgggccctgctgcgtcgggaaacgcttggccttgagcctggttga

SEQ ID NO: 188679 - DNA, 747 bp, Klebsiella oxytoca
atgagaatcggcgtaattggtacaggcaatattggcggtacgcttgcacgtaagttaagcgaagctgggcatgaggtaaaagtggcaaattcacgcggtttagacgcggtaagggaatttgccagtgaaattaacgcagtgccggcggacatatatggtgcagtgactgacgtagatgccgttattctgtccattccattcccggcggtgagtagcctgcctgatgggtttttctcgggtttacctccacatgtccctgtcattgatacgagcaactattatccaggtctgcgcgatccgcagattgctgcgctggatgaagatcggacggaaagcgaatgggttcaggagcagattgggcatcccgttatcaaagccttcaacaatatactcgccgactctctggcagaactgggactgcctgaggggagccgcggtcgcctggcagtcgcagtagcaggagatcatccagccgcagcacaggtcacgatgtccctggttaacgataccggctttgaccccgtattttccgggtctatcgctgaatcatggcgtcagcagccgtgcacgccatcctattgttgtgactgggaggctgccaccatgcttcgcgctttccccctggcgaaaaagggagaaggacgggcccgtctgcctttactttatgccagcttcggtaagctgggtgaggcgccaacacacgaagatatcatagataataatcgagccatcaactggcctgtataa

SEQ ID NO: 188680 - DNA, 1044 bp, Klebsiella oxytoca
atggaccgtttcattgagtttgcgctcatggcggccgaggaagcgctgacgcaggcaggctggcgcccggtggatgatgactcgcagcaacgcacagcaaccattatcgcatccggtgtgggagggtttggcgcgattgctgatgcggtaaggactaccgatacgcgcggcccacggcgactatcgccgttcactgcgccctcttttctcgccaatatggctgcaggccatatctcgatccgacatggtttcagggggccgcttggcgcgccgatcacagcatgtgcggctggcgtgcaggcgattggcgatgcggccaggcttatcagaggcggcgaagctgatatcgctatttgtggggggacggaggccgcaatcgatcgcgttaccctggggtgctttgccgcggcgcgtgcgctctccaccgggttttcggaaaacccggctgaagcgtcaagacccttcgatcgcgatcgggacgggtttgttatggcggaaggtgccgggttattagtgattgaatctcttgagcacgcgcttgcgcgcggcgcgacccctctggctgaactggtgggatatggcaccagcgccgatgcatggcatcttaccgccgggccggaagacggtagcggcgcacgtcgggcaattgaactggctttggctcaggcggaggtgaaggccgatgagatccagcacatcaacgcccatgccacctctacgcagattggagacaagggcgagctggcggccatcaggtctgtgttcggtgggggattgggtgtcgctattagttcgacaaagtctgccaccggccatctgctgggggccgcagggggtgttgaggccatatttaccgtgcttgccttacgcgatcaggttataccgccgacgttgaatctgcatcatccggatgaggcggggcagggcctggatcttgtcgcgttaaaggcccgtcctgctgctataacttatgcattatcgaacggttttggtttcggtggcgtcaatgcgagtcttctgtttcgtcgctgggaaacgacgtga

SEQ ID NO: 188681 - DNA, 1110 bp, Klebsiella oxytoca
atgctcaggctcaaatcagcccctcttgccgtttgcctgctgccgtttgccctcgcggcctgcggtgacgtttccggcacagacgatccccgcactcagcctcctctggtcaggtctgcgaccgtagtgagtgcgatggatgcctcccgcgcgtttaccggcgttgttgtcgcccgcgttcaaagcgatctcggtttcagagtgcagggcaaaattcttgaacgtctggtcgataccggtcagaacgtcaagcgcggccagccgttgatgcgtctggatcccgtggacctcggcctgcaggcgcaggctcagcaacaggctgtcgcggccgcacgggcccgcgcaaaacaagctgcggcggatgaggcgcgttaccgcggtctggtcgcggcaggggcggtgtcggcatcggcctacgaccagattaaggcggccgccgatacggccaaagctgaactcaatgcggctcaggcccaggcgaatgtggcgcaaaacgccacgggctacacggtgctgctggccgacgccgacggcgtggttatggagactctggctgaacccggtcaggtggttagcgccggtcagccggtggttcgtctggccagagcgggccagcgtgaggccagcgtgcagttacccgaaacgttacgtccggctcccgcaagcgaggccgaggccatgttgtacggcaccggtaaacagacggtcccggcgaaactgcgtctcctttccgatgcggccgatccggtcacccgcaccttcgaggcgagatatgtgcttgaaggggcgctggcgaatgcgccgctgggatccaccgtgacgctgcacattgcagacggtaaattaccgaaccaggtgatgcaggtgccattagcctccctctacgatccgggcaaagggccgggcgtctggcagatttcaggtcagccagccaaagtgtcgtggcggtccgttcaggtgctgggattgagtgatgatgcggcgcaggtatccggtaatctccagcctggcgagaaggtggtcgcgctcggggcgcatctgctgcatgacggtgaggccgtacgcatggctgtacagaacgatgccagcgtcgccgggagtcggccatga

SEQ ID NO: 188682 - DNA, 621 bp, Klebsiella oxytoca
atgacaaaatacacaaatgcacactcctcacggggaccgtcggaccattgcgtccgcgatcggattgttgaagccgctacggagcacttcgggtatttcggctacgagaagaccaccgtgtcagacctggcgaaaacgattggtttttcaaaagcctatatatacaaatttttcgattcaaaacaggcgattggagaagtcatttgtgctaacaggctggcgaaaatctctgaggtcgtcaatgatgcgattgccgatgcgcctaccgcctccgaaaagctgaggcggttattgaacgcgctgatcgaagccggtaacgatctgttcttccacgatcgcaagctttatgacattgctgccgttgcctcccgggagcgctggccttccgccgccgtctatcagcagcagctgcgacagctaatacagcacatcattcaggaaggtcggcaggcaggggagtttgaacgaaaaaccccgctgggtgagaccgctgatgccatcagtctggtcatgcagccttatatttgcccgttacagctgcaatttaacctcgataccgcacccactgcggccgtattgctatcctcattaatactcagaagtttagcaattcgaaagtga

SEQ ID NO: 188683 - DNA, 486 bp, Klebsiella oxytoca
atgaaaagaataggcgttctgggcgtggatgcgttaagcgaaaaactgatcgcaggattctttcaggcggaaacgggcgcccaggtgtttctgtccccggcaaacagcgaacgggctcaaaggctggcaaggaaatttccctgctggaccctggacaatcaccaggcggtcattgatgaagcggatgtcattattattagcgttaaccctgatactttaaatgaactcgcgcgcggtgtgcggttacgcgattcacacaccctgatttcgcttgtaccaggtattcagtcccgaaccctacgtgagatattccagcctgcaaactgcgtcagattacgcctggcatatagtgatggaataaatcaattcgcagtcatcctcaccgcagcggatgaagaaatacagcgcctgtttgcctcgttagggccgctcttagtagcggccgacgaatcggattttgattcaacaaccggaggccctgtctga

SEQ ID NO: 188684 - DNA, 849 bp, Klebsiella oxytoca
atgaaactattaagctttcgcgttaatgataaaaataaatatggtctggcgaccgccgatggcgtcatcgatctgcaggcgctgttccctcaatatggcagtctgcttgaatttctgccgcaccttcatctgcttgatactctaccgccgtccgcgaagaaaacgcattattccttcaacgagatcgctttcctgccggtcattactgaaccgaaaaaaatcatctgcgccggcgtgaattatcgcgataaaaacgttgccggtaacgagaagcccgcgaatcctgtgctattcatccgctttgcggattcgcagaccgggcatctggcgccgctcctcaagccggaacgtagcaatgagtttgactatgaaggcgaaatggcgctggtgatcggccgtggagggcgcaatatccctgagcaggaggcgctgcagtatgttgccggctacagctgctatatggatggctcggtgcgcgactggcagcatacctgctttaccggcgggaaaaactggccagcaacgggcggcttcggcccctggctggtgacggcggatgatatccccgacccgcaaaatctgaatattaccacccggctcaatggccagacggtgcagcaggataatacgggcagcatgttgtattcaattgccgaactcattgcgtatatcagcaccttcagcgcgctctctccgggagacgttatcctgaccggcacgcccggaggcatcggaaaaaaacgtacgccgccgctctttatgcagcccggggacaaggtggaagttgagattgagcagatcggatgcctgattcacaccgtgtgcagcgatgccgctgtatcgcgataa

SEQ ID NO: 188685 - DNA, 492 bp, Klebsiella oxytoca
atgccgaaaataagaccgtatggagagcgtgattttgccacgctatgcgcgatttttttgcgggcgattaaagagacggccagcgccgattattctccccggcaaattgccgcctgggctcaggttgatgaagcccgctggcggcaaaaaatagcggcttcacgggtactggtcgcggtaaaagaggcatcgccggtcgggtttattaccaccgtggatgactatattgatttgctgtttgtttctcccgactatagccgccagggaatagccagcgcattgctcaacgcattgcttatacggcggcctgaacgcgtgttaacggtagaagccagcattacggcaaagcccttttttgaacgccacggttttagcgtaattgagcaacagcaggttgaagcgcgcggtgagcggtttcttaattaccggatgcggcgggaaatcgatgcgctaaatactcagaacgcactttgcaggcctttcctgcaatga

SEQ ID NO: 188686 - DNA, 417 bp, Klebsiella oxytoca
atgaaaatgaaacctatcattctaacaataatgtcaggcttattgcttactggatgcgatcaagttaaagactcggttgacaattatgtaaagcaggttttcttaatggatgatgcttttaaattaccatcgatagttatttctccaggttggagaattaacgatcacggaagtattgcagaagtatatgggaataaagattgtcctaccttatttggcgatgacattaggtcgggatgtattgttatcgatccggaagatgaaaccgtaagagcattcatagttaaggcgaattcaggacgcgaagaagtggtcaaggaagtatggatagtggagcatcggggagaattcccgcacgtcaattttagattaaaacgacctgataactcatatgtaaccccttggcaccaggcataa

SEQ ID NO: 188687 - DNA, 1032 bp, Klebsiella oxytoca
atgagaactttaaatttcaacggtaaaatttcgactttagaaccaatgaccgtttccttaaaaaatgcagtcacaactacagggcatcgtttgcctcgcaacggtggcttcaattccgcaccgtatttccccggcaccagcattcgaggtaccctccgccatgctgctcacctggtcgttgtcgatcgtgtgggtctcaataccgaaggtaaagctccgttcgaccttgccgagcacttcatgctcgcccagggcgtagatattaatggtgaggcggaaacttttgctgcaggcgaaattaatgccggttctgaactgcgtagcaaaaatcccctgctcagtctttttggccgctggggtctgagcgggaaagctggcattggaaatgctattccgacaggtgataaccaatgggctatgtttggcggcggggctcgcgccattatgtttgaaagaaacgaaaacttgatggattatcttgagacggaccaggtcgaccgccttgaacggctgttggaagaacaggcagaagccagtgttgatatctcccagattaaatctgaacaagacgcaatcaaaaaagagatgaagtctgcagataaagacgcgaaggctgagctccagatcaaattgaaagttctggacgaaaagattcaggcaaggaaggaccagaaacaggaatcccgtgaatctattcgacgtcctatcgacccgtacgaagcattcattaccggcgcagaactcagccaccgcatgagcattaaaaatgcgactgacgaagaagccggactgttcatttccgcgctaattcgttttgctgccgaacctcgttttggtggtcatgcaaaccataactgtgggctggtggaggcaaactggacagtgactacgtggaaaccgggtgagttggtccccgttactctgggggaaatcagcatcacacctaatggcgtaaatattaaaggggatgagctgactgcgatggtgaaggcattcaatgataaccaatcgttcgatttcactacccgctaa

SEQ ID NO: 188688 - DNA, 678 bp, Klebsiella oxytoca
atgtcatccctgacgccggtagtaatcagcgggattgccccgtcattagacggcatcctctatgaagcactatctcaggttatccccagtaacgagcctgatactgttctggcacgactgaaagaaattcttctttttaacgacgaactaggtgttttccacgcttcatctctgcgttttggtattacacctgagcaggggataggtgcggccagcagcgtgcggtgtgattacctcggagatgagaaattaagctccgctatgttttcacctcgctcccgtggcggcaagttcacccgggtaatcacgaccggtggcccaactaaaaaaaggatgacaacccgacctgcgtattccgcaccttatttaacttttgattttgtcggcgacgacgaatctgtagaaattctccttaaccacgcccatgttggcgtcgggtacgactatttctcagcggctaacggggaattcaataacgtgatgattattcccctggattgcgacacgagcatttccttcgaagggatggcgacaagacccgtacctgttaataagggactagatgggattagaggtgtatctcctctcgttcccccctatttcatcggtgataaaaccagcgtggtttatccagcaccagtccgaactcaactgatttctgctttattgcgaggctaa

SEQ ID NO: 188689 - DNA, 1881 bp, Klebsiella oxytoca
atgaacatggatacagctgcttgtttcacgagcgccgggctttctttacgtaaagtccagcaggactttattgaggccgctggcctgggccttaatgtccaaaacaagctggcgttactcagcgccgaaacaggtgtgggtaaaacgttagggtacctggttccggccatgcagattctggtgaaaaaccctggggcaaaatttgttatcgcaactaactcccatgccctgatgcatcagattttcagaagcgaccgtctaagtctggaacgtatggcagaagaggccggaataaaagttactttttcccgtctgatggggaaagccagctatatttcgccggataaagtgcgggagctccttcgggtgagtgatacctatgattcggagaccgttcagcttcttgaaaaactacggggctggtcaaaacctctggttgaatttgaagaggagtatggtgaactaccgacgctgataaagccggatatggtcacgttttctttctgggatgatatccagaatgttaacgatattcgacgtgaagcactgaacgcagacttcatcgtcacaactcacgctatggtgatgattgattgcctttgcaatcacggcatcctgggagacaaagagaatctgtacctgatcgtcgatgaggcggacatgtttgtcgatatgttagaggtctggaaacaacgccgcttcaatctccgcgagttgctcagttcgttcagcgcatatatccctagaactggcgttgagattatcaaagagctggaaagcgatattaccaaaatcgctggtggtctgcatttttgtagtacgcccgaagccgttgaactctttgaccgcagctttaaagcgctggcgatggtcgggcgaaaaatcaaagatgaagagccccgtaaatctttctttgattgcatctacaggtgggaaatgctcgggatgtccggagggcagaaagggatcggtgtctccaaagttcgctatgaacccgctttaatcgctgttaatccgtttattggtatgaaccttggcaggtactgcacccagtggcgcagcgcattactgacgtccgctacgcttgcgattaccaacacaccagagggcggcatggagtggttgtgcaaaacgctggcgctcaatgacgatatggtttcaatcaaaagaattttcgctccagaaagctatggcactatgactcttactatagccggtgcggctttccctaaagtctttagcgaccccaaagaacaggagttttccagtaaatggcttgctgcagtcactgaccagctatcccgcatgcctggccccgtcctggtgttaactgcgagtcattcagaaacccgtgctatcgccggtcgactgggtgaagtttcgcaaccggtatatatccagcaggcgggtcagccgctatctgaaataatcaaactctaccagaagaagcctggcattctgatttcagctggcgcatctgttggtctgagtccgagaggagagcaaggcgaacagattttccacgatctactcatcaccagaatccctttcccgccgccggacaggatgaaggttgaaagcctttacggttacctgaaagaccgtggctatggactcactctggaatccgttcaccggactatttacctcgaaaatttgcgaaaagttatccgcaaagggaaacagtcggtagggcggggtatccgcagtgaaaccgatagtatcagaataatgattcttgacccgcgcttcccggaacctgccgacctgtcgtcaaggcatcgatccctggaacatatcattcccgttcgattccgccgtgaataccgctcatgcgaaatactctctccggcacattgtgaagaggacatccagtgttaa

SEQ ID NO: 188690 - DNA, 573 bp, Klebsiella oxytoca
atgattttctacgataatgcatttcgtttacggataccgcacacgagtatttatcgaatccaccagcacctggatttcttcgttcaggagcggaagggggagaagctgccatattcttttaaaattcttcctggtaccgctaatgatgcacagttgcttgttcgcacagcatcacctcttggcctacccggtgaaaaaccgcgtgagcttacgctatccgagggggatgggatttcgttcatcacttccatggccattttccataaagccaatcagacagaaggtactggccgacgtcagtacgcaccttctgacgataaaaaacatgatctggccgttaacaaaataatcaatgccggtttcgagcccgaccatattgtcgtaggtggggctgaaattgttcacgttgggaagggcaattccggtcgtggctttacgctaccggtgttcacgatccagggtacggtcgttgtcagcaacaaacaggaagcagagaaagctattgtctttggcattggtcccaaacgagtctttggttgcggcttcatgcacctgacagggcagggactatga

SEQ ID NO: 188691 - DNA, 735 bp, Klebsiella oxytoca
atgggggaatcagtatctatccctcaaaaatgttcatgttgtcagcgtgacccggacgagtttggtcatgccggtttcctgatggtcaatggctatggtgaaaacgtggctcattgccgttcctgtcagactttttttgtctcagcgccagagcttatgggcgtcgagaacccaaaaaaacccaccaccggacagaaatttggcatgtggtcaggggtaggggcagtcattaatctggaaaataacagcgctgttttattggctcctcagggggtggtcaataagctacccacgcattttttcgaagcagtgaacgttgtgactgcaacgagcggtcagcacctggaatatctgtttaacaccaacctgaaattcccgatcatttatatccaaaacttcggtgtcaaaacatacgagcttatccggtcattacgggttagtcttagcggcgatgctatttttacctgtgcggatcagctaatgaccactcagaatgaagtccttttcacgctcgatttaaataaagctaaagaacttcatctggaaatgcagaactattccaaaaaagaaatagatgcctttattcgaacggtaacccaactggccttttcacggataacccctgaggcagcatctaatcagtttaaaaaagacaacctcattcctttgttgcagttgttaccgactgatccgcatcagcgccttagcattttgcgtcttttgaaaaaggtataa

SEQ ID NO: 188692 - DNA, 489 bp, Klebsiella oxytoca
atgaaacgagataatgcattgcccgctttagtaaaagcaaatgtagagaattacaggggcgcgattgccctttatctaaagcaaacagaagataacgcactggtatttatcatcggtgaagcaggcgcaggtaaatcttatctggcaaaactcgaattaccgaatgctttatatcccacacctcagcaatttgccgaatgtgatcatatctccacgatgttcacaggatttgacgtagtcattgatgacattctccggtttgactcagacaaagtcatagaatgtattcaggcggtccatgcttctgggcatagagtcatggtcaccgggcaaccggtcgaccttgaattgtgcacgggcctactgtcgcgtttaccagtgggttaccgcactatgttttcgacgctgatggggcatagcgatttgcaagagatgaaaggcaaagacaactccgtggaaccaccgaaaacaggtcccgttctgcactag

SEQ ID NO: 188693 - DNA, 411 bp, Klebsiella oxytoca
atgagttctgatggtgttgaattgtcttctatatgggaggcgggttcctggtttcccgttcgtgcgtttggcattctgttattagttatgctgttcctgatgattgtttttggtgtttttaggaaagatttttcccatttaaaaccactgctcacattgtttgttttgttaattgctcttggcgggacgatactctttacgaccttattcttttctgccaaaaacaaaaatgaagctgaatggcgagactgggcaaaagaccactgtaaaattgttgctaaaaaagatgggtcaacaaccactggtgtcggtatatccctgaaagggcaggcaggcctgtttattggcggagagccagggcagaccggttacagttgcgatgatggcgtgacttactggaaaaatgattga

SEQ ID NO: 188694 - DNA, 516 bp, Klebsiella oxytoca
atggtgatgtcgctggagaaaaggctgactgggtgcaggcctatgaagcgggaatggctgttgattctgcgtactatgaagcctttggtgacagtgatgactgacacgaacaatcaggaaagaaacggttcaaaatttctgtttggtgtgacttctaccgaccgcattattcagactgagcaaggcgatggattcattaattcatgtatcgcagctcacgggattatcaccaaaattattttgacgagctatcgtgctgctggtgctcttacggagatggttctctttaatgagcaaggtgctaccttcgttattaccattgagtcaggggtgtttacaccttctggattagtgctaacagatgaagatatccagatagcacacaagcagatcacattatccgacacaacagacatattaatcctggcaacgaggatggctagacgtgcagggcttaagcctgtttttcctgaacaatcggaatttagttcgattttagaatttacagtcaattga

SEQ ID NO: 188695 - DNA, 423 bp, Klebsiella oxytoca
atgaattttattaagcttattattttatttgccgttgtggctttgctggtttatggattcagcggtttatcaggaaaagattccgtcgcctttacatttctgagctttggtttttcagctgttatagctgcatttttctggataatgattgtgttgctggtggctctgtatttgtttgcttcaagctcaatcagtatttatccaaaaatgcttttcctggaaggtacactttttggctggtggtattttgttttcaattttcttataccagacggacagtctctaaccttgctgggcgtaaatatctataaccttgggggttattttatatacggaacgaccgtgcttattggtatcggtattgtgatgatgatgttccggcggtcaactaatcaggttgataaggtgaaaaagcatggctga

SEQ ID NO: 188696 - DNA, 1074 bp, Klebsiella oxytoca
gtgtctagattatccgtggcgattcaaaaactcgattcttccagacctgtattgctaagcaaaaatagcgtatgtgaaaccacactctaccaatggccggaggccagcgagtggaaagggttgaaatcggctttcggcagtttcgaagagaaacaaagagcctttgaatttattgaaacgggtaaagaggatctgcaaaagctgtctccggctaatcccgtagaatttgaggctggagtgcgtgaatggatgatggcttactgcgaaatgaatgattaccgcaaaaccggaggccaggtgcaacagcccactttaatgatacctgttggcatctacatcgatcgcggagtctggcagtacgtatacgtaaccacaggaaatgaggctgtggggtatttttaccacaatgccagcgattccttaaaaaaggaacttttccatgagtacgtctcgcgctttgctcaaaaggaaggcaaacgggaaaggattgaaaaacagggtaaccgactggcattgggcatgtcgcagaaaactccagatgtcggcatgtttagcgctgaccgtaagcttagtatggataacgttgaatacggttctatttcgttcagtgcctacagccaactccggatgttagaaaaccgactcttttttgttatctcggaagctgaacgcggactacaccgcaatatatatattgccgataatctcaaagacgataacgacgagtttatcatcgataaactactgggctcgtctcaccaacaggagcaggaagctgttgatgtattcgaagtaaaactgcccaagtctctgtcagaaggcccactcccggtgctgaaatgtgatggggaaatatatcgaattcaccactggttcgatatctgtccacaagggtcggacggaaccatttcattgagcaatatcgaagcgccggtacatacggtcaccaggcacagttttgataataaagagttggcaatgatgtttatccttaaggaggacagttccgtaaggaaacatacgtccggtgataaattcaaaccgccagcaggaattaacgaaaggtggtattag

SEQ ID NO: 188697 - DNA, 525 bp, Klebsiella oxytoca
atggcaacagtaacccgctggtgggcgctgacgcttattgcctgtggtctgctcgcaggctgcggtctgacgcagaccgtcacggacggtacggtcagcatcacgaaatccctcttctacaagaaaattaaaacactgcatctggattttatcccgcgcacggccattaacgccgatggcgcacagacgccgctggcgacaatggtgcgggtttatcagctcagggatcgtaaagcggttgatgccgccgattatcagacgctgctgcgcaatgccgatacggtactgaaggacgacgtactggcgtcaaaagagctgctggtgatgcccaacggcagcgtgacgctcaatatgcctatggatgaaaatgctcagttcgtggcggtggtggggctgtttaaccggccggatcagaaggacaaccgctggcgcctggtactgacccgtgacgacctcgacccggacaaaccccgcacaattgaactgggtgatggctggctcggcctcgtgccggtaaaggagtga

SEQ ID NO: 188698 - DNA, 738 bp, Klebsiella oxytoca
gtgactaaactgaccacgcgtgtagaagggatcgttcagccgcttccgccggagttgccatgctggctggtgctggattgtgataacgacctgtaccccttgattgaagagcagcttaaggccgctctctcactaaagaccggcaggatttttcgcctgatgtccggaaaagggttgagcgcactcgatgcctggctggacaagcgatgggacaatccgagcattctggttgccatcactctgtcgttacccgcgtctccccgggaagaagatgctgatgccatctcgatggtggtattgagcaaccgcaaagcccacgcctggccggatgcactacgccttcatcgccccgaaaggggagcagaatcaacgctcacaaagacactcacccgggcgctgctctgggcgaagaccaggccagatgaactcaaaggaagctggatctccggtcccacattgaccgctggaagcggctggaataatgcctgcgagcagagcggggtggaatttagcctttcagaggacaacttcagtatcgatccagttctgggatacacgggccatgcggctccatggctggtcatcacgcttgccaatgctgacgttgaacaacgaggcccgcaggttaccgtagcgacgcccgactgcgcctcaccgtacccgtgcggttgttgcctgagccccgccttggcaaaggcaggcgtatccaactgggccgtaccggtttgttgggtctga

SEQ ID NO: 188699 - DNA, 483 bp, Klebsiella oxytoca
atgaaatcaacgctcaaaaatttattgctgttattgacttttgttttcgcgatattttcaaacttcagttttggagaaaataacagcccgatactcgatgcgaaaagtccagaattcgttgttaaaaaattttactctgactatctcaccgcgtggaacgaccctgatgtggggagtggtgcagagaaaagccagaaggcaattgatagctatacgacacaacaccttcagcaacttaacagtgacaatgatactggggctgattattttctcaacgctcaggaaatatgtcctgactgggttaatcaaatcgaggttaaaacatcttccgtgagcagtaacaaggttgcagctgagttaacgcttggacatgctgatagtgaatcaaaatatgatatcggccttgttctcaagaatgacaaatggctaatgaattcggtgaagttcatatccagaaaaacaggtcattgcaacgagaactaa

SEQ ID NO: 188700 - DNA, 822 bp, Klebsiella oxytoca
atgaagtttatgaaatatattacggctcttatcacatttacctgcgctgccaattcatatgctggattctttagttcatctgatgaattcaaatgtggtcgagatgatgctgttaaagcgctacagcagtacataagagatggggcatcagaaatgcttcagcatgattccatccaaaatgcaaagatacttttaaataagccggttaatgtctattcagaaaagatgaacagcattacagttgatgttaagggggcgtctacgatcggtaacaccagccctacggaagtatcgtgtaaagctaaggtaagtatattattaccgcaggaaagtattgatgtcattcatgctatcccggagcaaattgctcgtctccagtcgggacaagaatctttttataacaacgctgttatatggaaggattatagctataacctgaaactctcagatgataaaaaagatatttctgtaacagatctcatgaaagacagtgcttcctctgagctgtattttattacattgtcatctgttaacaaaaatgaactcattgacaaaaataatgacataaaaatcaaggttgcacaaaatgaatataacgaagcagataccgagttaaatatcctgtggaaaaatatgcctgattctatacgtgcttcgatgaaatcctcccagttggcatgggtgaaagacaaagcagtgaaatgcgggaaaattagtgatgcaacgggcaataccgcagatattgctacgaaggtaaatatctttaactgccagacaaaaatgactaatgagcgaatcactattttgggtggcggtaattaa

SEQ ID NO: 188701 - DNA, 2541 bp, Klebsiella oxytoca
ttgttaaagttgctggagcagggagaaggtgatctgaccgttctcgctcgccgctatgaatgggacatggatgccgtctggcagtcactcctgagctggctggatgtacagcctcgttcagttcgcacccgaccagagctctctgcgtcccttcagacgctgctgaaacaggcatggcttgccgccacgctcgtcggagatgagcagatccgcagcatacatttgcttacggccatgattgaaacgtcagagctgacgcgctgcgatggcctctggcctttgatgactctgaccaccagccagctggagaggttacgccccttactggaagcccagtcggatgagcggcatgacgttgcgctcagcgagcaggctggcaatgcctccattattggccgggcgccgccattacaacatgaagcccaaaagcatgctgagggtggaattgcgcagcctgccgtttcacaggtggagtccattctcaatcgttttacggttgatgtgaccgcccgtgcccgggaaggaaagattgacccggtctttggccgcgataacgaaatccgccagatggtggacattctctcaagacgccggaagaacaaccccattctggtgggtgagccaggcgtgggcaaaacggccctggttgaaggcctggcgctacgtattgccgaggggaatgtgcccgaaagtcttaagcctgtcatcgtcaggacactggatctgggtttgctgcaggcgggcgccggtgtaaagggtgaatttgaacagcgtctgaaaaatatcatcgacgccgtccagcaatccccggtgccggtgctgctgtttattgatgaagcgcacaccattatcggggcgggtaatcaggcgggcggggcagatgcggctaacctgctgaaaccggcgctggcgcgtggcgaattgcgtaccatagcggccactacctggagtgaatacaagcaatatttcgaacgtgacgctgccctggagcgccgcttccagatggttaaggttgatgagcccgatgatgacacggcctgcctgatgctgcgcggtcttaaatcccgctatgccgaacatcatggcgtacacattaccggtgaggccgtccgggcagcggtgacgctatctcgccgctacctgacagggcgccagttgcctgataaagcggtggacttactggataccgctgcggcccgggtgcggatgagtctggacatgcagccagaacagcttacccggttgcaggcccggctgactgcgctggccatggagcagcaggagttgctggaagatatctccctgggtaacgctgttgatgccagccgtctgcctcagatcgagcaccttactctggatctcaaccagcagaaaactgcccttcagtcacaatatgagaccgaaaagcagctcaccgactcgctgaaagcctgccgtgaagatatcagccgccagaaggagatctccgccttccagcaggagctggcgcaggtacaaaataacagcccattactgggtctggatgttgatgtccgcaccgttgcgaccgttatcgccgactggacaggggttcccctctcgtccctgatgaaggatgagcaaaccgaattactgacgctggaagagcagctggcaacccgtgttgtcggccaacattcagctctgaatgccatagcccaacgactgcgagcgtcaaaaaccggtctgacgccggagaacggaccgcagggtgtatttttactggtggggccaagcggagtgggcaaaaccgaaacagcgctggcacttgctgacgttatgtatggtggtgagaaatcgctcattaccatcaacctgtctgaataccaggagccgcacacggtctcgcagttgaaaggctcacctccgggctatgtcggatatggtcagggcggcattctcaccgaggcagtccgtaagcggccatacagcgtagtgctgctcgatgaagtggagaaggctcaccgggatgtgatgaacctgttttatcaggtctttgaccggggctttatgcgggacggggaagggcgtgaaattgatttccgcaataccgtgatcctgatgacgtccaacctgggaagtgacccgctgatgcagttactggaagagcaaccagaagccactgagagcgatctgcatgagttgttacgcccgatcctgcgcgatcatttccagccagcgctgctggctcgcttccagacggtgatataccgctcgctggcaatggatgccatgcgcaccatcgtcggcatgaagctggcacaggtgagcatgcgtctgcaacgccactacggtatttccactcacactggagaaagtctcatcgacacgctgacgaaggcgtgtttgctgccggataccggtgcccgcaacgtggacagcctgcttaaccagcagatcctgccggttctgagccagcagttattaagccatatggcggcaaaacaaaaaccacactccgtgatgctcagttgggatgaggaagaaggaatcgtactggagtttggaatagaaagatcataa

SEQ ID NO: 188702 - DNA, 1536 bp, Klebsiella oxytoca
atgtctgtaaatactgaaaccgcctccgcgcaggggcagactgctgtactggaaaaagagggcgtgtacgcctccctgtttgaaaaaatcaacctgaccccggcatcccgcctgggggatattaacgactttctggacgatgccgcactgtctgacgccccggcgggcgagcgtctgacggcggcgatgcaggtgtttatggactgcatccgcaaggccggccagccggtggagaagctcgataagaccctgatcgatcaccatatcgcggagctggattaccagattagctgccagctggatgcgatcatgcaccacgaagcgttccagaaagtggagtccctgtggcgcggcttgaagcaactggtggacagcaccgactatagtcagaacgtgaaaaccgaaattctggacgtatcgaaagacgatctacgccaggacttcgaagacgcgccggagctgatccagagcggcctctactggcatacctacaccgcggagtacgacacccctggcggcgagcccattggatcggtgatctccgcttacgagttcgacgctagcccgcaggacatggcgctgctgcgtaacatatctaacgtctcagccgcggcgcatatgccgtttatcggcgccgtcggcccggctttcttcctgaaagattccatggaagaggtcgccgcgatcaaggatatcggcaactacttcgaccgcgccgagtacatcaagtggaaatccttccgcgatactgacgatgcgcgctatatcggcctggtaatgccgcgcgtgctgggccgcctgccgtatggtccggacaccgtgccggtgcgcagctttaactacgtcgagcaggtgaaaggtccggatcacgagaaatacctgtggaccagcgcgtcgttctccttcgccgccaacatggtgaaaagctttatcaataacggctggtgcgtgcagatccgcggcccgcaggcgggcggggcggtgaaagatctgccgatccatctttatgatctgggtaccggcaaccaggtgaagatcccatccgaggtgatgatcccggaaacccgcgagtttgagtttgccggcctcggttttatcccgctgtcgttctacaagaatcgcgactacgcctgcttcttctcggcgaactccgcccagaaaccggcgcggtacgacaccgccgacgccaccgccaacagccggatcaacgcgcgcctaccgtacatcttcctgctgtcgcgcattgcgcactacctgaagcttatccagcgtgaaaacatcggcaccaccaaggatcgtcgtctgctggaactggagctcaacacctgggtgcgtgggttggtcaccgaaatgaccgacccgggcgacgagctgcaggcctctcacccgctgtgcgacgcgaaggtggtggtggaagacattgaggacaacccgggcttcttccgcgtgaagctgttcgcggtgccgcacttccaggtggaagggatggacgtcaacctgtcgctggtttctcagatgccgaaagccaaatcgtaa

SEQ ID NO: 188703 - DNA, 543 bp, Klebsiella oxytoca
atgattgatccggttcaattttctaccctgcccgtgacgccgtggaaaaatggccgcggggaaacgcgcgaaatcgtcagcattgcctcgccggacgcgccgttcctctggcgcgccagtatcgccacgctggaaaacgacggtccgttctccccttttcccggcgttgaccgggtcatcaccctgcttgagggacagccgctgtggctacggggcgatgatatcgcccagcgccttgagcgctggcaaccgtgggcgtttgccggcgagtggcctattgccagcgaaggcatcagcggacgcggtctggacttcaatattatgacccagcgcacgcgcgccgcggcgcgcgtgaacgtcatcgcggaaggacagcggcccgccgcggagggcatcgcatggattctccagggtagctggcggctggctgacgcggtttatcaggccggcttcgggatctggtggcaggacgaatcgccaggcgagctgttaccgcagtctgcggacgcccgacttttactggcggaaatcgttcgccgctag

SEQ ID NO: 188704 - DNA, 1899 bp, Klebsiella oxytoca
gtgaaatggacattaatctgtcgcttttttcttctgctgtggctgttcagcgtgccgttcagccctgcgcattctgaggttttatccccctggcaagaagctatcgctctgtttgacgttcaggctaccatgcgccaggacggcgtgctggacgtgcgagaaaaccttcacttccaggcgcgcaacaggcagatcaaacacggtttctttcgcgatcttccgcgtatgtgggtgcggccggacggcaacgcggccctgctgacgtaccatgtgatcggcgtgacccgcgatggcaaacccgagccctggcatctgctctggcaccgggggacgatgaggatcgtagtcggcgatgagcaaacttttctgccggaaggcgattatcgctaccaggtgcactatcaggtcagcaacgcgtttatccgcgatgacgaagatgatgtgcttatctggaatgtcaccggcgccagctggtcgttcgaaatattccaggttcgcttcgcgctgcaactagcggatgcgcaaggggacccgttcaggcagatcgacttttttaccggcgatgatggcgaaaggttaaaaaatggccaccttctgccggatgggcgcattgagtcccgcgaacccttctaccagcaggattttaccgtactctatcgctggcctcgtgcgctgttgcctgatgccgcagagccgcaggcgactcatctactcccgcatctttttatccccacgttatcgtctttaagcgtgtggatcccctgtggattaatggcgggttatttcttgtttttatggctgcgcaggccgcgttttactccggttgacgtgccggtgctgacgtcaatgtctagggaattttctccaggctatttgcgtatggcggcgaagcaaacgtacgacgataaaggtttttgcgccgatgtgaccaacctgattgtgaaggggcgggtggcgctggagaatgtgccgggcgatgaaatgctatgctcgttggttcgggtacgttctggcgcaattcacacaggcgatattccgacccaggaagagcagctattgatggatctgctgtttcataagagcgataaagtggagctcaaggggcgctacaacagaacgctgcgcaaagcgtttaagcgaatggataaatactatcgtcagcagcataagggcgcgggctatcggcctttgagcttcctgttatgcggtattgtggcgatgtttgcgactcagattctcgctaatgcgcagagtctgggctggacggccagaaccttaactgcggattggtttgcgggtcttttcttcgttattccgcttctctttagcagcgtgtttttactgagcgatagcgatcccggcaaaccaattcgcaagcgtctaatggcgacggtgttgtggccgcttatcggcggcggcctgatttttctgtttctatgggcgaaaatgggtttttcgctctttcaatggtatatgcccgccggatacttcagcgcctggtgcctgtccggttatatcaccgcgctgggcttttgcctgctcccgcagcttacgcaattgggccagcagcgctttgccagagctgaaggggtcatccgttatcttggacggctggaggcagcaacgcacagcggcccacggcgcaaaggcgaatcccgttacctggatatttcattgcttagctgggcggtagccgcagggttgggtaaggcgtgggccaatcgcctggctccatccctggcggcggcgattaaggcgccggagatagcccgatccggggcgtttttgaccttgcaggcgcatctgaatagtggatccgccagcgcttttggtctcggcggcagcggcgggggattttccggcggcggagcaggaggcggcggcggaggcggatggtaa

SEQ ID NO: 188705 - DNA, 948 bp, Klebsiella oxytoca
atgaaagcagccgtggtttttgacctgcagcaggtgccggtttggtccgattttagcgatccgcgcgccggtgagagtgaggcgttagtcaaggttcgcgccgccgccatcagtcatgtggtgaaaggccgggcctccggcaaacattatagtttcgatggtcgtctgccttttgtcccgggtattgatggcgccggcgtactacccgacgggcggcgcgtctatttcgccttccccgccgcgccctggggcagtatggcgcagtgggctcccgtcgccctaaaccactgtctgccgctgccggatgaactggacgatatcactgccgccgcaatggctaatccgggtatgtcggcctgggcggcgctggtcaagcgcggcgggttgaaagcgggcgaaaccgtattgatcaacggcgccacgggcagcgccggtcagctggcggtgcaaatcgcccgctttctgggcgccagaaaagtgatagcctgcgggcgaaacggggagaaactggccgcgctcgaagccgatgcgatcgtgaacttaagtcaggatgaggcgagcctgcgggcgcagtttgccgaactggcggcgcagcagattgatgtcgtcgtcgattatctgtggggacgtagcgccgaacttttgctgccagcgctggcaaagcacagcccgggaaatacgccggtacgttttattcaggtcggttccctttccgccgccgatatcgcgctcagcggcgcggtactgcgctccgcgccgctgcagctgatgggcagcggtattggcagcctttcagtgtcccagctgctggccgctaccggggaaatgctgcaggctgccgttactggcgggtttaccatcgccaccactccccggccgcttcgcgaggtcgccgcggcatggccgcaggataacagccagaagcgcaccgtttttatcgtcgattaa

SEQ ID NO: 188706 - DNA, 624 bp, Klebsiella oxytoca
atgataaccattttaatcaataccaaaaatatctacacccgatatgccatcaagcagctgatgcaggaaagcgtagctcacgaggaaaacctcatttttgtagatagctacacccctggtaacatcgcagaggctcagatcatattcaccgaaatggcacccggagaaatatttttatgtcatgatgagttgaaatataaagccacgaaaagcttactgtttattcttcaggaaagggaaaatcaatgttcggaaagtgaactccccaactgtactaaagattgtttgtttttatataaaggtgattcgcttccggtgataagaaataaaataaaacttcatgtttatgcattcacctggacggacaatgaaacaggatatcgcccgcagactatccgctgcattaactgtccctataaatcgctgacccaggcgcagtcaaaggtcgttcatgccctgagtcttggacttaaccagctggaaattgcgaataaattgaacattaactataaaacagtgtattctcacaagaaaaatgtcatgcatgactttaagattgaaagcaataccgatcttaataagtttctaaacgtgctagagaaaagaaaacagtttatgacctag

SEQ ID NO: 188707 - DNA, 432 bp, Klebsiella oxytoca
atgtactcatttcagcgcatgaaacctgggcaaatcgcgcttctggcctcactttgtacgcaagaagacgaagataattttcgccagaagctattagcggataagcccgaacataaggtgggttttgtttttatgaccgggacatcggatgaaataaaaaataaactacagcgctgtatcatcggctgcgcgtttaagcatcagataattacgcgccaggaatcggccatttttacgttatgtcaggtcagccatcaggcgctgacccatgctttagcgaacagcatcaatggcgatcggatgagaataaaaatagccttagtcagtaatccaaagtggcttgccgtcgctatctacggcgaaagcgtgttctatcagcgattgagtcatgagcttacggggttttctctgtctcgcttttctccatcataa

SEQ ID NO: 188708 - DNA, 687 bp, Klebsiella oxytoca
atgaccgccctgcaacgacataccctgtgctggctggagccttcgacgctggatgaaatcgcggcgcagctggaggatgaattcggccaccttcctgccgtattgcggcagcaagcgcgggaatatctgctcagcggatcgctaccgggcatcgtacgtcgcggcctgcggagtgagaatagtgttccgcttgggttctctttcccactgcgctggcaagggcagcgagtgcgtctggccactgaagcggcgttatcagcgataacacgttactcaaccccagagcaaacggcatcgctctccattgcagagcgcactaatgcgataggcgcatttcatgccttgcgccaggcatggcgctggcccgggctccagctcggggtctggggttcggtagggctggaaatggccacgccgtggcgatggagcgatgcccactcggatctggatattcgcgttatccccaccgcgccaggcgaactcaacgcatgctgggcctgtttacgtcataccgaagagcaatttcagttacgtattgatggcgagattggtttagctgacggatacgcaatcaatatcaaagagtggttcagcggaagcgcaactctgctggctaaaggagaggatgatgttcaattaagatcgcgacagcaggtcacggcagcaatgagaacatatctctgttaa

SEQ ID NO: 188709 - DNA, 1104 bp, Klebsiella oxytoca
atgaacgatcccatcgccacgctcgaatggttggcccaggcgcagcccggaattcccttatttgaggaaatgccgcgccggacgctggaggacaaaggcattgccggcccaacggcggcgcacgtgattgaagagatccatacgccgcttaacctggcgctggtcaccttcaccaccggcagcagcgcgtttcaaaatatcgtcggcgtcacgcacgatgaactggcgctgcgcaccgccgccggaaagcgcgcgctggcggcatgtggcgtaaccgcagggcagcagatgctggtgacctacgcgccgctggtcaacgtgtttacccgccaggcgctggatgagagcggccttcgctggtcgtttttatcccgctcctgccgggacgcgctgctgatcgccctgtgccggcagccgccggacgcggtggtgggcgagtcctcttttttacgcgccaccctggagcaggcgctgaagatggagctggcggacaggctgccgaaaaagctgacgctgataacggccggaacgccgctggatgaagcgctggttccgctggcggcttctctgggttatgcgctgcacgatatgtatggctgtcaggaattcggctggctgacgcttgatggcatcccgctacgcgaagatatttcgctggttcccgctccgcagggcggagactggcgggaagcgatcgttggcggtttaccaaccggcgacagctttcccgtcgccgccggcggacatctctgcaatccgcagggaaaaatccagacctggaagcgccagcgcaccacgccggaatacgacatggtggtcatggcgaccaccgcgcggcatcgggagatcgtggagcgcaccgcacggacgattttgcgtattaagggacgcgtttgccacgtgtcaacgcagctgataaccgaggccacggccacccatattcgcctctggccaaaggcggttcccggcgaatgtaccgcaggcgttgcgcccatcgatattatcggtccgcaggcaacggcccagtttgacgctctgctgcagtcccagcgggatttacagcggcaggcgaaaaacgatcctgcctggtgtaaagcgcgatga

SEQ ID NO: 188710 - DNA, 891 bp, Klebsiella oxytoca
atgagccaaccaaccgccaatgcaataaggatcggtgagtgtttattaaaagcgctattaatggaagtttgcgcctggccgaaacccggcctggtgacgccgcactcgcagggcgcgcatgacgatatggatatatggctttttattaccagtagctctgccatagcgccctgtttttatgcttgcgcgcaggccggtgaatatcatcagggcgagctggcagatttatttcccaaaatacgtcttatcggtattgaatacgaatccaggctgctgcaatccacccgcgagataaatactcagcgcggcatactctttgccggagccgttctggccgccgccgccggctggctaaaaggtcggagacagccgctttccagcgagtcattaagccagtgcgtcgccgggctgtgcctcgatctctgccgcaacgatttcgccgcgctcgcccatcgttccgcgcaaacccacggtgaaaaactgtatctgcaatttggtatcaccggcgtgcgcggcgaggcggaacaaggcttcccgctggtctgccatattggtctcccagcgctgcgccaggcgctctcgctgagatttagctggcgtgaagcactggtacatacgctgctcgcgctaatggcgcactgcgatgatacgacggtactttcacgcgcaggtccccctgcgctgcacgaaatgaaacagcgcgcgcagcgcctggtcaacctgggaggaatgagccaccccggcatagaacatgagctcaacgaatttaatgcctggtgcgtggacaaatgggtcagtccgggcgggtcggcagatttattagcgctgaccctggcgatgtactttctttgccatcaattgcaagaggaccctaacgaggaagagatatga

SEQ ID NO: 188711 - DNA, 873 bp, Klebsiella oxytoca
atgcaccaacgacctcatttagctaagcaaacgatcgatgcacgtttgcttaaccagctaaatacaaaaacgcagagtaaaacggagaagttatcgcacagcgaaaaattagcttatatcaacgatgactactgcgagataacgcgtaattacacttcattttatgggatgaacatcctgggcattgtgcttttcttgcctgttgttattttgtgttttgtgggtattttattttccttatatgatataacattcaattttgaacgacatgttgaaagctggaattccaggtcgggcgattatcttttactatgttttggattttttatttcatttttcatgacgtttattttcgcagccatcgtaaactattttatcttcgcgccccagcattatccggttcgttttaatagaaaaaccggcaaggtttatgtttacgattacgtgatgtatagtatcacttataaattaacctatactttctggtggcatcatcctttttataaacgaactaaacctgaatgcaaagagtatgactggagccagattcaagccatcagtatatattcacgcaataagcactcatcatactccacaattcgctgcgtcgtttatgactccagcatcagtaccactatgatcgattcctttaacctgatatcgacggacgcgggtacggatgcgctgtttatgcctaactacaagctgtggttatggattagtaattatatgaaatttaacgatgagttattagatatgtccgttaacacgaaaccaggtatttatggacgcgaagtgaagtggcctgatgatatggataagaaatctaaagtatcatctttgaatgagtacagtaaaatctgctctgaataa

SEQ ID NO: 188712 - DNA, 1623 bp, Klebsiella oxytoca
atgctcagtcaaatacaacgctttggcggcgccatgtttaccccggttttactctttcctttcgccgggatcgtggtgggtatcgccattatgttgcgcaacccgatgttcgtcggcgaagcgctcacagcacccgacagtttatttgctcagatcgttcacattattgaagagggcggctggaccgtctttcgtaatatgccgctgattttcgccgtcggtctaccgatcggcctggcgaaacaggcccagggccgtgcctgcctggcggtgctggttagcttcctcacctggaactactttattaatgcgatggggatgacctggggccacttcttcggcgtcgacttttccgttgagccaacggcaggcagcggcctgacgatgatggccgggattaaaacgcttgataccagcattattggcgcgatcgtcatttccgggctggtgaccgccctgcataaccgctatttcgataagccgctgccggtgtttctggggattttccagggctcctcgtttgtggtgattgttgccttcctggcaatgatcccctgcgcctggctgaccctgctgggctggccaaaggtgcagatgggcattgaatcgctgcaggcctttttacgctcggccggcgcgctgggcgtctgggtatacattttccttgagcgcattctgatcccgaccgggttacaccatttcgtctatggcccgtttatcttcggcccggcggtcgtggaaggggggattcaggtttactgggcgcagcatttacaggcgttcagccagagcaccgaggcgctgaaaaccctgttcccggaaggcggattcgcgctgcacggtaactcgaaggtctttggttcggtggggattgcgctggcgctctactttaccgccgcgccggaaaatcgcgtcaaagttgccgggctgctgatccccgccacgctgaccgccatgctggtaggtatcaccgagccgttagagttcaccttcctgtttatttcgccgctgctgtttgccgtccatgcggtactggcggccaccatggcaacggtgatgtatatctgcggcgtggtaggcaacttcggcggcggcctgctggaccagttcctgccgcaaaactggatcccgatgttccacaaccacgcgtcgatgatgtttatccagatcggcgttggcgtgtgcttcaccgcactctacttcatcatcttccgcacgttgattctgcgcctgaacctgaaaacgcctggccgtgaagagagcgaaattaagctctacagcaaagcggattaccaggccgcgcgcggtaaaaccagcgccgccggggcagcggacaccaaactgggccaggccgccggcttcctgcaggcgctgggcggagcgggcaatatcgaaagcatcaataactgcgccacccgactgcgcatcgcgctggtcgatatggcgaagacccaaagcgacgacgtttttaaagcgctgggcgcccacggcgtagtccgccgcggcaacgggattcaggtcatcgtcggcctgcacgttccccaggtccgcgaccagctcgaaaccctgatgaaagattctctacagaccgaacaaaccaccatgacggaggcagtatcatga

SEQ ID NO: 188713 - DNA, 747 bp, Klebsiella oxytoca
gtgatctacaaatccatcgccgacagattgcgtctgcggctgaattcctccgatttcgaggtcggcagcccgcttcctggggaaaaaaaactagcggaagagtttggcgtcgcgcgcatgaccatccgcaaggcgatagatctgctggtcgcctgggggctggtggtgcgtcggcacggctccggcacctatgtcgcccgtaaagacctgcatcatgaaaccaccaatctgaccgggctggccgaagtgctgcgcaagcagggtaaagaggtgatcagccgggtattggttttcgaggtcatgcccgcccctccggctatcgccagcctgctgcggatacaaattgatgaacggatctacttctcgcgccgggtgcgctatgtcgatggcaagccgctcatgctcgaagacagctatatgccggtaaagctgtttcgcaatctgtcgctggcgcatctggagggatcgaagttcgattacatcgagaaggagtgcgggttaaccatcagcggtaactatgaaacgctgtcgccggtgctggcggacaggcagctggcgcagtcgatgaacgtgccggaacagacgccgctgctgcgtattacctctctttcctacagcgacagcggcgagtttcttaactattcggtgatgttccgtaacgccagcgtctatcaggtggactaccacctgcggcgcgtccgcgcggagaatccgttaacctatcccccagaacagcaccgccagtag

SEQ ID NO: 188714 - DNA, 633 bp, Klebsiella oxytoca
atggtcgaattgggttccggttccagcaggaatcttgaagacattcatctatcccgcgacgcctgctatctggttgtgcaaaatggcgatccgtcgaaaccggtcattgccgcggggcaaacctactttgcgttgcaaacccggcgtcaggaactgaaggacgatcaaacctttaaatctctacgagaggatgagaagcggctatttttgcgcaatgagctgaaagaacataataaacaccttgttgaaacggcccagctagcgggcgtacagacaacgctggatttcgctattttccagaaccatggctataaaggcctctatgacggactggatcaaaaagcgattcacgagcgtaagaggctgaagaaaagccaaaaaattctcgaccatatggggtctactgaacttgcagccaacctgtttcgcgctactcaaacggaagaaaaactacgccgggatgaggttgatacgaagcagttggccaatcaaacccattatgaagtaggtcaaaaagtacgccagactatcaaagaacttggcggcacgatgccggaagcgcttccttccccggagaaaagtattcagcagctaaaaatcgccgcgaaaaagaactgttcccctgagtcgtaa

SEQ ID NO: 188715 - DNA, 123 bp, Klebsiella oxytoca
atgaacgaacagcagccattcgaagcgatcaaaaatagagatgaggcggggagagagtattggtctgcccgaaaccttggccattactggactataaagagtggagaaattttcaaaaggtaa

SEQ ID NO: 188716 - DNA, 945 bp, Klebsiella oxytoca
atgaaactgaaaatattaaagcaagcatcattgcctgaccaacttacggcggagctgaacagtctgtatgaagtttatgaatatgaggcgcttacatgcgaagagttggcagtcctggctgaacaattcactattatgatcaccaatggtgaggccaccgtaacgcgccagctgatttccagcctaccctctctggagcttattgctgtgtttggcgtgggttatgatggggttgatgttcgtgctgcggcagatcatcgtgtggctgtcagccatacgccgggcgtattaacggatgatgttgctgatttagcgatggggctgatgttggcgacatcgcgacaaatcgtttctgcacagaagtttattgaggcgggaggctggcgtcaggggggctttcagtggacgcgtaaagtctcgggctcgcgtgttgggatcgttgggatggggagaattgggcaggcaatagcccgacgctgcgaagggtttgcgatgcagattgcttatagcgatcggaaagcaataccggggctggattatccgtggattgaggatatttcaacactggcgtcacaaacagattttttagtgatatgtacgccaggaagtgcggaaaaccaggcgcttattgatgaacgggtactctcggctctgggcgcgagcggcattttaatcaacatttctcgcggcagcgttgtcgatgaatttgctctgataaaagccctcgaacaaggaattattgccggagcaggattggatgtttttagccaggagccagaagtgccgcaggcgctcctgcgccgcgcgaacgtggtggtcacgccacatatggcaagcgcgacctggagtaccagggaggctatgtccaggttagttcttgaaaacgtgtcgggatgggcaaaaaataagactttggttacgcctgttcccgcgcttgaaccatag

SEQ ID NO: 188717 - DNA, 1311 bp, Klebsiella oxytoca
atgagcattgaactctatacatctacactaaaaaaactccatagcaaaataataccttttgtgattatttgctattttgttgcaaaccttgataaaaccaatatttctattgcggccttacaaatgaatgcggatttaggtctgacagccagcatgtatggtctcggggtgggaatgttctatatctcctatattatttttgaaattcccagtaatgttattatgacccgcataggtgcccgtatttggattgcgagaataatgataacctggggtattgtaagcgcagggatgtcgctggtacataccccaacgcagctctatgtgatgcgctttttgttgggaatggcagaggctgggtttacccccgggattatttattatatttcctgctggttccctaaaagtaatcgagctcgcgctatgtcattcttttatatggggtcggttctggcatcaattattggtttaccaatatccgggtttattttgaatatgcacggtattgctgatatcgctggttggcgttggttatttgcgatagaaggaatcccggctattatccttggtgtgatggttttatggttgctgccatcgagtcctgaaaaagcacactggttaacgggttcagaaaaagaatggttagtatcacaattagaggaagataatcgaaatgtaatggtcaataaaaatcattcgtggctgagcgctttgaaaaataaagttgtgctcttattaagtttggtgtggtttttacaagctttcggttctattggtattaccttgtttttacctttgattctaaaaagcatcgccagcgagcaaagcaattttgttattagcttactatccgcggtgccgtttatttttgcctgcttatttatgtatcttaacggccggcattccgatctcaccaaagagcgatcgttgcatatggggttaccattgattcttgccggcgtatcgctgggggtggctatctattcagataacctactgatctcttatatcctgctggtgcttaccgttgggttcaactttgctctgacccccgttttttgggcggtcaccactgaaaagcttgctggcgttgcagcagcagcctcaattgcttttattaacactatcgcgaattttgttggcttaggcctgcctcctgttttaggcaagattaaagatgtgacccatagctatcactacggcctgcttattgttgctatcgcactggtattaggaggaattatcggtatagccgtttcgcgtactggtaaagatacctccttaaagcactctgcccactcttccttataa

SEQ ID NO: 188718 - DNA, 465 bp, Klebsiella oxytoca
atgattatcggcgatatccatcacccggaatgcgcgggactgtcacccgttctgcttgaggccgtgaggctggccgttaaggctcagccgcagcagcgtgaaccggggcgttatgagttgcagggcgatgatatttatatgaacgtcatgcgcttcgccacgcagtcggcggaaagtaaaaaagcggagctgcacgaaaaatttattgatattcagatcctgctgcaaggcgaggagacaatccactgcggcgtggccgatagcgcccgtgagtgcgacacctggcataaagaagaggactaccagctgtgcgcagctatcgccgaccagcagcaggtgaccctgaagcctggcatgttcgccatttttttccctggcgaaccgcataagccgggcgtgcagggcgcagcgagcatggagataaaaaaagcggtaattaaagttaaccgcgcgctgcttgtctga

SEQ ID NO: 188719 - DNA, 1035 bp, Klebsiella oxytoca
atgaatcacgcgattacgatgggtattttttggcatttgataggtgcggccagtgcagcctgtttctatgccccgttcaagaaagttaaacattggtcctgggaaaccatgtggtctatcggcggtattgtctcctggctgatcctcccctgggccatcagcgccatgctgctgcccgatttctgggcctattacggttcttttaacgcctccactctgctgcccgttttcctgttcggcgccatgtggggtatcggtaatatcaactacggcctgacgatgcgctacctcggcatgtcgatggggatcggcatcgccattggtatcacgctgattgtcggcacgcttatgaccccgattcttaacggtcagtttgatgttctcattaacactaaaggcggtcagatgacgctgctcggcgtgctggtggcggtcattggcgtgggtatcgtcacccgcgccggccagctgaaagagcgcaaaatgggtatcaaagccgaagacttcaacctgaaaaaggggctggtcctggcggtgatgtgcggcatcttctcggccggtatgtcgtttgccatgaacgccgccaagccgatgcatgaagccgccgccgcgctcggcgtcgacccgctctacactgcgctgccaagctatgtggtgatcatgggcggcggcgcgctggttaacctcggcttctgctttattcgtctggcaaaagtgaaaaacctgtcgataaaagccgacttctcgctggcaaaaccgctcatcatcagcaatatcctgctttcggcgttaggcggcctgatgtggtatctccagttcttcttctacgcctggggacacgccagcattccggcgcagtacgactacatgagctggatgctgcatatgagcttctacgtcctgtgcggcggcctggtgggtctgatcctgaaagagtggaacaacgccggtcgtcgtccggtgggtgtactcagcctcggctgcgtggtgattattatcgccgccaatatcgttggcctggggatggcaaactaa

SEQ ID NO: 188720 - DNA, 2088 bp, Klebsiella oxytoca
atgagagtaatttccattgctggagtagcggcgttttttctctgtacgcacgcggctatggctacagaaaattatcaataccgtgtcgcatttatgccggatatccattttcatgacgtgtacggcgaatttcaggacggcgcatttagcgggctgaagaatagcaagagcgggcagaatgcgatgattcgcaccatgtatgcgcagcttacgtcaacgcgattatttaatgaaaactactttgccctgcgcgcggcgctggatgacgccgggaaaaaggggataaaactgatcgcgctgcccggagactttagcgacgatggacagtctgtgcatattcgcggactggtgaccctgctgaaggagtatgagcaaaaatatgccatgcgattctttgcaacgccgggtaatcacgacccgaaccgaccctttgatttacctgatggggaagaggatttcttagggcagggagggaaaacgcagcggatttttagttttggcgccaaagagtgtacaggctatcaggggaaaaccgcacttattccaacaggtgcggaattgccgactatctgtagcgaggagatggtaagccgcggctatgagtacattatgcaaatgatggcgccgttcggtatcgatccgcagcctgaagatatctattgggaaacgccttactcatcctatgggcagcaggattacacgtttgacaaagccaaacaggccagcgacttccgccagcggcagtatgagatttgcgcccagggaaccggcggtgcatatcggcaaccggattatggcccctgttttactgtcgctgatagcagctatctcgttgagccgataccgggtctatggctgttggccgttgatgcgaatgtctacgtgccgcgcgaggatgcggatctgacgaatccgcagtctgctaaaaacttcgcgggttcaggtgacgcaggctacaacaaaatgctcactcacaagcagcaggtggtggcgtggatgacgtccgttgccatgcgggcaaaagagcagaaaaagacgctgatcacctttagccacttcccgatggtcgaattcgataacggtgctgctggcgatctggagtccatctttggcgaaggtaaatttcagttgaagagggccccgaaagaggataccagtcatgcgttagcgaagacgggtattggcgtacacgtaggcggacatatgcactttaacgataccggcgtgcgtaaatatcctgacggtagcctgctatttaatattcaggcgccttccatggcggcctacgttccggcgtataaaatcctcaatttctctaatcggagcgagattgatgttcagaccgttatcctggacagcgtgccgcgctttaatgagctttttgaacactaccagcaagagtgggagcatctgaaagccacaggttctccgcacctctggaacaaagcggtgctaagcgcgaaggattattatgactttaccaattggcatatcaccgaacttacccggctgcgttttattcccgaagagtggccatgtgaaattcgtcagatgctttttagcctgaacggtgcggaaatgttgacgctgagtcagttgagcagccatacctcttaccatgatgttctgaccgtcccgatgagcagcgatcgtgccgtttgcgctaaaggagatgcaccgcctgttagggctatcgggcaaatttatctgcaaaagaatgccgcagcatggcagcttgcgcagcaaaaagcccaggctttggcccaggatgctggtatgacgctggatcagttcgcctcatggaatggctttgatttggcagtggatttttatcgtctgcgcaatgccgatgagctggcgctgcgcgatatttccgcacaacgcttacgcgaatatcagctgttgactcgcaccctggcgcagtcgttacctgctgaggcctcggcgctgacggcggatagcggcttcgaagccatcttccgcctgcgctttggcagcatttttagcgtgatagataaatatctgcggggtaacccctcacgaaatttccatctgaatagcgaaacgggtgaaatctccgcgcgttaa

SEQ ID NO: 188721 - DNA, 708 bp, Klebsiella oxytoca
atgaaaaaacaatacctctgtggactatttttagcagcaagcttttcctcgcacgccacctatattgattaccggcatgagtggctgggcgatcagcataaacaagaagatcgtatcaaaatggggcattctttaaataacggtatttactttagcgttgaggggaagtgggagagtaaacagggcggcttctgggataatctctcctcaaaagggaacgaatttgaacttggctacaaatataagctactggacaatctctccattactccctcgtttgcgctggattcgggggaacgcgatacggcatacaagtttagtgtgaagagcgtctataactggaccgatgctttctccagcggagttcggctgcgctacgctgttcgcgactatgaacgagagtatgatcccgatagagccagccagcactactggcaggcaaacttctatctaggctaccggatttatgacgtctcttttgattacgattttgaatataaattcgataccgactatccagccttacgcggaaaagaaaaagattatgtgcataatgtgacggtggcctggagaggaaacaaaacctgggtgccttacgtcgaattagggtatgtttcatatgatgatggttcatatgtaaaagatggcaaaacttatcgtgatgcctgggagatgcgttatcgcgtaggtattacctacaacttctaa

SEQ ID NO: 188722 - DNA, 2487 bp, Klebsiella oxytoca
gtgttgaagatttcttttatctgcccgctggaaaacgggctacatgcgcgacccgccagcgaactggagcaacgcgtcaacgcctttagcgcccggattgatctgtgtaatttgcgtaaccaacgacgggcggatgcgcgcagcgtgctggcgatgattggtgcggatgtggtctatcaggatccgtgtgaactggtgattgatggccaggatgaggcggcggcgtatcaggcgctgagccggtttattcatgatgaattggccgggtgcgatgcgcccgttgcggtggtttcaactcgctctgagcaacctttaccggtgttccttgcgcagacaacttcgccttttgtgcgcggcaacggcgtgagcccggggctggcccttggcaggacgatgctgctgggaacggtcgatctgtgggcgctggcgcagcagcaagaaccagaagaatccgcagctcagcataacgccatgcaacatgcgctgcttcaggtccgtcagcagctgcgccaggagcatcagcatgcacaaggggacgcggcgtcggtgttacaggcgcacagtaagctgctggatgacgcgcttctggaaagcacattactcgcgcctcgccagcagagaaataccctggcggcgctggcggcggcgttggatgagctttgcgctcctctgcgcgaaagcagaagcgtctatttacgccagcgggtgctggacctgcaggatctcgggctgcgtctggcggcatatctgacagcgcagccgcttactacgcttgcgcctttgcttcaggatacgattgtaataagccccgcgccgatgacccctggccagcttctggcgctgcgtggccccaggctgaaagggattattatgggcgatggcggcgaaacgtcgcatacggtgattctggcgcgttcgtttggtatcccgctgctcagtctgcctgtggcggaatcggggtcgataccgggtggtgaaacgctgctgctcgatgctcgccatggcgtagcgatcctctcaccggacgcggtggcgcagcgttggtatcagctggaaacggaaaaacatcagcgtattgctaaccgcctgcaaccgtttatcgaccagccaggggtcatgcaggatggcgaaggcgttacgctgctggcgaatatagccctggctgcggaagccgattcggcgtttgctgccggagcgcagggtattgggctgttccgtacggaaatgctcttctgcgaacgcagctcgccgcccgacgaagaagagcagtaccaggcttatcgtcatgtgctggagcaggcgcagggccgcaaagtggtgatccgcacgctggatattggcggcgataagccctgcgactacctgaatttacctgaggaagagaatccgttcctcggctggcgcggggttcgcctttatcccgcatttatggccctttttgtcacccagatgcgggcgcttttgcgcgccagcgccgtcgggccgttgcatattatggctccgatggtggcgacgcttgaggagattaagtggttgcatacgcagttcacgcagactcaggctgagctgacggcgcagggtgtggcgaccggaacctggtcactgggcatgatggctgaagtcccctcggtgctttatttactggataaagccgccgcctggattgattttgtttccattggcagtaacgacctggcgcagtattttctcgcctgcgaccggggcaatgccagcgtacgccatctttacaattactttgatccggcatttttgcagctgctgcaagagatgacggcgcgggcgcatcgtgcaggcgtggagattagcctgtgcggagaaatgggcggcgacccgcaggcgctgccgctgctgctgggggccgggctgcgccatatcagtatgtccgccagccgtatcggtagcgcgaaagcgcagttaacaacgctttccgccgttgaatgccagcagatgctgaaacaggtcgtggcggccgagagcgggcaagatgtggtggcccttttgcagaaacagtcgataactacctttccggtattcgatccccggctgatcctgctcgatcggggcattgacgctaaggctgaggtgattaagcgcctgaccgacaacctggaaattgagcagcgtgcgcgctgtggtgcggaggtggaagcggcaatctggcagcgcgaggccatcttttcaaccgccctgggttttgctatcgcgctcccccactgcaaatcgcccgccgttaccagcagcagcgtatcggttatgcgtctcgcttcaccgctggcgtggaatgaggaggtttccgtatcgctgataattatgctgacagtgagtgaggaggagaaaggtgaccatatgaaaatattttctcggctggcaagaaaattaatgcatgctgattttcgccaacaattgctggagggcaataacccgcaggcggttgccgaattgctgcaacgggaaattgcgatgtaa

SEQ ID NO: 188723 - DNA, 2598 bp, Klebsiella oxytoca
atgaaaaccgttcatttaattcagcatacgcactgggatcgcgaatggtattttacggagaatgattctcaggccctgctttattattttatggccgatctcctgcaacgtctggaagccgatgaaacattaggtccgtttatgcttgatggccaaaccgtagtgctcgaagattactttcaactggcaccggaaaatcgcgaacgcgtgcaggcgctggtggcggcagggcggttgttaattggcccgtggtatacccagacggattttctggtggtcggcgcggagtccatcacccgcaacctgctgctgggaacgctggactgcgaaaaaatggggccgcgtatggccgtgggctatattccggactcctttggccagagcgcgcagctaccgatgttcctcaatcagttcgccattgagcatgccgtgatctggcgaggctggagtgaatacgatagcgaaaacagcgagttttgctggcgcagccaggacggtagttgcgtcacgacggcagtattacctcagggctatggttgtgcgaaatggctgcctactgagccggagcaggcctggccgcggctctctgcgatcctcgaaaagcagggcctctttagccggagttcgcagctattactgcccaacggcaatgaccagtcgccttttgaatatggtgtacccgcgatgctggaggcgctgaacgcccggcaaaatcactatcattttatccgcagtgattttaagcgctattttaccgctcttgcgcagtccggcacgccgctggatacctttgaaggcgagctgctcagtccaaaatatatgcgtatccatcgtgggattttttccacccgaatggatatcaaacaggcgaatgcccggctggagaatttcctcagccgccagcttgaaccgctgctcagcgtcgcctggcgcctggggcttccatatccgcagcaggcggtagaggccatctggcgcgagatgatgaaatctcacgctcacgatagcatcggcgggtgtaactctgaccgggttaacgcgatggtaaaagcccggctgttatctggccaggagaaagcaagccagctctatgaactgaatatgcagatgctggcgaaagggatcagcgcgcagcagcagggtaagaaaatcctggtttttaatgcgttgccctacacacgtgatggcctggtagcgctgacgctataccttcccggcgctgattttcgcattgttgatggtgatgggcagacctgccgttggcaaatcttgcgcgaaacatcacaggacatgtcggtcatagtccaggagctgtcgaacagtagcgaagcggttttttatcgcaaatgcgaaatcttactggaagcctccgctctgcccgcctgcggctatacaacgttttatctgcaagaagggagggcgtgtgattttgccgctccgtcatcggcagacagcgcgctggagaatccctggctgcgcctgacgcttgagcaggggcgcatcgttctgctggataaacgcagcggtaagcgctgggcggacttaatccagttggtggatggcggcgatgcgggggatacctataactattccccgccggaaattgactggcgcattagcgcggaaggggcgctggtgtccgtcgcctggcagcagggcgcgttggccgatacgctggcgctgagctggtctattgctgctccgttgaccctggaagatcgcctgcgtcgtcagcgtaatgcgcggctcgacgtcaatatgctgattacgctggagcatcaacgtcccgtgcttgatgtgcaggttcacgttaacaacaccctgcgcgatcatcgcctacaggttgaaatacccactgacatcgcgcaaagcgtccatttcgccgatcagccgtttggcctgattcaccgcgataatcggccttcaacgctggatgtctggcaacaggaaaactggagcgaagcgccgaccgcgctctggccgatgcaaagtctggttatgatgcacgatggacagcaaggcatgagcgtggtgacggagggattacgcgaatatgagatccccgaggaacgtccgtccgtactggcgatcaccttgctgcgcagcgtgggatggctggggaaagccggcatgccctggcgaccgggccgggcttccggtatggctctcccctcgccggactcgcaaattgcaggtgaattcaccgcccgattcgccctgattccgctgcacgatggtgaaagcccgaacttctggcgcgaagtggaggcctggcgtacacctgctattggctggctggattcaggctgggcgcgattcaaaaccaacccttcagaacagaccttcccggcggcgtacagcctgctgcgctgggatacggcgctgcatttcagcaccttgaaaaaggcacagtatgaagaggcattaattttgcgtggctggaaccctggttcgcagccggttagcagcctgacgcctgaaacggttgatgacctgtgcgaggtcacgctcgccgaacagccttgcgccctccctcgcacatgcgtgcccgcctgcgcacctgttacctggcgcattgcgtcgaactctagaggataa

SEQ ID NO: 188724 - DNA, 1128 bp, Klebsiella oxytoca
atggctaagtttcaggggggagggaagccttcggcgggcgctgaagtgaaaaatgcgattatgacaggtgtttcctggatgctgccgtttgtcattgccggtgcggtgttaatggggattgcgcgtatcggcgcttctgcctggggcattgataatatctgggacgccagccatgagcaggccgccagcatcgtggtacaggcgctgcataagttcgatggttttggcggtctggcgctatccctgatgctgccggtggtggcggggtatatcagctttgcgctggcgaataagccgggcctggcgccgggtatggtcggcgggctgctggccagcaatctgggaaccggctttctgggcgcgctggcggcgggatttgtcgcaggctatatcgtgcgggcgctcaatcgctacgtaaaactaccgaaagcgctggcctcagccgggccaatttttattctgccagtgggcgggacgctgctgacctgcatcattatggcttttgtgattggcgcgccgctggcggcactgaatcacggtatggaaagctggctgctgtcgatgtccgggacaaataaggttctgctggcggcggtgattggcgggatggtgggctttgacctcggcgggccggtcaacaaggcggcggttaccacggcgatggcgctgctcgcttccggtatttacgatcccaacaccgccgcgcaggtcgcgataattgtgccgcccattggtctgggcgtggcgacgttaatctggtcatcgcgcttccctgaatcgctacgagaagcgggaaaagcctcgacgttaatgggactgatcggtgtttcagaaggggcaattccttttgcgctggcaaacccgcgcatcatcatcgttaacgttattggctctgccgtgggggcggcgatggcggtagggctaggctcggtaaaccacgcgccaatctctggattctatggctggctggccgttgagagctggcccgtttatgtcctgtctatcgcctgcggctcagcgataatcgcagtaggatcgctgcttatttttcgcggggttgcggagagtgcagagaaagacagcgtgaaaaaaaactcaccagcgcccaaatttaaagccagtcgatag

SEQ ID NO: 188725 - DNA, 243 bp, Klebsiella oxytoca
atgacgggtaacaaccgcggtcatgaagtgaaggttgagacgcaggggagcctcggtgcggagaacgttattaccgatgacgacctgatgcgggcggatgccgtcattattgccgccgatgtcgctatcgatggtaaagaacgttttgacggcatgattaagctggagtgcgccgtttccgatccgattaaatttggcgatgccgtgtttgaagcggtggagcaggaggtcgccaatggctaa

SEQ ID NO: 188726 - DNA, 543 bp, Klebsiella oxytoca
atgttaacctcattgatattgcgagtattaaaaagcatgactttaattttgctttcaatcgatagcaaaattaaagtcatgcttgctgattcatgctggtttaattccgtcaacgacctggctgaaagtgatattgctcctgcgccttgtgatgaaatccagataacccagaagtggtcccagctttgggattgcgcgggccaggcgctgtgttccgggtttagccaggccgttcagaaagaggggcactgccgccgcttgctgccgcaggctttactgtgctcgcgtaagcgcgatgaactggcgttcagcttccgtatttccagcctgcatcagcttgtagtgtgccgccacgccagcggtgccgatagcgacagcgtcgcaaataacccaatttgtttttctcaaagcacaatgcgcattctcgccattgtgctttttttatcgcctgaatcgaccagaaggatgcgttatgtacattgtttgtgtagctgcttgcccaacgggcgtggcccatacctatatggctgcggaagcgcttga

SEQ ID NO: 188727 - DNA, 882 bp, Klebsiella oxytoca
atgactcgttttttcgcgtttggagttgatgtcgtggcagctcagctgattcttcgcaaagatgaatttttcgcctctcccgctcaggcggtggcggtagcggatcgctatccgcaaaacgtcttcgccgagcacacccacgagttctgcgaactggtgctggtgtggcgggggaacggcctgcacgtccttaacgatcgcccgtggcgcattacccgcggcgatctgttctatatccgcgcggaagacaaacactcctacgcctcggtgaacgatctcgtcctgcaaaacgtcatttactgcccggaccggctgcggcttaactttgactgggcggcgcacattcccggcctgttcggtactccgtgggttccgcactggcggattggcagcagcggcatggcgcaggtcaggcaggtgattacccagcttgaacatgagagcagccgcagcgatgcgcaggccaataatatggccgagctgctgtttgcccagctggcgcttattcttcagcgctatcgctacgccaccgataatctggcggcgacgcaaagcgaagcgctgctcgataagctgctcaccgagctggcgggcagcctcaaccgtcccttctttcttgaccgtttttgcgagcgggaagggtgcagcgaacgcgcgctgcgccagcagtttcgtcagcagacggggatgaccatcaaccactacctgcgccagctgcgcatctgtcacgcgcagtatctgctgcagcataccgaacggctgattggcgaagtggcgatgcagtgcgggtttgaagacagcaactacttttcggtggtgttcaaccgcgagataggcatgacgccggggcagtggcggcagcgcagtcgcgtagtggtctga

SEQ ID NO: 188728 - DNA, 996 bp, Klebsiella oxytoca
atgtcgctgaaagccattgctaaagaacttgggatctcggtaacgaccgtcagccgcgcgttaaacggctatgacgacgtgtcgcaggagacgcgcgcccgcgtggaagcggaagcccagcgccgcggatatcgccccaatactttcgctcgtcgcctgaagatgggcaaaatcgacgccgtcggcctcgttttccccgtgcgccccgcgccgctgaataacaacgtctttctcgaaatggtgggtgaaatcagccacgaactggcgcgctacgagattgatttactgctgattgccgacgatgaacaggccgataagcacggctatatgcgtatggtgcagagccgccgcgtcgatgcgctgatcgtcgcgcatacgctcgatgacgacccgcgcctgattcaactgctctccgccggctttccttttctggcgctgggccgcagccgcctgccgcagccctacgcctggtttgatttcgataaccaggcgggaacgtatcgcgccacccgccacctgattagccaggggcaccgacgcatcgcgctgctgagcgaaaataacaatcaggcttttattacccagcgccgcaacggttatctgcaggcgctgcgcgaagcgggcctggcggatacctggctgcgcagcgtgccgcccacccgccgcggcgggtttcaggcaaccatggaactgctgcgcttgcctgaaccgccaacggcgattgtcaccgattgcaatactcacggcgacggcgcggcgatggccctggctcaactggggcgtctgactggcgataaccgtgttgcattagtggtttacgacggtttaccgcaggatagcatcattgaaactccggttggcgcggtgattcaatccacccgccagggtgtgggtcgccagatagccagcatggttcgccgcttaatcgccggtgacgatctcgcctcgctccaggtgctctggcagcctgaatttatctccggcgaaaccgcctga

SEQ ID NO: 188729 - DNA, 1278 bp, Klebsiella oxytoca
atgagcaccgtgaatcagacttcctcggcggtaatcgagccgccgaaactctctcgccggcgctgggggattattttgattttgctgctggctgcggtggtgaactatcttgaccgcgccaacctgagtattgctaataccaccatttcgaaggagtttggtttctccggaaccgaaatgggtctgctgctatcggcgtttctctggccttatgcgctggcaaacctgccggccggctggctggtcgaccgtttcggcccaaagaagatgttcaccggcgcgctgacgctatggtctgccgtgacctttctgatgggatttgtgaatacctatagtttcttctacggcctgcgggtgctgctgggggtggcagagtcgccgttctttacctctggtatcaagatcacccaaagctggttttcggataaagagcgcggcctgccgacatcgatcatcaatacgggttcgcaaatcgctaacgccatcgcgccgccgctgctgacgcttctgctgctgtgggttggctggcgcgggatgtttatcgccgtgggtctgctgggtataccgttgattctggcgtggctgaagttttatcgcgatccggatgcgcgggaagcgatgctgatccacaccggtaaggtggtgatggctgaggccgataagccacaggttagctggggcgagctgtttcgcaataaaacgacctggttcatgatctccggcaacttctgcatcatgtttactatctgggtttatctgacgtggctgccgggttatctggaaacgtcgctgggattcagcctgaagcagacgggctttattgcctcgattccattctttgccggtattcttggcgtcctttgcggcgggatgctctctgaccgtctggtgcgtagagggattaatgcggtaacggcgcggaaggtgcctattgtggtgggggcggcaatggcggcctgttttgtgatgccaattccgtttgtcagcaacagcggtaccgcgattacgctactgacgctgggctatttctgctcgcaaatgccgtccggggttatttgggcgctggcggcggatatggcgcccaaagagcaggtcgcttctctcggtgcgatccagaactttggcggttttctcggtgcagcgctggcgccggtgatcacggggattatccttgatgctaccggtcagttcaccaatgtctttattctcggcggctgcctgctgttccttggcgcctgtctctatggcttctttgtgcgtaaaccgctggcgcagtag

SEQ ID NO: 188730 - DNA, 492 bp, Klebsiella oxytoca
atgatcgtaaccagtctgaaggcatggcccgcacagtcgatggcttatcatccggttattcgccaggcgctggcttttcttgcagagcaagattttaaggatttcacgctgggaaaaatcgacctgatccctgaccgactcttttgcctgctacaggagatggatagcatgccttttgccgaggctcgtccggaatcgcaccgtcagtttatcgatattcagtacctgatttcaggccatgagcgtatgggcgtcagccgcgtggaaagcggtctgcataccgttgtggatgatcgaacgccgcagcaggacatcatgttctggcaggtagaagaagcagagacgcaggtaacgttaacccccggtatgttcgcgattttcttcccggaagatattcatcgcccctgctgccatcctctgggcggtggtgttagccatctgcgcaaagcggtcatcaaaatcgatcgcgcattactggaggtatcggcatga

SEQ ID NO: 188731 - DNA, 924 bp, Klebsiella oxytoca
atgaaaacgattaacggtattgtcccagtaatgctgacgccatttgccgctgacgaacggatagattatccggcgctggcgaaattaatcgactggtatctggagaagggcgttgatgcgctgtttgccgtctgtcaatcaagcgaaatgcagttcctttccttagaagaacgcgttgagctggcgcgttttgtggtactgcgcgttaacggccgcattcccgttatcgcttctggccatatcagtgatgatattgaagcgcaaaaagccgagctgctggcgatggcgcagaccggtattgatgccctggtgctggtgactaaccatctcgatccgcgtaatgaggggagcgacgttttctatgcagtgctgaacacgttgctggaaacgctgccagcctcgctaccgctcggcctttacgagtgtccggcgccttatcgccgattgcttaccgatgatgaatttacatggtgcgccaatagcgggcgcttcgttgtgctgaaggatgtgagctgcgatctaccgaccgttgaacgtcgcgtacgtctggcgcagggcacgccgctcaacgtcattaacgccaacgcggcgattgcctggccagcgattttggcgggctcacagggctttagcggtgtgtttaccaactttcaccctgaactatatagctggctgtggcgagaggggaaaaaccaacgcgcactggccgatgaactggcgattttcctctctctgggggcggtgagcgaaacgctgggctatccgaaaaacgccaaaatctaccatcagcgtctggggactttcgacagtatcacctgccgggttaataaagatgatgtgctgaataagtactgggggctgacggtgattctcgaccagattcgcgccggaaccgaacagtggcgtcagcgtatcgtgggctaa

SEQ ID NO: 188732 - DNA, 921 bp, Klebsiella oxytoca
atgcagggtaaggtatgtgtatttggctcgttcaacgttgacattgtggcgaaggtggaacgcttcccgcgaggcggtgaatcgctaatggcgctgggtagcagcctgggaccgggagggaaaggtgcaaaccaggcaacggccgccagtaaagctggtgctcaggtgcattttgttgccaaggtgggtaaagatcagttcagtcatttagcagcagatcatttaactcgctctgcaattcactcttacacgctttatcagtcagagagtgaaccaaccggtaatgcgattatttatgtttctcaggaaaacggcgaaaatatgattgctatttattccggggcaaatactactattacctatagtgaaattcagaaaattattccggaattatcttcatcagatattttattggttcagctggaaaataatttcgatgctactcattcactaatcaagatagcgcatgagctgggtaagcaagttattcttaatcccgccccctattctgctgaaattatccccagcatcccctttgtagatgtcattacgccgaatgaaacggaagcatctttattatcgggaatcgacattagcgattttgatacggcaaaagaagcggcgctacgtatcgccagactcggcgctaaaaaagtgctgattacgatggggtcgcgcggtgcgctgctgctggataaccgccagttcagtcatatacgcgctttcccagccgtcaccgtggataccaccggtgccggcgatgctttcaacggtgcgctggccgcatcgcttgccgccggaaatagtctggtgcaggccgctacctgggcctccgccttcgcctctctggccgtggagctggaaggggcatccaatatgcctgaatttgaacaggcaaacgcacgactccgtaccctctga

SEQ ID NO: 188733 - DNA, 555 bp, Klebsiella oxytoca
atgaacagacatctcacacccggctgcaaaacggtgattttaattaacggcattcccgcctcgggcaaaagcaccgtcacccggcagctatcggcaaccttcaatctgccgcagctgactatcgacggtattaaagagccgtttatggcgtgctttagcgaaatcgacagatctttcaaccggcagctgggctgcgccgcttatgaagtcatctggtcgatcgtcggccacgctccggcaggctgtatctggttaatcgacgcctggtttggttttcagccgcgcgaaacgttgcagcggcagctgcagcaggcgggcgttgaaaaggttctggagatctggaaccgcatctcgcccgagcttgcggtgtcgcgctatgccagccggttgcaggatcgcaggccggggcacccgggcgaagagtatctcccggagctggctcagctggcgcggcgggcggaacccatgcggctggggccggtgtttaccgtcgatcagcaaaaaccgctggagatggcgcctgttatccgttggctcgaagtacaaatgcagtaa

SEQ ID NO: 188734 - DNA, 216 bp, Klebsiella oxytoca
atgctgataaatctctgccagcctaatattgacagcgggtttattagcgcattttttgtgatcaatatctcttttataaaatgggctcgtcttaacagttacgtttttattttcttttatatcattaggttacttgaggagataatttcgccggcgggctgccccttttcatctttatgcccagcgataatgaaaaagcagaaatgtgataaatag

SEQ ID NO: 188735 - DNA, 963 bp, Klebsiella oxytoca
gtgacaataacagctgacctgctgtcgccgcggcggccgatcgtggttatcggcgccgcttttggcgacatgattctccatctcgatgcgctgccgcatagcggtagcgatgtttctgcccgcgatggcggacggcagattggcggctgcgcgtttaatgtcgcccgcgcgctctcgcgccttgaactccctttgataaacgcgataccggtgggcaatggcgagtgggggcaggccgttgcacagaaaatggcgctggaaaacctacccgtcctcttgcgccaccccacccacgataacggctggtgtctggcactcgtcgaggcgaacaaagagcggacgtttatcaccattgagggctgcgagcagcactggaacaacgagctgctggcacaaattccgcagccgaaggacgccataatttatgtctctggctacgagctggccagcgaagcgctgcgccagtggattctggaccttacggaagataaaacgctgtttgtcgattttggcccgcgtctgaacgatctggatattcactttatccaggcgctgctgggcaaagctcctgtgctcactctgaatcgcgatgaactcagcgtgctgtgcgcacgtttatacgatttggatagcgcgacccttgacgccgcttcacggctcgccagcgactggcatttacgggcgatctgtcggttcgataaagatggcgcgtgggtggttgaacctgacgcacaaccgcagcatattcctgcctgccgcgtgaaggtctacgatacgattgccgctggagacagccactgcgccggtacgatcgccgggctggcctgcgggatggatctgcgccaggccgcgctgctgggcaatgaagtagcggctattgtcgtcacccggccgggtgcagacggtgctccgggtcgcgaagagctacgtcagttccagagtcagcagcaaaacggccgctag

SEQ ID NO: 188736 - DNA, 141 bp, Klebsiella oxytoca
atgcagaagggcataaaagagggcaaacgcgccgcccttcttagcgtcgcgaaggccatgctcgaacgggatattgatgcggcggcggtgatggaaatgaccggtctgacgtccgacgatttgcagcagctccgtcattaa

SEQ ID NO: 188737 - DNA, 312 bp, Klebsiella oxytoca
atgaaaacactcccaatcatttttctgctaaccacgttctctgccgcagcgctcgccagcgaacaggatagcgctcaggcatgcctttccagggggatcagtaaaatggcgcaggaccctggcagcgatcggctaaagcatctggtcatcaccgacattaataccgaacgctatgatgagaagataggcagccagcatatcgcgacgcagctcaccgctacgctggaaaaagaagggaacccggtagggaaaatgctctgtttgctggaaaacgatcggccgctgtacgtttacttcagcgatgaccggtaa

SEQ ID NO: 188738 - DNA, 513 bp, Klebsiella oxytoca
gtgactcagactccgacagcgattcggactcggacagcgattcggattctgacagcgattcggattctgacagcgattcggattccgacagtgactcagactccgacagcgattcggactctgacagcgactcggattcagatagcgatgcggattcggacagcgactccgattcggacagcgattccgattccgacagcgactcggattcggacagcgattccgactctgacagcgactccgattcggatagtgattctgactccgattccgacagcgactcggattctgacagcgattccgattcggacagcgatgccgactcagacagcgactcggattctgacagcgattcggactccgacagtgattccgattcggatagtgactcggattccgacagcgactcagactccgacagcgattccgattctgacagcgattcggattcagacagcgactccgatagcgatatcgaggctgtaccggatagcaacagcccggatgtggtga

SEQ ID NO: 188739 - DNA, 597 bp, Klebsiella oxytoca
atggcgaaaattcaacgagatcaggtgattgaggcagcattagctctcttagatgaagtcggtctggaagcgttgacgacccgcaagctggctcaaaaactgggcgtggaatccgcgacgttgtactggcatttcaaaaacaaggccaatttgctggaagaaatggcttcagctgttttagccaaacaccatgcgctagctgtgcccgaagaaacttcggaatggacaagttggctggcggataacgcacgtagtttccgccgcgctctgctcgcccatcgggacggcgctctgttacatgcagggacatcgccgacccgggtgggaggagaaaccttttatccaaaactggtttatcttgttcgagccggtttcactgaggcagaagccgcaatgatattactcgcgattagcgaatacactttggggtgcgtattagaggaacagtcgcgaacgtacggtaatgataataaaatgttatcaaaaataccggcagaaattgcccatatcgaatcgttggtcaatccacatccggataccgcttttgagtatggtctgtctttgataattaaaggattatcaatgccatcagcttaa

SEQ ID NO: 188740 - DNA, 693 bp, Klebsiella oxytoca
atgcaacatgaatatattgacatattaattgttgaagacgagaacgaactggcgcaactgcatgcggaactggttagcaaacatcctcgcctgcgtctggttggcatcgcttcctcgctggccgaggcgcaggcgaaacttgccagcctgcaaccgcagcttattctgctggataactatttacccgatgggaaaggcatcacgctgatcagcaatcccctgctggctcacgctaactgctcggtgattttcatcaccgccgccagcgatatggatacctgtagcctggcgatccgcaacggcgcatttgattacattcttaaacccgtgtcgtggaaacggctgagccaatcgcttgagcgctttgttcagttcgccgagcaacagcgggagtggaagattgtcgaccagcagaacgttgattcgctgtatcagctacaggccaaaaattatcgtaaggataacggcggtaagggcatcgaagagaacaccctggcgagggtgcaaaccttgttcaacgccagaacgacacactgcttttctgtcgatgaagtcgtcagcgagacggggttaagtaaaacaaccacacgccgctatctggagcactgcgtggaggcaggatttttgcgcgtggagatgctgtacgggaaaattggccatccgcgaagaatgtacaggcgggcagataggtga

SEQ ID NO: 188741 - DNA, 1656 bp, Klebsiella oxytoca
atgccgtgcgtgatggtcatgagagtgtcatttcagataaaactgtttatttcactggttgcctttttctcagtgctatttgtcttactgggaagttactattatgtcgatgttggcagacagctatatcaggagatgagcaccagagctaaaatacagtcggaagaaattgcgcttattcctaatttgcgtaaagaggtagaagaaaaagatatcaaagccattcatcattttatgcagcaaatagcagcgcacagcgatgcgagctttattgttattggtgataatcaaggtcagcatctgtttcactccgtgttcgctgaccggacgggcacaacgctcgttggcggcgataacgaagaggtgctgcgcggaaaaagtatcaccaccattcgcaatggaggtttaggcatttcgctgcgcagcaaaacccccattttcaacgatatcggccgggtagtgggcattgtctccgtgggctatctcaccagctatctggataccatcaccgtcaataaggtggtcaacatccttattgccgccctgctactacttatcgcgctgtttattttttcctggtttttcacccgcagcataaagaagcagatcttctcgcttgagccgcgagagattggcctgctagttcgtcagcaaaaggcaatgatggagtctatttatgaaggcgtgatcgcggtcgatcgcgatctgcgaatcgaggtgatcaatcaggcagcgcgaacgctgctgggcttatcccagcccgcgagggcgctgcgtgggcagttaatcagcgaggtcatcacgcccgtgccgttcttcaccccgcgcaccatgctgctcaaggatacgcacgatgagatttgccgttttaatgatttgacggtgattgccagccgcgtgcgtatcatgctggaagattcgctccagggctgggtcattacctttcgcgatcgcaatgaaatcgactcgctcagcgcccagcttagccaggtgaaacgctacgtcgataacctgcgcattatgcgtcacgaacagttaaaccgaatggctaccctctccggcctgctgcatatggaacgctataaagaggccattggttttattcaggcgcagtcggaacacgcccaggagctgctggactttatctcttcacactttagctcacccacgctgtgcgggctgctgttgggtaaatccgtgcgcgcccgagaaaaaggggtcgagattaatttcgatcccgcctgccggatggatgacgctttcaccccgcttctggaagcagaattaatttcaattattggcaacctgctggacaacgcgattgaagccacgcagcgtgcgccgctcccgcacgatccgatcgaagtgctgattaagctgaatgagcgcgagctgattattgaagtggccgatcggggcgtaggaattaaaccggcgatccgcgaaaggatatttgaacgcggtatcaccaccaaaacgcgtggcgatcatggtattggcctgtacctgatcgaaagttacgtcacccaggctgacggctacattgaagttgccgataacaccccgcggggcgctattttctcgctctttattcccgccacgggaaccgcccgctgccctgctcaagaactggaagatattgactatgcaacatga

SEQ ID NO: 188742 - DNA, 1362 bp, Klebsiella oxytoca
atgagcactactgacgattctttatctgtaacccacgacccggttaatattcagcggccgtccctcaaagagcgctggtggcacattatggatacctggaaggtggggatcatcccgctgccgctgtttgtgctggcgggagcattaatcgcgatcgactgcctcggcggcaagctgccgagcgacatcgtggtgatggtcgccacgctggcgttcttcggcttcgcctgcggcgagtttggcaagcggctaccgattgttggcaagctgggcgctgcggcgatttgtgctactttcattccttccgcgatggtctattatggcctgctgccggacgtggtggtcgaatcaaccaccaggttctacaaatccaccaacattctttatctctatatctgctgcatcattgtcggcagcatcatgagtatgaaccgcactgtgctgattcagggcttcctgcgcattttcttcccgatgctctgcggcgaaattgtcggcatgatcgtcgggatgggcgtgggcatggcgctcgggcttgagcctttccagatcttcttttttatcattctaccgatcatggcgggcggcgtgggcgaaggcgcaatcccgctctccatcggctatgccgcgctgttgcacatggatcagggcgtggcgctcggtcgcgtgctgccgatggtcatgctcggaggcttaaccgccatcattatctccggttgcctgaaccagctcggcaagcgctatccgcatctgaccggtgaaggtcagctgatgccaaaccgcgctaatgcggacaccgccacctcccagccagcgttctccgggaaagcggacgtgacgacgattgcctccggcgcgctgctggcggtgctgctctatatgctgggcatgcttggccataagttgattggcctgcctgcgccggttggcatgctgtttgtagctgtgctggttaagctttgcaacggcgcatctccgcgtctgctggaaggatcccaggttgtttataaattcttccagacctccgtcacctatccgattctgttcgccgtgggcgtagccattaccccgtggcaggagctggtcaacgccttcaccgtaagcaacctgctggtcattgttagcaccgtctcctcgctggtcgcgaccggatttttcgtgggtaagaagattggtatgcatccgattgatgtcgccatcgtctcatgctgtcagagcgggcagggcggtaccggcgatgtggcaatcctgaccgcaggcaatcgcatgagcctgatgccgttcgcccagattgctactcgtatcggcggcgcgatcaacgtctctatctctctgctgattctgggcaacttcctcgtttaa

SEQ ID NO: 188743 - DNA, 873 bp, Klebsiella oxytoca
atgaaactcgcaagctttatctataaaggtcaacgcagctacggcatcgtcaaggccgacggcgtggtgaatttaggtcgccgtttgggggaccgctacggcgaccttaaggcgctgctacagggtaacggtatgtcggaggccacgcgctatctcgatgacgccgtcgacgcgccgctggaggccatcacctttttgccggtgattgagcggccggaaaaaatcctctgcgtgggcatgaactacgccgccaagcgccaggagtttgaccagcataatccggctccgacgctgtttatccgctttccggactcccagaccgggcacaatgcgccggtactgaaaccgcgtcactccagcgagtttgactatgagggcgagctggcggtgatcatgggtaaaggaggcgaaaatatccgccgcgaggacgcgctgcgccacgtggcgggctatagctgttacatggacggttcggcccgcgactggcagcatacctggtttacggcggggaaaaactggcgtcaaaccggggcgtttggcccgtggatggcgaccgccgatgagatcccggacccgcatcaacttgcgatccgcacctggctgaacggccgcatggttcaggaagacaacaccagcagcatgatccacaaggtcgcggagctgattgaatacattagcaccttcacccgcctgagtccgggcgatgtgattatcacaggctcgccgggcggcgtgggtaaaaaacgtaatccgccgctgtttcttgaggagggcgaccgcattgaggtggaaatcgaaaacatcggtcatctgagcaatacgatcgtcgaagcgccagcgcaacggctgaacgcagcgcgccaggaaagctga

SEQ ID NO: 188744 - DNA, 1026 bp, Klebsiella oxytoca
atgcacacgcaacccaccattgattttcgactcacggaagtggccgaacatcccgaaaggctcagccggattcgcgggctactggccgacagcggtctggggctggacaacgatatcattctgtttgtcgaggcgttgtccggttcgcagctggtgggatgcgcgggtcttgcggccaacgttatcaaatgcgtggtggttgatgagcagatgcgtggggtgaatctgagcgcgcgcctgctggcggaagtggaaaacgtcgccctcgcgcacggccattttcacctctttctgtgtacccgtccatgcaacaaagagcgctttgcccgcagcggcttctggcccatcgcccaaagtggcaacagcgcggtgcttatggaaaacacccccctgggcattgagcgttactgccgttcgctggctggccagcgcaggtgtggggagcgtatcggcgcgatcgtaatgaacgccaatccgtttaccctcgggcaccgtcatctggtggagcaggcggccaggtgctgcgactggttgcatctgttcgtggtgcgcgaagacgcatcgttcttcccgtttcgcgagcgtctggagatggtgcgggcgggcgtggcgcatctgtcgaacgtctccgtgcatgaagggtcgcaatacattatttcgcgcgccaccttccccgcctattttctgaaggagagcggagaagtgcagcaggcgtggagtgaaatcgatgtgctgattttccgcgattttatcgcaccggcgttagggataacccatcggttcatcggttccgagccattttgcgatatcacacgacagtacaatcagacgctgcatcaactgctgactccgcagatctcggtggtggaaattccgcgcatcaaggccactggcaatgccatttcggcatcagaagtccgccgattactcagaacacaacaggtatctcgcattcgggagattgtcccggagtccacgttcgcacacctcgaagcgcactacagcgcgcgtgcggaagtggcataa

SEQ ID NO: 188745 - DNA, 294 bp, Klebsiella oxytoca
atgaaaattgttagggagtcgctgtccggaacccaggagtccagcgacctgatggtgaaaatcgcccccgccgacggcggtctggagattatcattcacagtgaagtgatcaagcagtttggcgagcagattcgccagacgatcgacgagacgctgcgcgcgctggacgtgcgccagggattaattatcgtcgaggataaaggcgcgctggactgtgtgatccgcgcccgcctgcagagcgcgatcctgcgcgctgcggaagagcagaccgctgactggagaaaaatgcaatga

SEQ ID NO: 188746 - DNA, 876 bp, Klebsiella oxytoca
atgactacactccgtcgcagcatgctgttcctgcccggcgcgaacgccgccatgctctctaccgcatttatctaccgacctgattccatcatgttcgatcttgaagacgccgttgccttgcgtgagaaagataccgcgcgcctgctggtattccacgcgctgcagcacccgatgtatcaggatatcgaaaccgtggtgcgcatcaacccgctcagcacgccgtttggtctgttagatctggaggccgccgttcatggcggcgtggatgtaatacggctgccaaaaaccgacacgccggaggacatctacgagctggaaggccacctggcgcgtatcgaacgcgagtgcgggcgcgaagtggggtcgacccgcgtcatggcggcgattgaatccgcaatcggggtgattaacgctgtggcgattgcccgcagttccccgcgccttatcggcatcgcgctggcggcgtttgactacgtcatggacatgcagactgaacgcggggacggcaccgagctgttctatgcgcggtgcgccgtgcttcatgccgcccgcgccgcaggcatagacgccttcgacgtcgtctggtcagacgttaacgacgaagccgggttcctgcgcgaggtcgatttgatccgcaaaatgggctttaacggcaaatcgctgattaacccgcgccagatcgacctgctgcataacgcttacgccccgacgcaggaagaggtggatcacgctcagcgcgtgattgaagcggcagaggaaggcgagcgtaatggcctcggtgtggtgtcgcttaacggcaaaatgatcgatgccccaatcatcaaccacgcgcaggtggttctcgaacgtgcggcggcctccggcgtgcgtcgttaa

SEQ ID NO: 188747 - DNA, 1524 bp, Klebsiella oxytoca
atgaatcagacagagcttctccatgtgaactttccccatctgcgggatttaaaaccttttgataccgcccatagcgcgacgccgtggctcaacaatcctgaagagaaaaagaaccgtaagctgtgcgcttctgttgaagaggccgttttacgtagcggtttgcaggacggaatgaccatctccttccaccacgcgttccgtgaaggcgaccgggtgatcaataacgtcgtttctctgttggcgagaatgggattcaggaacctgacgctggcttccagttcgctgatgacctgtaacgatgcgctgatcgagcatatccagaacggcgtcattgcccgtatctacacctccggcatgcgcggtaggctggcggatgccatctctcacgggctgatggacgaaccggtacaaattcactcccacggcgggcgcgtcaagctgctgcaggatggcgaactgaatatcgacgtcgcgtttcttggcgtaccgtgcagcgatgaatttggcaatgccaacggaacccacggcaaatcgagctgcggctcgttgggctatgcgatggtggatgcgcacttcgcccgtaaggtggtgctgctgactgaagaactggtgccgttccctaatatgcccgccagcctggtgcaggatcaggtggactacatcgtgcaggtggagagcgtcggcgatcccgccaaaatcagcgttggcgcggcgcgtgtcaccagcaacccgcgcgagctgatgattgcccgtcatgcggcagatgtcattgagcactccggttatttcaggcccggcttctcgatgcagaccggctctggcgcggcggcgaccgcctgcactcgctttatggaagagaagatggagcgcagcggcgtgaaggcgcgcttcgccctggggggcatcaccggcagcctggtggatctccacgagaaaggcttaatcgaaaagctgctggatacccagtgctttgacggtcaggcagcggcctctctggcgcgtaacccgaaccacgttgagatctccaccaacgtttacgccaaccccggcagtaaagcgacgagctgcgaccagcttgacgtggtgatcctcagcgccctggagattgacgtcgattttaacgtcaacgtaatcaccgggtcggacggcgtgatgcgcggtgcgtccggcggacactgtgacgtggccgcggcggctaacctgaccattgtcgttgccccgctgctgcgcagccgtatcccaacagtggtaaaacgggccaccacgcgcctgacaccgggagaaagtatcgacgtgctggtgaccgatcatggcattgcggttaacccggcgcgcccggaaatccgcgagcgtctgcttgccgctggtctcagcgttgtggatatcaatgcgctgtatgagcgggcaatttcgcttaccggcgtcccaaaaccgattgaatttaccgacaaaattgtcggggtgatccgctaccgcgacggcagcgtgatcgacaccgttcgacaggtaaaggcgtcaatatga

SEQ ID NO: 188748 - DNA, 807 bp, Klebsiella oxytoca
atgactggtttgctcgcgattaaagcgcggccgattgatgcgcccgcgctggcggaagaggcgctatggctggaactggagctgacgccgaagccggggctggtagacaaactcaacaacggcgcgcatcgtgatatggatcacgccctgtttgcccgcagtatcgcggctattaccccgtggctggttcgctttactgagctgggggatgcccacgcggataaacccgctgctgaacagctacggattattcgcccgatagggatggcctgcgaacaggccatgtatgccgcgaccaacggcgtgaacacccataaaggggggatcttcgcgctcggactgctgtgctttaccgccgggcgtgtgaaaaatttaacggcggaccgcctctgcgatgagatgcgcaacatctgcgccgggctggtggcgcgtgagttagcagggcgtagcggcagagcgacggcgggcgagcggcagtatcagcagtatgggttgaccggcgcgcgaggggaggcggagagcggttttgccaccgtccgcgaggtattagcccgctggaacggcgatcttcatgagcttttgttgcgcctgatggccatcaatcaggacagcaacctggtctcacgcggtggcatcgacggattgcgctatgtgcagggatatgcgaaagggttgctggctaacggctgggatcggcgggcgctgcttgagatggacaaagcgctgattaggcgcaatcttagccccgggggcagcgcagatttactgtcggtgggatgggtgctggcaaaattaccctccgcctga

SEQ ID NO: 188749 - DNA, 453 bp, Klebsiella oxytoca
atggaaattgaactcaataaaagcgcgcgcgaacgtatttttcatgccgtactttttgaactgcttgcaaatgtactaatcgcgctttttctggcgtggtttatgcagatgtctttgctcaatacaggggcgctttcgcttatctcagcattaaccgcaacggtctggaactatatcttcaataaactctttgacggactgcaaaaatatcaaggtttcaaacgtaccgcggtgatacgcgcgctgcacgccgtagtctttgaggttggtctaatcgccgcgcttacgcccattgcaatgcttttgcttggtctatcctttgttgatgcactttacgtagaaatggggctggtgctgttctttctgccttacactatggcttataactggctttatgattacatccgctggctcttcatcgggcgaaggaagcagcctgccccccagcagtag

SEQ ID NO: 188750 - DNA, 669 bp, Klebsiella oxytoca
atgaatattaagttttttataggcttgtcgctatttatttcatattgctcatttgcagaaatgcactgggtgaaatcagaaaacattaaacctgcggaggtaaaaacagcgaagataatatactccggagaaataacccctcgtcaggtatccgagctaatatctgctcttgatgagataaataatgattatccgcaggcagattcaataaagatattcatttctagctttggcggaagtatggaaagtggatacctggcaatgcaggctattaaggggtcgaaaattcccgttgaaactattaatgcagggatgaccggttcttcagcgacgttattatattgtggcgcgcaaaagagattcacgcttgctgaatcttcatttatgttgcacccggcggcatcgccaaatatgaatactgagtggatccgccccaatgatattgaactgctaaggaaagacgtcgaagatggcaataagtactttaagacggtttataaacgttgtaccactctgagtgatgaggaaattaaaaagatactttacagtaatgacagtgcgcgatatttggtggcatctgaggctgaaaagataaaattatcacaaggcacgcttgcgggtattctcccgacgtccgttgcatattacattactaacgacactaaataa

SEQ ID NO: 188751 - DNA, 396 bp, Klebsiella oxytoca
atgtcctggtaccctatgcgcaaccgtcggctccctggtaaatggtttttgatactgacctgcttcgtcatggcattctgccttgttcagcgggcggcctatctgcaccattttttggcggacgccagcgcccaggcgcaggagagcgttctcagcgcacaggcccagcagccctcttcagaggaggctgagcaagggccttcgccctgccagctgagcgccaaatccttgctctgcacgcagccgcttttcttcgatggcgcattaccggccgttcttttattccttaccctgcttcagctgctcgccgcgggccgtccggtggttttgcgggacgatcccgttcgtccgcccacgctgcgaatacatctcaaaaactgcgttttccgtgagtga

SEQ ID NO: 188752 - DNA, 225 bp, Klebsiella oxytoca
atgtttaataagcaaatcatcgctgttgttgggccgctgctggttctgacgtcgttcaatagcctggccgagcccgggaacccgtcaattcgcgaacgtattgtcgatcaggttttaaaaccctgcgaaggtaaaaaagccggcgataaagtgctgatcgtcgaccatcgcggcggcaagcatgaagctatctgcaccctcgcggcggtgccgctgccggagtaa

SEQ ID NO: 188753 - DNA, 1074 bp, Klebsiella oxytoca
atggccattgatccggaactattatatatagaaattctggagactattctgttggctacgctggattctcaattctggaaacccgcgctgcagaaactgtcgttactgacaggacatcagtacgcggcattgctttattatgacaaaggtaatgcgcatcttatgacggattcattactttttgatgaaaaagtctttacggcctaccgggatgtttttctggcaatcgatcctgccgaaaaaatattgacggggttgcctgtagggcagatgtacagagacagggagtttttaggagataaatttattgctaatagtatttattataatgaatttcatcaccctaatgatttaaattatcttaccagcgtcaaactaggtaccgtcaacggttatgccacttatttatcgctgatgacggctaatgaagcggcctatccacagcccacgcaatttgacctgttccggcgcctcatccccgcgttaattaccgccagccagcttcatgccagatttgaacaccttcgtgacacgattaaatatcagggtgccgtcatggacaacggtatttacccggtctggcttgtgggtcatgccggtaaaatcctttacgccaacacccgggccgaaaattaccaccgcgcgagccatagcgcgatctggtctgtcggcgctgacacgctaagcctgaacacagacagcaaaaaactgcggcatgccattgaacaggccacccggacggaggcgcgcccccgggcaggattatgctacaccgccgggcggcaagcaaaaccgatcctggtcatcccgtcccccagcattcccggtgcggcttgcattatcatccccgagcctttcctcaccggcagcgcattcatggagctctttaatgtcaaacccgccgagaatgcggtagcagaactgctggtcagagggatgaccccggatgaatgcgccctgcatctcggcgtctccatcaccaccgtcagaacccaccttagtgcgctgtaccggaaaacgcatacccgtaatcaatccgagctgctgctcattatcagggctattcatagctaa

SEQ ID NO: 188754 - DNA, 573 bp, Klebsiella oxytoca
atgtttttactaaaaacacacgcatcagtaattgttttattttttatttccgccaccgctcacgctaatgaagcctcctgtcaggctcagcagtcctgcggtgaacatatcaacaaatatttaatttaccttgtgtttttcatcgttatctttggtaccttgctttctattttagtcatccgcaattcacttcctaaagcgtggtctttagccgatgcgctttctgaagatgttgaattatccgctaccgaagaggttaaagccaccagggacggcactgataccgtgacaaagaagcctctttatgacgatgcaggcaggccgcggctggtcaaagaaatgaaagccagttcgagccggctcattgcgctaatcggcatgctggttattttgtttatgtatattggcttcggctcgttattgctacttgactttggccgcaatggaaaaatatccaaccctgacgccctgaatgaaatcattaaattcctgatagccggaatgacattatttgcgccttacctggtaaataaagtctcttctctctttcagggcttaacctcgagtaaatag

SEQ ID NO: 188755 - DNA, 1065 bp, Klebsiella oxytoca
atggatactatcaacaagcgtatattcatcgcgactcgctatcctgtcagcacgcagcatggtcgcccaccgatagcgtttttagaacagttagtcgatactttaaatgctttacctgatgaggtttttgctgaaaataagcttcatgatatctatgccgtaatgaaaggggctctcgggccttacaccagccttttacaccgtaaagccgtcatgtgtgaagtgcttcgcgttcaggcggggtttgaatcagactggcgctgggatgccggcgttgattccgaaaacgcgcattcaatggctcacatggaaagcgaggaaaccggggcgtttcaggtgtcatttgacagcatcggcaatggaaaggcggaactcctgagttttgctaaacagcatggcattgatacagctgaaaaattcattacaaaaatgaaaacagatcacccgctggcgatagagtattgtgcccgactgttgcgtttcagcaccagctggtgcggtaccatcgtaaaccccgcgatggttatctctcacgtgcgacgcgatgccgtggaagaattccagacatttgttacgctacatacgcctcctgtgatgtttgccgatagcatcacgccgctgagcgacaaagaaaaaatgctcgacgtagtcaatattgccacaacgccggatcgttatgaaaaagttcaggccatcgctgcgattgagcttttcaaattagcccatgagcagtggccgcatgatggttgcgccctgaacctggctaacctgttacaggccggagggattgccgttcccgatattacgcaggcattagctttgggtaactatcttcgtgataaacgacaatggaaagtcatttctgtgggtgatcaacagcccggcgatgtcggttccacctgcggtcccgtagcgcaccacggttacgatcatatttatctggtgctggaatgcgaaggtaacgacataatgctcattgccgataatcaaaaaccagtccctcatcaacgactagccagtggaaatggcaaaacacccacaactttctttttgcggccagtctga

SEQ ID NO: 188756 - DNA, 1026 bp, Klebsiella oxytoca
atgcgagctttcggcaagcgccccgccgggctcaccaggccggagctggacgccatcctcggtttactctgcggctacagcgccagcgctcaggcgaaacgccgcggcatcagccacaaaacgctctacaatcaaagaaccgcaggattaaaaaaaatggtagaacaccatcctgaaatggcccccggttttcccggcagccagatacgagaacagaaaagtgagcccatcgccgccctttccgctttcgagcgcgaactcgtccatgcgatccacacccgacatatcttcccggttttccaggccattgccgatgaacgccggcaattaaaggggatggagatcctctcccgctggaaccgaaacggcagcgtgctgcttgccgatgagtttttaccgcaaataggctcggaatatgcctggctggtgctcaccgcttttgtgcttcaggaggcggtacagaatatcaaccggcattctggcgaatgctatttcgccgtgaatattcccgccgccgtcgccagtaatgataacctgcttcgcatgatggaaaccgcgcgccagcagctgcgtcagccgcagcggtcgcagaggctggtgctcgagttcgctgaaaacagcgacctcaaccgccacggcaaaacagccgacaatatcgcccgcctgcaaaagcgcggctttcgtatcatgctcgatggctgcttctcgcaaagcagcgtgatgtttccggtacgtacggtgagattcaacgcctacaagctggatatgagcatcgtcaatgatatgcagcgcgatccgcacgcgctcgccctgattaaaagcctcatccactactgccagttgaccgacagccgctgtctggcggaaggcgtggacagccgggataaatttaacaaactcaaagcgctgggcgtcgactcttttcagggggacgccatcgctgcgccggtaggcagggaaaacgtggcggagatgatggcggagctctcaggcgaagcggagccgcagtccggcgtcgcagtataa

SEQ ID NO: 188757 - DNA, 138 bp, Klebsiella oxytoca
atgcgcctgtccgggctaccgccccgcagagcgctgttaacccgtagcccggtcagcgcagcgccaccgggaagaaagccaatcctacagcagggccagcagaaatatgacttcgcccagctcaatcgccgcgcctaa

SEQ ID NO: 188758 - DNA, 303 bp, Klebsiella oxytoca
atgagcaacgaagcgatctcgattatcgcagtgctgaaggcaaagccgggccagcaagatgcgctgcggcaagccctgcaggcgctgctgctgccgacgcgtcaggagccgggcaacctcgattacgccctgtttcagctgcgcgacgcgccggatacgttctatatgcgcgaatcctggcgcaatcaggaagcgctggacgcgcatgtcgccctgccgcacttccagaattttatcgcgcagatgaataacctgcttgccgaaccgctgcggctggattacctgacgcccgtcgcaccctga

SEQ ID NO: 188759 - DNA, 942 bp, Klebsiella oxytoca
atgaaaaaatatatttatattgacactaatattataagtgatttcaaatccttcacacctgacaaatggcaattattcaataaagtacagaagaaatatcacttccctttttcacacgctcatttattcgacctaaaaaatagcccagaaaaatacttagttgaagacttggatctacttgaacgcatatctgataggtatggaataaatgaaatagacgaaaacgataaatttgtaattaaaaaactaaactcaaaattatatccattttttaattctgttatagaaactgaaataaaagatgaagaattagctaaaaagaacaggatttttttcttacctggttatgataagcataaaatcgaattatcgaaaatgcacaaggattcattcctaacccaaatgattgataaaaataacgggattttagatggaaactttcccaacttactaatgacttatttaactgaaaatatggattctccaaatatttataaaagcttaagaaaacaagtccaagacttgatttctcatgcaaaaaaatacaatacatttaaaaatctcccgaaagaatttgtcggatttcttgagatattttcaggttcaattaaagaagaccagatttttgaaaagttagttgactatagaaaatgggcattgaaatttacaggtaaagatttcagtaaactttcacaaccagaacagatagttgatatatatatgtctttagatatagtgaagggttttagtgaagatatttctaaaaaaaaccgttgggtaaatatgtatagagatgcacaacattgcggcaatgcaagtcaatcaaaatattatattactaaagagcaaaataataaaaataaatttaacttcataatgagagagtttaatttaaaatgcagagaaattactcttgaagatctcttgaaccgaatctcgtag

SEQ ID NO: 188760 - DNA, 852 bp, Klebsiella oxytoca
atgcaaaattggtcagccgcgcataccaaggaaatcaagaagtggttagatatcgatacttatcgcagatttgaagatctgactctcatacagctttatcatgaactgcttgcaaggacattgttcttcaaaccatatcatgaagaatttgaagcagaagccgtaagactctacatcgacaggatcttcagtggcaacccctttctcatcacagaaaagcatctcggctatctcacaagagaggataccctttaccagccaccacacttctttctgacaacaactgaaagattggcgcaactcagtattgtggggctgcgaaattcacttttcttttgggatggcggtgatgagtactcggttaaccgtgaattcctcgaaagccctgtatcagagtccctacctcgcctgttcagagatactgtcatggtcgaaatcgacttggcgaatggaactgacgaggaaatagctgaatccctgaaagccgcactacctcagtggcgtaaggtcagaggtatcgaggctgacactactgactcgatccgcttcggttatggaacgattaagaaaatcatcaactacagactgataccactaattgatatcctagtatggtcaaacctgcataaggtacgtatatcagaaaaccgcctctcgcgtctgctgtataccgatgatgatgacgaaagtgatacccggatgaaccaccaaatcagggacacggacagaccacttgctttgaaagctgcgagtataccgttcatccgacagtttcatctgtttatcaacaagaacagccatttgaaaaagatcagagtttcagaggtgatgaaaatctctgattctgactga

SEQ ID NO: 188761 - DNA, 207 bp, Klebsiella oxytoca
atgaatcagcacaatacccgccttattcgtttaccagaggtgctgcatcgcactggatacggtaaagcttggatctatcacctcatcaaccaaaatcgttttccttcccccgttaaaatcggtgcgcgctctgttgctttcattgaaagtgaagtagacgaatggattcaattagctatcgaaaattcaagaaagcatgttgcctga

SEQ ID NO: 188762 - DNA, 1299 bp, Klebsiella oxytoca
atggggagtaagtggaaagaatgtgaattaggcgattttattgagcttaaacgtggttatgatcttcctaaaagcactcgaaacgaaggtagcatcccaataatttcctcatcaggttttactgatttccatgacaaaccaatggttaaggggcctggtgtagtaacaggtcgatatggaacaattggtgaggttttctattctgaagaagatttttggcctctcaatacaacactttatgttgttgactttaagggaaacgatcctttattcgtgtattaccttcttcagacaatttcgtatgcagactatacagataaagcagcagtaccaggagtaaacagaaatcatctgcacaaggccaaagttaaagtacctatttatctagatatccaacaaaaagtggctgcccagctttatcaattagagaaaagagtcacgcttggtaagcaaatcaaccaaaccctggaacaaatgtcacaaaccctgttcaaatcctggtttgtggattttgacccggtgattgataacgcgctggatgcgggaaacccaatcccggaagcgctgcaatctcgcgccgaactgcgtcaaaaagtacgcagtagtgcagatttcaaaccacttccggcggatatccgtgcactgttcccggctgaatttgaagaaatggagttgggctgggtaccaaggggttggaaagaaggttcaattcctgatatagcctttataaattccacatcatggggtactaagaatcagcctgattatgttaactatgtagatctttctaatgcaaaagatgggataatcagttccattgaagaaatcccatttgaagatgctccaagccgagcaagaagaatattaaaaaaagacgaccttatctttggtcttgttagacctgcaaatagatcgtttgcatatgtacatgttgatggtttaactggtagtactggtttcgctgtggtcagatccaaaaatacaatttataaaaacttcatttattattttgttacctgtgacaaaaacgttgaggaactggcaagaattgcagatggcggcgcatatcctgcaattaagcctgatgatatatgctctttgcctttaatcatcccgccagaggagatcgttcagaggtttgatgagtcaacaagcaactttagggacctgatgaataattcattagttcaaaacgaccatttaacatccctccgcgacaccctgctccccaaacttatctccggcgagctgtctctggaggatctcccggatttagtgaaccaaaccgaacccgcataa

SEQ ID NO: 188763 - DNA, 1467 bp, Klebsiella oxytoca
atgaaaaaaattaaccactggatcaacggcaaaaacgtcgccggaagcgactatttccacaccaccaacccggccactggcgaagtgctggcggaggtcgcctccggcggcgccgacgaggtgaatcaggcggtagccgcggcgaaagaggcgttcccgaaatgggccaatctgccgatgaaagagcgcgcgcgtctgatgcgccggctgggggatctgatcgatcagaacgtcccggagatcgccgccatggagactgccgataccggtctgccgatccaccagaccaaaaacgtgctgatcccgcgcgcttcgcataacttcgagttcttcgccgaggtgtgccagcagatgaacggcaagacctacccggttgacgacaagatgctcaactataccctcgtgcagccggtcggcgtctgcgcgctggtgtcgccgtggaacgtgccgtttatgaccgcgacctggaaggtggcgccgtgcctggcgctgggtaataccgcggtgctgaagatgtccgaactgtcgccgctaactgccgaccgtcttggcgagctggcgctggaagcgggtattccggcgggtgtgctgaacgtggttcagggctacggcgcgacagccggcgatgcgctggtccgccaccatgacgtgcgcgcggtgtctttcaccggcggtaccgccaccgggcgcaacatcatgaaaaacgccgggctgaaaaagtactccatggagctgggcggcaaatcgccggtgctgattttcgaagacgccgatattgagcgcgccctcgacgccgcgctgttcaccatcttctcgatcaacggtgaacgctgcaccgccggctcacgcatctttattcagcagagcatctaccccgagttcgttaaacgcttcgccgagcgggcgaaccgcctgcgcgtcggcgacccgaccgacccgaacacccaagtgggggcgctgattagccagcagcactgggagaaagtctccggctatatccgcctcggcattgaagaaggggcgaccctgctggccggcggcgcggataaaccgaccgatctgcccgcccatctgagaaacggcaacttcctgcggcccacggtgctggcggacgtcgataaccgcatgcgcgtggcgcaggaagagatttttggcccggtagcctgtctgctgccgtttaaagacgaggcggaaggtctgcgcctggccaacgacgtggagtacggcctcgcctcgtatatctggacccaggacgtcagcaaagtgctgcgcctggcgcgcggcatcgaagccggaatggtgttcgtcaacactcagaacgtccgcgacctgcgtcagcctttcggcggcgtgaaggcctccggcaccggccgcgaaggcggcgaatacagctttgaagtgttcgctgaaatgaaaaacgtctgcatctcgatgggcgaccatccgatcccaaaatggggagtctga

SEQ ID NO: 188764 - DNA, 123 bp, Klebsiella oxytoca
atgaaaaatgaactatccggtatgaaagcttttgtcacggttgcggagctaggctcatttagtaaagcagccgagcagctcaacctcacgcaacccgcgctgactaaaaagataaaaaaatag

SEQ ID NO: 188765 - DNA, 1359 bp, Klebsiella oxytoca
atgttgaaatcaccactattctggaaaatgagcaccctgctggggtgtattttactgttatcgatcccgctgatgatcgtccggcagctgatcgttgaacgcgcggattatcgcagcgaagtcatcgaagctctggagaacagtaccagcggatcgcagaaactggtcgggccgctgatcgccattcccgtgaccgaggtattgacccgcattgaggataaaaaagaggtcacatatcaacgtcactggctgcattactggttacctgagtcgctggcgatagccggaaaacagaacgttgaatccagaaaaatagggatttatgaaggccaaatctggcacaacgatctggggattaaggcgcaatttgatgtttcccgtctggctgaactcagaaaagataatattacgttaggtaaaccggttatggtggtcggcgttagcgatgcacgcgggattggcaccattattgctccgaaaattaatggagaggcactgccggtggagcccggaatcggtatcagcggcagcggagagggaattcatatgccaatgccgctgttaactcctcaacaaaaaacgctggatgttgaattcacactcaacctgaacggaaccggaagcttctcagtcgcgccgctcggacgcaatagccaattacagctgaccagtaactgggcgcatcctggtttcctgggcgattttctcccggttagtcgtgaggtttccccatcaggttatagcgcccgctggcagagtagctggtttgcgaacaatatggcccggttttttatggacgatcgcgagattgagtggcgtcaactgcctgctttcaacgttaacgttacgacgccggccgatcggtaccagctgaccgatagggcgacaaagtatgccattctattaatctcccttacgtttatggcgtttttcgttttcgagagcctgactcagtgccgtttacacccgatgcagtatctgctggttggtttgtcgctagtgatgttctatctgatattactggccctgtccgagcatattggctttacgccgtcatggattgttgccagcctgataggggcgctgatcaatggggtttatctgcatgcggtgctgaagggatggcttaacagctttctttttgtctgcgcattgctgctgctggatggcgttatgtggatgctattgcgttcggaagatagcgcgctgctattgggaacgggagtgctactgctggcgctcagcgcgctgatgttcctgacccgtcgcgttgactggtacacgctatctctcccgaagccaaaagagaggcagcccgagggcggtgatgatgacgataagttgaggatctggaaataa

SEQ ID NO: 188766 - DNA, 309 bp, Klebsiella oxytoca
atgcaaaaaaaattgctgataatgttggtctgtgccacaggcattctttcaggctgtaaggaggaaggtatcaccccaaccggcgaagcatgtatgggcaccgataatgacagtctggtagaaggtctggagggaaaatgccagaaaggcgatatcattgcgacaaaacacccggcatatttttgtgatttcaaaagcgagattgctttaaataattacaacagtgcgatatgtatttataccggtaagcaagctgatgaacggattaaagaagccgacagcagctcaagaaaagacagcaaaccttaa

SEQ ID NO: 188767 - DNA, 279 bp, Klebsiella oxytoca
atgagcggtaagcgttatcccgaagagtttaaaactgaagcagtcaaacaggttgttgatcgcggttattctgttgccagcgttgcaacacgtctcgatatcaccacccacagcctttacgcctggataaagaagtacggtccggatccttccactaataaagaacagtcagatgctcaggccgagatccgccgtctccagaaagagctgaagcgggttaccgacgaacgggacatattaaaaaaagccgcggcgtacttcgcaaagctgtccgactga

SEQ ID NO: 188768 - DNA, 1452 bp, Klebsiella oxytoca
atgcagtttgaaatcatcgttgtactgctcgtttacctgttggtcgtgtttggtctgtcgatttacgcgatgcgcaaacgcagcagcggcagctttctcagcgaatactttctcggtagccgttcgatgggcggcttcgttctcgcaatgacgctaaccgccacctatatcagcgccagttcttttatcggcgggccgggagccgcctataaatatgggcttggctgggtgctgctggcgatgattcaggtgccgacaatctggctgtcattagggatactcggcaaaaagttcgccattctggcgcggcgctataacgcgattacccttaacgatatgctgcaggcgcgctaccaaagccgcgcggtcgtctggatagcgagcgtaagcctgctggtcgcctttgtcggggcgattgccgtgcagtttatcggcggcgcccgcctgctggaaaccgccgccggcatcaaatatgaaacgggcctgctgatcttcggcatcactatcgcgctgtacaccgccttcggcggcttccgcgccagcgtcctcaacgacacgatgcaaggtatggtcatgctgatcggcaccatcgtcttgctggttggcgtcgtacacgcggcaggcggattgcataacgccgtggatacgctgcagcatatcgacccgaagctggtatcgccgcacggagcgaacgatatcctcactccggcatttatgacctccttctgggttctggtgtgcttcggggttatcggcctgccgcacaccgccgtgcgctgcatctcttataaagatagtaaagcggtgcaccgcggcatcatcatcggtaccatcgttgtcgcgatcctgatgtttggtatgcatctggccggcgcgctgggtagagccgttttgccccacctgaccgtcccggatcaggttatcccgaccctgatggtgcaggttctccccccctgggctgcgggtctgtttctggcggccccgatggccgcgatcatgtcgaacgtcaatgcccatttattgcaggcttcagctacgatcattaaagatctttggctcagcgctcagccgacgaaaaaacataatgaacagaagctaaagcggatctcaacgatcgccacgctggtgctggggatcctgatgatgctggccgcctggcgtccgcctgagatgatcatctggctcaacctgctggcgttcggcggccttgaggccgtgttcttatggccgctggttctgggcctgtactgggaacgggcgaatgcaacaggcgcattgagcgcgatgatcgtcggcggcgtactctatgccatactcgccacttttaatcttcagtacctgggcttccatccgatagtgccctcgttgctgttaagcttattggctttcctggtcggaaaccggttcggtacctccgccccgcaagccgccgtattgactactgataaataa

SEQ ID NO: 188769 - DNA, 861 bp, Klebsiella oxytoca
atgctgaatcttgtctggctgaagagtttcgtggcggtgctggaccacaacgggtttcaggccgcagcccgccagttggacatcgcacaacccacactgtcccagcaccttcaaaaactcgaaaaccaacttggcgttttattggtccacagggggcgctctggctgtgagccaacccgggctgccttaaccttgttgccttttgcccgaagtctgctccggctggaggagcaggcgagatcttccattatggaggctcgacttcgcgttggggcgagctccaatattgggatttatatgctccagccctacatccgtcgttacaaggagctgggcgtagggcccgaggtggatgtggtaatagattccaatccgactattgcacggcatttatcggacggtgagctggacgtggcgattatggagtggtggcatgatctacccggattccatgctcaggcgtggcgtaacgagcccgttgttctaatcgttccgcctggtcacccgttagcccgtcgaaccgatatcgaccgcgatacgctgtctaacatggctctgatcggcggcgaacccggcaccggcactggccggcttttggcgacctacttcggtgagcatgggccatttccgacggtatctatgcagctgggtagcaccgaagccgtcaagcaagcggttaaggtcggacttggcgcatcgttggtgcttgaaagttctgtacgggaggaggtccaaaatggaagtctggtggctattcccgtgagtgagcctggccttagcaaggagctgatggtgatttatccgagcagcctggacaaacacaggccagtatactcgtttgttgggcatctctgtgaatag

SEQ ID NO: 188770 - DNA, 1011 bp, Klebsiella oxytoca
atgaaacccaaggttgtgataacccataagatccatgacagtgttctggatgaacttgcccaagattgcgagctggtcaccaaccaatccggcgccacgttgccccaggaggaagtggctgcgcgcgttgcagacgctgatgcgatgatggcgttcatgccagaccgagttggagtggagttcctacaggggtgtccgcgcttgaaggtgattggtgcagccctgaaaggctatgacaactttgatgtggatgcctgcacgcgtcatggggtttggctgacatttgtaccggatttgctaaccgtgcctactgcagagctaacggtcgggctgacgatcagtctcacccgacaagtcaaggcggcggaccacttcgttcgatccggtgaatttactggctggacaccacgcttctatgggcaggggatcgaaggctcacggattggtattgtgggtatgggggccatcggccaagcggtggcgcagcgcctgaacggatggggagcggatttaatctattcccagccggaacgtttacccgtgcagcatgagcaggcactgggtttgtcccatactcccctcaagatgctgctggcccagtcagatattgtgatcctggcactggcgctcaatgagcaaaccctccacaccattaatcgcgaaacgctaacaggaatgaaaccgggcgcattccttatcaatccctgccgtggatctgtggtggatgagggtagtgttctgcaagcgcttcaatccggtcagttgggggggtacgccgctgatgtgtttgagatggaagattgggcgagagaagatcgtccgagggagatcgcccaggggctcagggcccaccccaacacgctgtttactgctcacatcggatcggcagtcagccaggtgcgtctggctatcgagcaacgcgctgctcggaacattctgcaagtgcttcggggtgagcggccgggtgatgcgatcaatgatcccagtggccgcgagagcggcccatgctga

SEQ ID NO: 188771 - DNA, 831 bp, Klebsiella oxytoca
atgaactatacaacgacggaaccggcgactctgtcgccggccccgtcggcctccgtgctggatgagcacgcgaaaggctggcggaaaaaactcggacagtcgctgttagtgctgctcatcatttttgtcgcaagttggcacgtagggctgctcaatttcaatacacttgccaatggcgtgccagccataggcacactcattggcgaatctcttccacctgacttcaccaatgtggccagctgggtgtcgccgttaatcgacacgcttgcgatgagcattgccggtactgccattgcagtaaccttgtctgtgccactggcattcctggctgcgcgcaacacctctccacatccggtggtgttccaagtaactcgaacccttttaaacggtttgcgttcagtcccggaactgatcatgggcatcatcttcgtggctgctgttggttttggggcgttgcctggcgtactggcgctcggtcttcactccattggcatggttggaaagttttttgccgaagcgattgagcatgtagatgaggcgccagtggaagcggccgatgctgccggcgctactcgcttgcaggtgctctatcacgccgtgctgccacaagtacttcctcaattcgcggacgtgtccatttatcgctgggaatacaatttccgtgcctcgaccgtaatgggcatggtgggtgccggtggtattggcttcgaattgatgggctcgctgagaatcatgcagtatcaggaagtcagcgccattctcattgtcatcttgttgatggtcaccgtcgtggacagtctcagtggccgccttcgtaagaaattcaaataa

SEQ ID NO: 188772 - DNA, 864 bp, Klebsiella oxytoca
atgaagacaatgattcactctttgctggctctgataatgatgctcggcatccattggtcagcccatgccgcagatacagaccctgatcttttgaaagttgccttgctgccggatgagaacgcgtcagaactgatcaagcgaaaccaacctttgaaggattacctggaaaccactcttggtaaggaagtagaactgattgttaccaccgattactcctccatgatcgaagccatgcgttttggccgaattgacctggcttactttggtccgttgtcctatgtgatggccaagagtaagagtgacattgaaccctttgccgccatggtggtagacgggaagccgacttatcgctccatcattattgccaatgcggactctggcgttggctccttcgcggatatcaaaggcaagaaaatggcctacggtgaccgcgcatccacttccagccacctgatccccaagaccgtactccttgagaaggcagagctcgaagccggaaaggactatgaggctcatttcgtcggtagccatgacgctgttgcggttaacgtcgccaatggcaatgccgacgccggagggttgtccgaagttatcttcgagcatgtgatggaccgcggtttgattgatcggagcaaggtcaaagtgctgggctacagcggtgactttcctcaatacccctgggccatgcgttcgaacctggcccctgagctgaagagcaacattcagaaagcctttctgcagatcgatgacccggagattctcgacaacctgaaggctgagggattcgcggcaattaccgacgaagattacgatgtcatccgcgctatgggtggcctgctcaatcttgatttcgcaaaaatgtga

SEQ ID NO: 188773 - DNA, 801 bp, Klebsiella oxytoca
atgggcgtaacctacccgggaaacgtcctcgcgctcaaacccaccaacgttcactttcacaagggcgaattcaccgtgctactgggactttcaggcgcgggtaaatccactctgcttcgttcactgaatcacctggttaagcccacaaccgggaaggttgtgtctggcgagtttggtgaactgaccaaccgtagaatcctgcgacagcaccgcagccgcaccgccatggtgttccagcatcaccagctgatcgaacgatacaccgcgttacagaatgtgctgacaggcagacttgcgtatcacggtacttggcgaagcctgcttcccctgccccggcaggacctggagttggctctgcaatgcctcgaccgcgtaggtctggctgacaaagcgctttcccgagtagatcagttgtccggcggccagcagcagcgggttggaatcgccagagcattggtgcagcaaccatccatgattcttgccgatgagcccgttgccagcctggatccggccacttctgaaaaggtactcggcctactgcgcgatatttgtcaggaagatggaatcaccgcggttatttccttgcaccaattggaatacgcccagcgttttgcagaccggatcatcggcctttcgaacgctcatatcgtttttgacgatgctcctgaaaacctgaaatcgaaacacctggacgagatttaccaccggtcacccagcgtggtagctgcggaaggcaaaccagccatccataaacctaagaccaccccgataacgacagacgtactggagatagcacaatga

SEQ ID NO: 188774 - DNA, 1425 bp, Klebsiella oxytoca
atgttcccgcagttcttcgccaacaagccggtcgagcgattgatcggccccgggctctgcgccgatgaccttaatgatgatgtgctcgggcgctgtctggatgcgctgtttgcggccgatgtgtcgacgctttatcaggtgatggccgagcaagtggtcgccaagctggggctcaagcccacggcggtgcatcttgatatcaccagctttcacgtcgatggcgcctatgactgcgccgatggcgaacagaccggccggctgcaactggtgcggggatacagccgtgaccatcggccagagctcaatcaggtgatcctggagctgatctgtgagaatcaggccggcttgccggtgtacctgcaagcgctcagtggcaacagcaacgataacagcgcctttcgcgagacggttaatcgccacctgcgcagcctcaagtccgcgcaggagagccgctatctggtcggtgatgcagcgctgtactgcgccgagaccctgcacctgttgcatcatcagcgccagctgttcatcacccgcgtgccgcgcaccctgacggaagcacggaatgctgtggcagccattggtgaggcgccgctgaccgcgctgggcgatggctaccaggggcgctggctggatgccgactacgcggatgtgccgcagcgctggctgctggtgcgcagcgaaaaggccaaccatgccgagcagaaaacgctggccaagcacctgctgggcgacagcacccgcgagctcaaggcgttcaccaaactgtgcgcgcggcgctttgcctgtcaggccgatgccgaagcggagctggcgcgctttgccaacgggctgaaactactggagattgtgcaaggccacgtgctgacggagcccgtttacgccagcgccggcagacccaaaagcggccagcaacccgacagctatcagtaccgcatcgagggtcaggccgctacctgcctggaacgggtggaggaggccaacgcccagacgggcgtgttcatcctggccaccaacgacctgagcggcaccctgaccatggccgaactgctggccacctacaaggcacagcaaacggttgagcgcggctttcgtttcctcaaaagccccgagttcctgacctcatcgctctatctgaaaaagccggagcgcattgaagccctgttgatggtgatgacctgcagcctgatgatttacgccgcgctggagcaccgtatccgcaaagggctggttgcccaaggccgcagcgtgccggacatgaagaagaaaccgacgcagaagccaaccgcccgctggatcttcctgtgctttggcgggatccacgagtacagcctggggggcgaaccagcccaagtgaccgacatcaacaccgttcaggagaccatcatcgacgttctcggccctcgataccggcagatttattcatga

SEQ ID NO: 188775 - DNA, 582 bp, Klebsiella oxytoca
atgaaaaccaaattacgcaaaaccgctgttcccgcagtggccgcagcaatcttcagcctgatgtttgccgccagcgcccaagctcattgtgatgctctggacggtcccgcgattaccgaagcccgtgcggcactggagtcaggcaatgttaagcccttgctcaaatgggtgccggcaaaggatgaggccgaaatcaaaagggtattcgccgatgtgctccaagtccgcgggcaaagcgaaactgcgaaaaacattgccgatcagcatctgttctcgacgctcgttaaggttcatcgtgcctccgaaggcgaaccctttaccggcatcaagccttccggacagattgatccgggtttaatggcggcggatgcggcgttgaaaaacgggcaaattgatcccctcgtggcaaatataacccgcaagatcgagaacggtattcgtgagcgttataatgaggctcagcgtgcaagggccatggctgatcaaagcgtcgataaggggcgtgcctttgtcgctgactacgtcaattacattcgctatatagagggcgtgcatggcgctgctggagggcagggggactaa

SEQ ID NO: 188776 - DNA, 1140 bp, Klebsiella oxytoca
atgtatctgacactcaccgacattgtgctgctgacgagcatcattcaatcgctggctcttgccgtttttctcctacttccatccaacagtgggctcatatctaaccgactcctggttgccactctggtgttcttcgccgccgggctgggagagatcttcctctatggcagcgggcttgcgctccagtacccaaacttcgcctacctcggaacactcatcggacttctacaagccggcacgctctatctatatgcgcaatcgctgatgtatcagaatttccagttaagcgggaagcatctcgtgcacacgttgctcttctgggtggtcggcgcaatttttctgattgaatattatttacagccaagcgagaccaaagttcagattctgcttgaacgggaccacccgggcgtacttacctctccccttcttgcagtcgctattcacgcggtctttctgggctacctgtacgcgactattcgtgcgattaaccgtttcggccttggtattcgacagattttctcgagtattgaaaacaaacaacttgcgtggttacggacgcttctgatcggctatgcagtggcttggaccgtgagcatgatgtactgccttacagcgcatgtgtttagaagcgtgcccggaaccgagtgggtggccggcgctggcgctgtaacgggcttcattttcatcaattttctgatgataaactctcttcgccaacccgttgttttctctggattggcagcagaccaggtcgccttgctggaagaagagcccacgccgcagtttgatcaaactttaaaggtcaggctccaacagttaatgcaccaggaaaagccccacttgcaccccaacctgaccctggaacaactttcacggaaattgggcgccccttcaagagaggtttcacgggccattaaccaaggctttggctgcaatttctttgagttcgtcagtcgctatcgcatcgacgaggcgaaatcgcgcctggccgatgcagccaatcaggcaaatattctgcaaactatgtatgactctggcttcaactcgaagtccgtattcaacactgctttcaagaaagagacaggatttacccccagtgaatatcgccgacgagccctgcagggcgatatccgaccctag

SEQ ID NO: 188777 - DNA, 1326 bp, Klebsiella oxytoca
atgaccactagaaccagcctgcaaaaaacactcggtatcggcctgacactcggtgtcaccctactctggctgttgggcgtgaccgcttcgggactggtggcacagcatgaaatgaacgaggtcttcgacagtgccctggaagaaaccgcccagcgcatactgccactggcggtcaccgacatcctgaaccgtgagaacggcgcgggcaatcaaaaggccccagccctgaaagaccatgacgaatacctgacctatctggtacgggacgaagctggaaatattctgctccagtcccacgatgccgaccctggcgtgtttagcaggacccccgcggaagggttttcagatactctgacccaccggctatatggcgtatctgcagtcagcaataccatctatcttgaagtggccgaacccttggcgcaccggcgtgaatccgctctggaggcgggattagccttactgttgcctttactggtgctgattccggtcagcctgttgggtgtctggtggattgtccggctttcccttcgtaaggtggtcgattttcagcaagacattgaatcccgcggcgcgggagatctgtcccctgttgtagaagagcagttaccccgtgaatttgaaccaatcgccggtgccatcaaccggctgcttgagcgtttgcatcgtgctctcgaatcagaacgcagctttaccgccaacagtgcccatgaattgcgaactcccctggcaacagcgcttgccaaagtgcagcgactgaaaaccagaatgcccgatgattatctcaagaatgatgttgcagaaattgaagaagcgttacgcagtctctcggtgctgtccggaaaactgctcgagttggcaaaagcagaaggtggcggtgcactctcacaaagccagcaggatcttgtgcccatcctcgcgatgattgcccgggattttgaggcccaggcacccgggcgagttgttttatccctgccggagcgcgaagtgaactcctttcttgatcccgatgccttcgccatcctggtgcgtaacctgatcgagaatgcccttaagcatggttcccgtagcgagccggtgaagatcaacctgaacgataatggggttttaagggtctgcaatggcggtgcaagagtgccaccggaacagctcgctcttttaagaaaccggtttgcacgcgccaaaacggacgctgcaggttctggcctgggcctcgcgattgccgatgcgattgctaaaggtgccggcatgaccctgcatctcagatcgccggcaacaggacggcaggatggttttgaagcggagctgaatctggcatgtatctga

SEQ ID NO: 188778 - DNA, 666 bp, Klebsiella oxytoca
atgcgggttcttttggtggaggatacggcgggattgggcgaggcggtccgggatcagattgcggacgacggccacgccgtggactgggtgcaaactctgcgctttgctgaggcgagtatcaggaccacagcctacgacctgattctgctggacctgatgctgcccgacggccatggcttcggctttttgcgaacgatccgggctaccggaataacaacaccggtgatcattctgaccgccagggatcaggtgtctgaccggattgaaggattgaatgccggtgctgacgactacctggtcaaaccctttgatctttcggagttgtcggcccgcgtggccgcggcggctcgccgatatcgcggcaatccaagcccgatcatacaagtgggcgagctgatgattgatcttggcgatcaccgcatcagtcgcaacggcctgccggtagaacttacggcacgggagtgggcattgtttgagggctttatccagcgacccggaatgctgttatcgcgatcgcaactggaggatcgtctatacgctttcggggccgaaatcgaaagtaacaccatcgaagtttatgtcagccgtctgcgtaaaaagctggggcgggacgctatcgtaaccgtcaggggaatgggctatcgcctggaaacacatgaccactag

SEQ ID NO: 188779 - DNA, 1317 bp, Klebsiella oxytoca
atgatgcggatgatttttcctttcgttgtgttggttttgggcctatgggcctggaacctctttgcaggtcctggggccggttctccctgggcagtctatgaccagagcctgctgctcagtgggctgttatccattgctctgatgtcactgaccatgatgctggcactgcgcccagcctggttggagagaccgctgggcgggttggatcagatctatcgcacccacaaatgggcgggcattctggcagtggtattcgcggcagctcattggctgattgaaatgggtgacgatgttatagagtcgattttcggaaaggccggcaggctgcacgatcaggattattccgggttcatcgacaccatgcgcgatgctgcggaagaggtaggggagttcgccgtctatctgctgttcgccatgctgttgatcactttgtggcgcaagtttccctacaaatactggcgttatttgcatcgcggcatgccggtgctttatctgttgctcgctttccacgcggcgtggctgactccgctgcaatggtggcagcagccaatcggactactgatggccattttgctctttggcgggagcatcgccagcgggctatctctgaccggcagagttggtcgtcgtcgccaggttcgcggcatggtcaccgcgatcaaaacaccagaccgggacgtcaccgaagttacctgccacatggggccggcatggcccggtcaccgtgcggggcaattcgcctttgtgaccttcgaccggattgagggtgcgcacccgttcaccatcgccagtgcggatcgggaaaatggcactgttaccttcctcatcaaatccctcggagactttacccgcaatctgagccagaaaatcagcgtggggcaaactgtaaatatagaaggcccttacggctgttttaacttcgatcgccgcaaccgcaaatcccaccagatctggatagccggtggcatcgggatcacgccgtttctggcctggctcgaagctctaagcagcgccaccgacgccaccgtgcctgaagccgatctgcattactgcacgcgcaacgccggccaggatcccatggtggatcgacttcgggcgctttgcgatggctttcccggaatacacctcgagattcatgacagcagcaaggggcagaggttgtctgccgagacgttgtctaccaacggacgctcggcagcaggcgcagaggtctggttctgcggcccggcagggctgggggaagccattagaaacggcttgcgggcagcacccttccgcctgactcgcttccataaagaagcttttcagttccgctga

SEQ ID NO: 188780 - DNA, 381 bp, Klebsiella oxytoca
atgaagaccaaacccattattctgagcctgtctttgttacttctgagcggcaccgcactggccgatgacgactgcgatgatccggtggcgagttggcagccccgtgaaaatctgcgtgaaaagctggaagccgaaggctggacagttcaccgaataaaggttgacgacggttgttatgaagtccggggcctcgatgccgatgggatcagggcagaagcctctttcgcgcccgcttcattgaccatgatgaaatgggagcgtgaagacagtgacgatgaggagagggaccgcggcaacaggaaaaatggacaggacaatcccaaaagtcaggcgccacgcaacggcatcgtcaaggggcgtcccacggttaccgttgagtaa

SEQ ID NO: 188781 - DNA, 474 bp, Klebsiella oxytoca
atgaaaacgtttgttctcacttgcagccttttcgccgccttggctttaccggtattcgcccaggcccgtgacgtgaccttcactacggaactacagaattacggcggcgatggagcctatctggcgctgtatcttaccgatgccgccggagagtatcagggtaccctttgggtttccgggaagaaatctaaatactacaaacacctgggaggctgggcccggggcagtgggcttgatcctgcagagtatgacggcttgactggcgccagtgttaccagtggccgcacgctgaaagtgactgtgaacctcgatgattcgctgatcgacaacggctatgaggttcgagtcgactctgctgttgaagatatgcgcgatatcagagccgatgtgatagcccccctgaccaccgaagggtccggaaagccggtttcaggacgtggttacgtgcgcgctctgacctacgagcttcaataa

SEQ ID NO: 188782 - DNA, 2217 bp, Klebsiella oxytoca
atgttgcgcaagttccacagtttaccgggtttgcttgcaggcgtgttcctgatcgttctctcggtcacgggagctgtgttggctttggctccgacgctggatagagtgtcagcggtcattccggcttccggtgaagtcagtattgccgagctggcagaccgggtcgttgctcactatcccgggactgagcagatcgtgcgagagccttctggcaaggtcattgtctattacagccgtgacggccaggccggtgcggatctggtgaatccggtaacaggtgagggcacgccctacgaaccttccgcattctttggctggatcaaggatctgcatcgtgcgtttatgctggatgatgccggtagagcgctggccggcgtattggctgttttgatggtgcttctgtgtctttcgggaatatttttgatagcccggcgtaccgggggttggaagaatatattaagaccgctttccggctctggcgggaaacgaatccatgccgaattggcccggtttgccgtgctcggcctactgttatccgcgctgaccggcagctatatgtccgcacagcgctttggtttgctggctgaagcgcctgacaccgggccaaggtttccggctgaggtctcgggcgggcaaccatcgcctgtgggcaccttaaaagccctaggcaatttcgatcttggcgaactccgggaactggtgtttccctatcccggtgatccgcaggatgtctattcactgtcaaccgccggcggctccggattcgtggaccaggctacgggcgagttgctgcagttccagccgcgctctgacagcggcgtattgcaggactggattgtacgtttgcacaccggtgaaggcctatggtggcttggcctgattcttggcgctgcggcactgactgtgccagctctctcgataacaggtgcaaccatctggtggcagcgtcgccggtcttcagggcagcttcctgacaacgccgatgccgctcaggcggatacaattattctggtcggctccgaaggtaatgccacctggggatttgcccgggaactccatagcagcctgaataaggccggtttccgcgtgcattgcagcgagatgaatgccctggctaagcagtatccgcaggcttccaggctgttcgtgctgacttcgacatacggcgatggtgatgcacccgcatcggcccggcagtttatggccaggctcaaagaattccgggctgagaagaacctgcgatacacggtactgggttttggtgaccggcagtttccgaacttctgtcagtttgccttgtcggtggatgctgcgctcgccggtaaaggcgtcagccgtttgcacgccattgaactgattgatcggtgttctgcctcgcaattcagtgagtggggaaaccgggttggtgaggttatcggtactccgcttttcttgaactactgtgcattgcagccagcaacggtcaaactggaactggtagaaagggcggattacgggattgcggttcaggcgcccaccagtatcttccggttcaaaccggcggagcagggcggatggctaacggcttctccaagaagatttaaagcgctgccaccgttcgaggcgggagaccttttgggggttattcccccacacggtcaacccccgcggttctactcgctcgcgtcctcggcaaatgacgaaattgttgagatatgcgtccgtaagcaggccggcggtctttgctccggttatttgcatgacctcaagccgggtgattgtatcgatggcttcatccgccccaatccaggctttcggccagctaccggtaaccgaccagtgattcttgttggtgcaggtgccgggattggtccgttaaccggtttcatcagaaacaataccagttgcaaccctatgtatctgtactggggcggtcgcgatgccaggtcagattttctctaccaacctgagcttgggcgctatcttgaggatcatcgactgagcgggctgaacacagccttctcaagaacagacgagcgcgcctacgtgcaggataagctcaaacaggatgaattagccgtgcgacagatggttaacaccggtgcgcagatactggtctgtggtggccaggatatggcggcggctgtgcggcaggttatagaagacattctcaaacccttgcacatcgatattgaaactctgagaggccagggacgttatcttgaagatgtatattga

SEQ ID NO: 188783 - DNA, 753 bp, Klebsiella oxytoca
atgccatccacagaaaatgaaagactgctcagcgagcaccagcctaatgccgttcgtgcacggcttgctggtcccgttaaggcctcgacgctaccagatgctgtgcttggcggcatcgatggctgcgttacaacgtttgcggttgtatcgggtgcgttcggcgcaggtttctcgccacaggttgcgttggtactcggctttgcaaacctgattgcagacggcttcagcatggcggtaagtaattacgaagcgggccaggcgcagttgaatcagatcaaatttgctgaacgcacagaacgtgaacatatccgtgctgtgccagaaggtgaacgtgaggaaattcgccagctgtttcaggcgaagggattcgacggcgaattgctggagcaagtagtggaggctatcagtcgtaatcccgatgtgtgggtagcaaccatgttgcgagaagagtacggactctcgggtgccggactcagcccacgccgagccgcgttgactaccttcgccgcatttttgtcggttggtgctttacctttactgccttatgccatcccgggtatggagagtcagattcagttcctgacgagtcttggtttggcaggcgtcgtcttcttgggtatcggaatgcttaaaagtatcgtctatggcttaccagcaatgcgatcaggactccggactttgatcatgggtacggccgcagcggggctggcgtttgctactgggcattttgcgcaggggttattggggggttag

SEQ ID NO: 188784 - DNA, 1488 bp, Klebsiella oxytoca
atgaatagtcatatctttttagtcggctttattatttacgcgttggccatgatttggcttggctggtacgtgtcgcgtaatcaaaaaagcggtgaagattttttactcggcggccgttccttaccgctttttctgacgctgggttccaccgtggcgaccatggtgggaaccggttcaagcatgggcgccgtaggcttcggctacagcaacggctgggccggcatgctgtacggcgtgggcggggcgatcggtattctgctggtggcctggctgtttgcgccggtgcgtaaactccgttttatgaccatgagcgaggagctgtcgtattataccggcggcagccatttaattaaaaatatcgtcggcataatgatatttattgcctcgattggctggctgggggcgcatattcttggcggcagcatgtatttatcctgggccacaggaataaatctgacgctggcaaaaattattatcgctctggcttttgcgatttacgtcatcatcggcggttattctgcggtggtgtggacggataccattcaggcattaattctgtttttcggttttattctgatggcgattctggccgtggttcacgtggggggatgggatgccattgttcaggcgatggatcctaaggcgatgagcctgtttgccgttgacaagctcggggtgatgccagcgctatcgctggcgatggtcatcggcgtcggcgtactggcgaccccttcctatcgtcagcgtatctactcggggaaagacgtctcttcggtgcgccgctcgtttgtctataccggcgtgctgtatctgtttttctcggtgctaccggcgattatcggcatggcggcatggacgatgaacccccatctggagaacagcaattacgccttcctgttcgcgaccagcttcctgccggcgatgctggggctggtggtgctgattgccgggctttccgccaccatgtcttcggccagctccgatgcgatagccgccgtcgctattatgatgcgcgatgtttataccctcgttaccgggaaaatgcccccggcagataaagccattacgctgtcgcgctggatgctggcgtttgttatcggcctggcgatgatcttcgccctgacctcgaacgatatcatcagctatatcaccaaaatgatctccatgctgatgtccgggctgttcgtctgctcaattctgggccgcttctggctgcgctttaactggcagggcgcgttaaccgcgctgctgagcggcatggtggtctctcttgtggttctgattaaggccgactggctggcttactggggcaacccgtgcataccgtcggtcgtcggcagcttcgtttccgccgtttttgtcacgttaatgacgcctgccagcaaaatcagccgtcagcaagcgctggagatgattaccctggagcgggaagggcaggcggcgccggcgaaaacggcggtggcgcaggcctcaggagaagcgcaatga

SEQ ID NO: 188785 - DNA, 375 bp, Klebsiella oxytoca
atgattaaaggcccggcgctgtttgatactaatattctcatcgatttattcagcggtcgcgttgaagcgaaacaggttctggaggcttatccgccacagaatgcgattagcctcatcacgtggatggaagtaatggtgggggcgaaaaagtatcatcaggaacaccgcacgcgtattgcactgagcgcgtttaatattatcgatatttcacaggatattgctgaacgaagcgtcaatctcaggaaggagtatgggatgaagctgccggatgccatcatactggcgacagcgcaaatacatcgttatgaactggtcacgcgcaataccaaagattttttcgggatacccggagtgattacgccttatcatttgtaa

SEQ ID NO: 188786 - DNA, 240 bp, Klebsiella oxytoca
atgatgacgggaacgaatatgggcagaatactactcgacttatcggatgacgttattaaacgtcttgaagacctcaaacagcagcgcaatcttcctcgagcggaactgttacgcgaggcggttgaacagtacctggaaagacaagctgacaccactatttccaatgcgctggggatttggcaaggctgtgaggaagagggagttgaattcgaaaggaaactccgcgaggagtggcaatga

SEQ ID NO: 188787 - DNA, 876 bp, Klebsiella oxytoca
atgcacagcggtggaaaaaccatacaacttcaggccggagattatcaggcaaaaatcgttacggttggcgcgggtctggcggaattaacccaccgtgggcgacatcttgttattccacacaggcctgaagagatgccgctggcgcatctgggaaaagtattggcgccctggccaaatcgcgtggtaaacggctgctatcagtataacagcaagaccttgcagcttgccgtgaatgacccggtttcgcataccgcgattcatggattgctggcctggcgggactggcagattaatcagctgtcggcatcggaagtgtcgctgatgatttttctgccgccctcatatgggtatcccttttcgttactcgtcgaagctacgtaccgcctggaggcgataaaaggtctgcgtgtatttatcaccgccctgaatatcggtgatgaatccgcaccgtacggttctggtgctcatccgtatttgacttgcgatctcgagaaaatagacatctgtacgctgtccctgcccgcagataagttcctgaacatcgataccctggaactgcatagcgttgagggcacagcgctaaatttcgcgtcgccgcgcccggtagccgcaacgcgtatcgatcacacctttaaaaccccggtttccggcagtgagtgggaagtcagcgttttcaacgcggcaaaaaatatgacgacctacttacgttgcgatcagccatgggtgcaggtttacagcggcgagaaattagatcgtctgggacttgccgtagaacccatgacttgcccacctgatgcctttaattccgctatcgatcttatctctctggcgcccggagagagccatcgactgcactttttaatcggcgctgaataa

SEQ ID NO: 188788 - DNA, 201 bp, Klebsiella oxytoca
atggtcatccagcgcaaactgctgctattttgtactttactgttgccatgcgttgagtatgatcttgcccggaaagacgggggagaaatcatgcttgaatcactcattaatattatatcgagcggtgttgcagcgggtcatacgccgcagacggcggtcgctgccgttctgtgcgcggcgatggttggcctgtttagctga

SEQ ID NO: 188789 - DNA, 540 bp, Klebsiella oxytoca
atggtggaagatctaacaaaagattcatcgtcgcagttgcaatacagaaacgagaaggtatttaactccggaaaagctgcgcttgaactcaatacttcagcttccaatggtgacgttaacctgatacttaccggtccatcgccagaaaagtctggttcttttgactggacaggtagtaaatgcatttcaacaaagcttagtgacgatgaagtcataactttatgcatggcatttcttcaccttactccagaagcagcgcttaaagataagaaaaccatgcatcatgggaagagagtctacaaaaacataaaagtaacttttgacggaaaactaacagctatactggaaggtggggttcttgccataaacaagactgaaagtggagtcaatttcgtacataaaattagtatcgaaccttcagcttgccttaggttaggacttttcctcctgtcagtcattcaatcaagaaatcctggcctaccgtccgatacgatactgacgtgcatgcgtctaaatgcaagcgctcgatcccaaaagtaa

SEQ ID NO: 188790 - DNA, 525 bp, Klebsiella oxytoca
atgttgatgtctctaaggtatctttcaccgcaacgtaggggtttattacaagtcgataaatcactaattttgcactttgttataatttctgtattgatacatttattttttaccaggttcacgctgggccacggactgctctatggttgcattcctgctgaatattacatggtggataaccacgacaagcaatatgaaataggagatatgattaactttacaatggacagggatgcgagattcattaaggctggcgataaagtaattaaaattgtcgcggggaagggaggggacaaaatccagattaccgatacatacgttaaaaacggagatcgtctattcccggtcgatggaagccgtattgtgaaaaaatatcaaattgcaccagaaatcctgaaccgagaagtgacggttcccgccgggcatatatttgttgtaggacaaaccgactactcatgggattcccgtttttggggaacagtaccagaaacgacaatcacaggaaaagcatatgccatcttctga

SEQ ID NO: 188791 - DNA, 852 bp, Klebsiella oxytoca
atgaaaaagacactgaccactgtactggcttgcacactccttgccggttgtgctacacaaccaaccagcccggaaaaccgcatgtttactaaaatgcatgacgtctactggcactcagatcgtcagaaatccttggcagtaaacgcatactcattggctggggtccaggcaaatgtcgaagaagctgagaatgctgctggaggcgtcgatgaaggtcttgcctccaaaatgcttttgaatacggctactggagcgatcaccggtggccttaacgcaggaatcggaatgtttacagcatctctttatagtgaagcagatgcggaatacatccaggccccacaatttgtagttttcgtgccaaacccaaccaatctgccatacaatgactcggcacttgttaaaaatggggcgaaaataattatcgatgctatcaaagatcatcctaaactaaacaatgcaacttactcacaacaaagcaaagctctttctgaatgtacaataactaagtcctttatggggccttgggatacgtgtgagactaaaactgaagtaccgcaatctggtagtaatggaacaaccttctttaagtatcaagtaatccgtccagctactgggtcagaactagatgaattacatatacgagctggtaattatacagttattcgatatgtctactttatggtgaagggactatcttttgataccactggtttccctgggtttacactaatgcctcaaacaccaaaaacggccccgggctatgcaagtgtatctcttaatggcggagaatattactttattaagggtgatttaggatataaaaaattccctttaaaaaaaggcattgattaa

SEQ ID NO: 188792 - DNA, 873 bp, Klebsiella oxytoca
atggcgcatgcaaaagtattctatggtgacgaaattccaccatcaaatactggcagtgatatttgcaaaattgaaaagggcactgataacgacaaggcttacatttggtatatgacagattctgtcagccgtgtagtcgagttaaaagcgcttgaggaaagttcaaaactgaagcatcttgttggttctgaacgttctgttatctacagcattaatgttagcgatactttcattaaggagatcactctcgatgaggcagagcaacttcttgaagagttccctgacattccacgtgaaaaaacactcgaagaatttttagcatctctggatgttaggcttatcgagttaaatattgactctattgtttcatcagaaaatcttaacttcggaaaagaaaaactgattaaacttggagcagttaaagtaagtcagtggcttcaacttgtcattgatgaagtctttgttttttataaacgtgaaaactttattgagactgtagaatctccccataaggaccttaatgacttttacagtaaattgaaacctttgatgagagagttcggtcttaaagataaacattatgggctttcatttaaagagatgatgatccacaaagttgatggttttgattttgttgtttctgattcaatgcctaagttgcttaagcttgaagcctcattgaaagaagaggaattaaaagcaaaggccttcactgaaaagcccttagttgatgaagcaatcactgaaattccaaataaggttatttctttctatgattcggtaacatcaagagttctgaaaggagctgcttgtgtagccgttgtctattttggagcttctactttatataacttcgttagctacattcaatga

SEQ ID NO: 188793 - DNA, 144 bp, Klebsiella oxytoca
atgattacaatagcctgtctattaaataaacatttactctatttgctgccggtcatcgtgctgcagctcacatatagcagacagcaaaaagggcgccttagcgccctttttaattcagaactaattattagcccagaactttag

SEQ ID NO: 188794 - DNA, 477 bp, Klebsiella oxytoca
atgacaatagcgacctttgcattctttattatccatggcgggctattactcacgctttgttggcacgatctgcgctatggcttgctacccgataaatttacctgccctctgctgtggagtgggttgctttattatctctgtctgtcgccggccaatctggtacatgccgtctggggcgcgataggcggctatctggcctttggcttgatctattggctctacaggggaatacgcaggcgggaaggcatcggctacggcgatattaaatttctcgccgcgcttggggcatggcatgggtgggaagttttaccgcagctggttctcatcgcagctattctggcctgcgcggccgtaacggcgctgattttgtgcacgagaacaaggcagatgctacaccacccgctgccttttggccctttcctggccacagcgggtgtgttctgtggatggcagacgtttatcagtcagccactttaa

SEQ ID NO: 188795 - DNA, 132 bp, Klebsiella oxytoca
atgctgttcggtgaatggatagaacgcaaagacattccagatccctaccggaagagcaatgaagctttcgcttcagtatttcatttaattgagctagccggtcagcgctgggttgacaaattaaaagcttaa

SEQ ID NO: 188796 - DNA, 825 bp, Klebsiella oxytoca
atgcgcagaggaattgaaagtcctgagcaactagaagaaattggaatcaatgtttatgcgagcattcctgttgcagaaacgtatgcaaagaaaatagctcaaaataaaagctggagcggaaaaaaatccaaggatatacaaagtttcttggctattgataatcccgcagatattgcaatcgaagcaattcgtggtttaagaactagtttacacttcgcgatgatggaggctcgaaataacatattaatgatttcgggagctagccctaatgctggtaagacattcattagtactaaccttgcagctattattacccaaaccggtaaaaaagttctgtttattgatacagatatgcgaaaaggatatacacataaactgttcaatacgaataatgagaatggattgtcggatgttttatcaggaaaaacacctattgagaaagctattaaaaaagttaatatgggtgaatttgattatatatccagaggtatagttccgcccaatcccgcagaattacttatgcatcaacgtttcggtgatttgataaagtgggcgggtgaaaactatgatttagttattttggataccccactaattctagctgttacggatgcggcaattattggtaattatgttggtacaacgctgttagtggctagatttgaagagaatacagttaaagaaattgaagtgagttataagagattcgaacaaagtggtgttttggtaaaaggatgtattcttaatggtgtggtaaagaaagctagtagctattatggttatggatataaccattatggatactcatacgatagtgataaataa

SEQ ID NO: 188797 - DNA, 270 bp, Klebsiella oxytoca
atgcctactaacccagggggaagcgatgccctgatgcgtgagatattaaagatgaaaggggtcgattttgagatggacaacctatctctgcaaagcctctcaggtgaaagcactcaaataccatcatccgttcattattcatggaatcctaagcagtttaatcgcaagctggtagtcggcaatcgagtactggggacgtctcagaaaacggaatctatggtcactcccgtttttgcaacaccgattttgacgacaagttggcttgcttga

SEQ ID NO: 188798 - DNA, 609 bp, Klebsiella oxytoca
gtggacacccatccaaagcatctgccggccgatgaacgtcgtgccgtaactgtcgagtccgtcgtggcgcttgccggttcacaaaacccaagcgagataaccactgcggctatcgctaaacacatgaacttgacccagggtgcgctgtttcggcacttcccgaacaaggaagccatttggcaggcggtcatggagtgggtagcagagcgcctattagccagaatcgatcgatccgcacaaggaatcgagtcgcccttggcagccatggaggcgatgttcatgagtcatatcgaattcgtagctgagcacccaggcgtgccaagaatgatgtttggtgagcttcagcgtgccgaatcgacaccggccaagcgcatggtgcaaaccttgattcagcgctacagcgaacgtttgcatcgtctcatcgagaaaggcaaggccagcggcgagttgtctccctcgcttgacaacgaggcggcggcaacgctgttcattggcacgatccagggcttggtcatgcaatcgctgttggcgggtgatgtgggacgtatgcaccgcgatgcgccgcgcgtctttgcaatttatcggcgtggcataaggagtgcgcaatga

SEQ ID NO: 188799 - DNA, 1152 bp, Klebsiella oxytoca
atgaaaaagttacccttgcaaggccgcaccctggcactgcttgccgtcatcattcctttgctggtgctttttatttatgtcggtctgcgatcagggccgctcgccccggtcgctgtgacggtggcaagcgtggaatcacgggctatcacaccggcgctgttcggcatcggcacggtggaggcgcgctacacctacaagatcgggccgacgtttgccgggcgcgtcaaacgcctggaggtgcatgtaggcgaccaggtcaaggccggacaggtgctcggcgagatggagccggtcgaccttgatgatcgggtgcgctcacaggagtctgtattcaagcgggcggaagcggctttgcgcgaggcagaagcccggcaagcctacgcgcaaacccaggcgcgccgctatgagcaattgtttgcggtgcgctcgaccagcgaggaaatcgtcaccaccaagcggcaggaactgcagatcgccgatgccgccctatccgccgctcgggaagatattgcccgggcacgctccgaccgcgaagcactcgtcgcgcagcggagcaatctgcgcctgatcgcgccggtcgacggtgtagtcgccgtgcgcgatgccgatcccggcacgaccatcgtcgcgggccaggccgtggtggaagtgatcgaccccaagagtttgtggatcaatgtgcgcttcgaccagatcagcgcatcggggctggctggggggctgccggctcatatcgtcctgcgttcgcgtggtggccagaccttgaaaggtcgcgtgctgcgggtggaacccaaggccgacgcggtaaccgaggaaacgcttgccaaggtgacattcgataacaaaccagaacctttgccaccagtgggtgaactggccgaagtcacggttgacttgccggcgctcccggccgctccactgatccccaacgctgccgtccagcgtgaaggcgataaagttggtgtctggcaaatcgtggatggtgatctgcatttctccccggtcaagctcggcacttccgacctcaatggttacgtgcaggtgcgcgaagggctcaagaatggggaccaggttgtgacctatagcgaaaaggcactgacggcgcgcagccgcatccatgtggtcgagcatatcccgggagtttcacgatga

SEQ ID NO: 188800 - DNA, 1206 bp, Klebsiella oxytoca
atgatcagcctggccggccgcgacattctccatgcctgggggaaattcgtcttcaccggcatcggtctgggtctgctgatcggcgtcaccctagtcatggctggggtgtaccgaggcatggtggacgacggcaaggcgttgctcgacaacagtggcgctgacctttgggtggtgcaaaaggatactctgggtccttatgcggagtcgtccagcctcaacgatgacgtgtatcgcgccattctcgccatgccgggagtctcacaggcagcgaacgcgacctacctgaccatgcaggtacgcaagggcgagagtgatgtacgcaccatggtggtcggcatcgcgcccggtgcgttgggggctacacccggatggcctccttatctcgtcgctggacgccagatcacgcgcggtcactacgaggctgtggccgacatcgccaccggcttcaaactgggagatcgtcttaccattcgccgcaatcattacaccgtcgtggggctgacacggcgtatggtgtcgtccagcggcgacccgatggtattcattccgctcaaagatgcccaggaggcccagttcctcaaggacaacgatgccatctggcaaagccggcgtcgcaccgaagccaacccggtcttcaatcgacccggtgatccaggtttgctggatgccgtgattgcttcacagagcagcaacgcgttcgtcaatgccgtgctggtcactctgaaacctggtcatgcgccggacgaggttgccgaatccatccagcgctggaagcgtttgacggtctacacccgggcacagatggaagacatcctcgtcggcaagctgatcgccacctcggccaagcagatcggcatgttccttgtgattctggccatcgttagcgcggccatcgttgccttcatcatctattcgctgacgatggacaaaatccgtgagatcgcggtgttgaagctcatcggcacacgcaaccgaaccatcgccgcgatgatcatgcagcaggcgctcgccctgggcgtgattggcttcgtggtcggcaagatcacagccaccttttcagcaccggcttttccaaaatatgtcctgctcacgccaatggattctgtcgccggtttttttgccgtgctcgtgatctgcgttctagctagcctcgtcgccattcgcatagcactcaaggtcgatccggccgaagccattggaggttga

SEQ ID NO: 188801 - DNA, 711 bp, Klebsiella oxytoca
atgagtggcaaagggatacacatcgaaagtttaagcaagcggtatggcgatggtgacaccgctgtctttgccttgagagacgtgaatatgcatgttgcgcctggtgaagtggtgggactgatcggcccttccgggtccggcaagagcacgctgctcaagtgtctgggtgcggtgatcgaaccgaccgccggtcgcatgacgctgggcgatgaagtgatctacgccgatggctggaaagtccgcgacctgcgcgccttacggcgtgacaagatcggtttcgttttccaggcgccgtacctgattccgtttctcgatgtcaccgacaacgtggcgctgctgccgatgcttgcaggcgtcgcgaatggagagtcgcgcgcgaaggcactggaattgctcacagcgcttgatgtgcaacaccgagctcgcgcaatgccctcgcaactctccggtggcgagcagcaacgggtcgccatcgcgcgcggactggtcaatcgtccgccggtgatcctggccgatgaacccactgcgccgctggattccgagcgcgccatggctgtaatccgcatcctcaacgacatggcccggaagttcgagaccgccatcatcgtcgtcacccatgacgaaaagatcatccccacattcaagcgcatctaccacatccgcgacggcgtgacccatgaggaagctggcgaagggcgggagttcgaatga

SEQ ID NO: 188802 - DNA, 474 bp, Klebsiella oxytoca
atgacccaccgcaaacacagccacgcatttggaactatcaccctgaccgttacggcctgcctgcttttatggggttttcagttgccagcttgggctggtgacgctacccaggttgagccactggcgctacgcaagatcatgcaggaactcgggcgcaacatgcaggctattaccggtgcgatttcgcaggaggaatgggttcaggtcgttcagctcgccccaaaagttgctgcacaccccgagccaccgcttactgaaaaaatgcgcatccttgcttacctcggcgctgatgcgaccaagttcagaaactttgacgcgcagactcacgaggcggcgctggccatgaagctggctgctgcgagcagcgacggcaaggcggtgacccaatcattcgcccacgtgcaggaaagctgcttgggctgccaccaagctttccgtaaacctttcgtggagcatttttatggagcacgctaa

SEQ ID NO: 188803 - DNA, 1488 bp, Klebsiella oxytoca
atggagcacgctaaaacatgccagcgccccatcagcctcgaaagacggcttgcggcaacttacctggtagctggtctggtcaccgccggtctggccggctgcgccgccggccctgattttcagcgtcccaccgcacccgatgtggctcgctacactgcaacaccggtagctgatagaaccgtgtccgctcccacgcagttcggcgaaacacaacgtctagtcgaagggcttccgatcgaaacgcaatggtggcaaagcttgggttcatccgcactcgacggactgataaacgaagctttccatgtcagcccgacgctggcgagcatcagcgccaatttgcgacaggcgcaggagcttcttgccgcacaggcgggctcgacgcaatatccacaggtagatgtcgcactgggatctcagcgccagcaaatgagtcccagtagccaagggttgagcggagacgcacgtcaattcagcctctacaacgccagcgttggcgtgcattacaacctcgatctggctggcggcaaccggcgcgcactcgaagccttggctgctcgcgccgactaccgtcgcttcgaactgaatgctgcgcgcctggcccttgccggcaacatggcaaccgctgccattacccgagcacgcctcgccgcgcaactagaagccactactgccattttgcgcgtgcaggatgagcaactgcgcctggcccatgaacgcgtgcgtatcggtcaggcctcacctgatgaagcgttgagcctacaagctcaggcggagcaaacgcgggcagaactgcctgcgctgcgtaaacaactgcaacaaaccgaacatctactggcggtgctagccggtcgtgccccaggcacgggtggcatcccggccttcactctggccgatttcactctacccgtcgagatgccgctcgtcgtgccctcagaactggtgcgccgccgaccggatatccaggcgtcagaggcgctgttgcatgcggccaatgcagactatggtgtggctgtcgccaagctctacccacagatcaacctgagcgccaaccttggttctcaggcgctgaccaccggtgccctgttcggtggtggctcggcagtgtggggcctggttgcgcagctcacccagcctctttttaatccagggctacccgctgaaaaaagagcggcgctcgccgcttttgatgccgccgtagccaattaccagagcgtcgtattggagtctttgcgtaacgtcgccgacaccctgcgcgcggtggaaagcgatgcacaaactttgactgccctcgctgccgctgatatggctgcacaggcctccttgcagtcggtcgagcggcaataccggctgggcgcggccagctacctgcaactgctcatcgcgcagcaacaggcacagtcaatccggatcaatatggttgcggtccaggcacaacgcctagtcgatagtgttgctttatatcaggccctgggaggtggtgtcagttaa

SEQ ID NO: 188804 - DNA, 558 bp, Klebsiella oxytoca
ttgcaaggtcaacgtatcggctacgttcgcgtcagcagcttcgaccagaatcctgatcgacaactggaacaaatagaagtcggcaaggtattcaccgataaggcttcaggcaaggacacacaacgtcccgaacttgaaaggctgctggccttcgtccgcgagggcgacaccgtggtggtgcatagcatggacaggttggcacgcaaccttgatgacctgcgccgcatcgtccaagggctgacacaacggggcgtgcgcatggagttcgtcaaagaagggctaacgttcaccggcgaggactcaccgatggccaatctgatgctgtcggtcatgggagcctttgctgagttcgagcgcgctctgatccgcgaacgtcagcgcgagggaatcgtgctggctaagcagcgcggggcctaccggggacgaaagaaatcgctgaacagcgaacaaattgccgagttgaaacggcgagttgcggcaggcgagcagaaaaccttggtggcccgtgacttcggcatcagccgcgaaaccttgtaccagtacctgcgggaagactga

SEQ ID NO: 188805 - DNA, 1221 bp, Klebsiella oxytoca
atgccacgccgctcaatcctgtccgccaccgagcgcgaaagtctgctgacactgccagatgccaaagacgaactgatacggcactacacgttcaacgaaaccgacctgtcggtgatccgtcagcgtcgcggcgccgcgaatcgattgggcttcgccgtgcagctttgctacttgcgattccctggcatcttcttgggcgtcgatgatcctccatttctgcccctgctgcgcatggtggccgcacaactcaaggtgccggtgggaagctggaaccattacggccagcgcgagcagacacggcgggagcacttggtcgagctgcaaacggtgtttggattcaagcccttcaccatgagtcattaccggcaagccgtgcatacattgaccgaactggccttgcaaacagacaaaggcattgtgctggccagcacccttgttgaaaacctgcggcggcagagcatcatcctacccgccatgaatgccatcgagcgcgcaagcgccgaggccattacccgtgccaaccgaagcatccatgcggcattggccgattccttgatacctgtccatcgccagtgcctggacgaactgctcaagcgcaaggatggtagcaaaatgacgtggctagcgtggctgcgccaatcgcccgccaagccaaactcgcgccacatgcttgaacacatcgaacgcctcaaagcctggcaggcgcttgacctacctgctggcatcgaacggcaggtacaccaaaaccgcttgctcaagatcgcccgcgaaggcggccagatgacgcccgccgacctggccaagttcgagtcgcagcggcgttacgccaccttggtagcactggccatcgagggcatggccaccgtcactgatgaaatcatcgaccttcacgaccgtatcatcggcaagctgttcaatgcggccaagaacaagcatcaacagcagttccaggcttccggcaaggcgatcaacgacaaggtgcggatgtatgggcgcatcgagcgcacgctgttcattctggattggctgcaaagcgtggagctgcgccgccgcgtccatgcggggctgaataagggcgaggcgctggacgacacgttgctgcaatatctgtccccgctggggtgggagcatatcaacctgaccggcgattacctatggcgcagcagtgccaaggtcggtgcggggaagttcaggccattgcgaccgctgccaccggcttag

SEQ ID NO: 188806 - DNA, 1005 bp, Klebsiella oxytoca; identical to SEQ ID NO: 31749

SEQ ID NO: 188807 - DNA, 321 bp, Klebsiella oxytoca
atgccaagacccagaattccccgtaacatctgtggccgccctgcggatacctgttttaagcccaatgcgcgaccgatgagccagcttgaacatgttcatttaaaagaagatgagtttgaagcgttacggctggtcgatttactgggcatgcaacagcaggaagcggctgttgcaatgggggtttcaaggcagacactggccaatgtcctgaaagcagcccgttttaaggttgtggactgtctcactcagggcaaggccttaataatgcactctgaaagggaaggagttacacaagatgatcacagccattccagtgaatga

SEQ ID NO: 188808 - DNA, 462 bp, Klebsiella oxytoca
atgatcacagccattccagtgaatgacgaccgggtagcaaatcattttaccaaagcgagtcaccttgtcctggtggatgagcgcggtgtggagctcagccggacagaaaatcccgcgctgggcgcagattgttcaggtaaacggaagctggttgacctgctggttcaacagcaagtcagccgcgttgtggtccgtaacatcggggaacggatgctgggtaaattactggggcatcagatcgcggtgtaccagactgactgtggtcgtcgtttgttcactgaactgtgtgatccggatacccgtgttctgactgaactgaataagccggagcagggacgccagtcctttcatcatgaggcgaaagggaaaaaatgctgtcactctgacgggaacacagcagaaaatgcgtgccagggtgggcgtcagcatcatcacggaaacgggcgctgttgccattcatga

SEQ ID NO: 188809 - DNA, 168 bp, Klebsiella oxytoca; identical to SEQ ID NO: 83459

SEQ ID NO: 188810 - DNA, 438 bp, Klebsiella oxytoca; identical to SEQ ID NO: 118543

SEQ ID NO: 188811 - DNA, 477 bp, Klebsiella oxytoca; identical to SEQ ID NO: 83457

SEQ ID NO: 188812 - DNA, 351 bp, Klebsiella oxytoca
atgctcatgaatgaagacacaaaacgtcagacagatatgaagaatgcggccctgagggcagcagatgtcttacggggactggccaacagcgaccggttgctgttgatgtgtcagttaagcctgggggaagcgaatgtggccgggctggaagcggcggtcggtatcactcagccgaccctgtcccagcagctgggtgtaatgcgccgcctgaagctggtcgagacccgacgggcaggtaaaatggtatattaccgtattgaggataaccgtatcatgacgttgttaaataccttatatgatctctactgcccgcaggcaggcaccggtaaaggaagccataacaacgaataa

SEQ ID NO: 188813 - DNA, 465 bp, Klebsiella oxytoca; identical to SEQ ID NO: 161500

SEQ ID NO: 188814 - DNA, 543 bp, Klebsiella oxytoca
atggaattaacattaccattgaccaaagagcaagccaaaactcttaaggtcggcgatatattatatctcacaggatttgcttacacctgtcgtgacgcagcgcataaaaaaatcgaaatagcgcttagtaatggagagaaatcgcctgtcgatttccaaaaccaaaccatttactatgccggcccttgccctgccagaccaggtttgcctattggctccaacggtcctacaacagctgcgcgtatggatccatttgtagagatgatgttccaacaaggagcaacggcttttctcggcaaaggcgaccgcgctgattatgttgcggaactttgtaaaaagtacggtggggtttctctgctcggaattggcggagcatctgcaattaataccaggcatgttaaatcagttgaaattgttgcctacggagaactaggaacagaatcaattaagaagctgtattttgaccgctatagagtcattgtaggaattgatactgaaggaaatacacttcagaagcaggaagtgcacaaatacgccaggtaa

SEQ ID NO: 188815 - DNA, 846 bp, Klebsiella oxytoca
atgagtcgtatattaaatacagaaattatcattccggttatagaaaatcttgtaaaaaaagcttgctatgaattggatgataatctcatgtgttcttttcgtaaagcatatgagaaagaagaatcaaaaatcggtaaggaaaccattaagattttaatcgataatggcgaatacgctaaaaaagaacaacttgcatgttgccatgataccgggacttgtatagttataatggaaattggacagcatgtatgctgggaaggcaagccgcttaaagatcaggtaaatcaaggtgttcgtcagggctatgagaatggatatttaagaaaatccatggttgcagatccattagaacgcataaatactaatgataatactcccgctgttttgcataccgagattgttgagggtgaccgggtgactattaccgttatgccaaagggcggcggtagcgaaaatatgggaacgtttaaaacattgcttcccggcgatggtattaaaggtataaaagattttgttctggaaaccgtccgccgggtgggaggcaatccatgtcctccttatattatcggcattggcgttggcggtaccatggaccactgttcctggatggctaagaaagcattgctacgccctcttggcgagtttaatgctaaaccactttatgcccaactcgaagctgaactgttagaggccgtaaataatacagggatcggacctttaggtatgggaggacgtgttacggcattgggcgtgcacgtcgattactatccttgccacatcactgcgctgccagttgccatcaatttccaatgtaattcaagccgacatgctagcgaaatcatttaa

SEQ ID NO: 188816 - DNA, 891 bp, Klebsiella oxytoca
atggaaattagacagctggaatattttgtaagcgcttctttgttaggtaacttaactagagttgctgagcggcatttcgtttctcaacctaatatcacaattgctattaagaagttagaaactgaattaggagtgacgttatttgacaggaggaaaaacaaactcgtccttactgaggaagggttgtttttcttaaaaaagattgaaccggttcttattgcattaaaaaatagcgtagcagaaatgaaagattttcgtaatgaaaatggtggcatagtaaccttagggatcccaccgatgataagtttgtttctattttcaccactttttaaacatttccgtgagatttatccggaaatggaactctctcttgttgaagagggtacttttggtttgcatgacaaactttccgcaggagaactggatcttgctattgtgattattaatgactcgccgaaggagttagttacggtaccattaatgacccagcagcatgtagtatgtatgtccgatcaacatcctttggcaaaaaaagaaagtattgactgggaagatctacaatatgaaccattaatactcatgaaaaaagattcctggcacaggagaactattattgaagagtgtacaaaacgaggaattcatacacacatttttctgtcttcaaacagggttcaaaccaacattgatctggtcgctaagaatgaaggtatttcgtttattttagatgctgttgatcttaaagcggaaaaagtaataaccaaagccatgactgacccaacgtatgttacaattggcctggcctggaaaaaggataaatatttatcatatgcatccagagcgttaattaaatttattgaaaattatattaaagaacattttacaactaaatga

SEQ ID NO: 188817 - DNA, 927 bp, Klebsiella oxytoca
atgcaatatcggcatcacctcgaactaacatggcttgaagactgcctggctctaaaagaaactttgaatttctcaaaagcatcagcctcaagatatgtgactcaacccgcatttagtcgtcggatacaatctcttgaagaatgggtgggtacccccctttttgaaagaagcaaacggggagtcactcttaccaaagccggagaagcatttaccgagcagcttcctgaactaatccactctttgtacacattgaaaagtgatacccttgaggctgcaggtaataaacagcccaatcttgttttctcagcaacgcatgccttgtctttttctttcgtaccttttttgttaaagcaaagtgagaaaattgcaaaatttggctcatttcgccttttatccgactcattgaatgcttgtgaaaaaatgatgcgacagggtgattcacaatttttgttatgccaccatcacccacatatgcatctaaatttaaatcaaaataactttatgagtattcgtcttgggtttgatacattaattccgttcagtaaacctgactcggcaacaatgaaaccactctggaatataaaaaataagattcaatttccttatctttctttttcatcacaatccgggttgggaagaataatatcaaatacagcttctattaacagaatcactcataatatgaatattgcatttgtggccgatctagccgcaacactattggcaatggtcagatcaggcgatggtatcgcctggatccctgaaagccttgccaagcaagacctggaggcgaaaactattgttaatgcagcagaaaaagaaagtaatttatgggtacccatagaaataaggctttataggccagccaagagaatgcctcctgatgctgaagagctctgggaaatttttattgaagaacaaatataa

SEQ ID NO: 188818 - DNA, 1269 bp, Klebsiella oxytoca
atgtcaccagcgattattactttgctgattttagtggttgcaataattatctttgttagcgatcgtcttcctatgggattggttgcatttatggttcctatggcgctttattttacagggattatcaatgccaaggatatttttgcttcaatcgtaaatgaaaatgttattctgattatcgccatgtgcgtactcggtgcagcattttttaaaacaggtctggcatggcaatcaagcaaaatattgctcaaatatgctaaaacagaaagaagtcttagcgtactgatctttctgattagtggggttatgtccgcctttgtttctaatagcgggacagttgctgtattgattcctattgttttaggtatcgccgccagtagtcaaattaaacctattaaactgcttatgcctcttgtctttggggcaacaattggtgctgatatttccattatcggttcgccaggaaatttgattgctaagaatactattgaaacctttagcaaaggtagtatgtcggtgccattttttgaatacgctaaaattggtatccctttgctgattgcctgctccatattcctctatttttttggctcaaaacttattgccgatcgtgatggaaatgcccaatctgactctcaaatggattatagccatattccagcctggcatagaaatttaactttaattgtttttatactatctatcgctgggatggttgcaactgattatattaaattgctccctccgatgcatattattgcgtgctgtgcggccattattcttgtattgactggagttttaacgcaaaaggaaacgttcaattcctttgaaactcttactgtttttatgcttgcatttatgatgcctttaggcgccgcgcttaattctacgggcgctggtgagatgattgcaaatgcagttatttcagtcaccgggaattctggcgtcatgattatcatggcttcattatggatcctgacctgggccctgactcaagttatgagtaacactgcagcatgcacgttgttgtgcccggtaggatggactatcgcacagtccattggagccgaccctcgtgctgtcgttattgctatttttatcgcgagtagcgttgccgtatgtaccccaatggctattccagcaaactcgatgattattggccctggcaatgttaagtttaaggattttttaaaacctggactggcgatcagtttagtgtgttttatcgttagtatgattttactaccagtgttttatccgttttattaa

SEQ ID NO: 188819 - DNA, 1341 bp, Klebsiella oxytoca
atgactactcctcctgaatgccacctcaaaaccggcggcgacccgcgcacgcttgcggattacgcgcgccttcgcgatgaaatgaataaactgacccatccggcgcgcccggacgtcaactggcagcacgcggaaacactctgcctgtcgctgtttgagcacaacggcgtggaactgcagactgccgcctggtatacgcttgcccgaacccatcaggccgggctaaacgggctgaatgaggggctgacgatcctggtcgctctggtctcccggcagtggggcaatgtgtggccgcagcagacggcggtgcgaatgaaaatactcagttcgctcagtaaacggctgcagctggcgatgcgtactctgccgctgacctctatagacctgagacagctttaccaggccgaagcgcacctggcggcgctggatgatgtactgcagcgcctggaactcaaacatgtcagccagcttgacgccctgtataccctgatgcacaacacggcggtgcggctggaagacagcgaaaataaagaggagaccgcgctgcaaacgggcgccgctatgcctgaaccttcctgcgccagcctccctgaaccgaccgtgcagatgaaatgggtctatgtcgccgagccggcaccgcggccggaagctgacgcggtaacggcattcccgccgtccgcgaagccctggaaaccctttgccgccgggatgctgaccatgctagcgctggccggagccgcggcgggaggatggctggcaatgcgtccgtccgaaacggcgctgcggcagtttaccgccatgcttaccccattacccgcggcgctttctgccgagcagctacggtcgctgcgacaacacacccctacgccggagacgggtataaaacaaacgcagcagcggctggcgcagcttttgcagctaaaaccggactgggcgctggattatggcgaccatctggtgcagcaggcgctgacattatggccggaacaggcgaaaccgctggcgcgacaatggcaacagcaggtcagcgccgccgcgcttcccgcagagaatctcaacggctggcaccagggaatgacgcagctacagcagttgacgaaccggcttaacgcgctggatgagcagaagggggggtatatcacggtgagtgagctgaagtcggcggtgtttgccataacgcagtcgttcagccgggccgttccggcggaagagcagctgcggcagctgtcagaacagccgcacaatcagccagggacttcggcgcagcagagccagacggaacagcacctgcagcaactgattgcccgctacgccgcgttgaaacaaaaaacggcggaataa

SEQ ID NO: 188820 - DNA, 450 bp, Klebsiella oxytoca
atggatagaaaatccccatctttatacgaaattctcaccggaaatttcactggttacctttctcttgacgttgtaaatgaggaagatcaggtcattctatcagtactggataacatccaacgtattttgaacgcccgggccggtaccgtatcccatctaccagattatggtttgccggatatgaccaaaatcctccagggtatgccgggtacagcccatgagctgatgggaaccctgtcagctgtactgctcaaatatgaaccacggttgcagaagattgacgtgattctgctcgaacaggatattcccggcgaactgcgctatgccattgacgcggaactgaaaggtatcgggctggtgcgctacggcaccgaatttatgcctgagggcagggtgcttatccgccacctgaaacagcagcagtacctggaagtccgttcctccctctag

SEQ ID NO: 188821 - DNA, 318 bp, Klebsiella oxytoca
atgagattagaaattaaagaacttggattgtacgttagggatacatacgagtttatgaatgatggtgatgatcaactgttaggttattggggggagaagggtgtcatcaaacctggggtgatgagtgaattattggaaaaagaatatcttgatgaagacggctgtagatactttagagttactaactcatcttttgtgagatacagggaaaaatataaaagcgaaaataaaactgaagattttttcgtatactcgacggtaaaaaaaatccctgcaaacattattatttactggaaagaggaaaatgttaatgcatag

SEQ ID NO: 188822 - DNA, 942 bp, Klebsiella oxytoca
atgaatcaggatatcaccctgtcggactatcaggcttctctggatcgagtacgaccgtgggtgcgcaaaacgccgcttgttgaaacggcaccctggcagcccgtgccgggaattgagctcagactgaaagctgaatgttgtcaggtaaccggctcgtttaaagcccgaggtgcatttaaccgtgtcctcaatctcccactctcagttcgtcagcaggggttagccactgcgtcagggggaaatttcggtgcggcagtcgcttacgtagggcagcaactcagcatacccgcagatgtctttgtgatgaataccagcacggatctgacgcgaaagcgtattgaaagttacggagcaaaactgactgttgaaggcgacttctgggatcaaagctgggatgctgccggcgttcgagtaaaggaaacggggggcgcattacttcacccctatgctgacagagatgtcgtcattggtcagggaaccatcgtgctggaaattctggagcaatggccagaggttgacacactggtcgtttcaatcggcggtggcggacttatcgctggggtggcacaggcagccaagctgcttaaacctgacattcgtatcattggtgttgaagcagcgggatgcccgatgatgtggaccagccgtcagcagcaaaaaatcgtaaaactggagaatgtaaaaacgattgttcccatccttgcggcacgttcaacagaagcgattaattttgcattgacggagcagtatgtagacgagattgtcctcgtccctgaagaccaggtagaagcgtcagcacgggaagtatgggcgtcgacagggctggcaattgaattgggcgcggctacggctgttgcggccgtaacaagaagatgcttcgtcacaaaccccgatgagaaaatcgctgttgttttgtgtgggagtgggactaacggtatgtga

SEQ ID NO: 188823 - DNA, 1116 bp, Klebsiella oxytoca
gtgcaagaagccggtgttcttgcgaaaacattaaatgtcaaaaaaatactgattgtgacggatgcatttctcgccaaaagtggtatggcagataaagtggcggcgatttatcagcaggtaggcattggggtacatatatttggcggcgcagaacctaacccaaccgatagaaatgtggaagaggggattaaatcctatcgtgagaatgagtgtaatgccattgtgtctctcggcggtggttcttctcatgactgtgcgaaagggattggtttgatcgctgccaacggagggagtatccgtgattttgaaggtattgataaatcaatcaacaacatgatcccactgatggccattaataccaccgcaggcaccgcgtctgaaattacgcgcttctgtattattaccgataccgaacgcaaggtgaaaatggcgattgttgattggcgcgtgacgccacaaatctccattaatgaccccgagttgatggtgggtatgccgccgtcgcttactgcggcgacaggtatggatgcattaacccatgcgatagaagcctatgtttccaccatggcgaatccgttgacagatgcggcggcattaaaagccattaaaatgatcacgcaatatttgccgaaagcagttgctaacggtgaatatatgaaggccagagataatatggcctatgcgcaatatctggccggtattgccttcaataatgcgtcgttaggttatgtgcacgcgatggcgcaccaattaggcggcttttataatttaccgcatggcgtatgtaatgccattctgctgccgtatgtagaatcatttaatttaattggcaacttaaatcggttcagggatatcgctgaagcaatgggggaaaatgtcgcgggtctatcgacagatgaagcggcgctcaaagcgattagcgctatccagcgtttgggtaaacaagtcgggatcccgaaagatctcaagagcctgggcgttaaaccggaagactttgctgtgatggctgaaaatgcgaagaaagatgtgtgccaactgacgaatccacgaaaagcgacgaaagagcaggttatcgaactctatcgtcaggcgtatgaaggtgaggcgattgtgtaa

SEQ ID NO: 188824 - DNA, 222 bp, Klebsiella oxytoca
gtgggccgggctggtggtgtaactcagagtcccctgggcgtgcgccccgtggctgcgcaccgcccgcagggcggcctgcatattgcgcgggtcgttcatggcgtcgaagacgcggaagacgtccatgccgtttttgacggcgcgctcaacaaagcgttcgaccacgtcatcggcgtagtggcggtagccgaggaggttctggccgcgcagcagcatctgtaa

SEQ ID NO: 188825 - DNA, 840 bp, Klebsiella oxytoca
atggcgccttatgattttcgtatttcatattatgctttgctttgtaataaaaaccatgttatcgagcatacttcttggccctactgggggcaaagatatgttcctagaacttatggtatattaacgaatttatcaaaaaaagtatggaggaaagttttaagttccgacaatatcaatattgtctgtgtcagcgaatctgcatttaaaactataaatctttttagaaatgttaatgaacattctactgtaatacctcatgtaatcgatacaccagtgttggaaaatgtacccgccagaaaagaaaaaactttaatttttatcgggaaattaataccggaaaagggtatcgacaaaatcatatcgtttgctgaagaacatcctgattatatggtgaccatcattggcgatggccctttaaaaaataaggttttgcaggcttctatgaaattttcaaatttggagtacttaggatttatcaaaaatcgacagcaaatatatcatcatttacttgaatcaactttcttttatttgccttcaattagaactaaacgctgggaagaattgtttggtatatctataattgaggcgatgagctgtggatgcatatgtttttgcagcgatcatgtagggccaagacaaattattaatgacaaaataaatggatttgttttggatgaaaaccatacatcgcaagatatcattgatattatcaataacagcgatcttgagaaaattagtaaaaatgccatcatggaagtgcaaaagtataatctagagactgttcaaggactatgggataatctcattgagagcgtgatctcagaaaggggtatcaaatga

SEQ ID NO: 188826 - DNA, 1158 bp, Klebsiella oxytoca
atgaaattaattcagtttactagaatattagatcaatcctcaggaattggtcgagtagccagcgaactaaataataaattaactgataatgggcacgaggtcatcaattactgtatatataaaaacgaagaacagagattcgatagcagtaaagtgtttgttataccttttatttatatttttgaaaaatatctaggcaaatggataggtaaagcgatttcagtattcctgtttgatgtattagttacctttatatcgttattccatagaaataacgttaagctatataacggctgtggttataacaacggaatacaagttggccattcttgccatcttcaggctcttaagactaaggttaaaaatggttcctatagttggataataaatccgttacattatgtatgtattttaagagaattttttgttttcaaaatactaaatagacaattcttagtagccatatcacaacaggttaaacatgaatatataaataattactcttttcctgcagagcgtattaaagttataccaaatggtgtggatatttccaaatttaaacctgatcagagcaataagaatttaaaacagaggctcggagtcccatttgataaagaaatatttatttttgttgggaatgagtttcaaaggaaaggacttaaagttatactagaaggactagcatattgcaataaagaaaacctttccatgatgacgctgcttatcattagcagggataatccagatgaatacattaagcaagctaagcaacttggtatttatgaatactgtaattttttaggagaaataaaagatgttagtccatatttcaatgtttctgactttgcattcttaatgagcgattatgagccctttgggttggttggaatagaggctatggcgtcaggtaatatacttctgagtaccggggtagacggcatttcagattatcttgtcgataatataaatgggtacattactctccgaacgccggaagatgttagccgtattgtttcgcaatgtattaatcttgaaagtgatgtgaaatgtaatatgctgatgaatgcttataccactgcccagtcttattcatgggataaaattgcgctgcaatactctgaagttttggaacaatataaacaagagtattgcaaatga

SEQ ID NO: 188827 - DNA, 534 bp, Klebsiella oxytoca
atgatagagaatgcggcgccatatataaacgaatggagaatatcaaaatatccttcccccgactctaaaaagaaggaagtgatgttcttagaaaatatcaaaaaaaataaagttagtagaagcgccaatgccaaattaatgatcagcacagccccaaatagacttctggcttcagcattattattattatccaataaagcacgatacttaggaattaaacccccagaaataatatccgatgagaataaattaataggtgataataagacagtttgtgtaattctaaatgatgaagtttctgcacttgtgccaaaacaccatgccattagtaactctctaaaaacacctgcaaatttgccaatcagaccgccagtgaaaagcggcaggaaaagtttctttatcatttgcaatactcttgtttatattgttccaaaacttcagagtattgcagcgcaattttatcccatgaataagactgggcagtggtataagcattcatcagcatattacatttcacatcactttcaagattaa

SEQ ID NO: 188828 - DNA, 468 bp, Klebsiella oxytoca
atgagatttttaatttatatttcattgcttacacttcttagcgtttttttgttttatttgttaaatataggatattatcgcggggagttatatcattataaccttgttaatgaaggagggctatcaagttatttgagttctttacttcgatttgatttaatagttgccattttaaacctttccttgttgattttgagctgtgtttttttgtcaaaaaataagtataataatttcaggtttagattttacaccctggctggttattttctttttaatttcataaatagccttgtgttcgcaataaaaaatcatatacgaaaccattatgatatttttgagttgaatgtttttgttgttttattaaaagaatatggtggggttgtcaatctggtctatatcactccattaatattatccggtgctatgctgctactttttttgtcatttgcaaaaaaaaggagtgattaa

SEQ ID NO: 188829 - DNA, 1008 bp, Klebsiella oxytoca
atgagtaatagtaagaattattacactgaggccgtaaaggttgttgatttacctgtgtatttggatgaacaatatatcaattataaacttgtttttatggaccaaataggaatgcctcttacggggaagctggactcatcaaaaacgatcgcgtcaattggtattaatgataagcacgttaaagtaacgctaatcatttacattcagggcattgaacttaagaaaataaatttaagcgtttttgatgatataaaaacaaaagaaatatctttaaaatctactgtatcagaaacctgtgccgaacaagataatacgtgttcatttaacttaaagttaaatatatacgccataaacaagcggagcaatcaggccattttactggacctgagtgagattgaaaaaatagcgaaagaacggagcttaacgcttgggtattatataaagagaagaactggcggtgtatctaaaacatcgaaggaaacaatagataagataaacaacccgagtgaaatcgccaataaatatattaagcatgcattagagtgtttaaaaaatgaaagcaatgcaggtaagggggattattcaagactaatatacagagatttaatggtgaagatatttgaatatttcctaaagaactcaaaagatcctgattcggttgttgatgaaattgtcagtatatttggtacaaatatggaggatagttacatgaggtcagaactactggccttttatcatatctatgaggcgcttattcctaaaacacacacaagcccaggatacgacaaaattcaacattttacatatagcgcggggaaaagttataatacaatgcaaattataacagatacagctcaatatgcgggggaagcatatgatttaataaatggaggtggctgggatgacaccaaatcagacatggaggctaataacttagggcaagcctacggaacgaggctgtatgaaaaataccatccagtgagagctgcgatcagaaatatggattga

SEQ ID NO: 188830 - DNA, 1311 bp, Klebsiella oxytoca
atgccttaccgcttcaagcacatctgtcaggtaggttgcatgaaagggatgcaaaaaatcaaaagaggaaaaacctttaatggacttatttcttatttattaaaacctgcttcgcaccacaagtcagatccgtatgtagtcggcggcaatgtcatagaaagcttcgcagaagcactaagtgcagagttcaacgctacgaagctcctacgctccgatgtcagtaaacctgtttggcacaattctctgcgtctgcctgctggtgagagtctacctatacaccgatggaagctgttagccgatgactatatgaagcgtatgggcttctctgatacgcatctacgcgcttatgtcctacatgatgataaagatggacaacatatacatatagttgcaagtcgcatagatgcaacttcggggaagctctacttaggtaaaaatgagaaccttatcagcacccgtatcatccaggatcttgaacaagactaccagctaacaagaaccaaaggaccgaaagcatctctagcagcgccctcacctaaaccgaagctcaaaaaatcccgtaatgagatgatgatagaaaagagaactggtgagctatgcccaaaaggattcatccaaaacgcccttaacgaactgcttgataccaggcaatcgattaccgacttcgtgcaacagcttgtggcacaaaatatcaggccaatccctaacattgcctcaactggacgcatgaacggcttctcattcgaatacaacgggattgctttcaaagcatctcaattgggaaaagggtattcctggtctgccttgcaaagcagaatcgactaccaacaggaacgtgataatgctttcctgtttaaactgaaatcatctgtcagagaaacatctgttagtgcaactcatgatatggtcataactatagatgctcctgaaaccacgacagaatacgttaaccgccccatagaagcacttatcctcgataaacgagctgctggtcaggacgaatactctatcgcttctgtcgaagcgcttctcccagaagctgttgcaactaacaaagaagcaatagcaaccgaagcgttaaaagtagcgcccaagcgaagctatgcagtgtcagcgttcaggtggttggaatacatcccctacctcgatgtaatttatcgtatgttgaaaaacctcaaagtccccacgctgaaacgtcctcgaaaacacaaaaccatcacttgtgtgaagacgatagagataacacctctccccaaaaaaaatcccattgaatcaatatctcaatctaaaagagcttcgctttcgatgtaa

SEQ ID NO: 188831 - DNA, 1152 bp, Klebsiella oxytoca
gtgactcggattcggacagcgattcggactccgacagtgactccgattctgacagcgactctgacagcgattctgactccgacagcgactcagactctgacagcgactccgactccgacagcgactctgatagcgacagcgattcagactcagacagcgattcagactctgacagtgattctgactctgacagcgactcggattcggacagtgactcggattccgacagtgactcggattccgacagcgattctgactcggacagtgactcggattctgacagcgactcggattccgatagcgacagcgactccgactccgacagtgactcggattcggacagcgactctgactctgacagcgactcggattcggacagtgattctgactccgacagtgactccgattccgacagcgattcggattctgacagtgattctgactctgacagcgactcggactcggactcggacagtgactccgattccgacagcgattcggattcggatagtgactcggactctgacagcgattccgattcggacagcgattctgactctgacagcgactcggattcagatagcgactcggattctgacagcgactcggactctgacagcgattcggattctgacagtgattcagactctgacagcgactcggattcggacagtgactcggattctgacagtgattccgactctgacagtgactccgattccgacagcgattctgattcggatagtgactcggactctgacagcgattcggactctgacagcgattctgactcggacagtgattcggactctgacagcgattcggatgctgacagtgactccgattcggacagcgactcggattcggacagcgactcggactctgacagcgattcggatgctgacagtgactccgattcggacagcgactcggattcggacagcgactcggactctgacagcgattcggatgctgacagtgactccgattcggacagcgactcggattcggacagtgactcggattcggacagcgattcggattccgacagcgattcggattctgacagcgattccgattcagacagcgatgccgactctgacagcgactcggatattccgcaggccaacgcggataccaatactgcgctga

SEQ ID NO: 188832 - DNA, 186 bp, Klebsiella oxytoca
atgatgatgaacgaggcaaacataatcacgcccacgaacgggtgcagaatacgcgccagctgcggggtgcccatgatgtgcatcagccagttgaaggacgggaagaaaaagcccagcccgctcaccgccgccagcacgaagcagaaggcggtgacccagtggttgatgcgttccggcgcggtgtag

SEQ ID NO: 188833 - DNA, 942 bp, Klebsiella oxytoca
ttgccccgtccgggcaaacagtcccagcttctctccggccagagcggtcatattgcccatcacgccagcactgaagtcttctccggagttaaccgccaggttccggccagcggccagctgcatatcttcaccactggtcatggccatgccttccggggccgagaaaagcaccgcttcattgagcggtttcagccgctgctcaaacatctgtatctggctgtcgacatccgccttcagcgcctgcgcctgttctgcggccatttccagctgttgcagttgctgattaagcctgtcgatttccctcagcgcggtatccatattcagagcatcaccctgggctttcgcctgagcatccgcagcgacaaagagtcccttccctgctctcagggttccccactcatcggtgcgcaactctgtgcccgtaccgcgacgttgcccctggctgtccacaaggtgcccggttttgagctgtgttttcccgtactccgtggcgagcttgatgtgctcctcaccgcgcctgtcttccatccgcagtttgttgttcgccggagtccgcaggatattgcgggtgtgattgtcacgggtgacgtggtcggaatgttcggagtcgtgcagcgcatacgcgatgtatggcagatcaatatcgccgttgctgtacgcaatcgccacttcggtgccgtcgatgagcggcgtatgccagcccagcgtttcaccggcatacggtttcgccattcgcagccacaggtaaccgtaaccgggttccgtcccctcccggtcgaagtccagcttcacccgatagcgcccctgctcgtccaggtgtgcgtaggtatcatttttttcgcgactttcgatccgggccggaagcgtaccgtgaatttccggacgcggcatttccgccgggcggaagcagtaacgttcggtgtaaggctggccccagactga

SEQ ID NO: 188834 - DNA, 804 bp, Klebsiella oxytoca
atgagcgaaattgagaaagagcctgttgagcagataaagcaggtcttaaaggaaagaatttctagccctttatggggttatgttttctttgcgtggctgggatttaactggcaaaatttagccaagctttttatgagtaataagcctgtagaggagagaatcatcgatataacttctcaaagctatttttacgttcattttttggtgcttcctttgttgctagggtgtgtgttagccgctctttcgccatattttcctcaatggctttcaatagcacataaaaaagcatttgagaaacagagagtaatggataaggaaaagataattaagaaatatcttgatgatgctgaaattatcgaagaaagagttaggtttgagagtgtcgagtctgtattcaaagagaaagaaaggtctaatagagaaattacagaggcaagaaaacaggttagattatctattctggatatgagaaaggccaagattgatacatctcgggaggctattaataaggcatatgaagatgcacaaatacggctatatgaaaagaaaaaagagattgacgatgttgatgagaaaaaaagactcttggatttgcaatatcattccgctgctaaaaaattaaatgggattgcagatgtctacttcaaatacaaagatatatcatctcacgctgattttttgtcatttctctctgatataaaagagaagggtttgttgactcatgatgcaacaacagggcgttatgatatgatgctgtcgaaagagttaactcctgttaatgctgtgaaaagttcaacgcaataa

SEQ ID NO: 188835 - DNA, 1416 bp, Klebsiella oxytoca
atgaggtgggataaaccgcagtcgttattcgctcaactgttgctgtttctcggcctgccgctggttttactatgggggctgtcggcgttcaatagctacgtcagcgctctgcaggcggcaacccaggcttacgatcgcacgctgctttcatccgcccgcacggtggcggaacgcctggtggttcgccgcggtaggctggaggtgaatgtcccctgggtggtgctggacagcttcgagctgaatatgaacgatcggctgtactataaggtactcgatcccgagaagcgggtgatttccggttttgacgacctgccgtcgatgccgccatcgacctctcgaaccgagctctatccggcgctggcgtggttttatcatactgaatatcgcggtcaggctatccgcgtggcgcgcctgctgcagccggttaacgaaggcggcgttgtcggcatggcggaaatctacatcgccgaaacgctgcagtcgcggcgctggctggcgggacagctgctgttttcatcatggatctcgcaggggctactagtgctgttgacgctggtgctcaccggctggctgctgcgccgcgtgctgcggccgatgcgccggctttcggcgctcatggtgcggcgcgaacccggcctgctgacgccgctgccggagctgctgccgtggtcggaaacccgtctgctgatcgtggcctttaaccgctatatcgaccggttacgggtgatgatctcccgccaggagcgctttagcgccgacgcgtcgcatcagctcaaaacgccgttagcggtgttgaaaacgcaggcctcagtggcgctggcgagcggcgatccccggctgtggcgagagagcctggaggcgatgagcggcacgcttgacagtactattctgcttaccgaacgcctgctgcagctggctaccatcaaacggaaagagcagagcgaacacgcgtttccgccggtggacctgtatgagattgtccacaatagctgcttttcgcgtcttcagcaggcgcggagcaaggctatcgatcttggctatgagggggaaccctcgacggtgaccatcgccggcgatggcgtgctgttgagcgagctgtgcgcgaatctgctggataacgcgattcgctatacgccgcagggcggtatcgtcacggtcagcctgcatcgtgacggagaggcggtgctgctggacgtcgaagacagcgggccggggatcgatgatgcgcagattcagcaggcgctcatgccgttccatcgtctggaaaacgtgggtgataaccccggcgccgggctcggactggcgctggtcagcgatattgcgcgcctgcaccgcagccatccgcagctgctgcgtagcgaaacgctgggcgggctgaaggtcaggctgcgctttttgcgcgcttgttcagagtaa

SEQ ID NO: 188836 - DNA, 327 bp, Klebsiella oxytoca
atgttgcgtgaaggtgccgttgcgcagcaggtgacaacaaagcgtagcggggtgatggcaggtttggcgaccgcattaagcgaccccaacgatattctctttttttcgcagtctattcatatcgccgacggtatcggctgctgtctggggctgttgacggcggtgtgggtgcgtatcgaccggagcgtgctttcgcttgatattctggcggttcgtcgttggctaacggcgcgttacgtcaaacgtttgacgacggtctcggcgacaacctgtggcagcaataggtttagtaaagaaaaaaacggctggcgaccagcgcgcagataa

SEQ ID NO: 188837 - DNA, 213 bp, Klebsiella oxytoca
atgcgaatgcattttagccataccctggcacctctacagtatcacttccccatcttgatgaatgtaaggcttcagtttggggaggaaaaacggacaaaaaccgcgctcggtcctctttacgtgacaatcgccggactaacccagtccgcggttttccagcatcggctcaatcgtaagagcgcgctcgcgccactggcgataaagcgcagttaa

SEQ ID NO: 188838 - DNA, 225 bp, Klebsiella oxytoca
atgaatggcaataagctttcagttaaagaaaaaataggctacgggatgggtgatgccggatgcaatatcatattcggcgccatcatgttgtttgttaactatttttatacggatatttttggtctcgcgccggcgctggtgggcgttttgctgctttccgtacgcgttattgatgccgtcaccgatccgatcatggggggcgatggccgaccgtacccgcagtaa

SEQ ID NO: 188839 - DNA, 471 bp, Klebsiella oxytoca
gtggaaagcccggaagccatcgtgtcggcgattaaccattacctgacgacgctgctcaagggccaggcagccgataatctgaatgtccttaccgcgcggacgaacggcgcggttaaaggcaatacctttgccaaatcagcgatcgaaaccgagctgctggatgcgcagggtaaggcgcttggcctgccggtttccgcgctgcttggcggcgcgctgacgatctcgctgcacgcctggtcgacgctacccctacagtggggcagcgagatgtctggcccgctattgctgagggactatattgtcagcgcgccgctaacgttcgccgaaggagaggtgacgctaccgcaaacgccgggtcttggcactgaactggaagcagacgtggtatcagacggtggccagcagcctgatgcatcgctacggtacgctggcggagcaggccaatgccatcctgtttctcgccagcgatga

SEQ ID NO: 188840 - DNA, 642 bp, Klebsiella oxytoca
gtgattggcgcgctgctgttactggttggcgcgggtatgctgtggtccgcctgcggcaaactgctgcatccggcgtctatcccgagcgtgcatattaccgctctgtgggtggcgctcgccgcgctgaccgccaaagagatgttattccgctatatgctcagggcggctaaacaaattcagtcgtccatgctgattgccaacgcctggcacgcccgctcggatgccgcgtcgtcggtggtggtcgcggtcggcatcatcggtaacctggccggcttcgcctggctcgatccggtggccgcgctggccgtcggcgcgctggtcacccgcatgggctataccttttcgtatgacgccctccatgacttgatggatcggtcagtggatagcgacagcgagcagcagataatcaccactattctggcaacgcccggcgtcgtggcgctgcatgacctgaaaacccgacgcgccggcgatgggatcctggtcgatgtacatatcgaggtgccgggagatttatcggtggcggaagggcacgatattgcgctgttggcccgcgcgcgggtgctaaacagccaaaacgtgctgcatatgatgattcatattgacccttgccgcgcggatagcgacgcgattatcgcttag

SEQ ID NO: 188841 - DNA, 603 bp, Klebsiella oxytoca
atgaccaataaagtcaatataacgaccgacgcgggcgccgatgccgccatgattaatgaagccgttgcggcgcgcattaagcgctaccgggcggaaaagaagatctccctggatgagctgtcgcgacgcgcgggcgtcagcaaaggtatgctggtagacattgaagcctgtagggccaatcccagcattgcgctgttgtgccgtctggcctcggcgctgggcgtttccgtggccgattttgtcaatgtcgccaccgcgccgccggtaaaggtgattgcagaaggcgagattcccacgctgtggcagggcgagcagggcggcaaggcgcggctccttgccggtaccagcggtccggatatggttgagctctggcagtggagcctcaatccgggagaaatgttcacatcgccggggcacggggaggggacgactgagctgcttttcgtgaccgagggcgccttaaccctgacggttaacgacggggtctatctgattcgagagggggattccgccgtcgcgcgtaccgacgccccgcatagctacgctaacgccggggataagatcgcgcgattcaccatgacggtgagcgaaaaagcgcgctag

SEQ ID NO: 188842 - DNA, 270 bp, Klebsiella oxytoca
atgacgggcaatgaagaaaaagaacagctgataacagcacgctatggggagaaagctcgcccgcaagatattatctggaacactcagattgaagggttacttaagcaccgttcggtaagacatttctcgcagcaacctctgccggaactaagtaaaatatgcactggcagctgcatatatcgtcgccaggccacgcataataaatatttccctaaaggcaacattcgcttcgctcaaagcagacattcccctggcattacagttctataa

SEQ ID NO: 188843 - DNA, 270 bp, Klebsiella oxytoca
atggccatattttctccgcttgagagagcggcgaaagataaaaccgttgaggatttaagccgcggctatatcaaagagctcgaagccttatttgtcgcgcttttcgcagccggtattgcttccggcgagtttgaagcaaactaccagccagaggcgatggcaaaggcatttatgtgtgcctattttggtttccgggtatttggcaggattgtgcatgagactgaatatcagcagctggcaatttcggcgattataaacagtattcagtaa

SEQ ID NO: 188844 - DNA, 357 bp, Klebsiella oxytoca
atgccagtctccaactccgttctggtccaccgcttccatgccaaactgcatcgcgtcctgtttaacgacagtattcataagcggcatttgttcatgaagcgcatcaccaaggccgacatcgacccaccatctcccgttgggattactttcactcgacaacccttcagcaatgattgccgcatggttttccagttttatgtgttccggtccttcggctccgtggacgtttgcagggtggatgctcacgcggtaaccaaggtgagtaagaagtgtgtggaagccgccattgagctgaaaacaataaccaccacgtcgggtagtcgccgctctttggaagcaagaaaacctctaccatga

SEQ ID NO: 188845 - DNA, 975 bp, Klebsiella oxytoca
atggtatcttttgtcgagaaaacatatttaccagtgtatattgcaactgagaatgattatttctctacgggacttatattccttttgaaagaattgtttgaagaggaatatcacgggagaattatcatttcaaaggttaaggaacctatggcggccgatctggttgtacaaattcattcaccgggagagaaagtattcgactgggtgggatgtaatgattttcaaacgcaaaatgaatataaattcatgatgttggggaagaagtggttgagcgtatatcctcacaatgatcattatgatcggaatattgtttgtccggtcgtaaattctgttatcacaatgagaagttcggtggctactattcgtagaaagttatttacattatttttcgctgacttaatgtgcggccctccggattttcgtaaaccaaattgtgcccgatgccctggtccctatcagttggcatggagagaacaattgatgttaggatatttaagtcaggggttagggcattacgacatctcgcaaaaaatgggctgtacaatcaaagcactcagtagctatcgacgttcgatcatgcgcaagctcaatataaaaaaatacagtgactttgctcagtggttgggaacgaagtccatctccgaaaagtattctgaagtcgtcaatcaatacgaacaggagcttgatgatgaaggcatcatatggcaaaccaaaaaactcgatgacgcaatcgtggaggtggacgacaaacaccgcgtattgcagagcatgaggcgtctgatgacgagccgtatgtatagaagcgggtctgaggacgatatctggttaacgacgcgtgagattgcaaatgaaatggatacgagtatttacagcatgcgctacttgctatgccaaatggaaataacgggagtcgtgataagtattaaaacgggcaaaggccggagtcatacactgcgttggaaattagctagctag

SEQ ID NO: 188846 - DNA, 1293 bp, Klebsiella oxytoca
atgagtcaccgggcaaggaatgctttagtcttcattctcggtatcacgatggttccttgcgcgcaggcggatgttttgaattatgcccgggactggactcagcgcgaagaagaaaataaatccgtagcgcaacctcaggcacaggaagaaaaacgccctgcgtcgcgaccaacgtcagagacgcagcaaaaatcgcctgctaaacaaaacattaaagtcagaccttccactgcgggaaaaacaataacggtaccagcgaaaagtagaacggctgaagtgaaagctaagaaaacgcctgcacttccgttgaacgatcctcaaaaagatgcctgcgtaatgacgggtgagggaataaataacgaaggtaagtcagaagtgtattttcccaatgaacgtacattaggccggtggttgaaatcgttgatccaacatattgctgccaccccttcagagaaagaagtaaaggctttgtacctggtgcagaaagaagaaatgaaacgcattagcgaaaatttagtgaataatgagcgtgaaatagtgggactgagaaatgctgaaaaagaacgcctttcactgtttaagcgagtagagcaactggaagaaagaaacgcgcagtggcagctgttaactcagaaaatgcaaaaaaatctgaaggaggcacaatacccccctctgcctacgagtggacctgaattagaggattttgcggccggaatggcgatgggttttgatattatcgaattgcttgaacaacgaagtgagcagggggttcaggttgatcggacattgtttctggcagggataacggagacgctacgcggagagcgacggctgtcccaggaggatttcgaacaataccttaacggggccaatcaacgtgttgctaacgctgttcagaaagcccttaaagataaggaggtacgcgatcgcgagtggttgcagaactttattaagcaggaaggtacgctggccgccgataaggaggcgtggttccgggttattcatagcggtgaagcgttattaccggacaatgagttggtaactgaattaactatttcgtttacacgtcgtctcacagatggaacgttgattgctgataccgatatttcaggtctggtactgcaagaaaaattcactaacctgccgtactggttacagatcgttgttgaaaaaacgcgcttaaatggcgaagctgaattagcagttaaagtaaatgaatatggcgatccaagtgaaaatggttcttatgtagagcactggagtatacgcgtagttaatcaacagttaatgtaa

SEQ ID NO: 188847 - DNA, 960 bp, Klebsiella oxytoca
atggaaaagagaaagttgaaaaaattgatgctgacagcagggattgttctgggcaatgccctgttatggtctgaatcagctttggcagcgaattgtaatgcctttggcaatcagggagggggatgcccgaccgtgcagtcattacaagtcaatggtagttctgtggcggttaactgggccgcagatatgaatgcgcagacctttgcctcaataacctcctcgcaagcaacaacgtggggtttatatatgatttatggttggtcgacctcaatgaatggacattggttcggtggaggaaccaaaacaccactgatgacggtcactaataccgatcctacgcgtgatgctctgggtaatgttacaacagatctttgtactaccagtgcgtatcaatgtacgcatgacagaatggccgcaaggttttatcagaagtacggtttctcaggtacaacaaacgtaacactgccctcaacgtggccagcccaggcacctccgtgtcttatttttggcgcaataaaccccggaacgggcgatttttataccgtctatcgacctgggctggcagaaccatgcaaacctggatttcctggaacggttgatcctgaaccggatcctgaatggtgtggcatgagcaccagcgcgctcacttttgcttttggtgatatggcgccggcggcggtagcggggcagtcaatgaccaaaagtgtcgtgatggcctgtagcgatgcaggtgtgagctatagtttatatctgagtaatgtttctaccaccggcagaaataaagttgatttgggccgaggggtcaccgcaacggtgagtgctaataatcaggcgttgcaaacaaatagaacttctacaggtaaaacaaatacgttaaatattacagtaaccctcagtggtacacctaccagtacaggttcaattagtggcactggtattttggcggttaattatttataa

SEQ ID NO: 188848 - DNA, 507 bp, Klebsiella oxytoca
gtgaaaataggaaagtttgggcgacgtgccgctctgtgctgcctgatcgttgcagcgccgtacagcctggcatcagacggcgggacaaccacgctgactatcagcggcaatattgtcgaaccggattgtgtgattaataacaatcagcagattgtggtgaattttggtgaggtaatgactactcggattgatggtgcgaactacgaaacgccgattatctatacattggaatgcaaagacctgattcgtaacacgttaaaaattaatctcaaaggtaacggcgcaccgtttaatagccagctgttttctacagatgtaacgggacttgggattaaagtatacggcgcaagtaaaacgacgattgttcccaataccggggtgctgagttttacctatgcggataataaccctccacctctgtatgcggttccggtcaagcagaccaacgcttcgctaccaggcggggcatttaacggttccgcgaccatggtgtttagctatcaatga

SEQ ID NO: 188849 - DNA, 534 bp, Klebsiella oxytoca
atggtaaaaattacacgtttcctgacattaagttttttattgggcatatcttccgtctctgtggcatccgaacagggcaggggactcgtcacaatgaatggtcaaattcaggaatcagcctgctctattcatactgatgacacttggcaggaaatcccctttggggtaatttcttataatgaccttgaccaggaaggcaaagcaattattaaacctttcgctatacgtttggtgaactgttcactggaacggagtaacggcgggttgtggcagagcgtaaatatcacctttggtggggaaactgaaatatttcgtcctgatatatttaaagttcatggcgaagcccgcggacttgggttgcgtattcacagccaggttggcgatttagcgcgagacggtgtgccgatgccggccatcatgttacaaaatgataataatgaactgcgttatttattatcgctggtgcgcggcggaaaatcgttgtcggaaggtgactggtacggaattattcgattcatggtgacctatcagtaa

SEQ ID NO: 188850 - DNA, 153 bp, Klebsiella oxytoca
atgaacattatctcggcggatatattttcggtgagcacagcctatttgaacgtgatctggaagaaattcgcgggctcaccctgcggcgaaccagtgaggctgcacaacctctacagcgacagcagcaacttcgcggactgtactcgctattga

SEQ ID NO: 188851 - DNA, 351 bp, Klebsiella oxytoca
gtgcggatagttcggcgtaccggcctgctggttcaccagcacccgggcgaggacaatttctcccgccctactgccggtctgcaccgacttttccgccagcgctttcgcctggcggtagtcggcctgctgcggattgcggattttgagctgagccagcagcgccagcgcatcgccgtcgcccttgtctgccgctttctgcgcccagtattcagcctgcggaaaatcgccgaagctgacgtaagtgtcggccaggtagtactgcgcgcgcgggtcgcccgcttcggccagcggtttgtactggctgccgggttccatggcgcctgcggcgacgcttgccatcaccagcagtaa

SEQ ID NO: 188852 - DNA, 180 bp, Klebsiella oxytoca
atgagtgaagacaattatttatgcccggaatgggtaaaaaaggatgccaacattcctcatgactggaagaaatacgtaagtgaggaagtcatggcgatttggggagactttagcgtaagccagcgcatggcattgggccgatgctttgatgacattgcaagtcgtgaggagtgggattga

SEQ ID NO: 188853 - DNA, 537 bp, Klebsiella oxytoca
atggataaggcgcatttttcaacgctgctgagaatgaaagagatgaacatgcgttttgtgtcgctcacattccataccgaccagctcagcgctgttcttgtgattcacatggtttgtgaaaaaattttagaaacatggattgaggcaagcagccacaataagaatttttttaataattcagttagcttaacctttaacaacaagcttattattgcaaaaaacttctcgtttccaaacgagtgctttcagtttatgaaaaaactcaacgcgatacgcaacaagttcgcccatcagattgacaaaacagaaatgactgaagaagagataaattctctttataattcactatcagaatttattgccagagagcctgaattcgaccctaagacgtcatcaattgaatctcgcaaaaaaagatacaaatacactgacaataataacataaagctactattgctatttactgccatgtatctttcggtcatgtatttcgccggattacgtgaactttacatccctttaggagaaaagccctga

SEQ ID NO: 188854 - DNA, 990 bp, Klebsiella oxytoca
atgagcctgttaatgccatcaaggccgatagtcatcaatcctgaccttgcatacagcattggcctgaatgaagccatagcgttgcagcaggttaactactggctgaaggagacaacctccgggcttgagcgtgacggtgtgcgttggatctacaacaccactgagcaatggctggagcaattcccgttctggtctgagtcaacgctgaagcgcacattcacccgcctgaagagcctgggcgtactcaaaatcgagcagctaaacaagtcgcagcgcgacatgaccaactactacacgatcaattacgagagtgagcttttagatgaagtcaaagtgactaaatcgaaggggtcaaaatgcgctgttccatcaggtcaaaatgacacgatggacgaggtcaatatgaaacgctccaccaggtcaaaacgacccgctgtcatcaggtcaaattggcacgatgatcctacagagaatacaacagagagtactacagataataaaactccttcttgtccggtcgctccgcaaccagacactgaaagtcatttggatgattttgctgtccgacatcctgacgcggttgtgtatagcacagcaaaacgccagtggggaactcaggacgatttaacctgtgcagaattcatatggggaaaaatcatcgggatgtacgagcgggcggcagaatctgacggagaggttgttcgtcctaaagaaccgaactggactgcctgggccaacgaagttcgcttgatggtatacatcgatggacgcacacataaacaaatctgctcgctgtttaagcgtgctaaccaggacacattctggtgcaagaacatccttagcccatcaaagctgcgtgagaaatgggatgagctgtcgctgaaactatcggcatcactgagtgctggttctgcaagagaagatcgggcatttaagccgacgcatgatgatgttgattattctggcataccagcggggttcagaggatga

SEQ ID NO: 188855 - DNA, 393 bp, Klebsiella oxytoca
atggctggtgctctgggaatgacagttacacagttcaacaacaacctttacgagaaaaatggctgccgtttcttcgaagtaagtgaacttgaagcgatggaggacatttcaaacacctcgttactagctgattacttcgcccgtcgccgtggtgctctgctggtggatgtgccgcaccttgaagaactggatcgtgtagacctgtttagtcgtgcaatgcgtacctcagcagccagggggcaggttgatcagattatcgagcaggctcttgatgatggggttatcgaaagacatgaagcagaagaaatcatggtacatcaccgccgccatctggcagcacgtgaagaagaaatcgcggcaattatcacgttgtttgcacgcaaaaagaagtga

SEQ ID NO: 188856 - DNA, 213 bp, Klebsiella oxytoca
atgacgacaacagagcttgaagagtactttgggaccccgagtaaagccgcagattttttttctgtatccaccgaggccttctacttatggcgaaaaagaccagggggattaatccctaaaggtcgcgctgctgaagcggcatatagaactgacggaaagctggtttttcgtcctgaactttacaaaaagtctaccgcctcaacaggcaagtag

SEQ ID NO: 188857 - DNA, 300 bp, Klebsiella oxytoca
atggcaaaaacagcacagcagttaattaaagatgcctttgaggcggctaaaacaatgcctcctgctactgcagaactgcttaaagatttggcaactatgctcgatgtttcgaatgttactcttcgccaggcacgtaaagaacgtgacgccatgaaagaagaagttatttcctgggctaaagaatgcgatcaaattgttgaacgtcacactaagacccgcagcaatatgcacgtcttagaagctatgcgcgatatgaagaatatctcggctgcttccaccagcgatgtggaggctgtctga

SEQ ID NO: 188858 - DNA, 786 bp, Klebsiella oxytoca
atggctaaagattcaaaagttgtatatggcgccagtggcaagacgaacgttttaacgttcgagcccgaaaacctgcacctggtcaccgatatgacccaccctctctacgatgaacgtgttcacctgccgatcgacgaagggatggtactgaacatcaaggagctgggtgtactggagccgatcatcgtctggaaagaccctgaaacggggctcacctgcgtagttgtaggccgtcagcgcgtaaaacataccctggaggcaaataagcttcttttgaaagagggcaaagacccactgcttgttcctggggtcgttaagcgcggatcagcaaatcagatggctaaatacatggtcagcgaaaacgaaattcgccgacctgatacaccgcttggccgtgctaaaaaaatgtcagacgctctcgaccgcggactcgatgaggacgacattgcagtgttgtttggctgcagctctcagaccgttcgtgcaacgctgtcacttctcgatgccacccaggccgtccgggaagcggtggaggctggcacggtgaccgttaccaaggcacgtcagttggcttctcttaaacccgaagagcagcgggagaaggtctctgaaatcgaagcggcaactgctggcacaaccggccatgaaaaagcccggcgtcagcgtcagatactcggtgatgcaaagccgcgcctgaaaaccagaaaagaaatcacaaaagccctggaatctgcagagggtgaatatgctgatgctctacgctgggtgctcggggaggtagcatga

SEQ ID NO: 188859 - DNA, 585 bp, Klebsiella oxytoca
atgacaactgatatcaccgaactggcgctgagagagaaattcgaagcgtggtgggagcgcacccagcataacggcaatcctcctcgctttggctgggagtgctggcgcgatggtggaggctataaggttgacgatgacgaatccgaacttgatggaatgtgggaggcatggaaagcggctagtactgagatggtagaggtgctggagaaggcgcagaccatcaacgcagcagccgaaaagctggttcgctgcaaaggtcgctatcacagcgagcagaactatcgcgcactggcggcgctgtttggcgtgacagcgccagacctgccgccgcttgatggggattcctgcacagtcaccattgagccatttcgctcgtttgtcactgatgctgacttagcagcgctccaccgcttcgccgaatgctgcgatgaccctgaatctggcggtcacgatttggaaaaagagcaggtgcggcggcttgaggcaatcggagcattgcagcgttcagggcgaattagctacatcactggatttggtgatgtcctgatttcgattacggctggcatcgagtgggaggttgagtga

SEQ ID NO: 188860 - DNA, 978 bp, Klebsiella oxytoca
atgaccaataaccagttagcaccggaacgcatctcagatatcagcgattattttgttgagatgcaagaccattacagtgacccggcggacagagaaaacttcgaaattttccgtgatgctgaattactgatgaaagagctacaggaacgccgcaattccgagatggacagcgagccggtggcgtggattgttcacgctcgcactggtgaccaattaaccaccgatggcggctatgtcgccaatgctgaggggatattaggcctgcattctacgccgctctatcgccacgcgcagccagcaaaaggtcttgagctggcaggctggcaattcaaatcagtaaacggtgactggttgggccttatcgacgaacacggaaagaatcaggccgttcgtgatggttgcgaggttcgtgaggtttttgctatggctgatggcgtcaatgaacgcgaccaggtacgccgcgagcacgccgagtggtcacagtccacattcggtaatgtcggccctgttggcccactgaaacacttaagcaaagaagcgctggaggcagctgccgaacctggcgacctctccgagtgggctgatatgcaattcctactgtgggacgcccagcgccgtgccggtatcactgacgagcaaatcactaaggcgatgattgacaagctggcggtgaacaaacagcgctcatggcctgagccgaaagacggagagccgcgcctgcacatcaaagagcagccagcgcctgtagtaccggtagtgccggtagtgcctgcaactcttccgtgctccgttgagttaaagccaggtcttatcatcggcaaggggtgcaaaacagagactttgctgactgcactgcgacgccgtgccgactataacgctgacattgacgccatgacgccggaagaacgtgcagagcatgacgccagtatcaaagcattcaaagccatgctcgcagccgccccgcaggaggtgaagtga

SEQ ID NO: 188861 - DNA, 264 bp, Klebsiella oxytoca
atggggcagctagttactatctatgactgggcatcaggaccaaatggttttaaatatccagtgagcaaagcaacactgaataaaatagctaaaaccaaacaaaccttcccggctgcaatcaaacaaggtcgccgctgggtgattgatgaagatgctcgttttattggcatggtgggtgatgttgatatttctacatctctgtcagataaagcccgccagttagtggagaaggccttctatggcagctcgacccagaaaacataa

SEQ ID NO: 188862 - DNA, 1140 bp, Klebsiella oxytoca
atggcagctcgacccagaaaacataacattaatattccaaacttatactgcaagttagataagagaacatcccgtatctactggcagtataggcatcccacatcaggtgtttttgtagggtttggaaccgatgaagatgcagcgaaagctgctgcaactgagatgaatcgtctcatttctgaacaggaaacaaagcaatcatacgctcttgtcgatatggccattaaagcaaacgacaagaaagccccgggaatgagagttagcgactggattaaaaagtataaggaaattcaacaggagaggatggaaaacaacgagatcaaactatccacattaaaaaataggcgtctttgctcgaatattttatctaaaagaacaccgaatctgcgaatagcagatgtggataccaagattatcgctaccatcattgatgaatataaaaatgcaggtaagcaaagaatggggcaacaggtaaggtcggttctggttgatgtttttaaagaggctcaacatgcaggcgaggttcctcctggttataaccctgctcttgctgcgaagaatcctgtagtgaaggtaaggagaaaacgattgaccttagcagaatggaaaaccatttttaaacacgccgaggatatgcagccagctgcgcagaacgccatgcttctggctttaattactggccagcgattgggtgacatcgttgatttcaagttttccgatgtgtgggatgggttcctgcatatcacacaaaacaagacggggtccaaaattgccttaccactttcccttagatgtgatgccatcggtatgacgcttgaagaagtgatcgcaagatgccgggatcgattcgttagcaagtacctaattcatcactcagttctgcatgcgacggcgaagccaggaagcaaaatccctgtgaattccatatcgcggtatttcaccattgcaagggatcaatcagggattaagtggcctgagggtcataccccgccatcgtttcatgaacaacgttcactggcatctcgcctctacaaagaacaaggcttaaacgttaaaaccttgctgggtcataaaactgacgcgatgagcgaagagtatgcagatgatagaggactggactggaaaaagcttcaggtgtag

SEQ ID NO: 188863 - DNA, 1152 bp, Klebsiella oxytoca; identical to SEQ ID NO: 131041

SEQ ID NO: 188864 - DNA, 663 bp, Klebsiella oxytoca; identical to SEQ ID NO: 131040

SEQ ID NO: 188865 - DNA, 1182 bp, Klebsiella oxytoca; identical to SEQ ID NO: 131039

SEQ ID NO: 188866 - DNA, 1287 bp, Klebsiella oxytoca
atgattgataaaatacaaagaaaactcgcacctttacgctggaaaaaacttattcctctggcatttatcacctatagtctggcctatttagatcgtgctaactatgggtttggtgccgcatcaggcttagcagaagatctcaacatcacccctgggatatcatctctgttaggtgctttattctttctaggatattttttctttcaggttccaggtggaatttatgctgaaaaacgcagcgctaaaaagctcatattttggagccttattctgtggggcatcctggcgactgctacaggtatggtccacgatgtaaaggtcctggcggtgattcgttttctgcttggagttgcagaaagtgtcgttatgcctgcaatgctcgtatttctaagtcactggtttactaagaaagaacgttcaaaagccaacactttcctttttctgggaaacccgattactgtgctatggatgtccgttctttcgggctatttagttgatgcctttggctggcgaggaatgtttatcattgaaggcgtacctgcaattatttgggcggcaatatggtggtttgtttttgtagaccgtccagcggatgcaaattggttaacacaaaaagagaaaactgacattgaggctgcacttgcagctgagcaaacaaacataaaagaaataaaaaactacagtgaggccttccgttcaggaaaagtactttccctttcctttatacattttttctggaatatcggaatgtatggtttcatcatgtggctaccgtctattttgaaatcagcatcaggcttgagtattgtcgcaacaggttggttatccgcggcgccttatcttttagccgttccactaatgttaagcgcatcctggtattcagacaaatttctgaatcgaaaaattattgtacttctctttttaggacttggtgccgtttgctttatcggttccttcaccattggagcctccaatttctggttatcctatatgctactgatgattgcaggcggagcgatgtatacaccatacggtccatttttcgcggcaatacctgacatgatcccaaggaatgtgatggctggggcgatggctttcatcgttagttttggtgcgcttggctctttcgttggatcatggattgtaggctatctaaatggtttgaccggtgggcctggtacctcttatattttcatgggcagttcacttgtcctggccgttttactgacttcaatgaccgcttttaccagtaaagagtccagtagcgcaaaagtacagccttgttaa

SEQ ID NO: 188867 - DNA, 453 bp, Klebsiella oxytoca
atgcagcatatggttggagccaaattggatgtactccttggagaagggaaagtcacccatcatcattcgaatcagaacgattcaggctccagtcgcagtggtgattttgactatgaagacatggtgttacatgttaccaacctaccaacagaagcattgctgagcaagtgtatcgcaaacctggaaggaggttataagccactcgtaattacgtcgtctaagggtgcatttgtattagaaacattactcgagaatttttgtaatggcgtatacgatggccgtgtagatatcttggagtttgaacagtttatagcatcaaacgtcattgaacttggaaggtttaatgccgctggtcgtaaagcctcactcagtaaaattattgaggcttacaaccgtatcattgaaacagtggaatatgatctcagcatgaagatcgagttaggggaaaagtag

SEQ ID NO: 188868 - DNA, 1503 bp, Klebsiella oxytoca
atgagctcacctctgctgattgcacgcacgctggataaacagctgcatttactgcccgctatggccaaccgccacggcttgattaccggcgccacggggaccggtaaaaccgtcactctgcaaaagctggcggagtctttctcggaaatcggcgttccggtatttatggccgatgtgaaaggcgacctcaccggtatcgccgagtcgggccaaagttcggaaaagctgcaggcgcggctggaaaaaatcggcgcaacggactggcagccgcacgccaatccggtggtgctatgggatatttttggcgaaaaaggccacccggttcgcgccacggtttccgatctcgggccgctgctgctggctcgcctgcttaacctcaatgaggttcagtccggggtgctgaatatcatcttccgtatcgccgacgatcgcgggctgctgctgctcgactttaaagacctgcgcgccataacccaatacattggcgacaacgccaaagcgtttcagaaccagtacggcaacatcagcagcgcctccgttggggctattcagcgcggattattaaccctggagcagcagggcgcggagcactttttcggcgaacctatgctcgatatccaggactggatgcgcgtcgacgctgagggtaaaggggtgattaatatcctgagcgccgaaaagctttaccagatgccgaagctgtacgccgccagcctgctgtggatgctctccgagctttacgaacgcctgccggaggccggtgaccaggagaagccaaagctggtctttttctttgatgaagcgcatctgctgtttaacgatgcgccgcaggtgctgctggataaaatcgagcaggtcatccgcctgattcgttctaaagccgtcggggtctattttgtttcacaaaacccggcggacattcccgatgcggttctcggtcagctgggtaatcgcgtgcagcacgccctgcgcgccttcacgccgaaagaccaaaaagcggtaaaaaccgccgcgcagaccatgcgcgcgaatcccgcgttcagtaccgaacaggcgatccaggagctgggcaccggcgaggcgctgatctcctttcttgatgagaaaggcagcccttcgatagtggaacgcgcgatggttatcgcaccctgctcgcgtatggggccggtcaccgatgacgaacgtaacgggctgcttaaccactcggcgctgtacggaaaatatgaagaagagatcgaccgtgaatcggcctttgaaatgctgcaacagggcgttcagagcacaacggagcagcagcaatcaccgcccgcaaaaggccagcaaaacggcgatgacgacggtctgctcggcgggctcaaagacattctgttcggcaccaccgggccgcgcggcggcaaacgcgacggcattgtgcaaacggcagccaggagcgcggtgcgtcaggtcaccaaccagatagtcaggggaatgctgggaagcttacttggcgggcggaaacgctaa

SEQ ID NO: 188869 - DNA, 1710 bp, Klebsiella oxytoca
atggcagtggaaaaaatgattgttgaccatatcgatacctggaccagggcgctgcaaacccgctccaccgccgggcgcggcagctcgggtaagattgacctgtatgggattaagaagctgcgtgagctgattctggagctggcggtgcgcggcaagctggtgccgcaggatccgaacgatgaaccggcatcagtgctgctgaaacgcattgcggcggaaaaagccgagctggtgaagcaggggaaaattaaaaaacccaagccgctgccggagattagcgaggaggagaaaccgtttgagctgccgaagggatgggaatgggtacgactgggaggtatagctgaaattatccgaggcgtaacatatacaaaaaaccaatgttttgacgtgaagaccgttggaacaatagcacttctcagagcaaataacatacaggaacaaatcgttttagatcctctaatatacgtggacgcaaacattgtatctaaagagcaattattattgccgggagatattcttattgcgatgtcaagtggctctgagaaattggttgggaaagctgcacaaataaaagataaaatagaggcatcttttggtgctttctgtggaacaataaggccactttcaacgtatatttctaattttttaggattttatttacaaacaccaacctatagaatacaaactcaagaattgggaaaaggcattggtataaaaaacctaaataaaaccaacttagagttaattttagtagccattccatcatcaaatttaatggaaaaaatcctaactagttgttcacagttatttgaattatgcgcccaactggaacagcactccctgaccagtctggacgcccatcaacagctggttgaaactctgctaaccacgctaaccgacagccagaacgccgaagaactggccgaaaactgggcgcgtatcagcgagcatttcgacacgctgtttaccaccgaagccagcattgacgccttaaagcagaccattctgcaactggcggtgatggggaaaataacaacgccgaaaatatcgccttctacaaagaacaaaaatacaaccgcacaaagcaactctatcttcagtgacctagtgcaatatattccagcacattggaatctttgtactttggatcagatatcagcagctatcatagattgtccacattcgacacctaaatggacagaacaaggttttatttgtgtaagaacaaaccaatttaaaccagggcatctagatttaaataattcaagatacgtcagcgaacaaacttatattgaacgaacccaacgtttagaaccatcgtatggtgacatactttatagcagggaaggtggaatattaggggtcgcatgccgagttcccgaaaaaattaagatttgtttggggcaaaggatgatgttgattagacctaaggaaaatattacttccgagtatcttgagattgtattaaacggccctttaattacgtctttggctcaaaaaatgaccactggcggagctgctccaagaattaatgtttcaactgtaaaagggtatcccattccttaccctccaattgaagagcagaatcagataattgaaaagatcaatgaactgaatggagtttgtgaacagttaagatcacaaattcaatccgcccaacaaacccagctccacctggccgacgccctcaccgacgctgccataaattaa

SEQ ID NO: 188870 - DNA, 789 bp, Klebsiella oxytoca
atgaaaaaattaatagtcatttcagcatttattctttttgccttatctacgccagccatatcaaagcagataacatctcatttaaaaatggttgatggttattttaatggaatcctaacggcaaatgatgacgagccgatatggtttggtatcttggagtttgactttttaggcagtcagcacctaacctgcagaatggactcaatgcacacctctggagatgctccagacaggatgtcgtcagtaaactaccgttgccaaaatgggttttctgtccagctatcaaaaaatgaaaatgataggtatgctattttaaaccttcaaaacatcaactttgaaagcggagaggaaagccagttaggtagttacaaggtcacctcatcaattcctttaactatgattgaaaataataaatataatgatgatttgtttaataagaggaatgccgagagggagcagtgggtaaaggaaaatactgttgacgttttttccgcatgcgacattatcatgtcatcgcaccttctggcttctcaaatggttaatgctggaacacaaaataacagcgcaggcaggaatgaaataagggatgcgctgtcaaaactttacccaaaaaatgcggatgaaatggtgcaatcatttataagctttcactctggcgacaaagagccttttggaatgccgcttacatttggagtcaaggggcgcatgattaaaatgtgcacggatcagccgggtgattacatacctgagtttggctcgctggtcatgtcaggtaaaatattcagataa

SEQ ID NO: 188871 - DNA, 588 bp, Klebsiella oxytoca
atgctaactaaccagactcctgagagcgtgtcatcgcagggtaacgccatattatcgctgctacattcagcgctgaagggaatgacgtttgtcgatgttgttctggttagagaggttgaaggcgatgtgttgaccgttctccccctggtcaatgatgtagacgtttctggacgggccattgccaaccaggacgtttaccagatcccatacctcagacttcaggcgggaaacagcgcggtaaaaatggagccaaggccaggagatattggtctggttgtggtttgcgacaaggacacgacgaacgctagggaaaccagagcggaaggcccggcgccaacgcagcgccggcactcgtattccgatgcgatatacataaccgcaatagccagcatgaatggcgagccgactgaattcgcagaatttaccgggagtggcataaacataaagagccccggtgttattaacatcaatggcttgaaagtccatccgagcggacagcttgagcttgtcgatggttctatcgttgatggacactctcatggcggagtacaattcggaggagacagaaccgatcctctggagccgtga

SEQ ID NO: 188872 - DNA, 516 bp, Klebsiella oxytoca
atgaaatatccaaccgtatcagtaaacggcgtatccgttcgtgtagatggcgaggggcgctacaatctcaacgatctacatgcagcggctgtggcggaaggcaaagccaccgaatcacagcggcctggtgaattccttaaaacaaagcaagtaagaaggtttgtacaggccctgagcgatgcgaagaaaatcgcatcggtattaaccatcaaaggtggaccgctccaggggtcatggggactcgaactaattgccatccgttatgctgcgtggcttaatccattattcgagattaaggtatacgagacattccagatgctgatccgtaatggctttgatgctatggctcgcttaaataagattgaccatgtgataaacgccgaaaccaaggaagtgagtcagtgcgcaagccgtatgggcaaatgggggtctggtggtcgtaaacgcctactcctggcagcccgcgcccgtgtggttgatgaggttcaaatgtacctgccaggctttgaggcgtga

SEQ ID NO: 188873 - DNA, 186 bp, Klebsiella oxytoca
atgaaaaaacaagatggtgtaaagcccagctatgaccatatcagttttgaagaggccgcaaagccgttaatcaaatggctgaatgagaatgccaatcctcacgcctccgtaatcgttgatgcgaccaacgctacgctgttcatcggcgaaattagcatccaaacggaagagttcattaaggactga

SEQ ID NO: 188874 - DNA, 141 bp, Klebsiella oxytoca
atgagccgtgacgttatcgaacgcatccgagaccgctggataaagctccgccttatacgcagcagcggcaccgtgctggttgactaccgcatcctcaaaaactttattcgcacctgtcagatccggggagagacagcatga

SEQ ID NO: 188875 - DNA, 231 bp, Klebsiella oxytoca
atgaagatcacctatagcgacgaaggggcttacgcccgcatctggctgaccggtccattttggcagttggctaaggccaggcgtattgcggatgctggtctggacgagtcaccggtcaacacctgggagtctcacggactcaccttccagatcaccctgtacgggaaaaacgcatatgtactcagggcgtataaagcgatggctaaggccatggcgagggcatccaaatga

SEQ ID NO: 188876 - DNA, 582 bp, Klebsiella oxytoca
atgcttaaccgaactcaacgccggtgcaaaatctgtagggcgaagtttaccgcggtatttgaaaatcagcgttggtgctgccctgagcatggcgctgaatttgccatgcaggaactggagaaaaagcgcgaaaagcaggctcaggcgaaagcgaagaaagagcgcgcagtctggcgcaaacgcaaggccgcggtgaagcctctccgacactgggaagatatgacccagcgtgttgttaacgactatatccgcgaacgagaccacgatctgccgtgtatcagctgcggcacgttcgagacggttcaatgggaggccgggcattaccgatcccgcggtaaagcatcgcacctgcgctacaacgaggacaacattcacaagcagtgtcatcactgcaacgtgcaaatgtcaggtaaccagcagcagtaccgcatcgctctggtagagaaaatcggcgctgagcgcgtcgaggcgctcgaaaacaacaacacccctcaccgatacaccatcgaagaactggaaggcatcaggcgccattacagcgcgctacgccgtgcgctcataaaacaacgggaggccgcatga

SEQ ID NO: 188877 - DNA, 171 bp, Klebsiella oxytoca
atgagctgccttctcgcaaaagtcattgagcgcggcatcttccgcgttcccgctcgccgcaagcgcaaagttgaagttaagccttccgacatcccaacactgaaaggttataccgcccgtctggtcgataagaagtggctctgcttgagagcgcggaggccacatgcttaa

SEQ ID NO: 188878 - DNA, 579 bp, Klebsiella oxytoca
atgaccagcaaattaaccagagagtggttgcaggaccgcatcgccaacatggaatgttatggggttgtgggcgatgaagcgctgatattgcaggcatacagaatggcgctggccgcaatggacagcgggccggtggcgtggcgttggcgctggtctgacgatgtcgaaggctattggcgatacacggaagaacaacgcgagactcgcggcagcgtaaccgcccagccgctctatcgccacgcgcagccggtgccagaacgcgaccaggtacgccgcgagcacgccgagtggtcgcaggccacgttcggtaatgtcggtccgattgggccactaaaacatctcagcaaagaagcgctggaagcagctgccgaacctgaagacctgagcgaatggtctgatatgcaattcctgctgtgggatgcgcaacgccgtgctggcatcactgacgagcaaattacccaggcgatgatcgaaaagttagcggtgaacaaacagcgtgagtggccggagccgaaagacggagagccgcggttgcatatcaaatcgcagccagcaacgcaggaggtgaaaggtgaataa

SEQ ID NO: 188879 - DNA, 339 bp, Klebsiella oxytoca
atgactgatatcaccgaactggcgcagagagagaaattcgaggcttggtttaagtcgtcatttcatcccgacaaaacagggccatacatcaaagaccaactgtatttctcctggaaagcggctagtgccgagctggtagaggcgctggagaaggcgcaggagacgattgcatttcagcaaggagaaattaaagcgcttttggcgtcattggaatcccgcaccgtgaagctgccagagtcattcaagttggctaaatcatcgagcggattaaggtactactacgccgacgatgtcgatgctgcgcttaccgccgctgacatcaagtgggaggctgagtga

SEQ ID NO: 188880 - DNA, 192 bp, Klebsiella oxytoca
atgaaaatttctttagctgattacgttggtgaggtcgggcaagcaaaagctgctgatgcaattggggttcaccagaccgcgataagtaaagccattcgagttggccgtaagatcttcgttaacacacttccggacggaaaaattaaggcagaagaaatcaagcctttcccttatagcaaaaatccggattaa

SEQ ID NO: 188881 - DNA, 711 bp, Klebsiella oxytoca
atggaaaagaaaaagacactcacaccggttcagatcgctgacgcagaaaggctgaaggccatctatgaagccaagaaaaaagagcttgggataacacagcaatcaatagctgacatgctggatatatctcagggaggggtaggtcattaccttaacggaaggaacgctcttaatgccgccgcagctgccgtttttgcaaaagtccttcaggttgatgtttctgcgttcagtcccagtcttgcgaaagaaatatctgcaatgagcgccgcatctacaacgaatgcaaggtatgctggccggtactctcctggcgttaaatacccagtattaagcaagattcaggctggctcttgggcagaagcatgcgaaccgtatgcactaaaagatattgatttatggttagagtcggatgctcacacccaaggtgatgcgttttggcttttggttgatggtgactcaatgactgcgccgattggcctgagcattcctgaggggacctatgttctatttgacactggtcgtgaggcgattaacggcagtctggttattgcaaagctgtctgaatcaaacgaggcgacattcaaaaagttgataatcgatggtggccagaagtacctgaagggattgaacccacaatggccaatggtacctatcaacggaaactgtcgaatcattggggtggcagtagaaactaagcttcgcttggtttga

SEQ ID NO: 188882 - DNA, 180 bp, Klebsiella oxytoca
atgatacgtaaaatgctgaaacacctcaaaaatgccaaaccgaaagcaggcattgatgagctgcagatcatcaatgacgaaattgaagaaacccagaagaatatagctcgggaaaaagaaaagatacaagaggaacgtagtgatggatcaagactcacaaagcacagattcactatttga

SEQ ID NO: 188883 - DNA, 837 bp, Klebsiella oxytoca
atggatcaagactcacaaagcacagattcactatttgattatttttatgtggataaagagcgtgtaaatgctataactgcgcagcttttcccttctggagttcttaatagtattaagcagacgtctggagagtctgaaaaagaccttaaagagcttaaggctgggctgtcattgataggcgttaaaactaacgcctctgaatcttggaatcgcagtcaagaaagattatttgactcatcatggagcatcccgctgaatcttttagataaactttctgaatcaggaaggataaaagcgagcttaaatgatgctagactaggcgacatagtcctaataaaaggcatgatgaaaatattcgatgcacaaatggttcacttgtgcatgccaatagttaaaaagataaaaatcaacgagatgaagaatgagaaaaatcctaaagctaagggcctgctgaaggaaagcatctcagtatttgaaaatgcggaggagttagtaaagatgcttcctccaactacgcacattgactttgctgatagttatggaaactacagttggatgtcggttgaaccatccaacctgacaactaccttgagcgatgtttctttaaagtacggccccttcattcccggtgagtggcatatactatgtattgttgatgcttatgctgatgatacaaaactggataatccaaccgcaccataccctacagtatccaatgatttaaaagatgccatgaatagcatgttaatcatgatgagaaatataatggggagacctgtaggatcctttggtataacaccactaattatttttcgtggcttagcaaaccatctttaa

SEQ ID NO: 188884 - DNA, 378 bp, Klebsiella oxytoca
gtgaaagttaaaacagcaaatctcagtggtgtgcagcttgattacgcggttgcgtgctctatcaatatgggccagccaatactgcacgtcacctcggaaatgttattcgttgaactggcgatgaaagtgttttcgccttccgcgaaatgggaccagtgcggtgagctgatggagaaatactctatcagttgttaccagtcagcggacccggctacaggaaaagtttatcactgggttggagttaatgagcttgtagcgcctggacgtcgccgcgggctcattgcagataatccccgcgtagctgtgtgccgcgccgtcgtcttcgcaaagtttggcgatgaaattgagctacctgatgaactggaaggtgcagcatga

SEQ ID NO: 188885 - DNA, 1146 bp, Klebsiella oxytoca
atgaaaatcgtaatcgccccagactcttataaagaaagcctctcggccaccgaggttgctcaggctatagaaaaaggttttcgggaaattttccccgatgcgctctacgtgaaggttcctctcgccgatggcggagaaggtaccgttgaggcgatgattgccgcgacgcagggaaccgaaatgagcgcctgcgtgacggggccgctgggtgttccggttaatgcctgctgggggctttccggagacggcaaaaccgcgtttatcgaaatggctgcggccagcgggctggggctggttccgcccgctcagcgtaacccgctattgacgacgtcgcgcggtaccggcgagctgattttgcaggcgctggatcatggggcgaaaaatatcatcattggcattggcggcagcgccaccaatgacggcggcgcggggatggttcaggcgctgggcgcgcgtctctgcgatgccaatggcgcggagattggcaacggcggcggtagtctgtgtagcctcaattcgatagatctctccggtcttgacgcgcgactgcatgattgcgctattcgggtcgcctgcgatgtcaccaatccgctgactggcgatactggcgcatcaaggatatttggtccgcagaaaggggctaccgaagcgatgatccgcgagcttgacagcaacctggcgcactatgcggacgttattaaggccgatctgcatgtcgatgtgaagcaggttgccggcgcgggcgcggcgggcggcatgggcgcagcgctgatggcgttcctgaacgctgaattacgcagcgggattgaaatcgtgacccaggcgctgaatctggaagagcatatcctcgattgttcgctggtggtgaccggtgaaggccggctggatagccagagtattaacggtaaagtgccggttggcgtggcgaacgtggcgaaaaagtatcataagccggtaattggcattgccggtagtctgacccgggacgtcggcgtggttcaccagtatgggattgatgcggtgtttagcgtgctgaccagcgtaacgacgctcgaagaggcatttcgcggcgcggcggacaatatttatcatgcgtcgcgtaatattgcggcgacattgctggttgggatggcgacggaaggatga

SEQ ID NO: 188886 - DNA, 180 bp, Klebsiella oxytoca
atgatggccacgccatccacctgcgtgcagtttaagccgcactgcgcgaacttcacgctcgataccgtctccccaggctggcgctggctggaactacatcctgacggcacattgaccactgaagtttgccgcctcgaaggcgtgaaatttcacccggatatcgcttcagaaggatactga

SEQ ID NO: 188887 - DNA, 1617 bp, Klebsiella oxytoca
atggcaatttttgatgaaaagcggcatttgtatgaagccttgctgagacataactatttccccaaccaaaaaggttcgataagtgaaatcccaccgtgcttttcttccagaacatttacaccggaaatagcggaattagtttcatctgacacgtcagggcgtagaagcttacaaggttatgattgtatagagtattatgctaccagatataacaatttcccaagaacgctctcaatcatccatccaaaagcgtacgcaaagttagccaagcatatacatgataactgggaggaaatacgttttataaaacaaaataaaagcagcatgatcaaaccagatatgcatactgatggccgtgttataatcatgaattatgaggatgcagaaactaaaactgtaagagagctgaatgatggttttggacggcgatttaaagttaacgcagatatatcaggttgctttaccaacatctactcacactctattccgtgggcggttgtaggtattaataatgcaaaaacagccttaaatactaaagtaaaaaatcaagataaacactggagcgacaagcttgactattttcagcgtcaggctaagaggaatgagacacatggtgttcctattggccccgcaacctcaagtattgtttgcgagattatcttaagcgctgtagataaacgactgagggatgatggttttttatttagacgttatatagatgattatacatgctattgtaaaacacatgatgatgccaaggcttttttacatttacttggtgtggagctttccaagtataaattatcattaaatttacataaaactaaaataagtaatctcccagggactttgaatgataactgggtttctttgcttaatgtaaactcaccaacaaagaaacgttttacagatcaggatctaaacactctaagttcttctgaagtaattaatttcctagattacgctgtgcaattgaacactcaagtaggtggtggaagtatactaaaatacgctatttcactggttataaacaacttagatgagtatacaatcactcaggtgtatgactatctcctgaacttatcatggcattatccaatgcttatcccatatctaggcgttcttatcgatcatatttatttagatgatggcgatgagtataagaataaattcaatgagattttgagaatgtgtgcagagaataaatactctgacggtatggcttggactctttatttttgcattaagaatgacattgatattgatgatgatgttataaaaatgattatatgtttcggtgactgcttgagcttatgcttgctagatagcatagggatatatgaagaaaaaattaatgattttgttacggatattattaaattagattatgagtatgacatggacagatattggctccttttttatcagcgattttttaataataaagccccaagcccttataatgacaaatgctttgatatcatgaaaacttatggagttaactttatgccagatgaaaattataataccaaagctgagtcatactgtcatgtaatcaataacccatttctcgaagatgaggatgagattgtaagctttaacgattatatggcgtag

SEQ ID NO: 188888 - DNA, 936 bp, Klebsiella oxytoca
atgaatcagatgagtaaactcgacacctttattcaacaggccgtcgccgcgatgcccatcagcgggacctcgcttattgcttctttatacggcgacgccttgctccagcgcggcggagaggtctggctcggcagcgtggcggcgctgctggaagggctcggattcggcgaacgattcgtgcgtaccgcgctgttccgcctgaataaagaagagtggctcgatgtggtgcgcattggccgccgcagcttctaccgcctcagcgacaaaggcctgcgcctgacccgccgggcggagcataaaatctatcgcgccagcgccccggagtgggacggtacctggctgctgctgctgtcggaagggctggagaagagcactctggcggaagtcaaaaaacagctgctgtggcagggatttggcgcgctggcgccgagcctgctggcttcgccatcgcagaagctggcggacgtgcaatctctgctgcacgaagcgggcgtagcggaaaacgttatctgcttcgaagcgcattccccgctggcgctctcccgggcggcgctgcgcgctcgcgttgaagagtgctggcatcttaccgagcagaacgcgatgtatgaaacgtttatcgccctgtttcgaccgctgctgccgctgcttcgcgactgcgagcccgcggagctgacgcctgaacgctgctttcaaattcagctcctgctgattcacttctatcgccgggtggtgctgaaagatccgctgctgcccgaagaactgctccccgcgcactgggccggacaaaccgcgcgccagctgtgcatcaatatttatcaacgcgttgcgcccggcgcgctggcgtttgtcggcgagaagggcgaaagttcggtgggggaacttcccgcgccggggccgctctatttccagcgcttcggcgggctgtcgggcgtataa

SEQ ID NO: 188889 - DNA, 597 bp, Klebsiella oxytoca
atgcccatttatcagattgacggtatgacgccggttgtaccggacgaaagctatgttcatcccaccgccgtgctgattggcgacgtgatcctcggcaaaggggtctacgtcggccctaacgccagcctgcgcggcgattttggccgtatcgtggtgaaagatggcgctaacatccaggataactgcgtgatgcacggctttcccggccaggacacggtggtggaagaagagggacatatcggccacggcgcgattctgcacggctgcaccatcggccgcaacgcgctggtggggatgagcgcggtgattattgacggggccagggttggggaaaacagcatcgtcggcgcttcggcctttgtgaaagccaacgccgaaatgcccgccaaccatctgattgtcggcagtccggcaaaagccattcgtacattaagtgaacaggagctggcctggaagaagcaggggacgcgggagtatcaggtgctggtggagcgctgcaaacagacgctgcatcaggtggaaccgctcaaagaagcagagtcggacagaaagcggctgacctttgacgagaatttgcggccgaaatcttcatcctga

SEQ ID NO: 188890 - DNA, 408 bp, Klebsiella oxytoca
atggcagagaaattatccgctcggtgccactgcggcgcggtggcgtttaccgttgagcttagcgatggcttcaacaccgttcgccgctgtaactgttcatattgccggatgcgtggggcggtcgcggtctccgcgccgctttcaggaatagaggtggtgcgcggacgggataagctcacggagtatcgttttaataccggtcaagccgtgcactttttctgctcggtatgcgggatctacacctttcatcagcggcgttcaaacccgcagcagtacggcgtgaatgtggcctgcattgacggcttgtcgcccttcgattttccctgcgtggaggtcaacgacggcgtgaatcatccgaaagatggcggcggtggcgtggtggggtatttgcgctacgagaaaaaatga

SEQ ID NO: 188891 - DNA, 606 bp, Klebsiella oxytoca
atgagcaaagtattagttctgaaatccagtattctggcagggtactcgcaatctggtcagctgtccgactattttgttgaacaatggcgtgaaaagcacgcggaagacgttatcaccgtgcgcgacctggctgcaaacccaattccggtactggacggtgagctggttggcgctctgcgtccgagcgacgcgccgctgacgccgcgtcagcaggaagcgctggcgctttctgacgaactgatcgctgaactgcaggcgaacgatgtgattgttatcgcggcgccgatgtacaacttcaacatcccgacccagctgaaaaactacttcgacctggtggcgcgcgctggcgtgaccttccgctacaccgagaaagggccggaaggtctggtgaaaggtaaacgtgcggttgtcgtcaccagccgcggcggtatccataaagataccccgaccgatctggtgaccccttacctctccaccttcctcggctttatcggcattaccgatgtgaacttcgtgtttgctgaaggcatcgcctacggcccggaagtcgcagcgaaagcgcagtctgatgcgaaagccgctatcgacagcgttgtagccgcgtaa

SEQ ID NO: 188892 - DNA, 3903 bp, Klebsiella oxytoca
atgacagaacaacaaaaaataaccttctcatcgctctttgaacggcttgatggcctgatgctgcgcgataagtcgcgcttcgcccgtcgcctgcacggcgtgaagaaggttaaaaatcctgatgcccaacaggccattcttcaggagatggcgcaagaaattgaacaggcggcagggagagtcctgctgcgcgaagccgcgcggccggcgatcgcttatccggaaaacctgccggttagccagaaaaaacaggagattctcgaagccgttcgcgatcaccaggtggtaattgtggcgggggaaaccgggtcggggaaaaccacccagctgccaaaaatttgtatggagctggggcgcggcgttaaaggcttaattggccatacgcagccgcgtcgcctggccgcgcgtaccgtcgccaaccgtatcgccgaagagctgcaaacggagcccggcggctgcatcggctataaagtccgctttagcgaccacgtcagcgataacaccatggttaagctgatgaccgacggtattctgctggcggaaatccagcaggaccggctgctgatgcagtatgacaccatcattatcgatgaagcgcacgaacgcagcctcaatatcgacttcctgctcggttatttgcgggaactgctgccccgtcgcccggatctgaaaattattatcacctcggcgaccatcgatccggaacgcttctcgcgccactttaacaacgccccgattatcgaagtgtccgggcgcacttacccggtagaagtgcgctatcgacccatcgttgaagacgccgacgacaccgagcgcgatcagctgcaggcgattttcgacgccgttgatgagctcgggcgtgaaagccccggcgatatcctcatttttatgagcggcgagcgcgaaattcgcgataccgccgatgcgctcaataagctgaatctgcgccataccgaagtgctgccgctgtatgcgcgactgtccaacagcgaacagaatcgcgtgttccaggcccacagcgggcggcggatagtgctggccaccaacgtcgcggaaacctcgctgaccgtgccgggcatcaagtacgttatcgatccaggcaccgcgcgtatcagccgctacagcttccggaccaaagtacagcgcctaccgattgagccggtttcccaggcgtcggctaaccagcgtaagggccgctgcggccgcgtctccgaagggatctgtattcgtctttattctgaagacgacttcctgtcgcgtccggagtttaccgacccggagattctgcgcaccaacctggcgtcggttattctgcaaatgaccgcgctcgggctcggcgatattgccgcgttcccgttcgttgaagcgccggacaaacgcaatattcaggacggcgtgcgcctgctggaagagctgggagcgattaccactgacgaacagcagaccgcctataagctgacgccgatgggccgccagctgagccagctaccggtggacccgcgtctggcgcgcatggtgctggaagcgcaaaaacacggctgcgtgcgcgaggcgatgattatcacctcggcgctctctattcaggatccgcgcgagcggccaatggacaagcagcaggcgtccgacgagaaacaccgccgcttccacgacaaagagtccgacttcctggcgttcgtcaacctgtggaactacctgggcgagcagcaaaaagcgctctcctcgaaccagttccgccgccagtgccgggtcgattttctcaactacctgcgcgtgcgcgagtggcaggatatctacacccagctgcgtcaggtggtcaaagagctcggcctgccggtcaatagcgagccggcggagtatcgcgaaattcacaccgcgctgctgaccggtctgctgtcgcacatcggtatgaaagacgccgacaagcaggagtttaccggcgcgcgcaacgcccgcttctccatcttccccggatcggggctgtttaaaaagccgccgaaatggacgatggtcgccgaactggtggagaccagccgcctgtgggggcgcatcgccgcgcgcattgagccggagtgggtcgagccggtggcgcagcatctgatcaaacgctcgtacagcgaaccccactgggagcgcgggcagggcgcggtgatggcgacggagaaggtgaccgtttacggcctgccgattgtcgctgcccgcaaggtcaactacagccagattgacccggcgctgtgccgcgagctctttatccgccacgctctggtggagggcgactggcagactcgccacgctttcttccgcgaaaacctgaagctgcgcaacgaaattgaagagctggagcataaatcgcgccgtcgcgacattcttgtcgatgacgaaacgctgtttgagttctacgaccagcgcatcagccatgacgtcatctccgcgcgccactttgataaatggtggaagcaggccagccgcgagacgccggatctgctcaactttgaaaagagcatgctgattaaggaaggcgcggagcaggtcagcaagctcgactatccgaacttctggcatcagggcaacctcaagctgcgtctgacctatcagttcgagccgggcgccgacgccgacggcgtgacggtgcatattccgctgccgctgctcaaccaggtggaagaggccgggtttgagtggcagatcccggggctgcgccgggagctggttatcgccctgattaaatcgctgccgaagccggtgcgccgcaattttgttccggcgccaaactacgcggaagcgtttctcggccgcgcgacgccgctggagctgccgctgctggattcactggagcgcgagctgcggcggatgaccggcgtgactatcgaccgcgaggcctggcaatgggatcaggtgcccgatcacctgaaaatcactttccgggtggtggacgagaaaaacaagaagctgcaggaagggcgttcgctgcaggatctgaaagatgcgctgaaaggtaaggtgcaggagacgctgtccgcggtcgccgatgacggtatcgagcagagcgggctgcatatctggagctttggccggcttccggaaagctacgagcagaagcgcggcaactacaaagttaaggcctggccggcgctggtggacgaacgcgacagcgtggccatcaagctgtttgataatccgctggagcagcagcaggagatgtggcgcggcctgcgccgcctgctgctgctgaatatcccgtcgccgataaagtatctgcacgaaaagctgccgaataaagccaagctggggctctatttcaacccctacggtaaagtgctggatctgatcgatgactgcatcgcctgcggcgtggataagctgattgacgaagcgggcggcccggtatggagcgaagagggctttgccgcgctgcatgaaaaggtgcgcgccgagctgaacgagacggttgtggacattgccaaacaggtcgaacagatcctgaccgcggtctttaacgtcaacaaacgcctgaaagggcgcgtggatatgaccatggcgctggggctgtcggatatcaaatcgcagatgagcgggctggtgtatcgcggtttcgtcaccggtaacggcttccgccgccttggagacacgctgcgctatctgcaggcgattgaaaaacggctggagaaaatggccatcgatccgcaccgcgaccgcgcgcagatgcttaaagtggagagcatccagcagacgtggcagcagtggctgaataagctgccgcctcagcgccgtcaggatgacgacgtgcaggagatccgctggatgattgaagagctgcgcgtcagcctgttcgcccagcagctcggcacgccgtatccgatttccgacaagcgggtactgcaggcaatggagcagattacggcctag

SEQ ID NO: 188893 - DNA, 660 bp, Klebsiella oxytoca
atgcaacaacagtggtcggcagtagataattatctcgtgacagcgttaatccccaccgatccgctactcagccaggttctggagaataaccagcgcgccgggcttccggctatcgacgttgccgctaatcaggggcagtttctggccctgctggtgcgcatgacgggcgccagacgcatcctcgagattggcacgctcggcggctacagcaccatctggatggccagagagttgcccgccgatggcgaattacttaccctggaggccgacgcgcaccatgccgccgtcgcccgcgagaacctgcgcctggcgggcgtggacgatcgcgttgcggtgctggaaggtccggcgctgaccagcctcgaaacgctgggagagcgcccgccgttcgatctcatttttatcgatgcggataagcccaataatccccactatctgcgctgggcgttacgctattcccgtccggggacagtgattgtgggcgataacgtggtgcgcgatggcgaagtgacgaatccggatagcgcggatgagcgggtgcagggcgtcagagcgtttatcgacatgatgggcagcgacccgcgactgacggtcacggccctgcaaaccgtgggcagcaaaggctgggatgggttcaccctcgcgtgggtgaacgcctga

SEQ ID NO: 188894 - DNA, 1380 bp, Klebsiella oxytoca
atgatccgtccgctcgctctcgccgttatgcttgcgctggccggctgccagtccgccgacgttcaacgggccgcgcccgggctgcagatccccgccgcctggcgggcggatgtcggcccctccagcccggttgagggcgtgtggtggcgcaacttccacgacagtacgctcaatctatacgttgaccaggcgctgcgctacaacagcgacgtgctgatagcccgcgaacgggtcaacgagtaccaggcgcgggcttacgccgccgatagcagcctgtttccctcccttgacgccggattgaccggcacccgcgcgcggtcacagtcggccgctaccggcctgccggtccacagtacggtgtataaaggcgcgctaaccgccagctacgatgttgatctctggggcgcaaaccgcagcgccgccagcgcggcgcaagccagcctggaggcgcaaaaggcggctgccgcagcggcgaatctgaccgtcgcctcttcggtggcggccggctatatcaccctgctctcgctggatgaacagctgcgggtgacgcagcaaacgttaaaatcgcgcgaagatgccttcaacctggcgaagcgccagtttgagacgggctatacctcacgcctggagctgatgcaggcggactccgaactgcgctccacgcgcgcgcaaattccgccgctgcgccaccaaatcgcccagcaggaaaatgcgctcagccttctgctcggcgccaatccggacgccgttaagcgcaacgcgttcgcgcagctgtcgccgctatcgctaccttcccagctgccgtcaaccctgctcaaccgccgaccggatatcgttcaggcccagcgtcagctggtggccgccgacgccaccctggcgtcatcgcaggcgcagctgctgccgtccattaaccttaccgccaccggcagcctgcaggatcgcaccctgcccgacctgctggataatccgctacgcttatggagcctcggcggcagcattctggcgccgctgctcaaccgccaggcgctgaatgcccaggtggacgtttcgatggcccagcgcaatcaggcgctgtttagctatgagaaaacggtacgcggcgcgtttaaagaggtgaatgacagtctcgatgccatcggccgctacggcgagcagctggcggagctgcaggcgcaggagaaggtggcccaggagacgctgcgcatcgcgcaaaaccgctatcgcaacggctactcctcctatctggacgtgctggacgcccagcgcacgctgttttccacccagctcagcgtggtacaggtaaaaaacaacctgctgctggcgcaagttgatttgtaccggtcgctgggaggcggctggtctgattcatcagggatgtaa

SEQ ID NO: 188895 - DNA, 1086 bp, Klebsiella oxytoca
atgagtcagcaggatgcggccaaacagcaggccaatacccgaaataatattcgcatcgtctctatttttaccgccgccgccattggcatcgttggcgtactggttattctctacgcctggcagctgccgccgtttacccgagaaagccagtttaccgataacgcctacgttcgcgggcaaaccacgtttatcagcccgcaggtcaacggttatatcaccgaggttaaggtccaggattttaatcaggtaaaagccggcgacgtgctgtttcaaatcgacgaccgcatctataagcagcgcgtccatcaggcggaagctcagctggcgatgaaagaggcggcgctgaagaacaatcagcagcagcgtaaaagcgccgaagcggccatcacgcgtaacgaagcggcgctgcaaaacgcccgcgcgcagaatctgaaaacccaggcggatttaaaacgcgttcaggagctgaccgccgacggctcgttatcgattcgcgaacgcgattccgcccgcgccagcgcggcgcagggcaccgcggatatcgagcaggccaaagcaacgctggagatgtcgcgccaggatttgcaatcaaccatcgttaatcgtgactcgctgctcgccgacgtcgccaatgcgaaagccgcgctggagctggcgcagatagacctgcaaaacacccgtattatcgcgccgacggacggtcagcttgggcaaatctccgttcgccttggcgcatacgtgaccgccgggacgcatttgacctcgctggtgccgccgcagcactggctgatcgctaacctgaaagagacccagctggcccaggtgcgcgtcggacagccggtgacctttaccgtggatgcgctgaacagcgagaaattcaccggtacggtgcagagcatctccccggcgaccggcgtggagttcagcgctatttcgccggataacgccaccggtaactttgtcaaaatcgcccagcgcattccggtacgcatcgccgttgatgaggggcagaaaaacggccagcgcctgcggccgggcatgtcggtgcaggtcaccatcgatacccgcgcggaggagcagcaatga

SEQ ID NO: 188896 - DNA, 1653 bp, Klebsiella oxytoca
atgccgcgtcgtcacgctaatccctatgttcctcacgactgggccccgcacgaaaaaccggcgatcctcggctcgccgtcgccccccattcacagtacgccaaaacgtattgcctacgggatcgtcgggctgctggtctgcctgacgggcgcgctcggcaacgcggtggtaaccgccaatctccagctgttgcagggtacctttgccgcctggtcaaccgagattgcctggctcccggcggtctacgtgatgaccaacgtctccataaacctgctgctggtgaagtttcgccagcagttcggcctgcgcgcttttaccgagggttttctcgttctctacgtgctggtgacctttttccacctgttcgttaacgacctcagttcagcgctgatggtgcgcgccgcccacggcatggtagccgcagcgctaagctcgctggggatttattatcaggtgcaggcctggcccgcccgccatcggctcaaagcgctgaccatcggcatcaccggttcatccctggcgatcccgctggcgcgcctgttctcaaccgagctgctgcaaatcgacgagtggcgcgggctgtacttctttgagctggggctggcgctggtgtcgctggcctgcgtgatcgccctcaagctgccgccaagcgatcgtaaaaaggtgtttgagaagaaagacttcatcaccttcttcctgctggcgccggggatggcgctggtcaccgcggtgctgtcgctgggacggctggactggtggtttgaagcgccgtggatcggctgggcgctggcgggcgcggtggtgctgattgtctccgcgattgcctttgagcataaccgcagcaacccgctgctcaatatcaaatggctctccagcggcagtattctgcgcctcgggctgattatgctgctgatccgcatcgtgctggcggagcagaataccggcgttatcggctggctgcagtacgtcggtttgcagaatgaacagatgaccaacctggcatggtcgattttcgccgggatcgtctgcggcatcgtcgccagctgcctgacgctcaacccgcagcgcctctactggcccaccgccacggcgctggcgttgattatggttgcctcgctgctcgacagccagtcgacgatcctcacgcgaccggagcagctgatgttcagccagtttctgctgggcttcggcagcgcctttttcctcgccccggcgatgctggcggggattggcggcgtcattgccgaccagcgcaacctggtgagcttctcggtgctgttcggcatgagtcagaatatcggcggcctgctgggctccgctattctcggcacctttcagacctggcgggagaagtttcactccagccagctcgccgaccagcttaccacactcaatccgctgattaccgagcgtttgcagcagtacagccagatgtatcaaagccagattggcgacagcacgttgctcaacgttcaggccaccacgctgctgcaaaacgccgccaccctgcaggccaatattctcgcttacaatgatacctatctgctgacggcggcgatttcagccgccacgctggtatgggttttctggcgcttaataagattacgtattaccgctcgtatcgcgctgaagcgcgcgacgggaagcaaataa

SEQ ID NO: 188897 - DNA, 432 bp, Klebsiella oxytoca
atggataaccgacagcttaacttttcccatcttttatatctgaccgcccaccactggcgcctggcggtcaaccgtcggctcaaggacctcggcatgagccaggccagctgggtcgccgtttccgccatcgcgcgcaacgaaaagccgctatcgcaaagcgagctggcccaggagctcggcgtcgaaagcgcaaccctcgtaccgctgctcaaccggctggtcgatctcggtctggtcgagcgggtgaaaaccgaacgcgacaagcgtaaacgactgctgatcgctaccgccaaaggccttgaggtgtatcagcaggtgaaaacggtggccgatgatttgcgggaggagatccttaccgccattacccccgaagagcagcggcagacgcagcgggtactggagaagctgctgcgcgaggttgagaaaaaataa

SEQ ID NO: 188898 - DNA, 1275 bp, Klebsiella oxytoca
atggaaaagttatcttacgcttctgaaagtagtacatctccatggaccacctacctgcgtcaaatcgatcgcgttgcgccttacctcggcgatctcgcctactggattgaaaccctgcgccatccgaaacgcgcgctgatcgttgatattccggtacaaatggatgatggcactatccgccacttcgaaggctaccgcgtccagcacaacctctcgcgtggaccgggtaaaggcggcgtgcgctaccatccggatgtcgatttgaatgaagtgatggcgctttcagcctggatgaccatcaagtgtgcggcagtcaatattccctacggcggcgccaagggcggtatccgcgtcgatccgttctcattatcagaaggtgaactggaacgtttgacccgtcgttataccagcgagatcggcattatcatcgggccgcaaaaagatattccggcgccggacgttggtaccaacggtaaagtgatggcctggatgatggatacttactccatgaaccacggcaccaccatcaccggcgtggtcaccggcaagcctattcacctcggcggttcgctgggccgtgaaaaagccaccggccgcggcgtattcgtcaccggtcgcgaagtggctcgccgcagcggtatcgaaatcgagggtgccaaagtcgcgctgcagggttttggtaacgtgggcagcgaagcggcccgcctgttcgcaggcgtcggcgcgcggattgtggtgattcaggaccacaccgccacgctgtataacgagggcggcattgatatggccgcgctgaccgcatggcaggcggagaacaagcaaattgccggcttcccgggcgcccgcgaaattgacaaagaagcgttctggacgacgccgatggatattctgatcccggcggcgctggaaggtcagattacgcgcgagcgcgcggaaaccctcagctgcaaactggtgcttgaaggcgctaacggcccgacctatccggaagcggacgacgtgctggccgagcgcggcatcgtggtggtgccggacgttatctgtaatgccggcggcgtcaccgtgagctacttcgaatgggtgcaggatatggccagcttcttctggagcgaagaagagatcaacgccaaaatggaccgtatcatgaccgatgcgatcgttcacgtttacgaaaaagcggtggaaaaagcgtgctctttgcgtaccgccgcctatatcgtggcctgtgagcgaattctgatggcgcgtaaagatcgcggtatttatccgggataa

SEQ ID NO: 188899 - DNA, 792 bp, Klebsiella oxytoca
atgtcagagcattttccatcgctgccggaggcggtactggccgcggcgaatcagctgggggcctggctggcgcaggatgatttaccgcaggatccgcaaatagagctggtggtgctggcaggcaatgcggtgatcccgaccattgatttcgcctgccggctggcggcgcatcacgccgttcctctgctgatcagcggcggtatcggccactccacctcgtttttataccagtcggtgttgaatgacccgcgctaccgcaccattccggtagacgatcgcgccgaggcgcatattctggccgacattgcccatcagttctgggcgattccgcgccaacgaatcgtggtggaagaccgctccaccaactgcggcgagaacgcgcgttttacccggcagatgctggagcacaacggcattgcgcaccgtacgggcgtggtggttcaggatccgaccatgcagcggcgaacgatggcgacatttgcccgcgtctggcaagacgacccgcgtgcgccgacgtggtacagcgcgccgggctgttcaccggtgttgtgtaacgggcgtgacggcgtcacgttcagcgggaaagaggcgggtctgtggccggtggggcgctatctggcgctaatcctcggtgaactaccgcggctggcggataacccgcagggctacggccccctgggtaagggatttatcgctcatgtggatattccgccgcacatcgctcaggcgtggcagacgctgcgcgacgaccgcctgctctccgatgcgctaagcgcgcgtcagctggcttag

SEQ ID NO: 188900 - DNA, 1440 bp, Klebsiella oxytoca
atgacagcacccgttcaacaccctatgtatattgacggccagtttgaacccggccgcggtgatgcatggattgatgtgatcaatccggcgacggaagcgctgctttcgcgtattcccgacggcagtgcggaagatgcccggcgcgcgattctggccgctgagcgcgcgcagccgggctgggaagccctgccggcgattgaacgagcggggtggctgcgcaaaatcgctgccggtatccgcgagcgggccgaggagatcgccgcgctgatcgtcgccgagggcggaaaaatacagcagctggccgcggtggaggtctcctttaccgccgattatatggattatatggccgaatgggcgcgccgttatgaaggtgaaattgtacagagcgaccggccgggggaaaatattctggtattcaagcgcgcgctgggcgtgaccaccggcattctgccgtggaattttccgttcttcctgattgcccgcaagctggcgccggcgctcattaccggtaataccatcgtgattaaaccgagtgaatttacgccgaataacgccatcgcttttgcgcaaatcgtccatgatatcggcctgccgaaaggggtctttaacctggtgctggggcgcggcgaaaccgtgggccaggagctggcgagcaatccgaaagtggcgatggtcagcatgaccggcagcgttgccgcgggcgagaagattatggccgcagcggcgaaaaacatcaccaaagtgtgtctggagctgggcggtaaagcgcccgctatcgtgatggacgatgcggatcttgagctggcggttaaggcggtggtggattctcgcgtaattaatagcgggcaggtgtgtaactgcgttgagcgcgtatatgtgcaaaagggcatttacgatcgcttcgttaaccgtctgggcgaagcgctgaaggcggtgcagtttggcgatccggcgtctcgcgacgatatcgcaatgggaccgttgattaacgccgccgcgctggagcgcgtggagcagaaggtggcgaaagcggtggcccagggcgcgcgcgttgtcctgggtgggaaagcggtgacgggtaagggctatttctatccgccgacgctgctgctggacgtgcgccaggagatggatatcgtgcatgaagagacgttcggcccggtgctgccggtggtggcgtttgatacccttgaagaagcgctggcgatggccaacgacagcgattacgggctgacgtcgtcaatctatacccgcgatttgaacgtcgcgatgaaggcgatcaaagggttgaagtttggtgaaacctatattaatcgcgagaatttcgaagcgatgcagggtttccatgccggatggcgtaaatcgggcatcggcggcgccgacgggcgtcatggtctgaatgagtatctgcaaacccaggtggtctatctgcaggcctga

SEQ ID NO: 188901 - DNA, 999 bp, Klebsiella oxytoca
atgagtaaactcgggattaatggatttgggcgtattggacgtttagtactgcgccgattactggaggttaatagtcctttagaggtcgtcgctatcaacgacctcacctcccccaaggtactggcctacctgcttaagcatgattctaactacggaccattcccgtggagcgtcgattttactgaagatgcgcttatcgttgacggcaaaaaaattaccgtttatgccgaaaaagaggctcagcatattccgtggaaagcggtcggtgccgagctgattgtcgagtgtacgggtttttatacctccgcggaaaaagcgcaagctcatctgaccgccggcgctaaaaaagtgcttatctccgcgcccgctggcgatatgaaaaccattgtctataacgttaacgacgacacgctggaggcaaacgatacgattatttccgtggcctcctgcaccaccaactgcctggcgccgatggcgaaagtgctgaatgacgcctttggtattaaggtggggaccatgaccacgattcacgcctataccggtacgcaatcgctggttgacggcccccgcggcaaagatctacgcgcttcccgcgcggcggcggaaaatatcattccgcatacaaccggggcggcgaaagctatcgggctggttattccagcgcttagcggcaagctgaagggccacgcccagcgcgtgccgacgaaaaccgggtcggtgactgagctggtgtcggtgctggagaaaaaggtctccgccgaagaagtcaatcaggcgatgaaaaacgcggcgacgaacaacgaatcattcggttacaccgaagaggagatcgtctcgtcggacgtgattggcagccatttcggttccatttatgacgccacgcagctggagattgccgaggttggcgatctccagctggtgaaaaccgtctcctggtacgataacgagtatggcttcgttacccagcttatccgcgtactggataagttcgccaaataa

SEQ ID NO: 188902 - DNA, 495 bp, Klebsiella oxytoca
atgaatatgaccattcgtcaggcccgcccggcggacgcaaaagcaatttatgacatgatttacgagcttgcggtttatgaaaaagcgccggagcaggtggtcaccacggtagatgaaatccaggcatcgcttttcgccagcgacagcaaaacggaagcgctaatctgcgagattgacaataaggttgccgggtacgcggtgttcttcaccagctattccacctggctcggtcgaaacggcatctatatggaagatctgtacgtcactcccgaatttcgcggtcgcggcgctggaaaagcgctattgcgaaccatcgctcagctggcggtaaaaagagagtgcggtcgcctggagtggagcgtgctcgactggaaccaaccggccattgatttttatctgagcattggcgccgttgcgcaaagtgagtgggttcgctatcgccttgacggcgccgcgcttgccgcttttgctgaacggggcgggaacgccgaataa

SEQ ID NO: 188903 - DNA, 927 bp, Klebsiella oxytoca
atgatgaatattatgcatcctgcgcttcgccgtcttgatttgaatctgctgccggtatttgaggcggtctaccgctatcgttcggtccgcctggcggcggaagagctggcgatgagcacatcagcgttaagccacgcgctatccagactgcgcgccgcgctcaacgacccgcttttctatcgcgaaggtcatcgtatgtgccccagcgtatacgccacccagctcgcgccttccatcgcttcggcgctcaagtttttagatcaggagcttactccgcagccgaagtttgttgcctcagccagtaccgactgcctacagatagcgatcacggacttcaccgcgcagtgcgttttcccgacgctgatgcccaggctacagcaacaggcgccaggcctgcgtttcgaactgcgctatctgccgcacagcccggcgctgacggaactgctggccggcgaggtggatttagcgctgggatttagcgcgctggatgaagcagagcatccggagctggatgagatttgctggctgaaagatgattatgttgcgataagcagcgccaggcgatcccggctcacgctgacggactacctggcagcacagcatctggtagtcaccccgtggaatgaaagccagggcgttctcgacgtgcagcttgcgaaaatgggcttctcgcggcatatcaccatcaaaaccccctctatgctgagcgcgccagctattattgcgcaaagtgaactgcttatggcgataccgcgctctgccgcggcaaaaatgactgacgcggcgacgctgaaggtctttgaattaccgtttgaggttccgccgtttgaagtgaaaatctattcccacaagcggagcgggcagcgcggcgcgagtcagtggctgaaagagaggctgagggagtgggccgcgacggaacgaacctga

SEQ ID NO: 188904 - DNA, 972 bp, Klebsiella oxytoca
ttgaaattagccggactccatcccgatgaactgcgtcgcctgcaatcgctgcgggcatccggattacttaatagcggaaaagaagagcgtttcgatcgcctgacccggcttgcgcgtacgctctacgatctgccggtggcgtcggttagcctcgtgggagaaaataccctgcatgttaaatcctgcgccggacttgaagtcgataccctgccgagggatatcacgttctgcgcgcatactattctgcagaccgaccctttaatcgttaatgacctgcagcaggatctgcgctttcacgataacccgctggtcacggaagcgccttttatccgcttttatgccggatacccggtacagctgcctgacggcgcgacggtcggcgcgttctgcctgatggaccacaagccgcgcgccttttccgtgcatgagatacaaatattaagcgacctggccgccatcgttgaagatgaattcaaggtgctcgacgcggcgaccgccgatgagctgacggggctgttcaaccgccggggttttatgtcgttagcggagtacgcgctgctgacggccaggcggcgcaatgaaccggcgagcctcgtatttatcgatctcgatcgctttaagctgattaacgatacctggggtcatgaacagggggataaagccctgacggcgatggctgatttgatgaaagccaccttccgggagtcggatatcattgccaggcagggcggagatgagtttattatcctgcttgctaatactgcccagcaggcggcgggcatcgcgatggcgcagctaagcaataacgttgctgaatataatcaacaggcgggcaatccgtggcagctggccttttcctggggctgcgttgaatacgatcctgcaacgcatcatagcctcaatgagatcgttgcggtggcggaccggcgcatgtatcaggcgaagaccagccatggcgccgagcgccggtag

SEQ ID NO: 188905 - DNA, 204 bp, Klebsiella oxytoca
atgatcacttacgatcgtaaccgcaatcctattactaacggcagccaggtgatgattaacgggacgggtaaaaccggtaaaattatcgctatccacgctacgggcttaacgccagcccagctgcgccgtaataagacagtcgaagtggaagggacggaaggtaagttcgagcccgttgaactgatccgccttggtctccactaa

SEQ ID NO: 188906 - DNA, 198 bp, Klebsiella oxytoca
atgaagaataaagaagagcaaacggggctgattggtcttgcgattggcgcggcggttattggcctggtctctggccagaagccaatcaaccgggaaagcattgttgaagaactggtgaggctgggcaggcagaagggggatggcgtcgaggacgagatttttatgcaggcggcaacgctggtgcgcaagggggtatga

SEQ ID NO: 188907 - DNA, 165 bp, Klebsiella oxytoca; identical to SEQ ID NO: 179050

SEQ ID NO: 188908 - DNA, 243 bp, Klebsiella oxytoca
atgttcgtagagctgatttatgacaaaagaaatttcgagggattggccggcgctaaagagatcattcttaatgaactgacgaagcgagtgcatcgcatttttcccgatgccgacgtccgcgttaagccgatgatgaccctggcttccatcaatactgacgccagcaagcacgagaaggagcagatcagccgcgctgtgcaggagatgttcgaagaagccgatatgtggatgcaggaagattaa

SEQ ID NO: 188909 - DNA, 528 bp, Klebsiella oxytoca
atgcgcgataaatattctggcctgcaaattggcatccactggctggtgtttcttttagtgataggcgcttacgcggcgatggagctgcggggctttttcccccgcagcgcgcggcccgtcatcaatatgattcacgtctcctgcgggatttctatttttgttctgatggtggtgcgcctgttggtgcgtctcaaatccccggcgccgccaattgtgcctaagccgtcgccgatgatgaccggcttcgcgcatctggggcatctggttatctatctgctgtttatcgcgctgccggccatcggcatggtcatgatgtactaccgcggtaacccgtggttcgcgtttggcctgaccatgccgcacgcggcggaaagcaactttgagctggtggataccctgaaagtgtggcacgagctgctggccaataccggctactttatcattggcctgcacgcgctggcggcgctgttgcaccactacttctggaaagataacacgctgctgaggatgatgcctcgcaggcgttaa

SEQ ID NO: 188910 - DNA, 474 bp, Klebsiella oxytoca
atgaaagtcagacatgccatcgcagaagaggctccggtcctttgggaggttcgtaatcaggcgattcgccacggttgccgggaaagctatgctgcggaagtcctgcaggcctggacacccgacaacatgcctgaaggttaccgccatgcggtgcgcgataatccgttttttgttgttgatgatgggctgggcaagccagttgccagcggctatctggatatcaaagcgggtagcgttgaagccatatttactttgccgacgtgggagggtaaaggctgcgccagcatgattatggcggccatcatcggggaggcgaaacaacgcaagttcaggcacattaccctcgatgcaacgccaaacgcggccggtttttatctgcgcctgggattcacttcaatcggcgaaaagcgctggcattcgaaaatggcgaacgccgacttacgctgtgaatcgatgatccttagcctcgactaa

SEQ ID NO: 188911 - DNA, 276 bp, Klebsiella oxytoca
atgccacattcacctgaagataaaaagcgtgccctcagtcgggtaaggcgcatccgtggccaggttgaagcgctcgagcgggcgctggaatccggcgaaccctgtatgaccattctgcaacaaatcgcctcaattcgcggcgccgccaacggcctgatgggagagatggttgaaattcatctgcaggatgaactggtcagcggcgaaacgacgccagaccagcgcgccgccagaatggcggaagtcgggcatctgctacggtcctatttaaaataa

SEQ ID NO: 188912 - DNA, 1119 bp, Klebsiella oxytoca
atgaaatcacgtgcagccgtcgcgtttggcccaggccagccgctttcaatcgttgagattgacgtcgcgccgccgaaaaaaggcgaagtgctggtcaaaatcacccataccggcgtatgccacaccgatgcctttaccctctcaggcgacgatccggaaggcgttttcccggcggtactgggccatgaaggcggcgggattgtcgtcgaagtgggggaaggcgtgaccagcctgcagccgggcgaccacgttattcctctgtataccgccgaatgccgcgagtgtaagttctgtaaatccggcaaaactaacctctgccaggcggtgcgcgccactcagggtaaaggcctgatgccggacggcaccacccgtttctcctacaacggtgaaccgatttatcactatatggggaccagtaccttcagcgaatacaccgtagtggccgaaatttcgctggcaaaagtgaacccgcaggcgccgctggataaagtctgcctgctgggctgcggcgtcactaccggcatcggcgcggtgcacaatacggcgaaagtaaaagagggcgataccgtcgccgtcttcggcctcggcgggatcggcctggcggtgatccagggcgcggtacaggcgaaagccgggcgcattctggcggtggataccaacccggaaaaattcaccctcgcgaaagagatgggcgcgaccgactttatcaacccgaatgattacgataagccggtgcaggatgtgattgttgaactcaccgacggcggcgtcgactttagcttcgagtgtatcggtaacgtcaacgtgatgcgcgcggcgctggagtgctgccacaaaggctggggcgaaagcgtcatcatcggcgttgccggcgcgggccaggagattaaaacccgcccattccagctggtcaccgggcgcgtctggcgcggctccgcgttcggcggcgtgaaagggcgtacccagctgccgggaatggttgaagaggcgatggcggggaaaattcgcctcgatccgtttattacccaccgtatgccgctggatcaaatcaacgaagcgtttgatctgatgcatgaaggtaaatccattcgtaccgtcattcatttcggcgagaattga

SEQ ID NO: 188913 - DNA, 276 bp, Klebsiella oxytoca; identical to SEQ ID NO: 179048

SEQ ID NO: 188914 - DNA, 2373 bp, Klebsiella oxytoca
atggcaactggcaacgcgccgcgaggattcccccgggtcctgcagtggcttctcgccgggctgatgctgatcatcggcctggctatcggtattcttggtgcaaagctcgcctccgttggcgggaccttctattttgcgattatgggcctggtgatggttatcgccgcggtgctcattttccgcagccgtcgcggcggtatcatactgtacgcgatagcgtttatcgcctcgatcgtctgggccattagcgatgccggctggacctactggccgctgttctcgcgcctgttcgcactcggcgtactggccttccttgccgcgctggtctggccgtttctgtcccggcagccggcgaaaaaagggccgtcgtttggcctggtagcggtgctggcggtggtactgttggtcagtttcggctggatgtttaaatcccagccgctggtcagcgccagcgaggcggtgccggttaaaccggtcgccgcgggcgagcagcagaaaaactgggcgcactggggcaacaccacccacggcgaccgtttcgccgccctcgaccagattaacaaacagaacgttgaccagctgcaggttgcctgggtcgcccacacctgggatatcccgcagagcaacggctccggcgcggaagaccagaatacgccgctgcagattggcgatacgctttacgtctgtacaccctacagcaaggtgctggcgctggatgtcgatagcggtaaagagaaatggcgctatgattcaaaagctaccgcgccgaactggcagcgctgccgcggcttaggctattacgaagagagccaggcccaggtttcccctgccgccgacgcgcagccggccgcctgctcccgccgcctgttcctgccaaccaccgacgcccgtctgatcgctattgatgccgataacggtaaactgtgcgacgccttcggcgaccacggtattgtggacctgagcgttggcatgggggaaatcaaagcgggttactaccagcagacctccacgccgctggtggcgggtaacgtggtcgtggttggcggtcgcgtggcggataacttctccaccggcgaacccccgggcgtcgttcgcgcctatgatgttcataccggcaaactggcgtgggcatgggatccgggcaacccgaacctgaccggcgaaccgccggcaggacagacctacacccgcggtacgccgaacgtctggtcggccatgtcctatgacgcgaagctgaatctgatttatctgccgaccggtaacgcaacgccggacttctttggcggcgaacgtaccgcgctggacgataaatacagttcctccatcgtggccgttgacgccacgaccggccaggtacgctggcattatcagaccacccatcacgatctctgggatttcgacctgccttcccagccgctgttgtacgatctgcctgacggtaaaggcggcaccacgccggtgctggtgcaaaccagcaagcagggcatgatctttatgctgaaccgcgccaccggtgaaccggtcgccaaggttgaggaacgtccagtcccggcgggcaacgtcaagggcgagcgctactcgccgacccagccctactccgtcggcatgccaatgatcggcaacgagacgctgaccgagtcggatatgtggggcgcgacgcctgtcgacctgctgctgtgccgcatccagtttaaagagatgcgtcaccagggcgtcttcaccccgccgggcgaggatcgttcgctgcagtatcccggctcgctgggcgggatgaactggggcagcgtgtcggttgacccgaataacagcctgatgttcgtcaatgatatgcgccttggcctcgccaactatatggtgccgcgcgccaaagtggcgaaggacgccagcggtatcgaaatggggattgtgccgatggagggcacgccgttcggcgccatgcgcgaacgcttcctgtctccgctgggcattccgtgccagaaaccaccgttcggcactatgtcagcggtcgatctgaaaaccggcaaactggtgtggcaggttccggtgggcaccgttgaggacaccggcccgctggggatccgcatgcacatgccaatccctatcggtatgccgacactgggcgcctcgttatcaacccagtccggcctgctgttcttcgcgggcacccaggacttctacctgcgcgcgtttgataccgccaacgggaaagagatctggaaatcgcgtctgccggtcggcagtcagtccggcccgatgacctacgtatcgccgaaaaccggcaaacagtacatcatcatcaacgcgggcggcgctcgccagtcgccggaccgcggcgattatattatcgcctacgcgcttccgcagcagaagtaa

SEQ ID NO: 188915 - DNA, 924 bp, Klebsiella oxytoca
atgcaaaaaaatggtcttttcagtcagcgcattcgcttgcgccatctacatactttcgtggccgtcgctcaacagggaacccttgggcgtgcggctgaaaccttaaatctgagtcaaccggccttatccaaaacgctaaacgaactggagcagctgaccggtacccggctgtttgagcgtggacgcctcggcgcgcagctcacgctggtcggcgaacagtttctcacccacgcggttaaagtgctcgacgcgctcaataccgcgggacaggcgctaaaccgtaaagaaggcctcaacagcgatatcgtgcgcatcggggcgctccccaccgccgcgctggggatcctgccctcggtgatcggccagttccatcagcagcaaaaagatatcaccctgcaggtggcgaccatgaataacaccatgctgctggccggactaaaatcgggagaaatcgatatcggtatcggacggatgtccgatccggagttgatgagcgggttgaactatgaactgctgtttctcgaatccctgaagctggtggttcgtccggggcatccgctgctgcaggaaacggttacgctgagtcgggtcatggagtggccggtggtggtttcgcccaaaggtacgctgccgcgacagaacgccgaaaccctgctgcaaagccagggctgcaaaattccgtctggctgcatcgagacgctgtcggcttccctgtcgcgccagctcaccgtcgattacgactacgtctggtttgtcccctccggcgcggtcaaagacgacctgcgccgtgggctgctggccgcgctgccggtgcccacccagggcgcgggcgaaccgataggtattctcacccgggtggacgccacgctcaccgcgggaacacaaaccctgctgagcgccattcgtaaatcgatgcccgtctga

SEQ ID NO: 188916 - DNA, 621 bp, Klebsiella oxytoca
atgaaagattatttacctgaaaccgcgtcacaaaccgccggcccttatgtgcatatcggcctcgcgccggacgccgccggtttccatatctttgagaaaaattttggcccgacgctgacaacggcagacaccgagggcgaacgtattactatcgaaggcagagtcatcgatggctccggcacgccggtgcgcgatgtgctgctggaaatctggcaggccaacgccgccgggcgctataaccatcccgacgaccgacagcagggcaagaagctggatgcggcgtttcgcggctggggacgcagctgctcggacttcaccagcggcgtctggcgcttcgaaaccattaaacccggggccgtggtaggtcgcgatgggcgcaccatggcgccgcacgtcaatctgtgggtggtcgcccgcgggattaatattggcctcaacacgcggatgtacttttccgacgagcaggatgccaaccaggtcgacccggtgctgaatctgattgagtgggaagtgcgtcgccagaccctcatcgcgcagcgcgaggtccgcggcgcggagatcgtgtatcgcttcgatattcacctgcagggcgaaaacgaaaccgtcttcttcgatatctga

SEQ ID NO: 188917 - DNA, 741 bp, Klebsiella oxytoca
atgaacgaaaaatggtcaccgcgcgaggtcctgcaccgcgactacagcagccatcctcccgcttacgccccgggctataaaaccagcgtgctgcgctcgccgcgcaatgcgctcatttccctgcagaattccctttctgaaatcaccggaccggtgttcagcagcgacgatctcggcgcgctcgataacgacctgatcctcaactacgccaaagacggcctgccgattggcgaaaggataatcgtccacggctacgttcgcgatggatttggccgaccaatgaaaaatacgctggtcgaagtctggcaggccaacgcgggcggacgctaccggcataagaaagatcaatacctggcgcctatcgacccgaactttggcggctgcggacgggtgctgaccgacgaaaacggctactattgtttccgcaccatcaagcccggcccctatccgtggcgcaaccaggtaagcgactggcgtccggcgcatattcacttttcgctctccggcgacgcctgggcacagcgcctaatcacgcagatgtatttcgaaggcgatccgctgattaaacagtgtcctattgtcaaaaccatcaataacgatgatgccatcaggacattaatcgccgagctggatacccatgcagccgtaccgctggactctctggcttaccgttttgatctcgtgctgcgcggccatcgcgcaacgctgtttgaaaaccgcacgcagggggccgcccgatga

SEQ ID NO: 188918 - DNA, 1344 bp, Klebsiella oxytoca
atggcgaacaccatcacggctgatgagattcgggaaagcttttcgcaggcgatgtcggcgatgtaccagcaggaagttccgcagtacgggacgctactggagctggtggccgacgttaacctggccatactggagaataacccgacgctgcacgaacaactggccaacgccgatgaactggcgcggctgaacgttgaacgccacggcgcgatccgcgtcggtacggcggaggaactggcgaccttgcgtcgcatgtttgccattatgggaatgtatcccgtcagctattacgatctgtcgcaggccggcgtaccggttcactccaccgcgtttcgccccattgatgacgccgcgctggcgcgcaatccgtttcgcgtttttacctcgcttctgcgacttgaacttatcgccaatgaagctttgcgtcagcgggcggcggatatcctttcccgacgggatatcttcacgccgcgctgtcgtgaactgatcgcgttacatgcacagaaaggggagtttaccgccgcagaggcgcgtgagtttgtgcaacaggcgctggaaacctttcgctggcatcgacacgccaccgtcgatgaggaaacctatcacgcgctgcatgaagagcaccggctgattgccgatgtggtctgtttccccggctgccacattaatcatctgacgccgcgcaccctggatattgaccgggtacaggcgttaatgcccgagtgcggtatcgcgccaaaagcgttgatagaagggccgccgcgccgcgatgtgcccattttactgcgccagaccagctttaaggcccttgaggaaccggtgatgtttgccggagagcatagaggcacgcatacggctcgctttggcgaaatcgagcagcgcggtatcgccttaacgccgaagggccgcgccctgtacgaccgactgcttggcgaggcgggggtgggcaaagataatctcacacatcagcgtcatctgcaggaggtgtttagcccgttcccggacagcgaattcctgctgcgtcagcaggggctggcgtactttcgctatcgcctgacgcccgccggcgaagcgcaccgtcaggcgtttcgtccgggtgacgatccgcagccgctgattgaacgcggctgggtcatcgcacaaccgattatttatgaagactttttgccggtcagcgccgccgggatttttcagtctaacctgggcaacgagatacagacccgcagccacggcaacgccagccgccaggcctttgaggaggcgctgggctgtccggtctatgatgagtttgctctttatcaacaggcggaagagcgcagtaaacgacgttgcggtctgctgtaa

SEQ ID NO: 188919 - DNA, 1509 bp, Klebsiella oxytoca
atgcagaatccgtctaccccgctggtgaaaacccggcagggcaccctatccggcaccgctgaagagaacatgcatatctggcgcggtataccctatgccgcgccgcccgtcggcgatctccgctggcgcgcgccgcaacctgccgcccgctggcagggcgtgcgcagggcggagaatttctcggcctccagctggcaggatattgagtactgtcgcgagctcggcggcggcgatcccggccgcttttccgaggattgcctgtaccttaacgtctggtcacccgcttcgcgcgcgcagccgctgccggtgatggtctggctacacggcggcggctataccatcggcgcgggaagcttaccgccctatgacggtaaagccttagcgtcccgtgacgtggtggtggtgacggttaactaccggctggggcatctgggcttttttgcccatccggcgctggagaaagaagagggggagcgcatctataatttcgcgctgctcgatcagatcgccgccctgcagtgggttcaggataacatccacgccttcggcggcgatgcggccaacgtgacgctgttcggcgagtccgccggggcgcgcagcgtgctgtcgctcatggtttcgccaaaatccagagggctgttccataaggcgattattcagagcggctataccttgccggatctgccgcgggaaaaggcgctggccaaagggcagctcatcgcggaacacttctctttaccgcaggccagcgccgaacagctgcgggcgattccggcggacgcgttctggtcgctgaccgcgccgcttaccatcggcccggcgcccattgttggcgatgccgtactgccgcagccgatgctggagactttttttagcgggcgccagcacccgctgccggtgatgatcggctcgaacagcgatgaggccagcgtcatggcggtgtttggcgtcgatatcgccgggcagatccagaagcttcgccgcgaacgccgttttggtctcggtttgattaagctgctctatcccggcgtcaagggcgatgaggcactagggcgtgaagtctgccgcgatatggcctttaccaccctgggttacgtggtgatgcaggcgcagcagcgggtagggcaaccgtgctggcgctactggtttgactacgttgccgaggcggaacaccaaacctatccgcacggcgcgtggcacggtaatgaagtggcgtatgtttttgacaacctcgaccttgccgagccggtacgacagtatgcgaacgagcgcgaccggacctttgccgcccgggttgccgactattgggctagctttgcccgtgtagcgggtaacggctgccacgagctctccggaccggtgcgctggcccgccagcgtgcgcggacgagaccgtctgttgcgtatcggtttgcacaagcgggccggttttaaagtggaaaaccgttttatgcgcgcgcgtctggcgctgtttcggcgggtgatgaagcaccatgtgacgctggattaa

SEQ ID NO: 188920 - DNA, 624 bp, Klebsiella oxytoca
atggccaaaccgtatgttcgtctggataaaagtgatgccgccgtgctgctggtcgatcaccagaccggattactctctctggtacgcgatatcgatcccgataaattcaagaacaacgtccttgcccttggcgacctggcgaagtacttcggtctgccgactatcttaaccaccagctttgagaacggccccaatggcccgctggtgccggagctgaaagcgcaattccccgatgcgccctatatcgcgcgcccgggtaatattaacgcctgggataacgaagattttgttaaggcagtcaaagcgacgggcaaaaagcagctgattattgccggggtggtgacggaagtttgcgtggcctttccggcgctttcggccattgaagaggggtttgaggtgtttgtggtgaccgacgcttccggtacctttaacccgattacccgcgatgccgcctgggatcgtatgtcgcaggccggggtacagctgatgtcgtggtttggcgttgcctgcgaactacaccgcgactggcgtaatgatatcgaagggctgggaacgctgttctccaaccatattccggattatcgcaacctgatgaccagttttaaccttctgcagcaaaaataa

SEQ ID NO: 188921 - DNA, 1656 bp, Klebsiella oxytoca
atgaatcgcagacgttttctcaaatcttccatggctgttgccgccgtatgcggaacgtcaggagttgcctcattattctcgaaagcggccttcgccgaggactcgggaattgccgacggccagacccgtcgctttgactattccgtacttcagtcgatggcccacgatcttgcgcgtcagccctggggcggcgcgccgcgcgatctgccgccaaccctggcaaacctgaccccgcaggcctacaacagcattcagtacgatactgcgcactccctgtggagtaatatcgaagagcgcaagctggatattcagttcttccacgtcgggatgggattccgccgccgcgtacggatgttctccctggattcacaaacccagcaggcgcgggaaattcacttccgtcccgagctgtttaaatataatgacgccggcgtcgacaccaaacagctggaaggccagagcgatctcggctttgccgggttccgcgtgtttaaggcgccggagctggcgcgccgcgatatcgtcgccttcctcggcgcgagctacttccgcgcggtagacagcacttatcaatacggactctccgcccgcggcctggcgatcgatacctttaccgatacgccggaagagttcccggacttcacctctttctggtttgagaccgtgaaaccgggggctacggtatttaccgtctatgcgctgctcgacagcccaagcgtcaccggcgcctataagttcgtggttaactgtcaggagacgcaggtgattatggatgtggaaaaccacatctacgcgcgtaaagacatcaaacagctgggcatcgcgccgatgaccagtatgttcagctgcggcaataacgaacggcggatgtgcgacactatccatccgcagatccacgactccgaccgcctgtcgatgtggctgggcaacggcgagtgggtgtgccgcccgctgaacaacccgcagaagctgcagttcaacgctttccaggataaaaatccgcgcggttttggcctgctgcagctggatcgcgacttctcccactatcaggacatcatgggctggtataacaaacgcccgagcctgtgggtggagccgcgcaaccagtggggtaaaggggccgtcaacctgatggagatcccgacgaccggtgaaacgctggacaatatcgtttgcttctggcagcccgagaagccggtgaaagccggggatgagctggacttccgctatcgactctactggagcgcgcagccgccggtccgttcgccgctggcgcgggtattggccacgcgtaccggaatgggcggtttccctgaaggctgggcgccgggtgagcactacccggataaatggacccgtcgttttgctatcgattttgtcggcggcgacctgaaggccgcggcgccaagaggcattgagccggtgattaccctgtcgagcggcgaagcgaagcagatagaaattctctacgtggaaccgtttgatggctatcgcatccagtttgactggtacccgacctcggattcgaccgacccggtcgaaatgcgcatgttcctgcgctgccagggggaagcgatcagcgaaacctggctgtatcagtacttcccgccagcgccagacaagcgtaactatgttgacgatcgggtaatgaaataa

SEQ ID NO: 188922 - DNA, 585 bp, Klebsiella oxytoca
atgactgacgaaaacgcgcctgcgagagaaactatccccgtcaccgagtcgctttctctgcgcgctgtggatgaaagccacgtcgctgagctgcatcagctggtgatcaagaaccagcgctggctccagcaatcgctgagctggcccgctgacgtcagtcacgaagacgaaacccgccgccacgtgcagggcaacgtgatgctgcaccagcgcggttacgccaaaatgtttttgctctttctgcgagaagagatcgtcggcgtgctgtcgtttaaccagattgagccgatcaataagaccgcatacatcggctactggattgatgaaagccaccaggggcaggggctgctttctcaggcgctgcaggcgctgatggacgcttttgcccgcagcgggacggttcgccgcttcgtgattaaatgtcgggtagcaaaccagagaagcaatcaggtcgccctgcgtaacggtttcaccctcgaagggtgcctgaagcaggccgagtatctgaacggttcgtacgatgatcagaatatctacgggcggattattgattgtgacaccgggcaattcccggctcgcggctga

SEQ ID NO: 188923 - DNA, 981 bp, Klebsiella oxytoca
atgcgcaaatattacctcagcgagaaggttcgccagtttcactatgaagccgacggaaacaaacatagcgtcaatctgcggcaaattgtcgccttacgcgatttcgctgacgtgaagcgcggcgatgaaggcggctggctggacaatgaagcagccctgagccacgaaggcgagtgctggatttatgacccgaatagcgcggtgtttgccggtgcgaaaatcgagggcaatgcccgcttaaccggcgagtgcattatcagccatggcgccatcgtcagcgataacgcgcgactggacagcgtgcaggcaagccactgcgcgcgtataagtgacaacgtcaccgtttcgcattcgcagattcggggttattgtcacctggccgacaatgcgcagatcctcccccactcgcttattatcgccgcccagggtctgaccgccgacagcgacaaaatcctgcgcatttatcagcgggcaacggtcagcgcttcgcgcatcgttcaccaggcgcaagtttacggcgatgcgtttgtcgaacacgcgtttgttgagcatcgggcggaaatcttcgattgcgcgcggctggagggtaacgacgaaaacgacgtctgggtctgcgataacgcgcgagtttatggccacgcgaggattatcgccgggcgggaagaggacgccatccccaccctgcgctacagctcgcaggtggcggagcacgcggtggtcgaaggcaactgcctgctgaagcatcgggtgatggtcggcgggcatgcgcacctgcgcggcgggccgattctgctggacgatagcgtgttaattgaaggccatgcggtgatttgcggcgatgtggtgattgaacatcaggtgacgatcggcgacagggcgcgaattgaagccagcgcgggcgacgccatttctatcagaggggagaaagtgataaacggcgacgaactttttacccgcacgcccattgtcggctttctataa

SEQ ID NO: 188924 - DNA, 597 bp, Klebsiella oxytoca
atgacgcttcgtgacgaaaattacttcaccgataaatacgggatgacccgcacccactccgaggtgctgcacgccgccaccctgatcgcgccgggcaaggcgctggatctgggctgcggcaacgggcgcaatagcctctacctcgcggccaacgggtttgatgtcaccgcgtgggataaaaatccggccagcatcggaaatcttgagcgcattcgtcaggcggaagggctggagaatctgcggacggcgattaaggaccttaacgccctcagctttgacggcgagtatgactttattctttcgaccgtggtgatgatgttcctcgacgcgaagaccatcccgggtctgattgctaacatgcagcgctgcaccagacccggcggctacaatctgattgttgcggctatggataccgacgattatccgtgcagcgtcggcttcccgttcgcgtttaaaccgggagagctgcgcaataattatgaaggctggacgttgctcaaatataacgaagacgtcggtgaactccaccgcaccgacgccagcgggaaccggattaagctgcgtttcgccacgatgctggcgcgcaaaccggcttaa

SEQ ID NO: 188925 - DNA, 1230 bp, Klebsiella oxytoca
atgtcatcagccctggccagtcaattaacccaacgcttctttcgctacctggcgataaccagccaaagcgacccgcgagccacgacgctgcctaccaccgccgggcaacacgcgatggcgcaggcccttgcggatgagctacgccagctggggctggatgagattgtgattgacgagcgcgccaccgtcacggcggtgaaaaagggcaacgtcgcaggcgcgccgcggattggctttattacccacatcgataccgttgacgtcggtttgtcgccggatattcatccacaaattctgcgttttactggtgaagatctctgtttgaacagggataaagatatctggctgcgcgttgcggaacatccggaaatcctcgcttatcccaatgaagagattattttcagcgacggcaccagcgtgctcggggcggataacaagtccgccgttacggtggtgatgacggtgctggaaaacctgacggcggaacaccgccacggcgacatcgtggtcgcgtttgtgccggatgaagaagtgggcctgcgcggcgcgaaggcgctggatctcgcgcgctttgccgtcgattttgcctggaccatcgactgctgcgagctcggcgaaatcgtctatgagaactttaacgccgccgcggcggagattcgctttaccggcgtgaccgctcaccccatgtcgtcaaagggggtgctggtgaacccgctgctgatggccacggattacatgagccatttcgatcgccagcaaacgccggagcataccgccggacgcgagggctacgtttggttcaacggtatccagggcgatcagaacagcaccctgctgcaggccagcattcgcgatttcgacctcgaaagttttcatcgccgtaagcagcaaattagcgaggtggcgcagaaaatcgccgcgcagtatccgaccggaaaggtggaatttcacatcagcgatacctatagcaacatcagcaatgccatcggcgaagaccgccgcgccgttgatctgatgttcgaagcgatggaaagcttaggcattacgccgaaaccgacgccgatgcgcggcggcaccgacggcgcggccctgtcggcaaaaggcgtattaacgcccaacttctttaccggcgcgcacaacttccactcgaaatttgagtttctgccgctgcgcgcctttgaggcctcttatcagaccgcgttacagctctgcctgttagcggcgcgttaa

SEQ ID NO: 188926 - DNA, 669 bp, Klebsiella oxytoca
atgcgtactccgttattttttaaagtcgccgcgcttgctggcctgttagcattggccggctgctcatccaaaatcgctaagccggaacaatattcgggatttttaaaagattactctaacttaaaagaaaccacctcggcgtccggcaaaccggaactgcgctggatttcgccggattacaatccgagcaactatgacaatatcgtctataacccgatcacctattacccggtaccaaaacccaccacccaggtgggcgagaaggcgctcagggatatcctgaattacaccaataaagagatgaaacaggctatttccgagcgtaaaccgctggcaaccaccccgggcaagcgcagcctgattttccgcggcgccatcaccggcgtggattccagcaaagaagggctgcagttctacgaagtgattccggtggcgatgattatcgccggtacgcaggcggcaacgggccaccgtaccatggacaccaacctgttttttgaaggggagctgattgatgcggcgaccaaaaagccggttatcaaagtggtccgtaagggcgaaggtaaaaacctgtccaacgaaaatacgccgctcaccgtcgagaccctgaagcaggtcattgatgatatggcgattgacgcggtgaaattcgaccccaataaccgttaa

SEQ ID NO: 188927 - DNA, 1023 bp, Klebsiella oxytoca
atgaaaaataagcgcaagaatttgcaagtcggcgacaagctgatgacagcgccgaattcgcccaagccgcacaatgaccggtacaacactcacaggagagacattttgaacgcattactctacgggttggtcgtggttatctggggcaccacctggattgctatctttttacagcaggggccggttgccgcgccggtgtctattttctggcgcttcgccgtcgccagcgtcgcgatgttgaccattctgctggttacccgccgcctgcgcccgctggccgcgcgcgaccatctcttttgcctgctacagggctgctgcgttttctgctttaatttctggtgtttctataccgccgccgcgtatatcaataccgggctggagtcggtgatcttctccatggcggtgttgtttaacgcgatcaatagctttctcttctatcgccagcagcctccgggccgattctggctggccgccgcgctggggctggcggggatcgtgacgctattctgggatgatttatgggccagcggcctgaacgcctcgctcctgctgggtattgccctcagcgcattgggcacctatgggttttcgctcggcaatatgctcagcatccgccaccagcgccgcggtctggagacgttgaccaccaacagctgggccatgctttacggcaccctggtcatgggcgcgatcgcgctggttcgcggtgataatttcgcgccacagtggaccctcagctatatgggcgcgctactgtatctcgccgtgtttggctcggtgattgcttttggcgcctattttacgctggtggggcgaatcggcgcgggtaaagcggcatacagcaccctgctgtttccactcgtcgcgctgaccatttcgactttttatgaaggttacgtctggcacagtagcgccgtggcaggactggcgctgatcctggtcggaaatctggtgatgttcgctcgcccggagcagtggctgctgcggcgcaggctggcctgggttcgcacggatcgctgctga

SEQ ID NO: 188928 - DNA, 876 bp, Klebsiella oxytoca
gtgaaggctatggcttacgggactttcgaaacattgcgtcaaaaaaatgccgtgctgcgggggacggtgaacctcaactccggtattcagctggcggcgtggtataacaatcttgataccatcacggtacaaagtgaccaccataccctgagcctgtatattgccgatggctacgaaagctaccaaaaaacgccccacggctggaaaaacggcggcgggccggaccgtttttgcctgatgccgaaaggcgatgagagcacctgggatatccgcggcgatctctcttttgtgcatctttactgcaccgatgagcacctgcgccgggtaggcgagcagatttgggaccgcagcccggcctcgttcacgctgcaggagaaaacgttttccagcgatgacaaaatcaccgccgtctaccgccagtttctcctcgacaacgactggcagcagcaggcgaatcagctaacgttgagttcggccagcacgctgctgctcacccacctgattcagcactattcgaacgttcagtggcgtttaccgacggtgaccggcgggctggcgccgcacgtcttgcgcaatctgctggcatggattgaggagaacctcgaccagccgctcactcttgccgaactggcgcaggaagctgcgttaagcgaataccattttgcgcggatgtttcgccagtcgatgaagatggcgccgcatcagtacgttatgcagcgccggatggttaaagcgcaggcgctgattagccagagtcggctgccgttaaccgatatcgccatggcctgcggttttagcagcgccagccacttcagcaaccgggtgaaaagcgccaccggcctgacgccctcgcagctacgcgcggcgcagcgttga

SEQ ID NO: 188929 - DNA, 1167 bp, Klebsiella oxytoca
atgcgctctttcactctcccttttccgagtctactcgccggcttcgtcgccgtgctggtcggctatgccagctctgccgccattatctggcaggcagcggcggcggcaggcgccgatgctgcgcaaatcgccggctggatgaccgccttaggtctgggaatgggcatcagcaccctggccctcaccgtctggcgaaaggtgcccatcctgacggcctggtcaacgcccggcgcggcgctgctggtcagcggcctgcagggggtcacgctctcccaggcggttggcgtctttatttttgccaacgccttaatcgtgctttgcggcatcactggcatatttgcccggctgatgaagattattccccattcgctggcggcggcgatgctggccggcatattgctgcgctttggcatgcaggctttcgccagcctgcaggctaatctgctgttatgcggcagtatgctagccgtatggttactgtgcaaagcctggcttccccgcttcgcggttgtcgccgccctgctgacaggaagcgcggtggccggattgagcggagaggtgacaatgtcacaaataggcttcagcattgtcgccccttcctggatcgcccctgaatttacgccggcgctgttgatcagcgtcggtataccatttttcctcgtcaccatggcgtcgcaaaacgcccccggcttcgccaccctccaggcctcaggctatcgggtccccgcttcaacgcttattgtcgccaccggcggcctggcgctgctgctgtcgcctttcggggtctactcgatctgcatcgccgccattacggccgcgatttgccagagcccggaagcccatccggacccgcaaaaacgctggctcgcggcggcggcggcgggcgtgttttatctgctggcggggatatttggcggctcaatcacctcgttgatgtcggcgctgccgatagcgtgggtccagatgcttgccgggctggcgctgctcggtaccatcggcggcagcctgtttcaggcattgaatcatgagagtgagcgcgatgcggcggtagtaacgtttctggtcaccgccagcggcgtgacgctggccggtatcggctcagcgttttgggggctggttctcggcggcgtcagctacgttttgctgtcaacgctgcgccgcgcgtag

SEQ ID NO: 188930 - DNA, 531 bp, Klebsiella oxytoca
atggatattgcgcaacacctgtcggcaacgttaaaaacgctgcgccagcagcgcggctggagcctgtcgcgcctggcggaagagaccggcgtgtcgaaggccatgctgggccagattgaacgcaacgaatccagcccgacggtagcgacgttatggaaaatcgccaccgggcttaacgtgccgttttccgcctttatcattgccgatgaggccggtgaaccgacggcatttgatccccagcagcaggccatggtggtcacgccgctattcccttgggacccggtgctgcgcttcgatcacttctccatcaccctggccccgggcgcgctgagtgagtcaacgccgcatgagcaaggggttatcgaacatgtggtggtgattagcggcgtgctggatctttgcctgcaggacagctggcaatcgctgcagccaggggaagggcggcgtttcgccggcgatttagcgcacgcctatcgcaatagcggcgcgcagactgcccatttccattcgctgatccactacccgaaataa

SEQ ID NO: 188931 - DNA, 1983 bp, Klebsiella oxytoca
atggataacgacgagcgtatgcgcctgcaaaaccatcatcttgaactactgagtcctgcccgcgatgccgggatcgcccgtgaagcgattttacacggcgcggatgcggtctacatcggcgggccgggctttggcgcgcgccacaacgccagcaacagcctgagcgatatcgccggtctggtaccgtttgcccatcgctacggcgcgaaagtgttcgtgaccctgaacaccattcttcatgatgatgaactggagccggcgcagcgcctgataaccgacctgtatgaaaccggcgtggacgcgctgattgtccaggatatgggggtcatggagctggatattccgccgattgagctgcacgccagcacccagtgcgatatccgcagcgttgagaaagcaaaatttctctccgacgtcggcttcagccaaatcgtgctcgcccgcgagctgaatcttcagcagatcaaagcgatttacgataacaccgacgcgaccattgagttcttcatccacggcgcgctgtgcgtggcctattccggccagtgcaatatttcccatgctcagaccgggcgcagcgccaaccgcggcgactgctcgcaggcctgccgtctgccctataccctgaaagatgaccagggccgcgtggtggcgtatgaaaagcacctgctgtcgatgaaagacaacgatcagaccgccaacctggccgcgctgatcgatgccggggtacgttccttcaagattgaaggccgctacaaagatatgagctatgtgaagaacatcaccgcgcactatcgccagatgctcgacgccatcattgacgatcgcggcgacttggcccgcgcctcggcggggcgtaccgaacacttctttgttccgtcaacggataagaccttccatcgcggcagcaccgactattttgtcaacgcgcgcaaaggtgatattggcgcgtttgactcgccgaagtttattggtctgccggtgggggaagtcctgaaagtcggtaaagattttctcgacgttgaggtgagcgaaacgctgaccaacggcgacggcctgaacgtgatgatcaaacgtgaaatcgtcggctttcgcgccaacacggtggagaaaaccggcgaaaaccgctatcgcgtatggccgaacgagatgcccgcggatttacacaaagtgcgtccgcaccagccgttaaaccgcaacctcgatcataactggcagcaggcgctgctgaaaacctccagcgagcgccgcatcgccgtcgatatcgaactgagcggctggcaggagcagctggtcctgacgatgaccagcgaagagggcgtgagcgtcacccacacgctggacggcgagtttgccgaggcgacccaggcggagaaagcgctggcgaacctgcgcgatggcgtggcgaagctcggccagaccctttactattcgcgcaacgttgagattaacctgcccggcgcgctgttcgtgccaaacagtctgctgaaccagctgcgccgtgaaacggcggaaatgcttgatgatgcgcgtctgaaggccgtggtgcgcggcagccgcaagccggtttcggtgccgccgccggtctatccggaaacgcatctgtcgtttctggctaacgtctacaaccacaaagcgcgcgagttttatcaacgctacggcgtccagctgatcgacgccgcctatgaagctcatgaagagaagggcgacgtgccggttatgattaccaagcactgcctgcgctttgccttcaacctgtgtccgaaacaggccaaaggttcgattaaaagctggaaagcgacgccaatgcagctgatccacggcgatgaagtgctgacgctgaaatttgactgccgcccatgcgaaatgcacgtggtcggtaagataaaaaaccatatcctgaaaatgccgctgccgggcagcatcgtggcgtccgtgagtcccgatgagctgatgaaaaccctgccgaaacgcaagggcgcctga

SEQ ID NO: 188932 - DNA, 234 bp, Klebsiella oxytoca
atgttcagaagaagcgtttcaacattactgctggcgtgcgccctgttttccgggcacgtgctggcccgccagcacggacacgatttcttcccggtacagagtctcgaacagcagttacagcacgaagccgatagcgacgagctgcgcagccaggcggaagacgccgcctccgacctgcgcgagcagcaccactggcagaatgcgcggaaaccaaaaatgcatcactaccagtag

SEQ ID NO: 188933 - DNA, 126 bp, Klebsiella oxytoca
atgcaacgagtatggcttaagcgcacgttatggatggtggtcctgtggggaggcagcgtgctggcgctggcggcggtaagcatgggatttcggctgctgatgacggccgccgggctgaaggcctga

SEQ ID NO: 188934 - DNA, 1011 bp, Klebsiella oxytoca
atgggtatcgatttatcggttatttggtttgtcatcatcgtcttcgccaccctgatgtatatcgtgatggacggcttcgacctgggcattggcattttattcagtaccacgcgggacgcggcggatcgcgacgtcatggtgaacagcgtcgcgccggtctgggatggcaacgagacctggctggtgctcggcggcgcggggctgtttggcgcttttccactggcctatgcggtaattatcgatgcgctggcgatccccctcaccctgatgctgatcgggcttattttccgcggcgtcgcttttgaattccgctttaatgcgacgccatcgcaccgcccgttctgggatcgcgcctttatgggcggttcgattctggccaccttcacccaggggatggttgtcggcgcggtgatcaacggcttcgcggtcagcggccgcagcttcagcggcggggtgtttgactggtttacgccgtttaccctgttctgcggcctgggactgtgcattgcgtatgcgctgctgggcgccagctggctggtgatgaagagcgagaatgcgctccaccgcaatatgcgcgagaccgcgcgcggtttgctgctggcgctgctggcggtaattgtcgccatcagcatctggaccccgctggcgcagacggccgtcgccgagcgctggtttagcttgccaaatctcttcttcctgctgccggtaccgctgctggtcgcggcgataagcgcctggctgtggcgagcgctgcgcaacagtgccagccacctgctgccgtttgtcctcacgctggggctgatctttctcggctttagcgggctggggatcagtatctggccgtatattattccaccgggcatcaccctctggcaggccgccgcgccgccgcaaagccagggctttatgctggttggtgcgctgcttattctgccggtgatcctcggctacaccttctggagctactacgtttttcgcggcaaagttcaacacggcgaggggtatcactga

SEQ ID NO: 188935 - DNA, 1398 bp, Klebsiella oxytoca
atgttcggtcttgatgcattccacctggcgcggatccagttcgccttcaccgtgtcatttcatatcatcttccccgccatcaccatcgggttagccagctacctggcggttctcgaaggcttatggttaaaaacgaaaaacccgacctggcgctcgctctaccacttctggtcgaaaatcttcgccgtcaacttcggcatgggagtggtctcaggtctggtcatggcctaccagtttggtaccaactggagcggattctccgagtttgccgggagcataaccggcccgctgctgacctacgaagttctgaccgccttcttccttgaagccggattcctcggcgtcatgctgttcggctggaaccgcgtcgggccgggcctgcacttcttcgccacctgcatggtggcgctggggacgataatctccaccttctggatcctcgcgtccaatagctggatgcaaacgccgcaggggtttgagatcgtcaatggccaggtggtgccggtggactggttcgcggttatctttaacccgtcatttccctaccgtctgctgcatatgtcggtggcggcctttctcagcagcgcgctgttcgtcggcgcatcggcagcctggcacctgctgcgcggcaacaacacgccctccgttcgcgcgatgttctccatggcgctgtggatgacgctgattgtcgccccggttcaggccatgattggcgatatgcacgggctgaatacgctcaagcaccagccggcgaaaatcgccgctatcgaggggcactgggagaatatccccggagaacccaccccgctgctgctgttcggctggccggatatgcagcaggaacggacgcgctatggtctggaaatcccggccctcggcagcctgatcctcacccacagcctggataaacaggttcccgcgctgaaagagttcgcggcggaagatcgccctaacgccaccatcgtgttctggtccttccgtctgatggccggcctcggcatgctgatgatcctgctcggcgcgctggccctgtggctgcgctatcgcggtcgcctctatcactcccgaccctttttacgctttgcgctatggatggggccatcggggcttatcgctatcctcgcgggttgggtgaccaccgaggtgggccgccagccgtgggtcgtctacggcgtacagcgtaccgcagatgccgtctccgctcacggcgacctgcatatgtccatcagtctgctgacgtttatcgtcgtctacgcttcggtattcggcgtcggttatagctatatgctgcgtctgattcgcaaagggccgcaggacgctcagccgcctggcgccggtacgcctgcccgcccgctttccgccgcaacggaccatgtacagcagaaggagtcctggtaa

SEQ ID NO: 188936 - DNA, 1413 bp, Klebsiella oxytoca
atgaaaaagtaccagcagctggcgcagcagattaccgaacagattggccttggggtgtggttacccggcgaccggctgccctcactgcgggaacaggttgtcagcagcgggatgagtttcatgaccgtcagccacgcctaccagctgctggaaagccagggccggatcattgcccgcccgcagtccggctattatgtcgcgccgcagccgatcaaacagcgccagcctgagccgcccgcccaggtgacgcgcgatgagtccgttgatatcaatacctacatcttcgaggtgctgcaggccagccgtcaggcgtccatgctgccctttgcctccgcttttcccgatccgcgcctgtttccgctgccgcagcttaatcgctctctggcgcaggtcagcaaaaccgccaccgccatgagcgtgattgaaaacctgccgccggggaatgatgaactccgccatgccattgcccgccgctacgcgctgcagggaatgaatatctcgccggatgaaatcgtcatcaccgccggagcgctggaggcgttgaaccttagcctgcaggccgttactgaaccgggcgattgggtcgttgtggaaaacccctgcttctacggggcgctgcaggcgctggagaggctgcgcctgaaggcgctgtcggtggcgaccgatgttaaagagggcattgacctcgacgcgctggagcaggcgttgcagaattacccggttaaagcctgctggctgatgaccaacgggcaaaacccgctcggctttaccctcagcgcggagaaaaaaacgcagctggtcgcgctgctggcgcgctacaaggtgatgctgattgaagatgatgtctacagcgagctctatttcggccgcgagaaaccgctgccggcaaagtactgggatcgcgacgatatgacgctgcactgcagctctttttccaagtgcctggtccccgggttccgcattggctgggtggcggcgggcaggcacgcccgacgcattcagcagctacagctgatgagcacgctctcaaccagttcacccatgcagctggcgctggtggattacctctcgaccaagcgctatgacgcccatttgcggcgtttgcgccgccagcttgccgagcgcaagcagctggcctggcaggcgctgctgcgccatctgcccgcagaggtgaaaatccatcatagcgacagcggctattttctctggcttgagctccccgccgggagcgacgcgggggagctgagcgcccgcgcgctggcgtataatatcagcattgcgccggggaaaatgttctccacctccgccagctggaccgcattttttcgctttaataccgcgtggggctggggcgaaagagaggagcagggggttaagcggctgggcgaactgattcgcgagatgctggcgtag

SEQ ID NO: 188937 - DNA, 1146 bp, Klebsiella oxytoca
atgagcaaaaaaattgcccgtggcagcctttgcgtgctgggtatggtttgcctgacggcgcaggccgccgagccgccgacatctctcgataaaggcgaaggccgtctcgatattatcgcctggccgggatatatcgaacggggacagaccgataaaagctacgactgggtaacccagtttgaaaaagaatccggctgtcaggtcaacgtcaaaaccgccgccacgtccgacgagatggtcagcctgatggcgaaaggcggttatgacctggtcaccgcgtccggcgacgcctcgctgcgcctgattatgggcaagcgcgtgcagccgattgacaccgcgctgatcgctaactggaagtccctcgacccgcgcgtggaaaatggcgcgtggttcaacgtcaacggtaaggtttacggcactccctaccagtgggggccgaacctgctaatgtacaacacgaaaaccttcccgacgccgccggacagctggagcgtggtgttcgtcaaacaaaacctgccggacggtaaaaccaacctgggccgcgtgcaggcctatgacgggccgatttatattgccgatgccgcgctgttcgtcaaagccacccagccgcagctgggtatcagtgacccctatcagcttaccgaagcgcaatatcaggcggtactcaaggtgctgcgcgatcagcacgccctgattcatcgctactggcacgataccaccgtacagatgagcgattttaaaaacgaaggcgtcgtggcctccagcgcctggccctatcaggccaacggtctgaaggcggaaggtcagccgattgcgaccgttttcccgaaagagggcgtcaccggctgggcggataccactatgctgcatagcgacgcgaaacacccggtctgcgcctataaatggatgaactggtcgctgacgccgaaagtgcagggggatgtcgcggcctggtttggttcgctaccggtggtacccgaggggtgcaaagccagcgcgctgctgggggacaaaggctgcgagaccaatggttacaacgaatttgccaaaatcgcgttctggaaaacgccggtagcggaaggcgggaaatttgttccctatagccgctggacccaggattacattgcgattatgggcggtcgttaa

SEQ ID NO: 188938 - DNA, 1011 bp, Klebsiella oxytoca
atgcacgcggtagagttcgataatgtttcgcggctgtacggcgacgtgcgggcggtggacggcgtcagcatcgccattcgcgatggcgaatttttctccatgctggggccctccggctccggcaaaaccacctgcctgcgcctgattgccgggtttgaacagctttcgggcggcgccattcgcatttttggtaaagcggccagcgaactgccgccgtggcagcgcgacgtgaatacggtgttccaggattacgcgctgtttcctcatatgtcggtcctcgataacgtcgcctacgggctgatggtcaaaggcgtcggtaagaaagcgcggcatgcccgcgcgctggaggcgctggagaaggtcgcgctcgcgtttgtccacgcgcgcaggccatcgcagctttccggcggccagcgccagcgggtggcgatcgcccgcgcgctggtgaatcagccgcgcgtcctgctgctggatgagccgctcggggcgctggatttaaaactgcgtgaacagatgcagctggagctaaagaaactgcagcaggcgctgggcattacctttatttttgtgacccacgatcagggcgaagccctgtcgatgtccgatcgcgtggcggtgtttaataatgggcgaatcgaacaggttgatgcgccccaggacctctatttgcggcctaaaacggcgtttgtggccggctttgtcggcaccgccaacgtattcaccagcgagcaggcgcacaagctgtgcgcgatggcgggaacgtggtcgctgcgcccggaacatatccggctgaacgttgccggggagatccagacggagggcgtcgtgcaggcggtgcagtatcagggggccgcgacccgcgtcgaactcaagctggcgaacggcgagaagctgttggtgagccaggcgaatagtgatggtcatgccgcgctaaacgcaccgccggtggggcaaacggtgctggcttcgtggtcgcgagcggcgatggtgccgctggagagcggaggctga

SEQ ID NO: 188939 - DNA, 930 bp, Klebsiella oxytoca
atgacgatggcgattccgtccgccaccaccgggcgcgtatccgcgctgttctggcgtaaaccctcgctggccctgtttttgcttctgcttggcccgctcatgtggtttggcattgtctatctgggatcgttgctgactctgctatggcaaagcttctacaccttcgacgatttcaccatgtcggtcactcacgacctgacgctggccaatctgcaggcgctgtttaacccggcgaactacgacatcattatccgtaccctgacgatggcgctgtcggtgaccgtcgccagcgcgattctggccttgcctatggcatggtacatggcccgctatacccggggcaagatgaaggcgtttttctacatcgccgtgatgctgccgatgtgggcaagctatatcgtcaaagcctatgcatggacgctgctgttggcgaaagatggcgttgcgcagtggttcctgcgccatcttggcctggaaagcgtactgagcatggtgctgacgatcccggcggtcggcggcaatacgttatcgacgtccggactgggtcgcttcctggtgttcgtctatatctggctgccgtttatgatcctgccggtgcaggccgcgctggaacgcctaccgccatcattgcttcaggcctccgccgatctgggcgctcgtccgcgccagaccttccgctacgtggtgctgccgctggcgattcccggcattgccgcaggctcgatttttaccttctccctgacgctcggcgattttatcgtgccgcagctggtggggccgccggggttctttatcggcaatatggtctattcccagcagggggcgattggcaatatgcccatggcggcggcgtttaccctggtgcccatcgtgctgattgccctttatctggcgtttgtgaaacgtctgggagcgtttgatgcactctga

SEQ ID NO: 188940 - DNA, 807 bp, Klebsiella oxytoca
atgcactctgaacgcgcaccgctgctcctgaaagtggcaacctggggaggggtgatctttctccatttcccgctgctgattatcgcgctctatgcgtttaataccgaagacgccgccttcagctttccgccacagggcctgacgctgcgctggtttagcgaggcggcggggcgcggggatattattgatgccgtgacgttgtcacttaaaatcgccgcgctctccaccgctatcgctctgctacttggcacgctggctgcaggtgcgctatggcgcagcacgttttttggcaagaacgccgtctcgctactgctgctgttgccgatagcactgcccggcatcatcaccggactggcgctgctcactgccttcaaggccgtcaatctggaacccgggttactgacgatcgtcgtggggcatgcgacgttctgcgtcgttgtggtgtttaacaacgtcattgcccgctttcgccggacctcctggagcctggtagaggcgtcgatggacttaggcgctacgggctggcaaacctttcgctatgtggtgttgcccaatttgggctcggcgctgctggcgggaggcatgctggcgtttgccctgtcgtttgatgaaattatcgtcaccacgttcaccgccgggcacgagcgcacgctgccgctctggctgctcaatcagcttggacgcccgcgcgatgtcccggtgaccaacgtggttgcgctgctggtgatgctggtgacgatgatgccgattctgggggcctggtggctcacccgtgacggcgacgtcagcgctgaaaacggaaagtaa

SEQ ID NO: 188941 - DNA, 1428 bp, Klebsiella oxytoca
atgcaaaataaccttttaattaacggtaagttagtggctggagaaggcgagaccgtgccggtgtttaatcccgccaccggtgaagagatcctgtcgattgctgaggccacggcggcgcaggtagacgctgcggttgaggccgcggatcgggcctttattagctggagtcagaccacgccgaagttccgcgccgaatgcctgctatcgctggcggacgtgattactgaacatgcgcaggcgctggctgagcttgaatcgctcaactgcggtaagccgctgcactgcgtggtcaacgatgagctaccggcggtcgccgatgtcttccgcttctttgccggcgcggcccgctgtctgccgggcatggcggcgggtgagtatctcgaaggccacacctccatgattcgccgcgacccggttggcgtggtggcctccatcgcgccctggaactacccgctgatgatggcggcatggaagctggccccggcgctggcggcaggcaactgcgtggtgatcaaaccctcggagatcacccctttaacggcactcaaactgggtgagctggcaaaagacgttttcccggccggggtgcttaacgtgctgtttggccgcggcgccacggtcggcgatccgctgaccgctcacgcgaaagtccgcatggtgtcgttgaccggttcgatcgccaccggcgcgcatatcatcggccataccgcatcgtcgattaaacgtacgcatatggaactgggcgggaaagcgccggttatcgtctttgatgacgcggatatcgacgcggtggtggagggcgtacggacctttgggttctataacgcaggccaggactgtaccgccgcctgccggatttacgcccaggccggaatttatgaccagctggtggaaaaactcggcgccgcggtcgccagcctgaagatgggcccgccggaagacgaaacgaccgagctggggccgctgagctcgcaggcgcatctggacagagtctgcgccgccgtcgatgccgcccgcgcgctagcgcatattcaggtggtcaccggcggcagcaaagcgccaggcaacggttactactatcagccgacgctgctggcgggagcgaagcaggaagatgcgattgtccagcgcgaggtcttcggcccggtggtcagtattacctcatttcatgacgaagatcaggcgctgagctgggccaacgattcgcagtatggtctggcttcgtcggtctggaccagggacgtcggcagggcgcatcgcctgagcgcgcgtctgcagtatggctgcacctgggttaacacccatttcatgctggtgagcgaaatgccgcacggcgggcagaagctttcgggctacggcaaggatatgtcgatgtacggtctggaggattacaccacgatccggcacgtcatgattaagcacggatag

SEQ ID NO: 188942 - DNA, 123 bp, Klebsiella oxytoca
atgtcaggaatcgccgttctcattgtggcgcttattttactcattgctgcaatttataatcttttttcctatgttcgcgaacgtcgccaggcgagtttaccgagcaaaaaaacaaaacgttag

SEQ ID NO: 188943 - DNA, 285 bp, Klebsiella oxytoca; identical to SEQ ID NO: 179045

SEQ ID NO: 188944 - DNA, 174 bp, Klebsiella oxytoca
atgacgttataccagaaaatgctgattttttacggagttatgggcttcatctgcgcggtaatcagctggttcttaacgaaagagagccgctggatccgcctgctggcggcgctgttgattggtgcgacatggccgttcagttttcccatggcgctgctggtctccctgttttga

SEQ ID NO: 188945 - DNA, 771 bp, Klebsiella oxytoca
atgcttagtttttactcttcacaggctggcgctatagtgcgctggctcgacctgcccggtcgcggcgaccctgttgtttttatccacggcctgggctgcgcctcgacctatgactatccgcgcgttgccgccgacccggcgctggccgggcggcgaatgattcttgtcgatttacccggtttcggctacagcgataaacccgagtccttcggctaccgtattggcgatcaggccggggtggtggttgagctgctggaccgcttagggcttgagcgctgctatctatatggccacagcatggggggcagcgtcgcgattgaagcggccgagcggctcgccggacgggtgcgggcgctgctggtggccgagcctaatctctatcccgggggcggcatgtacagcagacgtatcgccgaacaaactgaagaacgctttattgctcgcggctacgccgacatgctgtccgccgacgcttcgccttgggccggctgtctgcaaaacagcgccccctgggcggtgtggcgcggcgcgaccagcctggtgaagggcgttaatccctcctggtttagccgctttatccacttatcctgtcctaaggctctgatatatggtgaatattcgctaccggcccaggaagcgacggatagcgaagccgccgggatcccgctgctggtaataccccaggccgggcactcaatggcgtgggaaaacccatcggcgctggcccgtacgctcgccgatttttactccgccatggaggcagaagcctga

SEQ ID NO: 188946 - DNA, 1257 bp, Klebsiella oxytoca
atgcgaaaaaccactatcctgggtatctcggctttactctttacaccgctgcttctgcaagggtgcgcgacgcaaactccgcgcgggaccacctcccgtccgcagcttacggcggcagaagcggcaaccttcaccactgagcgctattttgcgcaaggcggcgcgttaagtgcccccgatggcccctggtcgccatcgccagttcacctcccgcaaaccgagagagcgtggcgcgtggcaccctcgggagcgccgttcacccgcattcagcaggcggttaacgcggcaatagaccagcatggggcgcaggaggcgcgcatctatatccgcatcgaaccgggcatctatcgggagacggtctatatccctgaaggcgcaccgccgataaccctctacggcgccggagatagtcctgaagaggtgagaattgagctggcaatagactcgcagttctcggtagcgcgctatcgccagcgggtaaatagccaacagcaataccgcgaaggcgatccggcatggtatcagtatgcgctgtgcgccgggcgaaccagcaagacgataggcaccaactgcgcggcggtggtctggtcgcaaagtgcggattttcagctgctgaatctcagcgtagccaatagcctgctggataccgtcgacggtgggacgcatcagggcgtggcgctgcggacggacggcgatcgcgtgcagctggagaacgtccgcctgctgggacgtcaggacacgctctacgtaaataccagcaatcggcgcaatgaggcggtaaccgaccgtatcagccgggtatacgtgaaagacagctacgtcgaaggggatgtggactacgtctttggccgggcgaacgccgtttttgataacgtccattttcacaccgtctcaacgcgccgctcgcccgaggcatacgtgcttgcgccgaatacgttgccggataatccatacggcttcctggtgaagaatagccgctttaccggcgacggcggctatcagggcagcttcaaggcgaagctgggccgcgcctgggatcagggggcggggaagaccggttatttagcgggtaaaaccgctaacgggcaggtgcttattgccaacagtactatcgatcaaagctacgatcggctttccccctggggcgctgcggccaccaccgcccggccgttccgcggcaacacttccgcagaacggcagcttgatgatgttgccttcaatcgcctgtgggaattcaataaccgctggcagccctga

SEQ ID NO: 188947 - DNA, 1434 bp, Klebsiella oxytoca
atgacaataacctgcaatctgtacaccaacggccagtggcatgatgctgaaggtcatgccacctttacccgcgataatccgctcacgcacgaacgcgcctccgttgccagcgccgccagcctggcggatgcccgccgctgcgccgctgccgccggcgcggcgttcccgcagtggcgcgatacggtacccgccgagcgccgacgtctcctgctggaggccgcggaagagatgctgcgccgtgaggcgaaatttatcgccgcgatggcggcggaaacgggagccaccgcgcactgggccggttttaacgttcatctggccgccgatatcctgcgcgaagccgccgccctgaccacgcaaattgagggccaggtgatcccttccaacgtgccgggaaacctggcgttgggcatccgccagggtgcaggcgtggtgcttggcatggcgccgtggaacgcgccattaatcctcgcgacccgcgctatcgccacgccgctggcctgtggaaatacggttatcctcaaaggcgcggagctttcaccggcgacccaggggctgattatcgatgccctggcggcggcaggctttcccgcgggcgtggtcaattatctgacctgcgcccccgccgacgcgcctgcgctggtggagttactgattgcccaccccgccgtacgccgcatcaatttcaccggctccacgccggtgggacggataatcgcccgcacctgcggcgaacatctgaaacccgcggtgctggaactcggcggcaaagcgccgctgctggtgctggatgacgccgatctcgaacaggccgccgcaggcgcaatttttggcgcattcgccaacgccggacaaatctgcatgtccaccgagcgcatcatcgttgacgcgaccgtcgcggaagcgtttgtggctcagatggccagacgcgccgccgccctgcccgccagcctgctcggcccggtggtggacatgaagaccgtcacccgctgcaatgccttgatagaggacgcgctggcgaagggggcgcgcctgctggccggcggcctatccgattcgacgcaaatgcgcgccaccctgcttgatggcgtcacccgggaaatgcgcatctggcatgaagagtcgttcggtccggtgaaatcgattattcgcgttaaggacgaagccgaagcgctggccgtcgccaatgaaagcgaatatggcctctcgtcggcgatatacagccgggacagcgccagggcgtggaacctggcgcaaaatctgcaaaccggcatttgccacatcaacggccccaccgtacacgacgaagcgcaaatgccgtttggcggctgcaaatcgtcaggctacggccgctttggcggacgcgcgggaattgccgagtttaccgagctacgctggataacgctgcaaacggtcccgcgcgagctcccgttttaa

SEQ ID NO: 188948 - DNA, 1599 bp, Klebsiella oxytoca
atgtctacagggaaaacgtttcttgcgctggcgttgagcgcgctactgccggcggcaggcgcctgggcggcgggcaacgatacgctggtctattgttccgaagcttcgccggaatctttcaacccgcagattgccagctcgggcccatctttcgtcgccagttcccaggtgctttataaccgcctgataaactttgacccggtcaaaaatacgccgattccctcgctggccaccgaatggcgtgtctccccggacggtaaaacctggactttcaccctgcgtaagggcgtgcagttcaacagcaacaaatacttcaagccgacccgtgatttcaacgccgatgatgtgctgttctcggtgctgcggcagaaagatgccaaccatccgtaccataatgtttcccagggacattacgaatacttccacgacgttgggctggataagctgatcaaagacgtcaaaaaaatcgatgattatcacgtgcagtttgtgctgaacgagccgaacgcggcgttcctcgccgactggggaatggattttgcgtcgattctgtctgccgaatatgccgatgcgatgctgaaaaaaggcaccccggagtatgtcgatacctggcctattggtaccggaccctacgcgctgcagcaatataaagcggattcgctgatccgctatgtcgccaacccgcactactgggacggtgacgtgccgaccaaacacctgattttctcgatcacaccgaacgttgagacgcggcttgcgaagctgcaaaccaatgaatgccagattatccccgcgccgtcgccggtacagttcccggtgattaagggcaataaagatctggcgctgcatgcggttgaggcgctcaacgttggctatctggcctttaataccgagaaaaagccgtttgataacgtactggtgcgccaggcgctgaactacgctaccgacaagcaggcaatcgtgaaagcggtcttcctggactccggcagcgtcgcgaaatcgccgatccccgccaatatgctgggctataagaaagatctgcctgattacgactacgatccgcaaaaagcgaaagatctccttaagcaggccgggctggaaaaaggggccgaggtcaccctgtggtcgatgccggtgcagcggccgtataaccccaattcccggcgtattgccgagatgattcaaaatgactggagcaaggttgggatcaaagccaaaatcgttacttatgaatggggtgaatacctcgccggcatgcgcaaaggcgagcacgacagcgcgctgtttggctggatgtctgataatggcgatccggataacttcgccggcaccctgttaagctgcgataacattaaaaccggctctaacgttgcccgctggtgcgataagtcctacgatgcgctggtgaaaaaggctatcctggtcagcgacccgcaggcgcgcgccgggctctacgctcaggcgcaggagatttttcagcagcaggccccctggatcaccctggcgaccggtaacaccttctacgcgacgcgcagcaacgtgagcggctacagtgtgagcctgatgggcagcgatttttccaaagttaaactcaattaa

SEQ ID NO: 188949 - DNA, 234 bp, Klebsiella oxytoca
atgtcgcatctggatgaggtcgtcgcgcgcgtggacgccgcgattgccgaaagcgttattagccatatgaatgaactgctgatcgcgctgagcgatgatgcggggctggggcgggaagagcgctacgttcagcagcagcgtttgcgtaacgccatcgcccaccacggccgccagcagcacgaggagcaggaagctcgccgggagcagctgacccgcggcggcgagattcactag

SEQ ID NO: 188950 - DNA, 450 bp, Klebsiella oxytoca
atgaatcaaacgctgaccctggcctgtttaatcgccgctggcgtcgggctggtgctgcaaaacacgctgatggtgcgcattacccagtccgcatcgaccatcctgatcgccatgctgcttaactcgctggtcggcatcgtgatttttgtgacaatactgctgcttaagcacggcgcggcggggtttcaggagctggcggtcagcgtaaagtggtggacgctcattcccggtctgctgggctcgttctttgtctttgccagcatcagcggctatcagaacgtcggggcggcaaccacgattgcggtattgattgccagccagctggttgggggcttagtgatagatctgattcgcgcgcaccacgtcccgctacgcgcgctggttggcccgctctgcggggcggtgatgctggttatcggcgcctggctggtggccaggcgccagttctag

SEQ ID NO: 188951 - DNA, 519 bp, Klebsiella oxytoca
atgagcatccgccatgccagcaaagacgattgcgcggcaatcgctgaaatctacaaccatgcggtcatccataccgccgccatctggaacgacaaaaccgtcgataccgacaaccgtattgcctggttcgaagcccggcagatagccggttatcccgtgctggtgagcgaagaaaacggggtgattaccggttactcctccttcggcgactggcgcgcctttgacggctttcgccacaccgtcgaacattccgtctatgtccaccccgatcatcaggggaaagggctgggccgcagcctgctcgtcgccctcatcgccgaggcgaaacggctgaataagcacgtcatggtcgccggcattgaagcgcaaaacgaggcttcattgcatctgcatgaaacgctgggctttatcaccaccgggcagatgccgcaggtcggcacgaaatttggccgctggctggatctgacctttatgcagctgcagcttgacgatcgccgcgatccggacggcagcgcatga

SEQ ID NO: 188952 - DNA, 1296 bp, Klebsiella oxytoca
atggcgcgtacacaaaatatgaagaaattaatgccgtcaatattggcaatggccatgggggctatatttggcaattcagctatggcggctgaaaccaccgcgctacaggcagcaccggcttataccgcgacgcagactaaaggggagaagctgtggagcaatgacgatacggcaattggtattttaggatccgtacgtttaatggccaaaacggactctaatcatactcaggaacataatatacagaataatgactcgcggctgggggttgccgtgcggcataattttgacctgaacggcctgagtaattatgccgtcggttattatgagaccggcgttcatggtttagattccgccaccgatgaccagggcaatgatgtttatacccggcaggcttatgccggtattggcaatgaccgctatggcgtggtgaccttcggcaaacagtatgctcccacggactgggggctgggtattgatacgacttatgcctggggcgggaaagcgaaacatgataccaccggaatgtcgacggatattattaattccgcggcaatctattattacaatgataaaaatatgacgattggcgtcatggggcaaggcaatgacaacgtcgacagcatcggctttgcggcctacggcgatgggccgaacctgcatgatgcttaccgcgatggttcagccaccgttcacggcggcgccgcggttgccgcgcagtaccgttgggataacggcttctccgtctccagcgcggtggcgtataacaattacacggtaaatagcgggtcagtcagcggctgccagaattttggcccgaatggccactgttttaattacaccgataataacggcgatgcctatgacggcaatacttatagcatgggcatgaacgcgaaatatacgacaagcgttggcgatcatgcctggtataacggcgcggaagtgacttattacctcaataaagtgaatgatgttacagcggcgaccagcggccattacgaacataataaccagcagggggatgaccaggaaacggttctcggtctggaatatgactcgcaatttaaaatcaccccggcctggagcgtgtacgttgattttaactggtcgcagggcggcgatgcgatggagggacagcacttccagtcgacggtattgggtaccgattactggctggggaaaaacgcggtgacttatcttgaatacggctacgaaaaagcctggggcaacgataatgaagcgtggaatattgacgacaatctcggcgcagtggggctgcgcgtctttatctga

SEQ ID NO: 188953 - DNA, 576 bp, Klebsiella oxytoca
atgaatactatagaagacaacctcaaccagcgcatcagcgcacgcatccgaatcgagcgggaatcccgcggctggtcgctcagcgaactcgccgagcgggctggggcgtcgcgggcgatgatccacaagatcgagcgcggcgaaagcagcccgacggcgtcgatgcttggacgactttccggcgccttcggcattagcatgtcgacgctgatcgccagggcggagatgcaggaaggcaagctgctgcgttttgctcatcagccggtgtggcacgatccgcagagccactatcttcggcgtcacgtttccccgcgtagcgacctgcctatcgatctggtgcaggtggaacttccggctggcagcgacgttcctatgcccgcgtcatcctatgcgctggcccggcagctcatctggctacagcagggcgaactggtctttctcgaaggcaacgcgcgccacgaaatgcaggcgggggattgcctggagctcgggccgccgaacgactgccgctttattaatgaaaccacgcagccctgcatctatctggtggtccggctcaatcaatctgcctcataa

SEQ ID NO: 188954 - DNA, 1038 bp, Klebsiella oxytoca
atggctttcaatccgcaacgccaccgccgctggctgctggcatcccgtccgcacggcgagccgaccggggaaaacttccgcctggaagagggtgaggtcgcttctcccgggccgggacagctactgctgcgcaccgtctttctgtctttagatccctatatgcgcgggcggatgagcgacgcgccttcctattcgccgccggtcgccgttggcgcggtgatggtgggcggcaccgtgagccgcgtcgtgacatcgaaccatgatgattatcagcccggcgactgggtgcttggctacggcggctggcaggattatgaactctccgacggcagcgggctggtgaagttaggcgagagcccggaacacccttcctgggcgttggggatcctcggcatgccgggctttaccgcctatatgggactgctggatattggtcagccgaaagcgggtgaaacgctggtggtcgccgccgccaccgggccggtcggcgcaacggtcggacagattgcgaagctgaaaggctgccgtacggtgggcatcgcgggcggcagcgagaagtgccgctatgcggtagaaaccctcggcttcgacgcctgcatcgatcaccgcgcgcccgatttcgccgtcaaactgcttgaagcctgcccgcaggggatcgatatctactatgagaacgtcggtgggaaagtgtttgatgaagtactgccgctgctgaacacctcggctcgcgtgccggtttgcggcctggtcagcggctacaatgccaccgcgctgcccgacggcccggatcgtttaccgctgctgatggcgacaatcctcaaaaaacgcatccgtatgcagggctttattatcggccaggattacgggcaccggattgccgagttccagcaggagatggggcgctgggtgcaggcagggaaaatcaaataccgcgagcaggtggttgacggcctggagaacgcgccgcaggcgctcatcggtctgctgaagggcgagaacttcggtaaagtggtggttcgagtctctcctgacgagtag

SEQ ID NO: 188955 - DNA, 936 bp, Klebsiella oxytoca
atggcactgccagtgattatcgattgcgatccgggtcatgatgacgcgattgccctcgttcttgccctcgcctcacccgaactcaatgttaaagccgtcacctcttccgcgggaaatcagaccccggacaaaaccctgcgcaacgtcctgcggatgctcaccctgcttaagcgcccggatattccggtagccggcggcgcgctcaagccgttgatgcgggagctgattatcgccgataacgtgcatggcgagagcggtcttgacggtccggcgctgccggaaccgggctttgccgcccagacgtgcaccgccgtcgagctgatggccaaaaccctgcgcgacagcgccgagccggtcaccatcgtcgcaaccggcccgcaaaccaacgtcgccctgctgctcaacagccaccctgaactgcatgccaaaattgcccgcatcgtgataatgggcggtgcgatggtgctgggtaactggcagccggcggtcgagtttaatatctacgtcgacccggaagcggcggagatcgttttccagtccggcattccggtggtgatggccgggttagacgtcacccataaagcgcaaattcacgttgaggatattgagcgcttccgccgcattggcaacccgatatccaccatcgtcgccgaactgctcgacttcttccttgagtaccataaggatgagaaatggggctttgtcggcgcgccgctgcacgacccgtgcaccattgcctggctgctgaagccggagatgtttaccaccgttgaacgctgggtcggcgtggaaactcaggggaaatatacccagggaatgaccgtggtcgatttctacaatctgaccggcaggaagccgaacgcaacggtgatgctcgatgtcgatcgccaggcgtttgttgacctgctggcggagcggctggcgttttacgcgtaa

SEQ ID NO: 188956 - DNA, 300 bp, Klebsiella oxytoca
atgaaagatgttgtagataaatgcagtaccaaaggctgcgccattgacgtgggctcgattattgataatgaggactgcgtctggcgggtagagaaaaacttcgccagccgcgaagaggccgagtccaccatcgcggccgtccgcgaacgtgccctggccgccgcgcccgccagcgagccgccgcaggtcgactataccatcgtggccgccggcgatgaggcaaagcttgaggcttcgattgccttctcctgccaggcggaaaagatcattttcgaattgtcgttaagaaacgtgatttaa

SEQ ID NO: 188957 - DNA, 2112 bp, Klebsiella oxytoca
atgaaaatcctttccgtgcgcgccgccgcgctccccgctctgcttttgccgctggtctccgcagggccaaccgctctcgccgctgaacagaccatggtggttaccgccgcgccgtcggcggtttctgaactcgatacccccgccgccgttagcgtggttaacggcgatgagatgcgccaggccgcgccgcgggtaaacctctccgagtcgctgggcgcggtaccgggactgcaggtgcaaaaccgccagaactacgcgcaggatctacagctttcgattcgcggcttcgggtcccgctccacctacggcgtgcgcgggctgcgtatttacgtcgacggtatcccggccaccatgcccgatggccaggggcaaacctcgaatattgatattggcagcctcgattcgctcgaggtgctgcgcgggcctttttccgccctgtacggtaactcctccggcggggtgatcaacgccaccagccagaccggaagccagccgcccactatcgaagccagcagctactacggcagctttggcacctggcattatggtatgaaagcgaccggcgcggtgggcgacggcagccacgcgggcgacgtcgactacgtggtttccaccaaccgcttcaccacccacggctcccgcgaccatagcggcgcgcgtaagaatctcgccaacgcgaagctcggcgtgcgcatcaacgacgtcagtaagctgaccctgctgtttaacagcgtggatattaaagctaatgacgcgggcggcctgagctatgacgaatggcaaaataatccgcgccagtcgccaagaggcgatgagtacaatacccgcaaaaccatcaaacaaacccaggccggtttacgctacgagcgacagctgagcgagcaggacgatctgagcgtgatgatgtacgccggtgaacgtgaaaccacgcaatatcagtcgattccagagaaagttcaaactaaaccgtctaattctgggggagttatcgaactgacccgccattatcaaggcatagacacccgctggacccaccgcggcgaactgctggtgccggtcacctttaccaccggtcttgattacgaaaccatgagtgagcaacggaaaggatatgagaacttcatagttacagatagcggaacgcagttaggagaaaaagggaacttaagacgcaatgaacgtaatttaatgtggaatctggacccctacttgcagacccagtggcagttggcagaaaaccttacttttgatgcaggtatccgttacagctcagtctggttcgattctaacgatcattacgtgactaaaggtaaccccgacagtagcgacaataccagctaccatcgatggttgccggtcggttcgcttaaatattcgattaccgatgcctggaacgtttatctttcagcaggccgcggttttgaaactccaaccattactgaactctcctaccgttcaaatgatattggcgggctaaatcttggattaaaacctgcaaccaatgacacagtagaaatcggtagtaaactgaggattgaaaacggtctcctcaccgcggccttatttcagactgacaccagtgatgaaattgtttccgacaccagcagcggcgggcgtaccagctacaaaaacgccgggaaaacccgtcgccaggggatggagctggggctggatcagcagttcggcgagagctggcgtttaaaagcggcctggacctggctggatgcgacctatcgtaccaacgtctgtgatgatgccagctgtaaaggcaatcgcattccggggatcgcccgcaacatgggctatgcctcctttggctaccagcccgaaaaaggctggtacgcgggcagcgatattcgctatatgagcgatattatggctaacgatgagaacaccgccaaagccccatcctggacggtggtcggcctgacgaccggctataaatggagctacggcaaaatggatatggatctgtttggccgcgtcgataacctgttcgaccgcagctacgcgggctcggttatcgttaacgaatccaacggccgctactacgaaccggtgccgggccgtaattacggtatcggtctaaatctggcatggcggtttgagtaa

SEQ ID NO: 188958 - DNA, 1062 bp, Klebsiella oxytoca
atgtcattacgtcatctgtccgcgccgcgtctgcgccgttcactgttgttaacttcgttactgctggcggggagctttagcgcccacgcggcggaagaaatgctgcgcaaagccgtcggcaagggcgcatacgaaatggcctatagccagcaggagaatgcgctgtgggtggccacctcgcaaagccgttcgctggataaaggcggtatcgtttaccgtctcgatccgacgactctcgaagtcacgcagattattcataacgatctgaaacccttcggcgcgacgatcgataacgccactcagaccctgtggtttggcaacaccaccgacagcaccgtcaccgccattgatgctaaaaccgggaaagtgaaagggcgtctggtgcttgacgcccgccagcgcagcgaaaccgtacgtccgctggccccgcgcgagctggcggtcaacgagaaaaccaacaccgtctacatcaccgggctgggtaaagagagcgtgatttgggtggtggatggcgacaagctaacgctgaaagacaccatcgccaatactggcgcaatggcgaccggcctggcgctggacgcggaagcgaaccgtatctataccaccaatgccgacggggaactggtgactatcgacagcaccagcaacaaaatcctgtcgcgtaaaaagctgcaggatgatggcaaagagcacttctatctcaacctgagcctggataccgccggacatcgcgcctttatcaccgacggtaaacagccggaagtgctggtggtcgatattcgcgatggcaaagtgctggagaagatcgccgcgccggagtccctggccgtgctgtttaacccgacccgcaatgaagcctacgtgacgcaccgtaaagccggcgaagtgagcgtgatcgatggtaagacctacaaagtggtcaagaccttcaaaacgccgactcatccgaacagcctgacgctctccgccgatggtaaaacgctgtacgtcagcgtgaagcaggagtcgacgcgtcagaaagaggcgacccagccggatgacgttatccgcatcgcgctgtga

SEQ ID NO: 188959 - DNA, 222 bp, Klebsiella oxytoca
atgaaaaaatcattaatggttgtttgcgccggcgcgatgctggctcttctggcgggctgtagctcaaactatgtcatgacgacaaaaagcgggcagactatcgtaacgcagggcaagccgaagctggataaagatactggaatgaccagctatactgatgagtcgggcaataagcgccagattaacagcagcgatgtggcccagctggtggaagataattaa

SEQ ID NO: 188960 - DNA, 1548 bp, Klebsiella oxytoca
atgctcgcttatctcattcctcagaatgatgagagagccagcagcacgaaccacttcatggacattgacaggaaaatagcgacatcaatgaatacaaaacactctagcgtggcggagcagcacgctgccaaacgccactggctgaactcgcaggagtcgggctaccacaaggcgatgggcaaccgtcaggtgcagatgattgccatcggcggcgcaattggtaccggcctgttcctcggcgcgggcgcgcgcctgcagatggccggaccggccctggcgctggtttatctggtctgcggcctcttctcgttctttatcttacgcgcgctgggcgagctggtgcttcatcgcccctccagcggcagcttcgtctcctacgcccgcgagttcctcggcgaaaaagcggcttacgttgcgggctggatgtactttatcaactgggcgatgaccgggatcgtcgatatcaccgccgtcgcgctgtatatgcactactggggcgcgtttggcgacgttccgcagtgggtcttcgctctcggcgcgctggcgattgtcggcaccatgaacatgatcggcgtgaaatggttcgccgagatggagttctggttcgcgctggtgaaagttctggctatcgtcgcgtttctggtggtcgggactatttttcttggcagcggaaagccgctggatggcaatgctaccggtttccacctgattaccgataacggcggcctgttcccgcacggcctgctaccggcgctggtgctggtacagggggtggtgttcgccttcgcctctatcgaactggtgggtaccgccgctggcgagtgtaaagacccgcagaccatggtgccgcgcgccattaacagcgttatctggcgtattggtctgttctacgttggctcagtgctgctgctggtgctgctgctgccgtggaatgcctatcaggccgggcagagcccgttcgtcaccttcttctcgaagctgggcgtgccgtatatcggcagcgtgatgaatatcgtggtgttaaccgccgcgctctccagcctcaactccggcctctactgcaccgggcgtattctgcgctccatgtcgatgggcggttcggcgccgaagtttatgtcgaaaatgagccgccaccacgtgccctacgccgggattctggcgacgctggcggtgtatgtcgttggggtattcctcaactacctggtgccttcgcaggtatttgaaattgtccttaacgtcgcgtcgctggggattatcgcttcatggggctttattgtggtgtgccagatgcgcctgcgtaaggcgatcaaggaaggcaaagcggcggacgttagcttcaagatgccgggggcgccttttacctcctggctgaccctgctgttcctgcttagcgtgctggtattaatggctttcgattatccgaatgggacttataccatcggttcgcttccgctgattgccgttttgctggtcgccggctggtttggcgtgcgcaagcgcgtgcatgacattcatagcaccgcgccgaatattgaaaaacagcaataa

SEQ ID NO: 188961 - DNA, 540 bp, Klebsiella oxytoca
atgaaaatcaacgtagtagggaccagcggcgtcggcaaatccaccctcgcgcgtcggctggctcaggaactgtcactgccttatattgaaatggatgtgctctactggctgcccgagtggcaagggacgccggacgatgagttctacgccaaactcaccgccgcgctcgccgcgcccggctgggtgctggacggcaactataaccgcagccgcccggtaaaatggcgcgatgtggatctggtggtatgggtggactacagcttctggcgcacgatccgccaggcggtccgtcgcgcggcttcacgcgcaagccgacgacaggagctgtggcccggcacaggcaattgcgaaaccttccgccgctctttctttagccgggactctattattctctggacgctgaaaacctggcgcaacaatcgccggcgttacctggcggatatgcaggacccgcagtatcaacacattcgctttgttcgtttacgcgaccagcagcagaccgaggcgctggtgcgcgagcttcggcagaatagccgataa

SEQ ID NO: 188962 - DNA, 162 bp, Klebsiella oxytoca
atgcgtaagatccgatctactgaacaccaaatcatctctgttctgaattccatcaaagtcggacataccatcaagcaaatctgtcgtgaactcgccatatctgaatccaatcattacgaccggaaggcgaaatatggtagggtggaaaccgctgatatttaa

SEQ ID NO: 188963 - DNA, 849 bp, Klebsiella oxytoca
gtgagttatctatctaagattagtttcttggggatcaccctgcttcctttcagtgaacgtcaattatataaatttatcacctcgtggtttaagacaaaaaatgagtctcttggtgaacaagttatcgaaagtataaaagggaaagaaattgctgatatagttaaaacacctttgcttgcaacattattatgtgaccttgcagagaaggggattgatatacctagaagcgagaatgaaattttcacaaagaggctagagttattctgtggtgtatatgacacatataaggatatacgtagaatcaacctctcacaaagtattttgcaaaaagcagcaataaaaatagcatatgcattacattctaggaatcttcgttctgcttccaaaaaggatattgttaaatttattacgaatgataccagttttaattatgatgagggaacctgcataactgcagtggaggaactaattgatccttgtaatatactcatatttgatgcgatttcggaaacttactcatttggtcacttgcgatatcaagagcatttgacatctctggagcttttacagaatagatctatagagatagttcactatttgaagaatgattggtggagaggaactctgtgtctttatgcgcaaaattgtgagttttattcgcttattgatgagtttacattgaaatatcataacattcagccagcattaatcactttgagagcaatggctagttatagacccaaaaaagaacagtctaatctactgtttttaattgaaaaatatgaaagaagtgatgatagctattacattgatagtgacatgggaaatgatgattggagagggttttaa

SEQ ID NO: 188964 - DNA, 660 bp, Klebsiella oxytoca
atgatagctcaaagtagaagtaacatactctttcctttaatcgtagagtgtcatcggttgctgaaaaatttggtttctacttcgttttgcgaaaaagaacaaaagaaaattgaacaattcatatccaaagaaggcattgttaaaatcgccgatctacacaagcagagtatatttccagattttctcaacgctaagaatataactgaaagaattatttcgcaaaaatgtgaacttgctactcttaaagcggaatacttagaagaaccacaaatagaaatcacctttcagcatcaaaaaatagataggtggatagagagtaagtgtaaggcgtataaacaaagcgtgtttgatattaataaaaataaagaatgtgttgacatggctttatttttaaatgatacacaaagaattttgaatgtgttggatatactattaaataaagttgaagataataagaggtatatttcaataaaaaataggccacaaaaatatagtgatggattatctatttcaccatttgagctgtttgatagtagatacgatatcgcggtttttggtggggctggtgcaggaaaaaccacaacattgcaaatgtatgttaaaaggttattgaaagatcggagctgtaaagtaaattccattaaatcgttatataaataa

SEQ ID NO: 188965 - DNA, 1317 bp, Klebsiella oxytoca
atgactgacagacctttcccggacgaaccggaaaaaaccaccgcagagcgggaagcggaagcccgtgaacgcgcccgttcggcaatggcgacgcagacgccggagcaaaaaacaccgcccggccagccggaagtgacccgtttccgtaaggcgtccggtcaccgcacgctgatcgtcagcctgctgagtctggcgctggtgatcgccctcgcatccggcggcgatcgtcttctcagcgccctgaaaaggggcgatgagaaggaagccgacaccgcaccgccgccctccaccggggcgacgcagcatgagcgtaaaaatctgggcatggacagtaacccgtttggcctgttcggacagcgcaaacagcaaggcacagacccggccagtcagaccgtcaccagcgcacccgccctgccagcagagccgcccgccctgaacaaagcggcagcactggcagacgggctgaacagcggcagtacaacggctggcggcaatgcccgcgcgtcccgtagcgaaccgcgcaaccgcgcgggaatgtcggagagcccgccagtctccacggcgtacacgtcctgtcggtcggtactggtcagaggggcggatggccgcctgcgctgcccggatcccgccgcaccggaaaccgcgcaggatacggttgacagcgacaatccgggcgtcgcccgtgtcaccggcgtcagacggctgggcctcgatcctgatctctatatcccggtggatcgttatattccctgttcgatgatgcggcgctttgtgtccgatgtcggcggccatatctcctgcctgattggggaggatgtctggagcgccagcaaccatgtgaagctgatcccggcgggaacggtcgcccgtggcgtctaccgcaccggggcactgcaacacgggcgcagccggatgtttgtgctgtggacggagctgcgcacgccggagcccggcagcctgcaaattccgctcaccgatacgcaggccaccggcccgctcggcgaggcggggattgcgggctggatcgacagccatttctgggagcgtttcggcaacgccctgatgctgagtaccgtgcaggacgtggcggcagcggcgtcagaggccgcaccggggaaagaccgcaataccgactacaccgaaaacacccgcgccgccacggcggaaatggcgaaaacgacgctggaaaacagcatcagtatcccgcccacgatgtacctgaaccagggtgatgtgatcggcatcatgaccggcacggatattgatttttcctctgtttatcaactgcgactgaaaaagaaatggtatgaacactga

SEQ ID NO: 188966 - DNA, 639 bp, Klebsiella oxytoca; identical to SEQ ID NO: 132169

SEQ ID NO: 188967 - DNA, 588 bp, Klebsiella oxytoca
atgattccattaattaattacaccatcttaactgatgcattgcacgctctgaaagaaggcaatattcgtcactgtgaatccctcggatttactttcgacgaaatgaatgctcttaatcagttatcactcgatgagctgtttacggtcagccgggcggcagctccctttgtttcggtcagtgtccgccatgatgttctgcatcatttactggcgcaggcccgccaggaataccaccatcaacaggagattaaccgtgctatccgcctgggtggctctatctcgttgctcaaccactattttggcctgacatcaaatgaagtctgccttcgccgacggttgctgggtgtaagcgtgccgtatggccgaacgcctgaaccggatgaagagacggatgcggctatctggctgcaatggcagaagtgccgggtggaaaaccttgaatcccccaacgcgctgatagccatgatgctggtaactgaagtcctactaccaagattccaggggctgtcactcaccatggtatggaggcgtatcacgctttgtcaaaagggagttgccgctgacaggaggacgtcacatgccggatga

SEQ ID NO: 188968 - DNA, 807 bp, Klebsiella oxytoca; identical to SEQ ID NO: 132171

SEQ ID NO: 188969 - DNA, 1974 bp, Klebsiella oxytoca
atggcttctccttcactactgaatgatgcgaacgctctgctctattccgcgaagagttttgccgcagcgatgctcgcatactacattgcactgtcaattggcctggagcggccttcctgggcaattatcaccgtgtatattgtttcccaaacctccgtcggagcgtcgctgagcagaagtctgtatcgtctggtgggaacggtagtcggagcgggcataacggtattaattgtacctgcttttgtgaatatgcctttatttttcagtgtgatactgacggggtggatcaccttctgcctctatttatccttgctggaacgcacgccccgcgcctatggttttgtcctagctggttacactgcgagtctgattggcttccctgcggtatccgatcctggtgcgatttttaacatcgctattgttcgggtacaggaaatcatgatcggtatcttctgcgcggcacttattcatcgctatgtattgcccgcgcgcataacgggccagttcaacagtaaattgtcgcagacgctgctctcggcgcgacagcgtgtcgcagatactttagcaggcaaacccgacgctgtttccgggccgctgcatatggcactggcattacagttcctgcagggtatcagccatcatatcccttatgattttgcgtactctgtaccggtccggcaagcgagaaaaaggcttcatgatcggcttgcgcgattagtcattgttaactgtgagttacgcgaccgtttagctctgatagcgacgatacctgtagatgtgcaaattctgctgggtgatgttgaggtctggctggcctgcaaagatgaaggaaaattcaaaagcgagggtgaagcgctcaaaaaaaggagtgaaaaattactacagcgctattcagtgtatgagctgacgtttgaagaagcgctgcgtgtaagttttatgcgctacctgttagaggccattgtccttgtgcagcagtgctatcgtctttcggatgccattcatcacgcgaaacagacgcctgcgcactcggaaaagaataccgtgaaaggatatgtattccaccgcgatcctcttactgctgcccgcaccgcactgggcgctttcgccatcattatgagcggctgtctggtgtggattttctcggcatggcctgatggtggtacggcggtttctatccttggcgtttgttgcacattgtttggcagcttcgatacgcctgccccgcatattgttaagtacattatcggctccttctggggcgttgtgataagcctgatctacagcttcgttctactaccacaagtcagtgattttatcgtgctggtaacggttttagctccggtatatctgctggccggatcgctccaggccagaccgcctaccacgtttatggctatggggatcacactgacgctgcctattttgtgcgagctgggtgcccactacagcggggattttgccgtggcggtgaatacctctatcgcactattttctgctactggttttgcagtgctcggcatgagcctactgcaaactgtgcaggctgattcggcgataaaacggctgcttcaattatgccagcgagatattaaccgcagcgtggaaggtaagctgaatacagacgaaaccctctggaccaaccttatgatcgatcgggcagcgttgatactgccgcgattgcagcgcagtggacagtcaccggaacgggcacatcatttgttgtacgccatgcgtatagggctgtgtgttatgcgattacgccgatgtgatgcgcatgcgaacaaagaaataaaagaagtgctcactcttcttacacactcgacagatattgacaccttacttcaacggatcgccagtctgactgagcgcagcttgagcgtaacagatgaactatcgcggcattatgttgatcaactggttgatctttactgcgcattaagcgttcagaaaatggagcctgctaatgatcaatga

SEQ ID NO: 188970 - DNA, 216 bp, Klebsiella oxytoca
atgatcaatgatttcaatattgagggcgtttttgtacccggtctgctggtaattgccctcgttgcactgacctgtacactatttctcgtacatcttttctctttcagcaagggttaccgccgcttgccctttagaccgatgatcgatttttccgtcttcattattactttttacctgctgttgcaggggctgaccgaactgggattttttaaatga

SEQ ID NO: 188971 - DNA, 864 bp, Klebsiella oxytoca
atgaaatcgttactttctctactgggccgctacgtgctgacgttcagcgctgtggcggtggctacgcttttggcttttattctctggaaacattatgcgcaaaccccctggacccgcgatggtcgggttcgtgcggatgtggtacagattgcgccgaatgtctccggaccgttgctgaatgtgtccgtccgcgataatcagtgggttaatcggggcgatgtgctctattccatcgacccgcactggttgaggttggcagtggacagcgcacaggcagatgttgaggcgaaacgtcatgaaatgctgatgcgccaggatgcggcgaggcgacgctctcagattaaaggggtgatttccagcgaggatttacaacaaacagccagcgcagccagcgtcgctgcggctaattaccacggtgcactggctgcgctggaccttgcagagcttaacttatcgcatgctattgttcggtctccggttacgggctatgtcacacatttgcggcttcgccctggtgactatgccacagcgggagaaactaaagtttccatcattgatgccaatagtttttgggtggttggctattttgaagagactaagttgcaacatatccgcacgggaaatactgcacacattacgctgatgggatttaagccagtgatcacgggtcatgttgagagtatcggacgcggaatagatgataacaatgacgagaccggggggcttggcctgcctaatgtcgagccaacctttagctgggtgcggctcgcgcagcgtatcccggttcggattcatattgacagattgccggagggagttgaattggtggctggattgtctgcgagtatatccatcacaccataa

SEQ ID NO: 188972 - DNA, 726 bp, Klebsiella oxytoca; identical to SEQ ID NO: 132175

SEQ ID NO: 188973 - DNA, 807 bp, Klebsiella oxytoca
atggatttaaaactgactggaaaagtggctctggtaaccggagcccgaaccggaattggtttcagcatttgtgaagaactggccatgaatggtgtgcatttagtcatggtggccagacgagaacctgagctgattctggctgcgaaaaaaatttcagagaaatacggtgtttcggtgctgcctgttgccggggatgtgactgatcccaaactaccttctttagtggttgaacaagcggaaaaggtttttcagcgtattgatttactggttaacaatgccggaagagcccatgcgggcacactgttaaccacttcggaagaagactggcagataatgactgagaccaaattatccgccatgcgacgtttttgtaaggtaatcatccccgggatgcagagacgaaactgggggcgtattgtcaatatctcatccattggcggtatctaccctaatccgcaacttaccgtctcacacgcactgagcgccgctatcaacaacctgacccgtagtttagcacttagcgtggctccggatggcattctggtcaatgcgatcggagtgggtgctgtcgcgacggataactgggcgcagaacatgctaccgaatgttcgcaatcgtcgtcctgaactggttgacagaacagacgaagaggtaatggcattactgggtaaagagaaaacgcctgtgggccgctttggacttcctgaagatattgctgcaattgctgcgttcctactttctgggaggaatcagtttgttactggacagacaattgaagcatcaggcggagcagacagatttatgtaa

SEQ ID NO: 188974 - DNA, 1188 bp, Klebsiella oxytoca
atgcgaacggacaatcatgagctttcttctgccaggattcttatgctggcgattatttgctgtattgttgtagctaatatttattttaatcaatctgtcctgaatttaattgccggatcctttcccaatgaatggggggctgtttctttgatccccatgggcacccagttaggttatgcggtgggcttattctttctgatcccactgggcgattatattgaacgtcagcggcttatcctgcgtcaagcgcaggtgcttttcctggcactgatcggcatgatgttatcgccaacggcgacagtgttggtgttcttctccttccttaccgggatggctgcaacagtagcccaacagatagtgccgcttgccgcctcgctctccagaacttctgcacgaggtaaaaccgtgggtacggtgatgagcggtgtcctggcaggtatccttgctggccgggctatcggaggccttattggtcagtatttcggctggcgcggtgtctttttgtccggcgcgatcatgacattgctggctatatttttcatcttgcgcattttgcctgctcagtcgttgccaacgccaaagtttaactatctggcggtattacgttcattaggacagctgtggaaaagcgagccgcaggtgcgtggtgcaactcttacacaagcaatgctgtttgcctccttcagcgtgctgtggaccgtgctccctttctggttagctcatagctacgattacggtgcagggataaccggcaccctggctgctttggggttaatcggtattctgtgtgcgcctctggcgggaagtttcagcgatcgtcagggaccattccgaatggttgtttttggtgtgatactcatgctgctagcctggactgttttttggagatggaacagtattgtgggtatggtggtgggcattctactactggatgcgggtgagcaatgtgtactgatagctaatcagcacacgatttattctttgcgtccggatgccagaaaccgtcttaatacattatttatgtgcgttatgtttattggcggagcatgtggctcactgactgccacctggttatgggagacaactcatagctgggcgctgatttcttcagcagggggcggactcgtgatcatggggatgttgatagccgtaagacgtaaatattcaggcccctattcgggcacataa

SEQ ID NO: 188975 - DNA, 2775 bp, Klebsiella oxytoca
atgctcaaaacagaagatctcaacactatgatatcaattgatgagattcactttgctgactggcaaatctggccacagctaaggattctgttacatcggggtaagccagtaagaatttctgccagagcttttgatgttctggttgttctggtgagtgccagaggtaaagcggtaaataaagaatctttacttacgcaagtgtggggaaatgaaatcgtcgaagaaaataatcttcaggcacaaatttcagctatacgccgcatactgggacatgaccgccatctactggttactgaatttggttgtggttatcgctttaatatcaacaattcgccaactgaaccgctctctaaatcaaaaatacctgagcccgctattaccccttttctagcgtcgattctggggcgtgataaagctgtgcaggaattatgcgccttattggatcaataccgtctggtgacgattacaggctcagggggcgtgggtaagactcgtctggcatgggaagtcgtcagtcttacacacacgcattttcctgatggaatatgtgtggctgaactggctcatatcaccgaagcatccagcttgctatccgttatttcacaagcgctccatcttccattagctgccattcataatgatgccgatttacggcaacagcttgcacggcgtcgatgtttactgctgattgataactgtgaacatgtaattaatgaacttgaaccagtgattacgttgctcctgcacctggctccccatatcaaactgttgttgaccagccaggtagcgttgcaggttgccggcgagcaacaatatctactaccaccattacaagttcctgagagcgaagaggctgatacccacgagttactaactttttccagtgtccgcctctttatcgaacgcgggcaggccaatcgacataattaccatccatcagccagcgaactgtctttgattggcgagttatgccgtcatcttgacggtctgccgctggcgattgaacttgcggcctcccgtctgccagtcatgagtgtcaaagagatctatagccgactggaagaccgtttccagctattgagcaatacgcacagatctctggagcccagacatcagaaaatactgaccgcgctggagtggacttatcagttgctcaacacacgtgaacaacgattattttgctctctggggatctataccgatatgttcagtgtgaaatcagtaagcgaccttctgctgattaaagacaagcatcgctggcaggttgttgacgatctgcaaagattgctgtctttatccctgattcaggtcagtactcaggtaccagagacccgtttccgcctgctggaaaccatgcgccagttcgcatgcgataaactcaggcaacagggtgaatatactgttcttgaggcccgttttgccgactattataaagttctggtaaaagaggcacaagatgattggtttatgctgccaacaggacaatggcgtgaacgttatagccatatacttaatgatttgcggagtgtattacagcaaacgttgattgagggagctgatccctctaaagggcttgagatcttacaagctatgacccctttttggattgaatattcactatacgatgaatgtcagcgccatatatatcctctgctttatgaaaatacttcgcaggtagtattaacgctacgccagagaatgaatctcagcgctgtagcaggtaaggcgtcaacctgggcaaaaggccctacgcctgaaacacattcagcctggaaaaccgcgctgacaattgcagaaaagctcgacgacaaagaaatacgtttacaggcacattacggattatggttgtattatctgcgtactggcgagttggataaagcgcttgagcatgcgcaatctatgtgcgagctagcacggtccattaccgacgaggaggcgatggcaaccgggctgcgtattctcggtgtatccctgcattttttgggccgtcatgatgtcgggcgtgattatctccaacaatctcttgattggtatgaacatggtgaattaagccactctttccgttttggtcttgatcaagagagcgccggtcaggcctttctgtctcgtttactctggttacagggtgagtataaggccgcgaaacagatggcatggcgcggtgttaaaaaagccgctcgtttgcagcatgtctgttctctttgctgtgcactggctgaaggcgcttgtatgacagcagcactggatcgtaatccgcgttgggttataaaggccgcaaactggcttattcatctggcaaaaaggcatgatttatatttctggaagacatacggcgagctgtttcttgtttgggctaaacagttcagtcataccgatgttagtcaaaccacactatttagctcgttgcgggcgatgggattagactggcaatattcccccttgttgtcagaaattgataccggggtatcactgagagccacccgccaggatcatgaaaactggtgcacgcctgagctgatgcgtctttctgccactcaattacctcctcagaagcaacgcctgctgttggagcaggccctggacaaagcgcgccagcaacaggcttatggctgggccctccgtattgcttattcattggcgacattgcaggctgaagccggggaaaaatgggctgctaaacaattgatacaggacgctttaaatgatgttgatgactcagacaatgcgacggatgtaagaagtgctattgcgttatgtgcccgaataggggcctga

SEQ ID NO: 188976 - DNA, 858 bp, Klebsiella oxytoca
atgcagttcagcacggtagcaatgattcttactgctgcgatagcccatgcagtatggaatatagcctcaaaatacaagagggaagacactcttgtgttcgtctgggcgtacagctgtgcctcagcattgctgtgggtcccgttcagcctcattctgatagttgagggacaacaggagctcgactggagactcgctgtcggcgcagttatctcgtctgcacttcatatcgcttattctctaatcttgcaggctggctacgagcgcgccgaactgggtgttgtttatccgattgcccgaggaagtggaccagttctgacgatactgtttgcaacccttctcatgggagaacggctttcaccaggcgctttactcggcgcctttatcgttatcgctggtattttcgttgtcaccggcaatccgttcaggagcggaagccggccgctacagggaatgctttggggggcagcgacaggcaccgccatcgctggctatacactctgggacggttattcggtaatctctctgcacctggatccagtgagctactacgccagcacactcctgctacagagtctgattcttacccctggtgcgatgcggcgacgaaatcgcattccaactgctgtacgtgtggatatcatcccaatccttatcattgctgtatgctctccccttgcctacatccttgtactgacagccatgcagagcatgccactggcactcgtcgctcctctcagggaaacatccattattgtcggctctcttctttcgtactggctgtttcgtgaaaatcatctggcacgccggattgctggtgcagtggtggtggtgaccggcatcgcaataattagcctttga

SEQ ID NO: 188977 - DNA, 948 bp, Klebsiella oxytoca
ttgcaacagaatctaattacgtggtggttgtgcccttcccaaaggacatgtaatatattacatatgaataaagaaattggtaatagaatttcagaaggtgagcagcggttacagcaatggcttggcagcattcacgcccgaagcggcgacctcgctgcaagtgaggctaaagttgtcgacctcctgcttgtcgatcctttatttgtcggtacaagcacggcagcacaggttgccacccgtgctggtgtatcaccgccgacagtaatacgcgctgcacgagcgatcgggttcaccgggttcactgaacttaagatagagattgcccgggctcgtggcactgcccaattctttgccccgcctgaagttcttacagcggatgcgacgctggcatcagtgctggaaacatcaattcgtgctggtgtagacgcactgactgcgctcagcggtgctatcgaaatctccgcccttgatgaggcggtcgatttaatccagagcgcacgccaggtatttgcatttggtgctggtccctctgcgacggttgccgctgatgcggtctttcgtttgcggacggcgggtgtgataaccgtcagtatccaggattatttatcagcgatgattgctgctcgtctactcggtccaggcgacgtcatcatcgtcgtcagttcaacagggcgcacatcatccacactctccatcgctgatgcagcatcctcggcaggagcatcgcttattgcaataactaaccagtacgataccccactggcgacactcgccaacgtttcgctcgttgttggcggaatgccactcccggcacagatggccgctgccgggagtcgactggcccagctcgtcgttattgatacgctggtcgctgctctcactctgcgggataaagaacaaagtcgccgggctgaacgggcgggtattgatttgcccgatatgtcctga

SEQ ID NO: 188978 - DNA, 897 bp, Klebsiella oxytoca
atgaacactgaaatcaatacagttgttgctgttttaggtccaggtgccatcggcacaacagtcgcggcggcgttacacgaagtcgaccgcacaccattgctgtgtggacgtactccccgcgatcacctgaccttgcaagatggcgaccgctttatcaccgtacccggtccggtacagacgaatccggcacaaatcactcgcacggttgatcttatctttctggcagtcaagtccacacaaatcgacgcggcagcagaatggctcagggcgttgactggcccggagacggttgtatgcgtgctccagaacggggtcgaacagttggacaggctcgctacgtactctctgcccggacagagcgttcccgctgtcgtgtggttccctgcgcaagcgcagtccgatggctcggtacgcttgcgtggtgaggcgcgcctcagcgtgccagacgcaccagcttcccgtgtagtggccgcagcgctgcaaggcacgtggtgctccgtagatctggccgcgaatttcagctccctggcctggcgcaagctgatgcagaatgcggtggctggactcatggcactcacgcaccgccgctcaggcatgtttggccgtgctgatatcgccaggcttacgctggcttatctgcaggaatgcctggccgtggcacgtgcagagggcgctgaactcggagacgaagtgccgcaggagatcctcgataagttccgggcggctcctgcagacatgagcacctccatcctcacggatcgagaagctggccgaccgcttgaatgggatatccgcaacggcgtcattgcgcgtcgcggccgggttcacagcattccaacgccgatcagcgacatcctggtgccgcttcttgcggctgcgagcgatggccctggttga

SEQ ID NO: 188979 - DNA, 348 bp, Klebsiella oxytoca; identical to SEQ ID NO: 132182

SEQ ID NO: 188980 - DNA, 1269 bp, Klebsiella oxytoca
atgtctcttaacgactcaaaaatccgcaacttaaaaccatccgcaaaacccttcaaagtttccgattctcacggtctgtaccttttagttaatccaggcggttcacgtctctggtatctaaaatatcgtataaacggcaaagaatcccgcattgcactgggtgcctatcctgccgtctccctgtctgatgcccgccagcagcgcgaaggtatccgtaagatgctggcgctgaacatcaacccggcacagcagagggctgctgaacgcagagcctgcacaccagagaaggtgtttaaaacagtggcgctggcatggcataaaaacaataaaaagtggtcgcagaacaccgctggccgtctacttgccagcatgaacaaccatatctttcctgtaattggtcatctgtccgtcacggagcttaaaccccatcatttcattgacctgctgaaaggcattgaggaaaagggcctgctggaagtcgcgtcccgcacgcggcagcacctcagtaacatcatgcgccatgcggtccatcagggatttatcgacaccaacccggcagcaaatcttgatggcgtgacggctccccccatgagacaccactatcccgccctgccgctggagcggctgcctgaactgattgaacacattgaagcatatcatcagggccgtgaactgacccggcttgctgtcctgctgacgctgcatctgttcattcgctccagtgagctgcgctttgcacgctggtcagaaattgatttcataaacagaatttggacgatacccgccacacgcgaagccattgtgggtgtgcgttattcagggcgcggtgccaaaatgcgcactgctcatatcgtgcccctctcacagcaggctatagctattctgaaacggattaaggaaatatccggggcttacgaactggtcttccccggcgaccataacccgtacaggccgatgtgcgaaaacgcggttaataaagcactgcgccttatgggattcgacacgaaacaggacatctgcggacatggctttcgggcaatggcatgcagtgccctgatggagtctggcttatggtcgcaggatgcagtggaacgccagatgagtcaccaggagcgcaacaccgtgcgtctggcttacattcataaggctgagcatctggaagcccgcaaggcgatgatgcagtggtggtcagattatatcgatacatgccgggtcgcatacgtaccaccttttaacacagggcggaataaaaacaacgaagctgcatga

SEQ ID NO: 188981 - DNA, 1458 bp, Klebsiella oxytoca
atgaacactgaggacgaacggatgacgtcttactctaaaaaaattattgcaatgttttacctcgcggcaattttcttagtttatagcccaacgattatatttagttacgcattttcagatgactggtcgacactttccgatgttttttcagggaaaggctctccgtttcaatgggatatgcaatccggcagacccttgtatgccgttgccagacgacttgcctttacgctagttcacaatatcgatgaccttgcctatcttagattttttaccgtaatatcggtatttatgctttgctttttccttttttcatttatagaaaaaagaaacatattcgagcgtaaaataacaacgatcgtattccctttattaatatgcctgacgcccgcagtacaggtttataattcctgggcgacatgtttcccttttgtactctccatactccttgccggaataagttatgcgacattaaaaccgatcaataagaaaacgacaattataagatttgcagcatccgtcattattttatggtttgcatttgccatatatcaaccaacggcgatggcatttttatttttcgtcatgcttgataactgtctgaaaaaagacaaacccttttccatcaacattgttttaatcagtggcgcagctttatttatcggcatgcttggcagcctgctattttcaaaatttatacctgtatggttatatggcagttcaattgcacgtgccgagttaactaataatccacttgagaaattacgatggtttataaaagaaccgttgattaacgctatcaacaactttaatataactccaggcacctttttcacaacgctctcattaataatttgcgcaataggtttactttcaataataaaaggcaaatcaggcccgattaaggttctcatgtttattatcatggggattggtgcctactctccaaacttattagtcaaggaaaactgggctgcatatagatcactgatagcactggaattcttcacatgcgctcttattattattgggttagatgccttgacaagcaaactcaacatagcaaaaaaagcgctacccatattgacggtattcgcgatgatcgctgcatcatacaatatctttaatggtttcattatcccacaaaaatcggagttaaacgcattagccagcgcgctttcctacaaggtggggaaaacatttacaggggatgttctttttgacatccaagatcctgcctataacgcctttactaaaacacaacgttatgacgagtttggcaatatttcccttgcggctccctgggctatcaaggggatggcggagcaaatcttaattagcaagtcaatgcatttcaggcttcccgataatgttattctgacggcaaaggagcaatgcgccactgattgcatcattataaaaacgggcgatgcgatgaggagttcaacctccaactattga

SEQ ID NO: 188982 - DNA, 1461 bp, Klebsiella oxytoca
atgaaaatgacactcaatcagtcgattataatcaataagttatctatcgacgtcaaaccaggtctcgatcaagatgggcgagtagtgtacttacccaacatagatagaaaaccttatcttatcactgacagccatcgtgattcaccagtcggtttcggtgtcaaaatcagtgcaacgaaaaagacctatatcgttcagcgacgagtgtcttctcctggcaatcgccctaagacaggggggaaatctccatcggaggttatcaggtctacaattggcaatgtctctgatttcgctaacatcgatcaagcccgcgaggttgctcgcaatttagttcaaaccatgaagttgaccaaaaggaaccctaacaagataaaacgggagtccgatgcttctgagctcactatcagtgaagtgtttgctcaatatcgtcaacaccttcttggcaggtctaaaccagctaaacccaacacacttaatgtcctgaacaaagcagaaaacaggctttctgaatggtcagggcttcgagtgaaggatttaaccggtaatgaaattcttcgtaagtttgatgaaatcgcaagtagagcaagaaccgctgctgaacaaaccttccgttgggccaatgttgctgtcagacatgcaatcgaaattgaagccagcaatgcccagacacaacaacgacaaccttcattgtcatataaccctttttccattttaaaagtgcagaagaagttcaggactcgttctgaactggaagatagctatcgtgcgaaaggtgtaagaaacccactttctccaaaagacaccttaggtaggtttttgactgcattgcataacaagagaagcttcaaccgccttgggtgcgattatctgctactcaccgttctcttaggtgctcgtaaggaagaaacagcatctttatgttggagggaagctctcaccaatgaagaagcaaaaacgacaagctatgttgacctgagtaacagaactatccgtttttacgacactaagaatcgaaacgatcacgagcttccgatttgtgatgccgtcaaaagaattttggaagatagaagagacatagtaaacgatacggtaacccggaaggacaaacagaagtgggttttcccggcccgttcttctcgaagtaaagttggtcactattccgatagcaaaagtctaagggaatatatctgccaagaggcgggaatcctgaagcttggtatgcacgatctacgaaggacatttggtagggttgctgaagaacttgtttcatatgccgtcgttaagagactgctcaatcacagaaatacaacagatccaacagaaaggtatgcagaacctgatcaagaacggatttttgaagcattacaaaggattgagttgcatatgcttatgactgctcctaaattatacaatgtgttacttgcttcggctaagtatccccccttaaacgaaacttgttag

SEQ ID NO: 188983 - DNA, 1770 bp, Klebsiella oxytoca
atgtgggctgacgtagaatccaacattgattacttaaattttggcgaagtttcaagtctcgcagtagatatattgaagtctgaaaatatgttgccagtgtctattggaatatttggtaactggggggctggaaaatcatcattacttaaaattatagaaaaacagataaatcaagaagatggtaaagatatcttagttgtaaatttcgatgcttggctgtatcaaggctatgatgacgcaagggctgcattactggaagttattgcaacaaaacttaacgaagcagcccaaggaaatccaaaccttgtagagaagacattcagtttatttaaccgagtagataaagtgagggcattaggttacacccttgaaggaattgcattagctatggggattcctactgggggaatggtttctaagggggttggggcaattaaaaatatttttagtaacggtgttaatgaaaatacataccaagaagccattagtacaggtaaggaggttgcaaatagtgggttaattaaagataaagaagcattgaccccaccacagcaaataaatttatttagagatgaatatagtggtattttaaaagagttagggaagaatttaattgtttttatagataacctagatcgttgtttaccacaaaatgctatacaaacattagaagcaatacgattatttttattcctaccaaatacggcatttgtgattgctgctgatgaagacatgataagaacatccgtatcagagtatttcaaaggaacatcagcaagacatcatattgattatttggataaactaatacaagtccctatccgagtcccaagaacaggccttttagaaataagatcgtatcttttcatgcttcatgcagtaaatgcaggggtagatagtaatttggtagaaaagctaaggatagcattggaaaaatctttacaggaatcatggcataaagatcctatgaagaaagaagatgcaataaaaatattagaaggagagaataatttagaattagcaagggcatatgatcaagtagaccggttggcacctatatttgctacctcaccaataatacatggcaatccaagaatagttaagagattactaaatattgtaaaaatgagatcaaacattgctagaagaagaagtatttcattagatgagaatgtcattacgaagttagtaatctttgaaagatgtgcaggagagactgctgccaatgatttatattcaatgatagatactaataaaggctacaaggaattatttagtgaaatagaaagcacgaaaccaaagaatttgcctgattctgtaccagaatcttggacgaaagatgatgcaaccagtgattttattttaaagtggtttgatctcgaaccaaaactgagtgataaggatttacgagcgtcaatatatttatcacgcgaaacaatgccagcagcccattatgtaataggtttgtctccaaaagcaagagatgcgttaagtgtattgattactacgacaaggaaaagttctcaagctgctgtaactgcattacgggatatatctcaagatgaatttgttccagttatggaaagtttgattgaacaccttcgaactataactgaatggagcaaacaacctgctggttttgctggggctgtattagttgcagataagcatatcgaagcagggaaagtctttaaaagatttataagtggtataaacgataatccgcattggatgaatgctcttataaaagaaaaaaaatggtttaaataa

SEQ ID NO: 188984 - DNA, 747 bp, Klebsiella oxytoca
atgggaacgtcacagtcaagtaaaggacctaaaaatgggaatccacttgttccaccttgggcagatcaagcaaaaaatggaggaaataaaaatctaagcggttttagaactctttttggtagatttgctcgaagccgagatatctcttcactaaaaggtgctcttggacgctattctcgacaagtaacaggtggaggagattcagctaacgaacgacttggtaatattgttagtgctggtggtggcttatttgaattactgaatgatggggttgtaaacgatcagaacagtaatcctattattgacctaagtagccttaatgggctctcatgtgaagacgcaattgcaagaatatcccaagccctttctgatggcagtgaggatgctgataaaattcaaactgcaatgaatgatgctttagttgaagctttagatggaaagaccacgtttaacccacaagatattacagacgatgttcttattgaaacgatgatttgctatttaactgatagtatttttattcaagttacaatggacgcaggaaaatcttggaataatgcacagtcagcgaaagaattgcagagagcagaaaatgaattgcatgagtatattagtgcaatagttgataaccatatggaacccaaaataagtaaaaacattagatcgttttcaaaatcagatataattaaaattcaaaaagatgttattactgaagtttgggatgaatggaaggggtatagcgaatga

SEQ ID NO: 188985 - DNA, 303 bp, Klebsiella oxytoca
atgaaacttctaaatacatacgaagataaagatgaagccgaggaggccttgactaaaatatctggagagaaaagattagcgagcgagcgcgatagtactgtcgttatttacaatctctttggtactccatcatgggggaatttttataaactaggtatgtttaatcttcctgagttgcagaaaatactggagttgcgcaggacgggacaatctattgatttggagaagtataatgaatacatcagaacgcttagctatgctgctcgtttatttgatttagccattccaaagcattggttgtaa

SEQ ID NO: 188986 - DNA, 708 bp, Klebsiella oxytoca
atgaaacccattattggattcaatcggcatttagagatggattggcttgttcaaaccgcatcctggtcagcgaatgggattcacgggctggcattaaaaaataaaattgatagtttacttgcccctagttttgacagcaaagtagcacaagataaaactagaaatcttctttttggcatttgggattcagaatcgaaatcggtacccaaagcatttcattcagacgcctgtaaattgctcattgaacacagcgaaataaatatagctattcattggggaatgatgcttgttaaataccccttcttttataatatcgtagtacaaattggtagaatgaccaagcatgaaggtttgttcatttacaatcaattagaacaacgcattactgaaagctatggagatacttcaactatcaagcgttgtatgcaatttgttgttagaaccttaataaatttagagttattatccaaccctaaatcaggcacataccagttgcgaaaatcaattgagattaagcacgacaacgttatcgcctggctgactgaagtatcagtgagggctcaaggaaactcaagcaaaagcatgtctgctattattaatgatccagcttggttcccctttgatattaatttcaatgaaaacagattatcttccaatatacggctagatgttcatcatcaagctaatgatgccatcattttcctatga

SEQ ID NO: 188987 - DNA, 717 bp, Klebsiella oxytoca
atggttaaaactccaggtttctgccgccatgtcgagaaagagtggcttgaacaaacgctccgctgggttgctagcgaaacagatagcgtgcaattaaataaaaacttggaattatttcttggtgcgtatatagcaactaaagaaaatcgacgtaaagctcgaaatctcctaacctcaatttggatgcgcccaaaaaataaagatgttttttttgatacaagcattcaattacatcaagagattgatacattttcattacctattcattggggaatgttaatttcaaaaaaacctttctttgctgaagtcgctcgttttataggtcgacaagccaggctaaatgacacatttacattttctcaagtatttcgccgaatgagtatgctatatggcgagacacaagcaaccagtagagcgctaagtgctgttttaaggactatgatcgagttaggggtgatagatagaagtaataaactaacatcatattcgatcgttcctattcaagaaaaagttagcacccatatcgcaaattggttaactacagctgctatgatttcattaaataaagtcagcattagtcttgatgaagtattagctgatcaagtattcttcccatttcaaattgatatcaacttgaatacacttgatgtatcaacatttgaatacttgcagcaaggaaactcaatagtcgttttcaaaaggaatctttactcatga

SEQ ID NO: 188988 - DNA, 1965 bp, Klebsiella oxytoca
atgacctggcaggatgacgttattcataaaataaatttggatggagcttttgtttacatcataaacgatcctgatggactactatacgagcctgtaatagcaacctcacttcaagaaaaaaatgcgttcatttttgatgatgatgacccattagcattacgtttggcctatgaaacatggcgtagtggtgagaataaaatatctttcctgatacggctgacggttgagcgtgatatttttatacctcatgatattcaacatgagtcaaaagagattgattatcatctatcagaatttttccaagatattgattcagacatactaagattactaccagccacgttatatcagtcagttatagatgcgctgaaattattttctccgggtagactcagccaacagtccagtctagatttcttattgcgccatatatatagaattgcacctgagataatccaatccagtgcagaccttgttaggctattgattagaaaacattatattggcattgaaatgccaatgccaattgaaacgagactaattcatctactgagtttagtgcctagttttggcttatggaatatcagtcgactgatttccaataaagcttatttttttgatttccttcaaaaacaatgggaaatatacttacaagatgaagaaaagagtcctatctactttgcatctcgaccaaacactcagctaattgttccttttgctgatggtgatgttcgcgtttttattgataatctgtttgctgaaggcattataaagccagtggcgataaaaaacctacctcctgaacactgggcatcatttgctgtactaaaagaaccaaaagtaacagaaaaagaacgaatactacacctacttaataatgcaaaaaaaacattcaaccaatactcagaagaaagtgcaaatgcagacttttggcttgagcagtcacgttctcttggtatcatgaacgcccttttttatcaaaataaaaatttacctgcagttgaagttttgtttgatgacattaaaaacattaatactgatgtagatgaattatttcaacattggttgcaaatcaactatataaaaatacaaaccataccaactgttcgttacccatctatgttgcataaagttcctgactggatatcacgcaggatagactctgggaataaagtttgtttactagttttggatggtatgggcgcccgccaatggccgttaatacgtaagcaattacaaatattcgaaaacatttcaatagaagagcattcttgttttgcttgggtgccgacgataacgtcaatttcacgacaagccttattttcaggaaaacgtccatttttctttagtgaatcgctactgactacaaataaagaagaacaactttggtttaactattggcttgataaaggcttaaacaaacgagaaattaagtatgcaaaaaaaattgagagctatccagtcgatgaatggcaatcactagttgggtcactaccagttaaaattgccggttttgtcataaactttatcgatgagcagatgcatggcatgaaaatgggaatggctggtttaaatgtagtagttgatagctggttgaccgaatggaaattcaaagagaaaatttcggacctacttgataatgggtttgaagttataattacttcggaccacggaaaccaagaggctatcggtatgggatatatcaatgaaggggtaaaagcggagactcggggggaacgagtacgaatttatcatgaccctagtttgcgagacagctctgctgcaaactatcaagattctgtgatagtatggcccggtccagagatggggctgccaaaagggacataccctttgctagccagctctgataaagcctttaaaagtaaaggtgatgtcgttgtggggcatggaggaatcagcctccatgaggcaatagtgcctttcattattgttaacaaaaagtag

SEQ ID NO: 188989 - DNA, 2799 bp, Klebsiella oxytoca
atgtggcaggtaggggactgggcctggagtcaggcccatcaacaatatgtcaaagtgattgaatctgctggcctctggggccagcagcattaccgtgtctggttacagcaacaagatgtagtactcaaggtattggacaccgatctctacaaccaaccggtacagacaatcgtgacggctgatacgttatgctacttggccactgcagccaaaattgccaacgtccagcaggaagatactttactggcaccaatagaatcgaatgtcattcctttaccgcaccagctgaaggcgctcaccaaggcaatgagccaaaaacaggtgcgctatctatttgctgatgaagtaggtctgggcaaaaccattgaggctgggttggtcatgcgtgaattgaagttgcgcggacttgcaaagcgaattctagtttgtgcacctaaagggttggttagccagtgggtaagtgaaatgcagacccactttaacgagtcattccaattgatgttacccggtgaacaaaaaccacagaatgaacatgacaatatctggtcacgttatgatcaggttgtctgccctgtcgacagtatcaagcccatcgaaaaccgcaaaggatggtcactcaagcaacttaatgagtacaacaaacttcgttttgatgacctgcttgctgcgagttgggaccttatcatcattgatgaagcccaccggctcggcggtagcaccgaccaggtcgcccgatacaagctgggccaaggtttggccgaagctgctccctatttattgttattatccgctacaccacatcaaggcaaaagtgatgctttccaccgtttgatggcactgctcgatgccgaagcctttccagatgtaagctcggtctcacaagaacgggtccagccatttgtggtgcgtactgaaaaacggatcgccatcgatggcgaaggtaagccacttttttgtcctcggcaaacagaaatggttgccgttgcctggcaagcccagcatgaattacagcgtcacctttatgaagaggtgactgagtacattaaagaaggctacaaccaggcgcaagccaagcaacaaaatgctattggctttttgatgatactaatgcagcgtttggtgagttctagtagtgcggccatcgcacgaaccctcgcccgtcggctaaaagtactagaaaataagcgggcagaagaagaactacctttggcgtttgccgatgagtgggcggatctggatggtcaaacccagctggacgaattattggctcagtgccaaacctcgttggagaatgaaaaaaacgaagtgcgccgtttgctagcgttagcggagcaatgtgtaagtgccgaaaatgatgccaaagccgaagccttgctcgattggctctaccgcctgcagcaagaagagagagacccatatctgaagatgctggtatttacagagtttgtgccgacccaagaaatgttggcgcagttctttgttgaacgaggcatcagtgtcgttagtctcaacggctcaatggatctgtcagagcgtaaaaaggtacaagctactttcgccagtgatactcgcattctgatttcaactgatgccggcggagaaggtctaaaccttcagttctgccatgtgattgttaattacgatatgccatggaatccgatgcgcatggaacagcgtattggtcgcgttgatcgtatcggccaacagcatatcgttcgcgcactgaactttgtgctcgaagataccgttgagcacagagttcgcgaagttcttgaagcgaagttacagattatcctcgaagagtttggcgttgataagaccagcgatgtattggattcctctgctgctaatcatctgtttgatgagttgtttatcacatctatcactgatcctgctttaatggatcaggagttagctaaagccttggccaccttaagagacggtgcagtggacaagcggcaacaggatgcactgtttggtggcggagatcccttatctgctgaggactatcgccaagccttgaaccacccattgccctattgggtacagagcatggtcgctagttacttgcgctggcaacgtagtatgcagcatgtagctgattttactgaagaaattgatgggagtcatactctaacttggccagatggtgcaacatggagtggaataacctttattgggaaaatcgctcagcaacagccaagtttcacgcatctaacgctcgaaaaccccaagataaaagggctgtgtagtcaattacctgtctggagtgaagcacaacccatccccagtgttgctgttaagtcattaccagccggagcaaatggttattgggcattatggagtatccgccttgtggctggccatgagcgacgctgccaatatatgcctgtctatatcaagcccaacggtcaatattacgcgacagcatcccaaaaagtctgggatgctgtctgtagtaaagaatttgatattttacctcaagacttagcagtcgattcttctttacatcagtcgatctatgctcttatgcataaggccgcacaagaggaaggaaaagctatcttcgaaagcatgttgacagccaaccagaccgatttagataaccagtttgaaaaaggtgaatactcatttaatgcaagaaaaaaagcaatagaacgagttggattaccagaggttcgccaatttcgcttgcgtcaattaagtagtgaatatgctctgtggctccaagatatagataaaaaacgcagggtgattcctgacatggttttacacaccattattgaaattaaaggatga

SEQ ID NO: 188990 - DNA, 2829 bp, Klebsiella oxytoca
atgcaacaagatagtctatttagcagtgacagctcacaacaaatgcaggcagcaggtccagtgatctgtctgggaaaaaccttcgctaacgatctggcgcgccgtgaatattttttatcgctgttggctgaaaaacttaaagacccagaattccgtaaaatcgaaggttttcccatcggtagcgatgaggatattttgaacctgagcgatccgccctattataccgcctgccccaacccgtggattggtgactttgtcgcagaatgggaagcacaaaaacctgcttgtgatgaagaatatcatcgtgagccttttgctgcagatgtcagtgaagggaaaaatgaccctatttataacgcccactcttaccacacaaaagtgccgcataaagccattatgcgttatatcctgcattacaccaatcctggtgatattgtctttgatggtttttgtggtactggaatgactggtgttgcagcgcagatgtgcggcgatcctgaagtcataatgtcattaggttatcaagtgacgccagatggcattatcttacgggaggaaacagatagctcaggaggaaaggtctggaaaccattttccaaattaggcgttaggaaagctatactcaatgacctttctcctgcagcaacatttatttcctataattataatacccctgtggatccaatatcttttgagaaagaagccaacagagtattgaaggaagtagaaaagcaatgtagctggatgtacgaaacaactcattcagacggtcaaaggggactgattaactatacagtctggtctgatgtttttgcttgtcatgaatgctcaggagaaattgttttttggcatgaagccgttgatgagaaaaatgggaaagtacgtgatgattttccttgcccacactgtagtgcggtgttaactaaaagacttctcgaacgagtatgggtgagtaaattcgatatctcaattggtaatacaataaagcaagccgcgcaagtacctgtaaaaattaattattcagtcgaaggtttgactggccgttttgaaaaaaaaccagataataatgatcttgctttaatctctaagatagaaaatgaagatataccttattggcatcctacatcaagaatgattgagggacgtgaaactaggcgaaatgatacaattggtattacgcatgttcatcatttctataccaaaagaaatttacgtgtccttgcaactcttcgccatatcctttccacatcctatatggaaagtcagttactttgccttgttggtgatcagcttcccagggcaagtaaaatgcataaaattgctgttagtcgtttaaatactaatttatcaaaaacggctggagttctagctgggactctttacattccatcaaaccaaattgaatactctttgatttcaatgattggatttaggattaaagatgtcacatcatatttgagtaaaagagatagcctaactagacaaattgctttcacatcttcctcggagaagatgcttatgccagataactctcttgattactttttctttgatcctccgtttggggcaaatattaattattcagagttaaactccctttgggaagcttggttgaaggtattaacaaataataaatctgaagcagttgagaacaaggcacaaggtaaagatctaaatgactaccgccaattgatggcgggctgtttttccgaggcgtatcgtttactaaaaccagggcgttggtttactgtcgagttttctaatactaatgcttccgtatggaatagtattcaatcagcactgaccgactctggatttattgtagccaacgtatctgctcttgataagcaacaaggcagttttaaagctgttacgaccccaacagcagtgaaacaagacctcgttatatccgcatataaacctaacgatggatttgaggaacgctttgagcaagaagcacaatcagaagaaggtgtttgggattttgttcgcacccacttgaaatatttgccaattataaagcaacaagatgcaataatgctatttgtccctgagcgtgaccctcgtattttgtttgaccaaatggtggcttactatgtccgcaaaggattccctgtaccgatctctagccaagaatttcaacgtggcttaggtaaacggtttatcgaacgcgaaggaatgtatttccttcctgatcaggtcgctgagtatgaccggaaaaagatgatcttaggcactttgcaacagctttctatgtttgtttccgatgaggcatctgcaattcagtggctgagacaacttattaagaataagccacagacattttctgatatcaatcctcaattcatgcaacaacttggtggatggagtaagaatgaaatcgttcttgatctacgggagctactaagtcagaacttcctctgttttgacggtcaggatgaggtgcctgatcaaattcacagctatctctctagcaactggaaagagctacgtaatcttccgaaaaacgatccggcattagttgccaaagccaaggatcgttggtatgtgccggaccctaataaagctggggacttggaaaagctacgtgaaaaatcattacttaaagagtttgaagaatacaaagataacaagaaaaaactcaaagtattccgcatcgaagccgtgcgtgttggcttcaagaaactttgggaattacaggagtttgcagctctgatcgctgtcgctgataaattgccaagtaacgtactggaagaggatccgatactgctgatgtattacgaccaagcggttaccttgagtcaagtcgataccgatgaggagtggtga

SEQ ID NO: 188991 - DNA, 3726 bp, Klebsiella oxytoca
atgaaaaagtacggagagctcatccaatttgagcccgtcacaactatcatcaaactcaaggagtctgctgaacagcacaaagctcagcagttggtggcatcttatgttatctcggacaagatggcactaaaactggcggacatcatcattccccagttgcagtttgaagaatcagttgataacaaatctctctgggttgtcggtaactacggctcaggtaaatcacacctgatgtcagtgatctcggcagttgctgagtttccagaacttgcaaaatatattactaatgacaaggttcgccacgctgcgggcaaaattaccggaaaatttaaagtcattcgctttgaggtcggggctagcaaaaaagcttttgctgatatcgtcacagacaacctgacctccagcttggcggaaatggggattgattatcaattcccctctatggatgaaatctcatccaatcacaaaccctactttgaagagatgatggcgctatttcatcaacgctatccagatcaaggtttacttttgatttgtgatgaaatcctcgactacctgcgctcacggaaccagcaacaactaccattggatatggcgatgatgcgcgtcatgggagaagtaattgatggcacacgcttccggtttatttgtggcgttcaggaagccattttcgacagcactcaattagcttttgctacgcaggaagtcaaacgcattcgtgaccgtgcagagcaggtattgatcacacgtgacgatatcaaatatgtggtcgcggaacgtttgctcaaaaaagatgcccagcaactgcactggatccgtgagtatctgcaacaattcacgtcttgttttgatcgcatgaatgaacgactcgacgaatttgttcggatgtttcctgttcatcctgactacatcaatactttcgagcgagttcatggtgcaggcatcgaacaacgacaggtattgcgtagcctctcgcggcagatgcaggctttaatggagcaacaagtcccccttgataagccaggcgtattttcttatgacacctactgggatgagctcagaagcgatcccagcgccaagaccaaccctgatgtaggtcaggtcattgatgtcggtgaaaccctgtttactcgtattgaccaagcctatccaaccgcaaccgaagtagactttgccaaacgcctagtagcaggtttggcaattcatcgtttgactgttggtgatgtttataacgagatgggagcaactgccgccgagctgcgtgattcactttgtctctatctacctggtatcgagcaactgccaggagaaaagagtaaaaatttggaaactcagattgttgctgtactgactaagattcgaaaaacggtcaatgggcagttcttttcaaagaacaaggcaaacgatcagttctttttggatttgaaaaagactgaagactttgatgcttacatcgaaaacaagattcccttgcttacggatgatagtcgtaacggtgcctatcgtgaagctatgctgcagatccttgaagaaactgatatgcagcaacccaatattcagatgtggcggcacgagctgaaatggttggatcgcaatgttaaccgcccaggttggatgttcttaggctcacctaatgagcgagaaacagccaagccgccgctcgattattacatgtattttatacagccatacaacccgccaaaacagaaaaaagagtacatccgtagcgatgaagtgctatttatactgcaaaatgctgacggagattttgatcgcagcctgaactactatgcagccgctatcgatttgcatgcttctgctacaggtaacgccaagaatgtctacaaacttaaggcggatggttatctgagagagatgcagacttggctaaaaagccatttcaaagatgcttacattgcccaatacaatgggcaaagcaagccgatgatggactggcttaaaggtacctctgtccgcaacatttctgggctcggcgatagtcaaattggcagcctcaaggatatttttgaatccgttgccagccatatcttggctaatcactttgtttcattagcacccgagtatcctacttttagccagtggatcacctatgaaaacatagaaagtgcagccaaagatgcgttaagtgttgtctccggtggcgctgcgaccaagcgagctaatgccgtccttgacgcacttgaattactggatggcgataaaatttccccgctacaatcacgctatgcccaagccgttttagctgttttgcaaagcaagccacaaggccaagtggtcaatcaggcagaactgctggaggccatcaattcccgactctattttaaaccagaaatcttccgattagagccggaatggctgctagtcttgatcgcctgtttggtttatagcggcgagcttgaattagtcgtggtcggccataccctgactgccagcgatgtagtcaaatttaaatccatttcatttgacgtacttaaagactttaaacatatccaagcacccaaggattttaatatcaccgcattaaaatccctgctcactctattggacatgaatgacggtttagctacctcgatccagcaaggtgatgagagcatagtacgcgaaatgttaaagcgtaccgagatgctgattaacgagctggtcaaggggcatcaaagtgtcaaggatcgcttaccactgtggggacaatcggttctggaagaggatgaggaacagacgctgtcgacgcagctgtccgagctgaagaattttttggaaaccattcagcgctacgataaaccgggtaagctgaaaaaccttaaggcgaccgccgcagaaatcgccgctttccaacagatactgcaggcatggcacaactttgtgcagctcaaattagttgtgaacgagctggcccctttatgcgcctacctcaaagaggctcaactggtactacctgagcagctcgcttggcaagaacaagttaaactggcgcgagatgcgctaagacaaggtttggctgatccggtattacgtggtgatgaaagctttaaatcagcgcagatcaacgttttgaccgcgttgaaagctgagtatgccaagcactatattgagctctatatgcgggtgcgtctcgatagcagcgaagaaaaaaccaaagccaagctgctaagtgacgagcgcctagcagagttggatatcttgagcggaatcgccttgctccctgcccagcaacttgctgattggcgtaaagacgctgcacaattgcaagcggccaagcccatcgatcccaaacagttgacgatgaatgccaatccggcagaattcaatgctcgccaagagagcggcaaggcaccggccagcgaacaattaaagaatctggaacagcggctcgatagcattcagagcgattggctcagtaacctgaacagcctgctagatgacccgtttattaacctagaactgctcaaacccgatcaagcacagttaattcgcgattttattcagcaaggccagttacccgaaccaatggatttcacctttgtgcaagcggtaaacctggtgctggcagggttggaagaggtgaggattagctctgtcgaactcgtaaatgcccttggtcaaggcatgcctcagagtcgcgatgaaatgtctgatcgctttaaccggctacttaccaagctctgtcagggtaaaaacctgaataaagtccgcattatcatcgattaa

SEQ ID NO: 188992 - DNA, 519 bp, Klebsiella oxytoca
atgattgatcaaaacatccatactacaatcgtatcctcgacttacgatctgcttaaggaaaccgactcagctcttttgagattgtgtgaccaggctagctcgctggtgctaatcgtaaactcagctgtacaaggcatattgccttctcatctgtcagaagagataacgttgctcgagctatctgaagagctatgtgaacacttgcttccgctatcacgtggtgatcgatcccgtagggcaccagatatcctcgctaaaatgctaaattgcatagcgtctgaagtagtatggattgacaggattcaagctctatttgaaccatctttggaactagatcctttgcgccagctacaagagctagcgcgtatcaagcctatcatcgctatttggccagggcagcttacagaacaatttttaaccttttcagttccgggaagggccgattatcgatcttacacagcgaatgagctggcaaatctgccgatcattcattttgttgagcagagggaatataaatga

SEQ ID NO: 188993 - DNA, 3159 bp, Klebsiella oxytoca
atggccgataagcaccccagtattatcgccccgctcacgggattgaaagattttcagcaacgcaccgtaaattatgtttttcagcaattttacggtgataaacagcaaaatcgctttctggtagccgatgaagtgggtctgggtaaaacgatggttgcccgcggcatcattgccaaagccatcgaacatttacaggataaagttgaccgtatcgacatcatttatatctgttcaaatgcggctatcgctgcgcagaatatcaagcgcctgaatgtcagcaatgagacgcaattttcgcattcaacccgcctgacactcctgccaaaacaggtacggtctctgcgcaaaaacagaatcaattttatcagtctaacgccgaataccgccctcgatcatacccgcagtcgtggcggccataaagaagagcgcgcgatcctgtatcgcattttgtacgatttaccgctggctaaaggcgcgcgtcgtgaacgtttacgcatgggtatgcttaacctgcttcaggcaacagcaaaccggccaggctggtgttccgcggttgaccagctttctgtcgacgacattgacagggaactggcaaaagattttcgccgccaggttctggacgataccgaactgtacgctcaactcaaagaaggttgtgaatgttttgccgataatgacgaggacggcgaaacgcacgattctgaactgcgttacgccctgatcggcaaactcagaagcaaactggcttccgtgtgcttatctgcgctggaacccgatctggttatccttgatgaatttcagcggtttaaagccttactcgacggtgacgatgaagccgcactgctggccaaagcgctctttgagcagcccgacgtgcgcgtgctcttgctctcagcgaccccgtataaaatgttcaccctcgatcaggaaagcgaagaagataaccactacgccgactttatccgcacattgcagtttttgtataacgatgacagtcaaatcaaagatattcagcagtacttgctcgatcaccgtaccgcattgcacgcctcagaaaacgcagcggagacaaaaaaagcactggagcacgctttattacaggtaatgtgccgtaccgaacgggtaacgatgactcaaaaactggatgcgatgacgaaggaagtctcacaaccagctatgattacgcccgccgatctttatcacgcagcggcggttgatggcgtcgccatggaagtacaagcccgcgatgtcctcgaatactggaaatcgatgccttatcttttcaatttcctgaaaaattacgaattccgtacccgtatggataaggcactggaatcaccttcagatgcattgcgtaaactcgtcaaatcagcaaaaccgcagttactgacaaaggcaaaactggagcgctaccagccactggatgccgccaacccacgtatgcggatgctgtttgaagacacgctggataaaggcatgtggcagcttttatggatgcctccttcgctgccttatatgacaccagacggggtatatgccaacaaaggcaactttaccaaaacgctggttttttccgcctggagtgcagtgcccaatgcgattgccactgtctgctcttatgaagccgaacgacgcatgattggcgccgctcccaaaattctgcacagccagttcaagaaaaaagtaaaaccgctgctcaactttgcgaaatcatcaaaagatggccgcctcagcggaatgcctgttatcgcctggatgttaccctcaccgacgctcgcccggcatatcgatccgcttgaaattgccctccaaaacaccggcgagccgctgagcgtgaaggccgtaagagcgattgcaacggcgaaatgtgaaacacttattgagacactgggcaatggcggcccggggactcgtgcggacgaacgttggtactgggcagccctggcgttactggatgcacaaactgaaacgccagcctggtggcagggcgaacattactggtacaccgggccatcccaaaatgagcccgcggaaaacttccaggaacatatcgaccagtttgccggggtggcaaatggtagcatcaccctcggcccacgcccagatgatttggctgaggtcctctgtgacttcgcgcttgccagccccggtacatgtgccctgcgggcgctcagccgtatagacacaggactgagaatcgattcggcagagatgttgtcagccgcagcgaaaatagcctctggatttcgttcgctctacaacttggcagagagcatttcgcttctacgcggcaccggggacgatacttactggcggctgacactgcgttatggcattgatggcaacattcaggccatactggatgagtatgtccatacgctgctggagtcgatggggttacagcatgagccagccggggcgcagctggcggctattgcgtcccgtattcaggctgtggtttcactgcgtaccacacaattgaacattgatgagttcaaaacgaacgggggcaattatacctggagcgatttatatacacgttgtcgctttgctttacgctacggtcagttgagagacgacacggatcaagccgtcgcacatgctgaatcggtaaaagatgcgtttaactcccccttccacccctttgtattggcttccacctcaatcgggcaagaggggctcgattttcacacgtggtgtcatgcggtgatgcactggaatctaccgtcaaacccggtcgatctagaacagcgtgaaggacgagtacaccgttataagggccatgcggtaaggaagaatattgccgagtattatggtttgagtgcacttcattccctggcagaaagtgcagatccctggacacagctcttcgcacttgcggcaagtcaacgcaaagcgggacagtcagatctgattccctactggatttttgaggaaggaacctctcgcgtcgagcgccgggttcccatactgccgtacagcaaagaaagcattaagtttaagcggctcaaacgagaacttgcactctaccgtatagtcttcggtcagccgcgccaggaagatttgctgttcggcctgaaacacagtggcaatgagtctttaacggatatggcacagtggcttatctctcttgagccaccaaagtgtgatgcaccttag

SEQ ID NO: 188994 - DNA, 1797 bp, Klebsiella oxytoca
atgctaaaccccagcaatcgcagcttatatacttcggcactgacctctccacccggtatggtgtttgacgaagccatcgccaccagtttctcactcgacccggcatttttactgcaagcaccggtctatttggcgttcacagcgactgatagcaaccgcgctgaggatccgctgtccatttttgaagccattcgtcgttattccgaacgtatcacggtgtacgtccaaaaagggcgtattcaggtccccgcaaagctcaaacccaaccccttattcggcctgcttgaagagatgattgttgaatcaaaagccaaaggccacggagtctttcaccccaaaatctgggcgattcgttttatcaatcctgaaacagacgaagcaatgtaccggctagtcgtactgagccgaaatttaactaccgattcatcctgggatctctctttgcaactggacggctaccccgcaaaacgtaagcaaagtgccaataaagcgctggtgtatttattttccgtactgcccaaacgggcgatgggaaaaatggcgaaacatcgccggacgcaagcgcagcgcttctcagatgaactgttgtatgtggaatgggaatgcccagctggctttgatgaagccgcgtttttcctgcccggagaaggatacgactggcagccacccgaagcggatcgtgcggtggttatctcaccattttgcaccgatgaggcactgcaacacatcgtgaagcattgccagcaagccgatgctctgatttcgcgcccggaaactctgcttaccttgagtgaagagacgcgcagccttttcacgcgtcagcttcaccttgacgatgccgctgaagagcaggcatccgacgggagtacccctgatgacatcatcgcctccggcctgcatgccaaagcgtatctgtttgaaaatggccgagacagcgagctggttctgggttccgccaatgccaccagcgcagcgctactggggaaaacaaattgcgaaattttagtctcgctcaagggtaagaaaaagcacacaggcaccattgatgaccttctgagcagcgatggaatggaaagctatctgcaagatttcgaccctgcccagccgtttgaacccgatgtcctgcgtgtagaagccgggtcccacgttgaacaggcacgtgcgttgctcgccgaagccgaattgactcttcactgtcaccccggtggaaacgaccaaagctgggcattgtggcttgtcggtgaaactcctgagctaccgggtatcgtgcaggcaactgcgtggcccgtgacggtatcagacggacttggctgtagcctgctggacccggccgatgggaataaaagagcactcggtgagttttcagtcccggcaattaccgggctgacagcgttttcccttaaaacatcgcacccggatgtatcggtcagatttgtcctcaatctgccgattgataccttaccccccgatcgccatgcaatgattttacaaagcagcatgcagaaacaggattttctgcgttatctgttgatgttgataggcgaggcgggacagcaatccttctttgccgaaaactcctttggcgatggccgtttctttacagggcttgccagtggcgaagaatttgccgtgctggaagagctgacgcgtatctatagccgtgagcctgaacacttaaaagatatcgccgcgctgattggcaatatgcgcaaaggacaaagcgatatgattccgcaagattttcttgctttgtgggccgtatttgaatcagccatgggaggacgaaatggccgataa

SEQ ID NO: 188995 - DNA, 1230 bp, Klebsiella oxytoca
atggcatccacattaggttggcttgatcacgatgcaaacgcacagtccaaaacgttaaatattcttgcgctctttcaacaaaaagagagccgagatgaactaggtatcggcactatcagagacagttttgctgaacaactatttccaggaaccagcaccattcagacccgtttacgctacatgctttttgttccatggatctatcagcgtctcgaaaataaacgcatatccgctgcaaactttggttcccaggccgaccgggacgaacgtgccttaattatccccctctcccggctcgaagaagattcggccggtacatttggtaaaaactcacgcgaaaagcttaaacgcctacccagctccgtttactggtccgggctgcggcgctggggtattcacgagatgtcgtgctcgcaggaagaatatcatcggcgtgtggatgaactgtatcgcgcgcgcgcggaaagtagcgaacggggataccaggaaaaaaatcagggcgatatgggcgacacaagcgcgaataaatcatcccagagctggcactccagcctgcctgcgccaccgcccaactttcctgatgaggcaacatttgccctgacgtgccaggaagccagttttcttcgcgatcgtattcaatgttcatgcaaaggcagcctgctagcctggctgaccctgcatagcgaaccggcaaaggtcagcgcaccatgggaacatccggattacgcgaaattcccggacgatctcaaggaactgttgactcacgcgcgacttttttcttatacgatgcacggcgcagccctgctttataactatttgcttgccaaagaacgagcagataacggccttcagtctcaacaccatgacaactttgtcgcctggtttaccgcactcccccgccaggacatcaagacctggtcgctcgaccgcatgtggggactgaccgccgggccggactatagtattagtctgaagacccgccgctttgtggaacagtggattgcccttatccgacaatcctccgggacattactcaccagtaaagaagcctgtacactcatccgagcccgcgaaatagcgctcaaaggcccgcggtcacgctttaaaaacagacgcgcactggagcaatggagtggatatgccggaaccctgcggctggtctatcgctggcataacgtccagataatacttaacgatctggcgcaggggctcaggagagaagaatgctaa

SEQ ID NO: 188996 - DNA, 339 bp, Klebsiella oxytoca
atgaatttaaagaccgctaccagtgaggaacagcacgccggaattcgtatgctgaaatgctacctcaccagcgaccaccgtgggcattttgtgacgaccagtgaagcagataacatgccaggacaggtatggggctgcgtatcctgtggctgtcgactcatcttccataccggcacatacactgactcaccctggttcgaacatgaccagacgacagtagctgccagtacgctgatgagatgcgcgcatattgatccggcagtgaaggcggaggaacgcagcagaatattacgcagtcttttcaacaaaccggactccccggtaatgtcgctggcctag

SEQ ID NO: 188997 - DNA, 219 bp, Klebsiella oxytoca
atgaccacagccattaaccccattatttgcgcagaagacccacttatcgacatggtatacatcaccacatacaccggtatgaccgacaagtggttctacaagcttattcagaatggcgaattcccgaaacccatcaaactgggacggagttcccgttggtataaaagcgaagtagaaagctggatgcaacagcgtattgcagactcgcggggagcctga

SEQ ID NO: 188998 - DNA, 315 bp, Klebsiella oxytoca
atgcaactggctgaaatgctggaacgacgctcagcgttgatagataagagcggccactttcattgcgaacgcatgcataaactcaccgaatttatcgatgatgccggagagggaaacggtcattaccagttgtacctgaagccagaattgcagcgacttaatcgtttcgatctcaaatactggcctgacattgccggtatcgttcgctcactggggatggaagatgtggagattacctttgcagatgacgcgacagaggcgattatcaaccgcccgcaggccttcaatgacggatttcttcaggaagctatttga

SEQ ID NO: 188999 - DNA, 216 bp, Klebsiella oxytoca
atgacggatttcttcaggaagctatttgataatattaacgagcaaaaaacagggaactactactctttgccgcggatgtttaacctttcggatgcagcactggcgacaatttttaatatcacacgcgatcttccaccggatgagctcattgacgcaacttatgtgaagcgtacccgtcatcgactgaaagaacagggttacagtgcagtatggtaa

SEQ ID NO: 189000 - DNA, 387 bp, Klebsiella oxytoca
atgaaagcaaacgtagagtatgcattccatcatttcggtataccggttcaggacggtgataccgcaggcaagttcagtgccagtgccggactgtacaccaccgataattcgggtaagtttcgggtgcagtggcatcgttttaccgatgactcacccctgcatccgttactggaaaccgttccatatgtggcgtttaaggtcaacagccttgctgaggcgattgcgggagaaacagttattctggggccttatgaacctatcgatgattaccgggtggcggttattgatgactgcggtgtaccggttgaactgattgaaaccacgctcagcgatgaggaactgtgggcgcgtgcagcatccggtcaggggagcctgcatcgcaagtga

SEQ ID NO: 189001 - DNA, 969 bp, Klebsiella oxytoca
atggctgtaaattatgatgatggcaggagaggtctcataacgagtcgggaccttagagtttgcgtgttttatgccggatggttgaatgccagcaacaaaattaacaccagcaatgttcccaggcaggatgcagaaagctgccgacaggcgttaaaccagctaattaatcgggccatcccggataaaaaccagcaggcaagactgctgtctgaaatggagacagcccgtgatgaaaatgtgcttccactggattgttttgactggcttcgtcagaatgagcgggccacgttctggctatgggcgtatctctgtaaggccggggattatgagtttggcattggcccaccagcaaatgctgaattcgggaaaaactggtatcagcgaataaatctgagtttatctccggcaagtcatcaggagagaatgcatattctcatcgccttctttgacaacatttacgtttccacacctcctgtgaatcaccttaagaaacaggtgatggaaaaactgaaagaccggtggaaaatcatatacagcaaaccgctaccgttaaaatggctgccgaatgaagaagatgctgtattatgggcctggaacaacctgcaaaaagttcagcaggagaaagccgataatatcggtggactctatatgagtttatccacacccggattaacgacctggctcacgccactgagtcattccgagcgcaacttggcactacgtgccgccctggatttatgggatgacgcaccggacacaaagcgtttattcctgctgaatctgaataaagcctggaaccagcataaactgcgtcaatcccgtaccgataaaaaagcactcaatacgtacctgaagaacgaaaccaaaatgcgtctggattttatggctgaacgcagcggggttcgtatcagcgatatgctggaaacgttgattaatgaccattaccgtaaaacctatggtggtgagtga

SEQ ID NO: 189002 - DNA, 297 bp, Klebsiella oxytoca
atgcagtgtccgaattgcgattcgcaaaacatccagatgcgccatatgggtaaaaaaacaggaggggtgaccggggcaattgccggggggcttgccggtcttgaaggggcgacggccggtgcgttgattggttcagcggtcccggttgtcggcacactggcgggaggactaatcggttttctgtcgggggcctgcgctggcgcagtagcgggagcggttgccggtgaaaagctggacgggacggtatttgatgaatatggctgcacgcagtgtgaacataccttcaatgtgccgtga

SEQ ID NO: 189003 - DNA, 366 bp, Klebsiella oxytoca
atgattgatgtcttagggccggagaaacgcagacggcgtactacacaggaaaagatcgctatcgttcagcagagctttgaaccgggaatgacggtctcccttgttgcccggcaacatggtgtggcagccagccagctatttctctggcgtaagcaataccaggagggaagtcttactgctgtggctgccggagaacaggtcgttcctgcctctgaacttgctgccgccatgaagcagattaaagaactccagcgcctgatcggcaaaaaaacgatggaaaatgaactccttaaagaagccgttgaatatgggcgagcaaaaaagtggatagcgcacgcgcccttattgcccggggatggggagtaa

SEQ ID NO: 189004 - DNA, 2523 bp, Klebsiella oxytoca
atgctacagataattggtgcgttaattttactgataatcggttttgttattataaaagcgttgtttaaggcatctctcaatattctaggtgtgatattaggattgagtgcattgattgttgcaggcccacctttattggcgggctatattgtagagcgcgtaacctatgcgcttcactcacgttggctgctgggtgtacctcttgccatagcaggaatggtgattagctttatgtggggacttgatggtaaacatattgcctacgaagcttattcatttgattcaatgaagtttattttaaccgctgcatttgccagtggcctgcttgcagtacctgtacaaaccaaggctattctacaaaacgggcttataccagccgatatcaatgccaaacttaaagagtattattgctgtttttatgcgtcttactttttgatggcctgctctgcggctacaccgtttatagcctggcaatataatatctcatcttcactgatgtggtggacaggattgctatactggatagcagccttactgacacagttctatgcggcaaaccaaattcaggaactcaagaagttaactaatgccatcaatacagggttaaatgagcaaaaagcgatcaataacaaactttggctgacggaactaaaagaaggaagtaacctctcagcagaattcgtagagactatctatctcaagttggtctcacagcatatttttcagggcgatactcgagagcaggatctggctggtgaaaactggcttttaaatgatgcctggtatgaaagaaagatggctgaatttaatgagcagttaaacagtaaaatagtacactcatcagatgagctaagaagcctttttggtaataggctgaatttaccctctgctgcgaatgatgatctcctgaaccgttatcttgatggtgggaactattattctttttcggatggtcgaaaatttgtctcgtttcactatgtcgacgagctttgtacctgcacttcatgcggtttgagcgagattaaaaacgcaaaacaccaaggcggtggtgggagccaggaatggtattgctctgatatttgccgggaaacggaaaaactctgcattgaaattcacaagcgaccacaggctgaatttatttccagtgcagcaacaaacggtctgattctcatgacactcccggaggcctggaatactaacgaaaaaatgtttgcactgggaggacaaggacatggttttgcagccgaacggggaaatcatcttactgacaaaatccaactaaaagatgcacatattctcggtgatgataatgcgaaaaatggtgcagacaggctggttaacggttcagagattcagaccaaatactgtgcaaccgctgcacgtagcgtcggtgctggttttgacggacaaaacggtaattatcgctattatgacagtaacggaaacccaatgcagttagaggttccgaaagaccagtattcgaaagcgcttgaaacgatggagaacaaaattcgcgatggcaaagtccccggcgttaccgatcctgcagaagccacaaaacttgtacgtcagggacacctgacttatagccaggcacaaaacattactaagtttggcacgttcgaatctatcacttacgacattgcggaaggatctatcatcagcctcgcagctggaggtatcagcttcggtctgacagcttctattttctacctcaataccggcgatcgtaaggctgcgttgcaaacggcagcaatacaggcaggtaaaacatttacccgcacactgacagtttatgtgacggtacagcaattacaccgtatcagtgccgttcaggggttacttaaaaatattgattttgccgctgccagcccgacagttcgtaatgcgcttcaacagggagtcggagctaacaatctcaacacacttaacaagatgatgcgtggcacactggttacttctttcgcactggtcgccgtgaccactggtccggatatgatcaaaatggtgcgaggtcgtatttctggggcacagtttataaaaaatctggcagttacttcatctggtgtggctgggggtgcaattggttctattgctggcggaatgatgcttagtccattaggtcctttcggtgctttagcaggacgcgcagctggtggcttgttaggcggtatgattgccacagctatttccaaaaaaatagcgggtgcactggttgaagacgaccgagtaaaagtgctggctctcatccaggaacaggttacatggcttgcaacaagtttcatgcttacagaacacgaacttgaaaacctgaacgcgaatctggcaagagtaattgaccaaaaaaccctggaggttatcttcgccgcaaaagagcaagaccgagcaacggccaatatgctgattaaaccacttgtagtaagtgtggttaagcaacgaccggtcctgagctatgaacaatcgcaaatctgcgaattggtcgatcagcttgatacatcggtttcattatctgctgttgcataa

SEQ ID NO: 189005 - DNA, 1446 bp, Klebsiella oxytoca
atgagcattaaccataatacagttggcgaccagcttatcggcagcgcggttaacgccattaatcagacctgcattgatagtgaactgttaaaactatcgcagcaggagcgtgcatttgagttggctggcgaacaaatgcaaaaggtgcgtgatttcatcgcgtcaccgggtaacatcctgggcgcaatgagcaccaaacacggtgaaattgctgagcaggtagaagttggcgtgcgcaatgctcgccaggcaatagaagaaagggttcaggatgtctctgatcttagcgccacgtttgacggagtgggtcgaaccgctccggcggattatatgatagatggcgttgacgtggagtcaaagtttatcaacggagttaataataacctgaaccatgtccttcagcacatggaaacctatcccaattttacccagggagaatccttttaccatatccccaaagactcctggcaaacgattcagaatgttattgatgggaagccggtggagggcttgagcgaaaaaacaatacaggctatcagggataaagttgcagaaattgaaagtacaacgggaagatcctttaatgatgtcgtgcgtcctggagtttctgattacaaagatgttcagtggggaaaaattgacgaaacgcttgataaacatgatcaggaattagcggaacagaacgaggcaaaaaaagcagaaattattgacaatcaccaaccctccctaagtgaaggcatgcgtgcaaccgcaatgggagccgctttcggtggaacctttgctcttgtaacaggtatatatagcaaataccgtgatggtaaaaatatatttcgtggagatttcaacagacaggactggcaggatgtcagcttacatacattgaaaggtgccgctattggcggtttatccgccggagcaatttataccctgaccaattatgcctctctgggagcaccgttcgccagcgcgctggtcactgccgctaaaggtgtaagcaatcttgctctctcctatcagcgcggtgagattaatgctgatgaatttaccgatcttggccttatcatctgcgcggaatcggccatcgttggcgcaatgtctgtcgcaggtcaggcaatcatccctgtgcctgttttgggggcattggttggttctatctcagggaagtttatggttaccgtagctaaaaatctggacagtaaagcacgccaagtgctggcgaaaaaaatggagcaatttacatgtcgcttaagtgagattgagcagaaagcactcaaccgaattttgaacgagttcgcggcgctgggtgagcttaccgcagctgcatttagcgtggaaaacaatcgccggttgctggaagcaagcatcacgcttgcccaggcccacggtgttgaagaggtgatgataatcaaaaatgcggacgatcttgacacatttatgatggcgtag

SEQ ID NO: 189006 - DNA, 585 bp, Klebsiella oxytoca
atgaaaaataaatacggttattcttctttgctaaagccggtatctggattacctgaatgggttactgagcatttattgcaacaaataagacagataactgagtatgaaccggttataggtattatgggtaaaacgggagcaggcaaaagtagcctttgcaatgccctgtttgctggtgaggtatcgcctgtcagcgatgtggtagcctgtacccgggaacctctgcgctttcgccttcaggttggcgagcgcgttatgacgttggtagacctgcccggcgtaggggaaagtagtgcacgcgatagcgagtatgccgggctgtaccgtgatcagcttccccggctcgacctggtgctgtggctgatcaaggccgatgatcgggcgctggcggtggatgagcatttttatcatcagataattggtgagtcgtaccggcataaggtgctgtttgttattagtcagtcggacaagaccgaacccactagcggtggcggttacttatccacagagcagaagcaaaacattagccataaaatttgcctgctgcatgaattgttccagcctgtttatcctgtatacccgtag

SEQ ID NO: 189007 - DNA, 465 bp, Klebsiella oxytoca
atgaacgcattcaatagcaatagcgttacgccctttcaggaacaatcgccagcgacaggtattaccgcctctgttgtgcccgatcgtcagcggctctcattctggccgacacactttggttccattccgcagtggataatcctgaagccccgcattttcgcctggatggaccgcttctgtgatgagtacagcggtggtatctggtccttttacacgctcagcaatggcggcgcgtttatggctcctggtgctgacagtgacgataaatggcatctgttcaatggcatgaacggcaacgatgcgcaaatgagtgcagacgctgccggtatcgcggtctgcctgattgaatacagccaccatgcctgtcgcaccgcatgcgatgcaatgaccgcgcactattaccgcctgcgggactatgccctgcagcatccagaagcccacgccattctgcgcatcattgactga

SEQ ID NO: 189008 - DNA, 477 bp, Klebsiella oxytoca
atgaaacagctttcctttttacccggcgagatgacgccacaggatcggcgtctcattcagcgggcgctcagggttctggaccgccacctgtatgagcccggggtggtcttcacctctacccacgccgtacgtgaatggctgcgactgcatatggccgcgcttgagcgggaagagttccgggtgttgtatctggacaaccagaatcagttgattgcccatgagacgctcttcactggcacgattaaccgcactgaagtccatccccgggaggtggtcaaacgcgccctgtatttcaatgcagcggcggtgatactggcgcataaccatccttccggtgagacaacacccagccaagccgacaaggctatcactcagcgactagtgcaagcactgatgctggtggaaatccgggtaccggaccattttattgtcggtggcaggcaaatattctcattcgccgaacatggtcttctttaa

SEQ ID NO: 189009 - DNA, 267 bp, Klebsiella oxytoca
gtgcaggaaggtaaccgtctgcattttctggcggaccgggcaggattcaacggtttgttcagcgagatgcaggccagagatctggaggaagcctttccgcattttgtcgcgcatatggaattaatgctgctttccggtgagctgaatccccggtgcgtgcactgcgtcacactgtaccgtaacaagctggcctgtgaagccgatacgctgggtagttatgggtatgtatatatcgcaatttatcccgcaaaacaggttaaagactga

SEQ ID NO: 189010 - DNA, 726 bp, Klebsiella oxytoca
atgatgaaagagcgggcctggaactccaaaaaatttggtccgggaatattattgtattcatcctcttatctgaaaaagcataggtacactgactctcataaggactttccatcaaatgagaaaagcattgagttagctacgcttattgaacgttattggagttcattagaggctgaacttctgagggataatgttgctgtcattatccctgaatatatctctatggatgaactctttaaatttcatcttaggtatgcacagaagtgctataaatggggtgaattagttatatcagacaatgaggatgttgcatttgaagcatttaaaaaagcatctgagttatttgataaaagcatggggatggttttgtataaaacttctgtagataaacgaaataaacttttaagtatcagaaaggagtctgggcgaaaaggagggatgaaaaaagctgaagtttatggaattatccaaggaaaacttgtggagcttattaatgttttagccccagagcagggatggggaagtaaagctgctgccgtgagagttctcattgaacctttgtgggaatttgttgaggaatcagattttatgattgataaccaaagtaaaaaatatagattagcaactgctagtcaagatgctttagctgaaactatcataaaatcttggtcgcaaaataatgaaattattaaacaagcttttgatgcgaatgtaagaaaaaaataa

SEQ ID NO: 189011 - DNA, 1515 bp, Klebsiella oxytoca
atgtctaaaaaaaacagctcaacgcaaaataaagaacttggactaaagttccagacgcttcccacttttgcacaacggttaataagctacatacattataaaacaggagccgccgctgaacttattttaatagtgttacttggggtaatggcacttgcctgccaggacaaatttgatattcagcttaaaaatgggagaacctttacatcactttatctgatgctattggcacgctcaggtagcaggaaatcaacggtattcaggctgttgatgggggagatttatcaactggaaaaagaactgaaagatgatttcctgttaaaggcgaaagtttatgagcagaaattcgcatcttgggaagtagaattaaaagagtacaaaaaacaatacagtaaagctattcgtcagaagaacggtgtaactgaagcgcttgaagcacaggaggaatgtcatgcaagaaaaccggttgcaccgataagaaagtttcttactaaaaacgattcaacaagtgagggacttagaaaggtattagtgcaggggtctccgtcgttgatgctcgggtctgatgaggctggagggttattcgacggtaatcttttccgtaatacaccagtactcaactctctttggggagaagggaaaatagcagacagcagggcttcacgcgacagctatgatgttgatgatgcacggctaacgatgctgctgatgatgcaacctggtttgtttgatgactttcttgataaacagggaaaaaaggcaaagagttcagggtggttagctcgtttattgcctgtcgacatggaacagatcccagaactgtgctgtatccctgatgttggtacatggtctgatgagctagggcttgaaggatttttctctattctcactaagcatttgcaagatgggataaagcgcagagagaataatgaagaacgtatttgtgtcactttttcctcggaggcacaagtcctttgggattcacagagtgaatacattcaggaaaagataaaaaaaggaggtgaattacaccattatgatgattttggtgctcggtttatggaacatgcttcaagaattgcagctgtaatgcaaatgtttatcacacccgactcaccaataatttctaaggagactttggtatcagcgtttaaaataactgaatggtgccttaatcatttaattgtaaaaatagactctaccagaaagcctagtgattctgaaatattgctattttggcttgaggaacatgttatcagtaatcaatcttacgatttcaggaggcatagtattcgtagagatggcccaaattgtcttaggaacatcgagcgtctgatatctgttttaacgaagcttgaaagtgaggggaaggttcagttattcaaggcgggtggcgttgattatgtgaaatttataggttcagaaatgaaacctgaaaatctcgcaagtgcattaaatataccgacactttcatctggatcagttgcttttaataagctaccacgacctgaataa

SEQ ID NO: 189012 - DNA, 699 bp, Klebsiella oxytoca
atggaatcacaatattcacttaccaacgaagagaccgatgacttgatagaaatagcctccagaaagtataaatcacccattgacctcaatattctcaacccactacttaacatggtctacggcactttggagcagaataaccgaatactaggtattcgttctgatctgagatttgcccagtctcatgtaccaggagaacctgatctacccctgtgcttccagcgcgatgatacgcaggcaatctctcgcttcttcgagtcactgaaaagccagctacgagcagatcataaccggtccgggagaccgggagatccgacattaccatcttatggatggtgcagggaacgcgatacaagcgaacatccccattatcacctgatgttgttgttcaacggagatgtctacaggtatcttggcaattacaaagaccgcaatggtgataacatgtctacccggatacagaaagcctggtgcagtgctgtagggcttgcccacgaagattacgcaacattagctgaatttcctcccaatgctgtttataggtttagccgattcgacgccttggatcgtagcccagtctactgggatttcctgattcgactggcgtatctggctaaaaccagaactaaggacgtccacagcggttaccgcaactttggcacaagccagtgtccatgcttaagcggattagcttgttaa

SEQ ID NO: 189013 - DNA, 6279 bp, Klebsiella oxytoca
atgtcagacagcttgcttgttcgagccagtagggatggagatcaatttcactatctttgggctgctcgccgagccctccggttgctagaccctaaagcgtctttaaccgcacttaccattgaaggtgcttcgacaacggaaatgggatctcaaccatcggtggaggaaggcgaagagatcattgatattgccgaatattacggcagtaatgagttcgagcaagcaactactgtcagatatatgcaattgaagcattcaacattacatgctgaaaccgcatggccccccagcggattacagaaaacgatagaaggattcgctaaacggtataaagaacttttgcagcgatttcctgctgaatccttgcatactaagcttgaattatggtttgtcactaaccgccctgtcagtacgagtttcagtgaagcaattacagatgtggcaaatcaacgcactcctcgccatccagacgaccttgctaaactaaaaaaattcacaggtctggaagatcaagggttggtgtccttttgccagatgcttcgcattgaagaacgacaggatggttactgggaacagcgaaatattctcctgagagaatctaacggatatctccctgatcttgacacccaagccccgctgaacctaaaagaactgattacccggaaagcgctatcagaaagtgcatccgatccagctattaccagaatggatgttttacgtgcgttaggggtagacgaaacagatctattccctgcaccttgcctgatagagaaaattgaaaatgtgataccccgaatacaagaggtttcactggtcaaaaatattgtggagtccatgggctcacctatcatcgttcatgccgacgctggtgtaggcaaatcaattttctcaacccgtattcatcaacacctgcctgaggggtcagtcagtattctgtatgactgttttggtaatggacaatatcgcaatgcttcagcttatcgccatcaccaccgaaccgcattagtgcagattgccaatgagatagcctcacatggtctatgtcatcctttaattccgaacgccagcactgacatttctcactatatgcgtgcatttatgtatcgtatttctcaggggatttccacgcttcgggcgtcacatcctgaggcaatattgtgcattattgttgatgctgcggataatgcacaaatggccgcaaaggaaatcaacgaatcacgctcatttataagagatctgctcagagagaacattcccgcaggcgtttgtattgtcgcactttgcagaccacataggcagagcctgcttaatccacgtcccggcactcccagcctgactttacaacctttcgatcgcagcgaaacagccgcacacctgcgtggaatattcccggatgcaaacgatcaggatgtggatgaattccatcgactgagctctcataaccccagggttcaggcattgtcactttctcgacatttatcactgccagatacattgagattgttaggtcctaatcccaaaacggtggaagatacaatcggagaagtactcgaagccgccatctgccagttgaaggatgcctctgggcatacagaacgtacgcagatcgattttatttgtgcagcactggcggtactccgcccactcattcctatcgctattttgtctgccatcgctgaaatcgatgaatccgcaataaaaagctttgcgttggatcttgggcggccgctaatcgtcaatggggatactatccagttctttgatgaacctgctgaaacgtggtttcaggaacgatatcgtcctaaagaaaaagagcttcgtcagtttattgcccgactgacgccgttaacaaaaaatagtgcctacgctgcgtcagtattaccaccgctaatgcttgaggctgggcaattttcggaactcgtcactctggcaatgacatcccaagggttaccagaaacgagtcctatcgaacgccgagatgttgaacttcaaagactgcagttcgccctgaaagctgcgttacgccttgagaagtatcaggatgcggcaaaacttgcgctcaaagccggtggagaaagtgcaggcgacagcaggcggcgaaaattattgcaggataatcttgatctgactgcaaaatttatggacagccacagtgttcaggagcttatttcacgccgtgcctttactgatactggttgggttgggtcacaaaacgtctataactctgcacttttatcggaattttctgagctctctggtgacgcccgtagccgactacgtattgctctggaatggttagataattggagctcactaaacgatgatgaacgcagcagagaaaacgtaaccgctcaggacatagccgttatggcgatcgcctatctgaatattcatggggcagatgaagcggcaagaagtcttcgccaatggcgacctcgagaattatctttcagtgccggcataatcattgccaaacaattactggatcacggccgttatacagagctgaaccagttagctattgcggcaggaaatgatcttggattaattttggctattgtactgaccgccagaaggttccattaccagttacctgaacaatctatcaagagaggctaccgtttattggctagtcctcatctgaaaatcaaaatcagatactcatttgataatcagacaatagcagcaataaccagcatggttgaaatggcgctacggctcaatgtctgtaatgacaaagaagctataacacttttaaaccgctacttgccccaatccgctccgaatgccctgtcctctaaacacagtaaagaacgtgtgcaatatatacgaatgtatgcgctacgcgcgacattaactaactcaccattaagtttgagtgatattgcatctgaaaaggtcattgaagagataaactctgaaagaaagcatagtgaatcacaggaacttcgcgaattaaagcaatatagtggtgtgttaattccttggtataacttatgggctaaagcccttttagggaaagtatccaaggctgagttagataatcaactcgctgatgcaaaaaaattatcagcggaaataaaagggtattcatactcggagcattcctttagcagtgatgaaatagctaatatctggttcgatattttatctgaagtcggagatattacttgcgctgatatcgaagaaatcactgcatggtatcaacataaggacaaccgggtctttacaccgacattgcacagattttcccgtctttgctcgcagataactgggcttgaaaaattttcatttatcttcgcgcaacaggcactatctttgtggaaagatgaccacactgacgcacaaaccaaggctgagaactatatcgatatagccagatcacttattttaattgataagtcagaagcacaagaatattttaaccacgctattgaggtcaccaataaactcggtgatgaaaatctggaacgatggggagcattacttgatctggcggaatacattgccgacaaaaacatagcatcaccagaaattgcctataaattctcacgctgtgccgaagtaactcgagaatatgttgatcgtgataaacattttgcatggaatgatacgatcaaagcgttgtctgaattatgcccatcttccacactggccatcattagtcgttggcgagatcgtacgtttggcgatcaccgaaatatactggcgttaacgatagaacaactagtaaagaaaaataaaatcaatccacttgatgcagcagcattaatccctttccgggaagagtgggacgaagataagttactaatagctgctctgcctttatgtaaaagcgatcaggacaaacaaacgctttttcaatgggtttataattacatacaattcacctcacctcgttcagaaaaattaacacgaattaaaaccatagctttgtccatcggaataaacctcactgttctaaatataaacatttcagttgaagaacagtccagattaaatttggaatcaacaagcgaccacgccactgaaactgacgaaaaatctaaaacagcatggcaaagagtttttaacatgtgtgatttatccacatccgaaggaatttctatcgcataccaaaacttccgtcatgaacctgagctctattcaaccgagttatttattcaagaggcgataactcgtattagttttggcaaagaaaaagactttattaacgcttttgttaaattatctgagatcagcctttatagtttcgggacttttcttgaatccatccctgaggaatggacagcccggttaagcataaaaacaactattgcttcagtaaccaaaagttactgccagcggttttgcatgcttattagaaagcatcgctactacgaaatgttcccttttaagcttgccagcgaactttccgggctcaatgaagatgagttaatcagtattgttctaaatgcaacatctgaatcaccagaaccatcagattcacaacaactgtttagccttgtcgggcttttggttaataagttgaccccagaagaagcattaaatgtcctatcttatgggttggacttattcaatgaagtattgaaagaggaagatggtgatggtccatgggggccaacattaattcccccaactcaggtagaagattctcttgcggggtacatatgggccaggctagcgtcgccagaatcaaccgttcgctgggaagccgctcatgccgtttttatgctctgccgattagaacgttccaaagtgcttcaagcaatatttcaacatgctgaaaattgctcaacacagcccttttgcgatcgcaatcttcccttctataacctccatgctcaattatggttattaattgctgttgcacgtgccgcgcaagatgacggaaaagcgctgataccctataccgattatttttatcgctacgcgacaactgaacaaccacatgtattaatccgcctttttgccgccagaaccctgctcgcgcttaatgaagctggattgatatctataaccgctcaagaaagagacaatctttccaacataaaccggtcaacgtatgacccaacagtgagtgactctgaaagtttagtgggcgaggattcatacacttttggtattgattttggcccatattggctggaacctttaggccgctgttttggagtatctcaaaaacagcttgaacccgaaatgttacgcattattcgcgatgattttgattttaaaggaacccgtaactgggaagaagatgagcgaaacaaacggcgttattatcgagacagagataatcatcacagccatggttcctatccacgtgttgatgattaccatttttatctctcctaccatgcaatgttcatctcggctggaaaactattggcaaccaagccattagtggatagccgttacgatgaaatagatgacgtttttcaggattggctaaaaaggcatgatatttcacgtagtgatgggcgctggctagccgatcgacgagatccacaacccgaaatcaggccaagctggattaacgatacttctgataatctcaatgaatggctgggatcaatttcggaaaacatctttgacgaatcattaagccctgcctctggattactgacagtatggggacactggtcagataagcgcaatgaccgaagagagtcgatttcggtttctactgcgttagtctcacccgaaagatctttatctttactccgggcgctacaaactactgaaaatgcatatgactataaaatccccagcactggtgaggatatggaaattgaccatatgtcttataagttaaagggatggattaaagacatcggtgaatataaaggcattgatgaacacgatccatgggctggcgatgtgacattcccgttacctaagcctgcgtcgtttatcgttgaagcaatgaaattaactacggataaagaccagcgggtatggcataccactcatagcaccgaaccagaaatgatatccagaatctggggtagcctagcagaaaaaaatgaagatgagaaaccaagtggttacaagctttacgcctcggtggagtttatcaaaaaaatgttaactacattaagcatggatctcattatagaggttggtgtaaatcgctactcgcggagtaacagatatggacggagtaatgaaaatgaactcgagaatatcccatcaagtaacagaatcttcctccttaaacatgacggaactttccgaacgctatacggcaattgtacaactggggaaaaagttggttga

SEQ ID NO: 189014 - DNA, 729 bp, Klebsiella oxytoca
atgacggaactttccgaacgctatacggcaattgtacaactggggaaaaagttggttgaagaactagcgttaaacaattctgttgatacgttaggccgttggatggctcatcatattgcagaactgatttacgacgctgaaaatactacggatgacactgtgcgcatcgcgaaacacatggagattaggaactctgtgtgggccttttggactaaccgctacgaattaccatttggtaataagccatttaaagaactagaacccatcctaagggctttagaaagtcttgatcctgaaaacctgctaccaaggtatttctttccctacccaaggctaactgatagagaaaaggaaacttcggagactcaaaaatggttaaaagttgccgaaagtatcgattcggcctcaaaaatcctgattgactattgtctctctttagctgcagaaaattctattgataaatctcaagaatgggtggaactggcacaaaaagctggattagacgacgacattgatctaattgaacttcgtattttccaattacgtgggaacccatccaacacaactaatcccagtagtgcacaacggcgagttctggaaaaacgacaaaaaaatcttgccgtatttctttcattagccgctcagttagacgaacaactcaaatcacaacttgaagccctaccagtaattgaggataaaccagaaaaagacgatgacgacgatgtttga

SEQ ID NO: 189015 - DNA, 1227 bp, Klebsiella oxytoca
atgtacaatgaagaaattaaagcttttgctcaaaggcaagagcagaaacttatcgcttctctggggcacagtagggagcattctgatcccagcaatgaagtaaggaacagggatgattatcagcgcgattatgcgcgtattctatactcatcttcatttcggcgacttcagggcaaaatgcagctgtttgaagttgatcccgaaaaattcaatagaaacagattaacacatagccttgaagtcgcgcagatagctcggagtatcgcatcagaccttgagctgaaacactccgtggtagttgaactggcagctctggcgcatgacattggtaatcctcctttcgggcactcaggggaaaaattgcttaatcggttatctgctgatataggtggatatgaagggaatgcccaagcgcttcgtatcttaagaaagctcgaaaagaaatatgctcactgtggcggtctggatctgacccaccgaagcttgctctctgtcatcaagtatccaaatacaaaatccattgctgagaaattcatttatgatgaagattatgagttctaccagcaattgcttataaagcatcggcttgaactgcaggcaggagagaaaactatagatgcacagataatggatcttgctgatgaaattgcctacgctgcgcatgatcttgaagacgcgcttagcagaaatatggtgaccattgaagacattgagtatgagttttttatctcagaaaagtacaaagatgctttgccccactttacagagattgtcaagaagtcaaaggaaactgctgctaaagctaattcaatgaagtcgtccgaagagttcgccatgatttttcgcaaagagcttacttccaatatagtaaatcgtctagtcatggatatttcagtcgtcatgagtaagcatggctttgaagaacttgggttcggaaagttacagaaactatcagaaggtctgaaaaaactgctatttaaagtaattatgcgtaagaggaatatactgacttacgagttcagaggtaacgagatcatcgctgacttatacgagttttataatcaggaagacaatttcaaatttttgccccctgaactcaagtttgcgataccggaagaaaattccactgactacaccagtaaaaaggcacgagctgttgttgactacatctcaggcatgatggatacgtttgccattaaagaatgggaaacccactgcaagaaataa

SEQ ID NO: 189016 - DNA, 1038 bp, Klebsiella oxytoca
atggcgatgattgatttatatagaagaaatgttgatcgtaaaagagatgaaatcgcgcgtttgattgatcaaaaagctaaagaatatgcaaaaataacaagcttaagtaataaaattcagtcagcaacaaaaaaaatgaactcatcgaagtcattaacgacgataaataataagcaaaaagaaatatacaaacatcaagcagatatatctaaagttgaaaagaaaatctcagaatttgaatcaaaaatctccagaaaaaataaagaactgcaagcggtgcaaagaaagtttgataatgaggaaatgaaagaatataaaaaacaccaagagcttcaagataaatttcaacgcgaacaaactagagcattatgcactgtcaataaaactttgtcggaacactctgaaatgataaaaaatttaagtgatttacctgaagaaattacggtgttgtttcttgcatcaaaccccaaagatcaaggacagttaaggttagatgaagaagttcgttctataaaagaaatgatcaggaaatcacatcaccgtgatgcagtgaaattggaatcatgttgggcagttagaccaggcgatattctacagtatataaatgaatatatgccaacaattgtgcacttcagtggtcacggaagcgctaatgatgaattagtccttatggataacaacttcaatactaaattagtgtcaatggaatctatcgttcaggcaatgagtgttgcaaatgacaatttaagactagtatttttcaacacatgctactcaaaaaaccaagctaataaagttgttgaacacattgaatgtgccattggaatgagtgactcaattacagatgatgctgcgagaaccttttctgcgcaattttattcatctttaacttttggtctttctgttgagaactcgtttaatcaagcgaaggcagctttaatgctagagggtattccagaacaaaatacaccaacactttttatgaagactggctacgatgcagctaatacatacattatcgcacaatcagatcaatag

SEQ ID NO: 189017 - DNA, 207 bp, Klebsiella oxytoca
atgagttattttgatatctcgcatgcagctcgcaaagcgcttaaagccattgaagaaagtgaactggaaaaatgtatcaataaatgcctgtatgaagaacaatcttattatcttcaggacttcagactctatgattgtggaccctatgtcacgcagcaactctgttgctttgaaaaagctgttactacacttcggatgtccaagtga

SEQ ID NO: 189018 - DNA, 228 bp, Klebsiella oxytoca
atgggccatgtatcgctgcgtcgggcgttgtatatgccggcgatggtgacgctgtataaaacagaatggggcagggagttcagggaacgactggagaagaacggaaaaaatgcaaagctgataatcggggcgatgatgaggaagctggcgcaggtcgcatacggcgtcctgaaatcaggacgcccgttcgatgccacactgcatacgaaaaatgcttgcatggcataa

SEQ ID NO: 189019 - DNA, 321 bp, Klebsiella oxytoca
atgtatatgaaaattagtgggttagtgatttcactgacggcagctatctccggacaggtccttgccgcagttcctcagggctatccggcggattatcaaaaggtggtggatgccgggattaaagaaggcaaagtggttatctattcaacgaccgataccaaggccgcaggcccgttaattaaagggtttgaagcgcaatatcccggcattaaagttgaatataacgatatgaacagcaccgaattgtacaaccgctatatcagcgaacaggcggcggcagcggcgacgtggtctggagctcttccatggatacggcgctga

SEQ ID NO: 189020 - DNA, 1137 bp, Klebsiella oxytoca
atgaaggaatgcctaattctgaagtgtatcttcctaatctcaatttatttatattccagtgttgcatttgcgaacgacggttgcgaaaattatggaagaaaatctgaagcatcgcaaacttacattaatccggataacaactcttttgaagtggtatccacaaagcggcttcatttctttagttccccgaataaagcttgcaaaataaaagatctttttttggtgccaggagatattataagcgggcatacagaatacaacggctatgtttctgcttcttatgcaaaaaatgagtcatggtcagtcactggatggcttgacaaatcacaactaaaacacatcgacataaaaagcaatcaccctataaaaaatcattgtgaattagtttctgatttagcagctactcaggcttttagcggagggctcaaaacaccaagcaatgcattcgcaacagcggttaagacaaaggttatgctctataatgcgcctgaccgaaactgcccaaaagaaaacacctttattattaaaggtgacaatgtgtatgccctcaaaaaatatgcagatttcattttggcacagtatgtgacaacttcgggaaaagatgttttcggctggataatccaatctgaactaaaagaattaaatccaactaccacagttcataataacactcaaattaatattattgactttatcgtaataaaaaataagaaatggattgggattggttctttctatagcaataaactttctggcatagatgaagacgaaacaggttcttcttatataggagatttccctaatactgtcggtgggttatataaatacacaaggcatagttataaaggtataagtttagtttcctcaaatgctaattatgataagaggcaatatacaattgatgatgaatatataatctcggcaattaacttagaaactccagcgtattctacgttacgcggaataaaagttggcgaccctgctgataatgtgtttaaagcctatcctgcggatcaggcacaaataacgcctgaaaaaatcggttacacgctaggtgatatgtatctggatttcacactaaaagctaacaaagtagcatcaattaacatggggatacctatccctggagaggaataa

SEQ ID NO: 189021 - DNA, 801 bp, Klebsiella oxytoca
atgaagcatctcaatttaagtttgtgtttgtcattgttgttatttgcaggcagttcaatcgctgcaactatctgcacatacagcaaaaattattattcttacaatccctctcaaaaacctgttcccaaagaagctacgtcaaagggacgagtttatttttattctttacccaaaagcgattgtaagacgagcacattcataataaataatgataaagtacttaagtatagagaaaacaaagaatatagtttcgtaaactttgttaataaaaatggtgctgtcgttgatggatgggtaaagaatgaagaaattgcccctagtgatgaacagaataatgagttaacttacggtgattttgcatggataggaaatggcaaagaaacctttcttttaggaaaagccacacctgaattaaataagtgggctaaagattccggtgtaaaactccctgatcccgacaatcacggttttaataatgggtttgaatcctggactttaacaattaaaaacgaaattgtgacaatatctcaggccaatgagataatagagaaaagattaggttttgatgatacgtatgtatcagcgatcacatttattgataataaatacaaaaccacacgaggcataaaagtcggcgacagctggaatatggtaacttcaaaatatggaatgggtagtcttaaagatactgaaaatggttgcagattttatcagtactttgatatgaagctaagcttctgccttgattcgtcgaatattgtgcagtctattccgtttgaaaactacccgacaaaaccataa

SEQ ID NO: 189022 - DNA, 606 bp, Klebsiella oxytoca
atgattaaaatcatgctatccatcttattatatggtttctcctgctatacttttgctggcgatttttgttcggagttgtccaaaacagctgagaaggaacaagaatatgtagatcattctatgaacatttataaagtcacatcaaaaacaagactttactttaatagcgcaccgagtgaacaatgcaagattaacaatgcatttataattaacggtgatgtagtttcaggatacaccatacttaatggttatttgtttgcttcatacttcaagaaaaatggtgattcagttgatgggtggcttaaattatcagatttaaaaaatactggatatacaagtggtccatcaagtgacgaacaaacagcttttaatattattccagatgtcattaagaagaacgcactgactacagcacctgaaaaatgtatcagcatcagtggagatgacactgacaataaatactacaaattcgctataaccaaaaaatcacttgaagaatgtaaaaacgtgcaactcactccttttagcatcttggtaaaaaaagggactcaagaaatttacacaaaccaaggggatgaaatagataaatttcacccaattgaataa

SEQ ID NO: 189023 - DNA, 618 bp, Klebsiella oxytoca
atgattaaatttaaagcacttccttttgttttattgacttactctatctcagcattttctagtgttactgatgatgattttgatagatgctcacaattcttggataaaatagtagcttccagtaatgcaagtttgataaaagagttgaaagtggataggagtctcattaaagcagatgttgacagtgtcagtggcaatgatataaatgctaaagttcaattcaataaaagtcagtcaactgacactccaggcgaaggctttcttttatggatgaaatatgattacctcaaattcaatttggaggatgttactattgatccagataatccagaaaaattaagttttgataatagatacgcatcagtatacctcaactgcctgaacaaaaaagtaattttcaaagtcaatggtgattcccgattacagttttataaagatgataaattatcaaccccagaaaacggcgtatttatcctaccaggggaatatgtggaagttgaaagaaactcagggggcgcttcgtatgttaaatatcaagcaaaggacggagtggtatattcttcttgggtggattctagccgcatacagaaatcttccccaggtaccattaaacactaa

SEQ ID NO: 189024 - DNA, 2661 bp, Klebsiella oxytoca
atgtggaataatagtgcatccgttagttacataaatagtcatgttgaaccaagaagtattgggaagtgtgctgcatacgtcagaagggcggtggaggctggtggtgtcaaaattaagattccaccgccaaggattggcaattccgcgtcagcatgtgattacggcccatcttttgaggccgtaggttttaaacctgtttatttttatacaggttcaggtccaacagacaccgcagttataccaggacaacaagcaggtgatgttgttgttattcaacctattgatggacatcctcatggccatattgctttatttaatgggacaaattgggtttcagactttattcaacttcgaggattctatcccggccaacaatatcgaaatgtaaagcccgcatatatcctttaccgttactctgacaacagtagccctgctccggaggcatcggcttcccaaaaaggaaaaatcaaaatagtctggccgatcccctccaacagtcggggaagtgagttccataatcaggaagatatcctctctcatatcgggggggaatccaccgggcagtatatgattggtcgcaatggcatgtggcatggcggtatacatatcacacatgcaacgacgccatggtgtgctctcagtggcaaagctcctgtggaggcatttgatttcccggttgcttttaaaggtgagcaggctgtgcgatgcatggctgacggcgaagtcgttgcttatcgtgtctgcaaggattatctaacgctaggctgggaatcaggtccgcttagcttttccggttcgtttgttctggttaaacactttattcaaccgggggagaaagaatccagcgggctgcatttctacaccctgtatatgcatcttgcgccgtattcagcttatgaagctgaagcagaaaatcagtgggtcattcaggatactctaagagcatattctgaaatggactggctgacggcaaaactgacttcagataaaacttctccgcaaattgcagggcacatgcctaaaggggccagagtggagtgggacccgacagacagcaatcttaacgccacaggaagtaacaagcgaaaatatggtcttgtgacgctaaagggtttaccagaagaaaccagcagtaccctcatacctggtcagcgctattgggttgttgtggataacaacaatattaagcctgtgccgggggccggtccaggctggtggcggcatttgcttcctcccgcaaaggaagtcatggtattcgataagacagtaagtctaagttctccatttgctattaaggccggtgacccgattggccacatgggctactatcaggcaccaaaagatggtggttatgaggcgcgataccaggtacatatcgaatgcacgagcatggatgataatctggagaatttcctgaccaacccagaaaaagtgggggagaaaaatccgctctggttgaagtattctcctggccttgctcttttcacaaaagatgttgcgaagggcactttcacaaaggactcgacgtcgacaacgcggacaggcattctaccgttgagtaaggtcataactgaaagtgatacctcaacaaagcaagaatactggcagttgcggccggaaaatgcctatgtgcccaaaggccaggcggagcctcaacttctgtcacagtatgatctggcgaagctaggcttcagaactgaaacctcagagcctaccagttttgattacctggatggaaaaaaccagcctgttggattcttccgcagccttatcaactcgctctatgaggctgcgaccggtgatacgcgaaccagtcatgccctggttaagcataattatcagcgccttcttgataaaattgatagtgggagcgaccgttactctccgatggaatactggagagcacttcataatcccgactatcgtgacaccatccagaaaacaatcgtaaaacatcccagcgattggtacttcaaaaaaggtgatgctatctggcaacctttcctcaatgcgctgaaaaaagaagccccagaatggaagaaatatagtgaagattttcttgataaaatggcatggatgcaggatgtctccactgagaagctgggcccctcgttatggcatatgcatcctataatgtttctaggggcaatgattagcataaaaaaacgacattcgggacttttcactgtacaagatgggaaagaagctttacgtaaaatatatgataaatacggtaaagacatgtctgtgatagttgaaagaatgtttcgtatcgagaccaaacactttacttctggtcaatatcaacattgtggtgctcctggtatggaggtacatggtgctccgccagcatacggatggagttctgactttttctcgcaacatccagaatatcaaccgactgggatttggagtaaaaaagaaggaagagggttaagtgggcagggagggaatgcccaagtcacagataagccaaaacaatttgtagtattcgattctgttgagagttcaatggaatatattgtgtactatattaataagcacggcggaaactatgcccgatggtactcaacccaagactcagcacaaaaactatatagagaagaatgtggggcaatcaaacccaaattcacgaatgagttttctgaggtaaattcatga

SEQ ID NO: 189025 - DNA, 540 bp, Klebsiella oxytoca
atgaaattatcaaccccaagcatattccatgctattctttacaccttcctccttacttgttcacatgtggcgctttctgctgaatctacaaccccagcagatattgttcatgatttttactctgaatatctcaaggctgatgcaggaaataatgatgcaataatcaaaaagtacgtgtctgaccaactgatgaatagcatcactgattccactatgtgcaattatgattctgacgattctgtgtctgcatcagaactagaaaaaaaatgttcacaaaaacacgagtgcagacaatataaagggaactatatttgtgactggtacggtgtttgggttgagtctgacgtcaattatttcactaagtctcaagatacatacccctcttggaagctgaatattaagaccagtactattacggaaaatggaaacaagtctgtgattggggttgttctgggtgatgattctgaacctaaaaattcactccatgtttcccttaaaaaaatcgacagtagctggaaaatcatcagcgtaacggaataa

SEQ ID NO: 189026 - DNA, 483 bp, Klebsiella oxytoca
atgaaaccaaactcaaaaaaatcactactgttattcactttcattttttcgacacttccaaacctcagcgttggagagaataataacccaacactcaatgcggaaagtccagagttcgttgttaaaacgttttactctgattatctcactgcatggaatgatcctgatatggagagtggtgcaaagaaaagccagaacgcaattgatacctatacaacgaaacatcttcagcaacttaatagtgataatgatactggcgctgattattttgtagatgctcaggacatatgtcctgactgggtaaatgaaattgcagttaaaacatcgcctatgggcagtgataaggctgccgctgagttaacacttggtcgtgctgacagtgaatcaaaatatgatatcagtcttgttctcaaaaatgaaaaatggctaatgaattcggtgaggtccatattcagaaaaacaggccattgcaacgagaactaa

SEQ ID NO: 189027 - DNA, 240 bp, Klebsiella oxytoca
atgtatcagcagcaacatattgaatttattatccagaaggcaaagaaacggctcgatctgcaggaggcccctggctgcaccaaagcgggatggctaatgatcaccgcattattaattgagtcatgggatatttattccatggcgtttattttattcgccctgaaagatatttatgagcccagcagctggctgcttggttttaccgccgccggcacccagctcggcgcggtggtcggctga

SEQ ID NO: 189028 - DNA, 294 bp, Klebsiella oxytoca
atgacgcttaacgctatccgcatcgccaggccggtcaccgacctttcactcagttgccacatgtactgcacaggccttgggctggagcaaatcgcgcagtttgccgatcatgacggctttagcggcgtgatggtcggacgcagcgatctcggctggcatcttgaattcaccctctgccatcatcattcagtggcgccctctccgggtacctctgttcttttttatgccttctgtgaattcctatatgtttttgatttaacgggttggggtaaaagtctttctgctatgttttga

SEQ ID NO: 189029 - DNA, 480 bp, Klebsiella oxytoca
atgtggcttatgaagacattactaacatcgcggtgtgttaatcaacggggagcaggtcacgttgccgaagcggcgttccaccgctcccagcattacgtcctgtactgtttcactgtcgaagccgcccgtagtgactgcccagtgcagtgcctcacggtcacagcagtccagcgcgaacgtgactcgcagtttttctccgttatcacagcggaactcgaacccgtcagagcaccatcgttgattgctttctttcacggccactttgccagtatgtgcccgtttcgatggcggtacagcggtttttcgctcaagcaacagcgcattctggcgcatgatcaggtaaacacgtttggcattgatcgcaggcataccatcaagttcggcctgtctgcgaagcagcgcccatacccgacgataaccatacgtgggcagctctccgataacatggtgtatacggagaagcacatccgtatcatctga

SEQ ID NO: 189030 - DNA, 366 bp, Klebsiella oxytoca; identical to SEQ ID NO: 181418

SEQ ID NO: 189031 - DNA, 903 bp, Klebsiella oxytoca
atggattggactaaagttcctaatggtttaaaagagcgatatacgtctatttcaaacatatcttatggccttttaaagatggctatgctcgaggaaataaatataaatcctatgccagtatctcctggcggggatagcaagtcttatgaggttttctcaagcgagttcaatgctataatgttggtggctcatttttatgagaatttgatgtattttgaagacaagcgtctagagttggagggaaataatgattttcaaataaaaattcccgatttttattttcagcatccgtctttaaatgcgagattatcaactggatataaagaaagttcaattatttcagatgttgtaagaaagacaaaacaaaaactaaactattcaaaagaccagtcttttgttctaagtcaattacataagcttgaatttatatccgttttctctcatctggaagcttacgtggaaagtttgctagttgagttcgtcgggcttgaacgcaaaagagccgcggcaaaagttagaaaatcatcgctgccagatttaatgactgaagttttaaactcaataaatcctatgataattgaagtgatcaactatctggacaaggatgcgctgcggttcattagattctgccataaactgaggaatttacatacacataacctggggattgttaatgattacttttatagcgaatgtattaatgatggatactttgtgcatgatgtctgtagtgaaacagaggagcctgttcttgaatattcaagaatgaattttgaatattttgattatgtttttaaagttggaaaagttgtaaatctatcttctatgttgcaaccttttagacttttctctagagaaattgtttttattacagaagcgttttgtggttcgggtggggattaa

SEQ ID NO: 189032 - DNA, 246 bp, Klebsiella oxytoca
atgtcggtcacatacgaagaaagtatggagcatatggagacgtttggtttaactaggctggaaactatgcacattgctgaatatcagaaagcacttgaagaggaagggttcttctgggattaccagcacggggttgttatgcatactttatctggcgagcgtgttgtcaccaatacagaacaactcgatgctttgctaaagcatcttgaaagctataggaataatttgtctgatccgtcgatataa

SEQ ID NO: 189033 - DNA, 216 bp, Klebsiella oxytoca
atgaatttgttcgataaagccgtcatgcagaatgttgaaaccttcccggcccatagcggacagcctgaacccgctttcgtcgtcagcaacaaccatgtcctgatacatacgcagcgccagctgctgaccaaggtcaggcccgtatttctcaatggcgccggcctcaatgtgattagcgagtgcaaagcgttccggccctgggtagacgctgattga

SEQ ID NO: 189034 - DNA, 552 bp, Klebsiella oxytoca
atgatttttgaaccagacgagactgatcggcttcgccgggccgagacttccgacattcgcaatcgactggcccgtcagatatcaatgtttgtgggcgatgaagatgagcgaatgacatcgctaccaggtttgagcttcgccaaggtcagaaaaccaatgccccgtagctcttatttgtatgagccaagcatctccatgattgtacgaggcagcaagcgtgtccagcttgggggaaccacctacctttatgatgagtctcgctttctactgacctccgttgacctgccgacagtaactgaggttttggaagccacagaggcgtctccttacctttcactacttatgcggctgaacctacctgttgcaagggaaatgattgccgaaatggggggacccgaagcgccgcttcctggtggaacaactgggatgtcgacgggaccggccaccgttgacttgtttgacgctattgagagattggtcagactgctcgatcatccgcaagaccttgagcatattggtgccctgaaccgtaccgggtttcttggagactaa

SEQ ID NO: 189035 - DNA, 768 bp, Klebsiella oxytoca
atggacatgagcacattaaaaacattgtctggttcggtagctttggttaccggtgcgtccagcggtattggtcaggcaaccgcattgaaattggccgacgcgggcgcccgtgtcgcccttattgcgcgtcgcgtcgatcgcctcgaagcattggccgagaaaatccgtggagccggtggacaagcgctgccgatcgaggcggatatcacattacccaacgttgcaagccagacaatcgagcaagtcatctcagagtacggccgcttggatacgctagtaaacgccgctggagtcatgcttaacgggccgtcgattgacgctccgctcgaagagtgggatcagatggttgacggcaatctacgtggcttaatgtacgtcacaaaagcagctttgccgcaccttatcgcctcagtcactacaagtctaagaaaggtcgttgatgttgtgaatatatcgtccgttgcaggtcgtgtggctgctgcacaggtcgcaatttacaacgcgacgaaatttgccgttactggtgctacggaagcttggcgacaagaatttaccaaacaatcagttcgtttctctgtcatcgagccaggagctacggagaccgaattgtggaaacaagaggggcaatgggagagcttcaaagtggcgttcggcgaggtcgagcgcctgtatgcggaggatatcgcaaaagctgttgaatttatcgtgacgaatccgaggcgcgtggcgatcaacgaaatcgtagttcgtccaacagaccaggcctga

SEQ ID NO: 189036 - DNA, 1059 bp, Klebsiella oxytoca
atgaaaaccttcggctatgctgcgcaaaatgcgcagagtgggctcgctcccatgtcattcgaacgccgcgcgctccgtgacgacgatctagcaatcgaaattaactattgtggcgtctgccactctgaccttcatcaaatccgagatgattggaggagctggaatccaacggtgtacccgagtattccaggtcatgaaatcatcggtacggttatcgaagttggcccaaacgtcacgcactataaaatcggggatgcagtcgctgtcggaacaatcgttgacagctgccgggtctgcgatcagtgtcgtcgtggtgaagagcaaatgtgtcgggaattccctaccatgacctataacagcagtgaccggcatgacggcaagacaactcttggaggatattccaaacacattatcgttcgtgaggaatttgtgttgcggatgccagagggtctcgatgctgcgcgtgctgcgccactcttatgcgctggcatcacggtctactcaccattaaggacctggaatgtgggccctggcagtcgtgtcggtgtcatcggaataggtggtcttgggcacctggctgtgaaattcgctgctggccttggtgctcatgtgactgttatcacgcggacagaggccaagacggccgaggcacgtgcgttgggagccgatacaacccttatttctaactcggatgacgcaatgaaagcggcaacgtcttcgttcgacgtcatcattgacaccattccggttgagcatgatgtatctgcatatgttcaactgctcgacgtcgaaggagcattggtgatcgtcggcgcgcttggcaatatggccgggtttaattccctaccgttaattatgggacggcgctgtattaccggctcgccgtcaggaggcatcgcagaaacgcaggaaatgctggatttctgtgggaagacagggatattacccgaatgcgagatgattgctatagcggaaatcaatgaggctttcgagcgcatggagcgcggcgaagtacattatcgcttcgttattgatatggcaacgctatcggacgcctaa

SEQ ID NO: 189037 - DNA, 894 bp, Klebsiella oxytoca
atgcagatttttatcgcggcagtggatgaaggcagtttcgccgccgccgcgagacgttttaagctttcggctgcaatggcaggaaagcatgtcagcgctatagaatctgatctaaatgtacgacttcttcagcgttcaacacgccgtcttagcctgacggatgccggtgagcggtattatgaacgttgcaaagttattcttgaggttcttgaggatgcgaaccgggaagccagtgatgttcagaaaacaccgaaggggttgcttcgcgttgcagcaccggtcgccttcggtgcaatgcatcttggtaggatcgtatcacgctatctggagcaatttccggaggtcagtctggacgttgtactggaggataaatacgccgatctactcgaaaatcgaatcgatgttgccatccgagttgggcgtcttgaggatccgacactggttacgcggcggctggcaccttgcaggatggttttgtgcgcctcaccggagtatttgaaaaaacatggcacaccagagacgccggatcatctttcccgtgcgcctcgactggcgttcagccaggcggtttcagcgggagactggacgatttatgatgcacaaggcaggccgcacagtattgaaggcccatgccgtatgactgccaataacattcagttgcttctcgaatctgtactggccggaacaggcattgcttacgggcccaactttgtttttggcgagcatattaagcagggcaagctgataaagctgctgccagcataccggacgactgaacttactattcaggctgtttatcccagcgcgatccgtattcctttcaaggttcgcagctttgttgattttattgctaaagcgttaggagatacaccgctgtggggagaagaaaattga

SEQ ID NO: 189038 - DNA, 1161 bp, Klebsiella oxytoca
atgaaaattaaggtgaatggaacgggtatccacattgagcaacagggcagcggtgaaattgcactggtatttttgcattattatggcggttcatcccgtacctgggagagcgtgataagtcagttacctgaccactaccgcacagttgcaatcgaccaccggggctgggggggctcagacgcacctaaatcaggataccgaattggtgaccttgctcgggatgccgaaggggttatttcagcgcttgagcttaaacgctacattcttgttggccattcgatggggggaaaagttgcccaactgatggcgtcgcgtcggcctgcaggtcttgaaggcctgatgcttatcgctccctctccaccttcacctatgcgtctcacgcctgagcagcgcgatacgttatccagcgcatataacagccgcgaatctgtcggctttgtgattgataatgtcctgacagcgggggcactaagttctgctctgtgtgaacaggtaatcgaggacagtttgagggcctcatccgaggccaaagaaggctggcctaatacggctatcggcgaagacattacccaggaagtggactcaattaatgtccctgtgacggtcatttcaggggagttggatcgtgtagaccttccggctactctgcaaagagaattgctgccccttatttcacatgcatcaatgtatatcattccagacgtcggacatctcttgcctctggaggcccctacagaggtcgccagccacctgttaaaatttacagccgccattgaaggggggacagcagtctaccattcgcctgtcgaaacgatagccgcgtttgatgatgctttcaatgcaggcagggttgatgacctgctggctctgttcagtaaccgtgccactatgaaaatgactgatggtgtggtcatcgaaagcgatcctgaaaagcttcgggacacttttttgtcactgacatcatcccagccagttatcagaaaccatatccgctcgatcctctccgccggtgaaattgctctgcttattattgactggactttgaccataaccactaaggatagaacactgcacgaagagtccggtacagcaacgcaggtgttgttgcgaagcgttgacggaggttggcggctgctgatttcaaatccatcaggaacgtag

SEQ ID NO: 189039 - DNA, 396 bp, Klebsiella oxytoca
atgtctaacactaacaccaattttgagatgaccgggatcctgttagggcaagaagtccgtaaacgtaaaactcctcaggaaaagatcgccattatccagcagacgatggagccaggcatgaatgtctcccatgtcgcccgcctgcatggcatccagcccagcctgctgtttaagtggaagaagcagtatcaggaaggcagcctcaccgccgttgcggccggagaagaagtcgttccagcttctgagcttactgctgctctgaagcaggtccgggagcttcagcgcctgctgggcaagaagacgatggaagttgagatcctgaaagaagctgtggagtacggtcagtcgcgaaaatggatagcgcacgcgcccttgttgccaaaggacggggaatag

SEQ ID NO: 189040 - DNA, 729 bp, Klebsiella oxytoca
atggttaggggattgttactattcggaattattttgatggtaattattttgatggggtacttctcttttttaccggcctcacaatggtggtttatcaaaaatatcatatcaaattttgattttgtaaaagcgctcctttcaattctaatattatcattgattactatatttttgtttttcggtattttagagaaaaaatactcattaaagttagaaaaattaactttcggtgggttaaatgttttatttgatagttctgacttgctatataaaagatctgttcgcaatttccttgatactaaaagaagtgtgttcaaaattgatccacattttgattcatttgaagaggtttttaactctttatatgatatctataactttattcgtgttgaaataagagtactggatgttaagcggaaaagagatatggagttgtatggtatatctaataaaatgctaaaaaaactgaatcaactgcttaccaaacatcagaataattacaggcgttggcataagtacatctcaacaaacgatattgtattgacgagggataaagattctaacggtgaaaatgtttctttgatttatcatttaacaccgattggagtaatccagactcattattatcatttcagccagttgatggctgattttgaatgcattaataaattcttctgtgaggaagttagtgttgtatttaacatcgatattgctaagtgggatgagtaa

SEQ ID NO: 189041 - DNA, 612 bp, Klebsiella oxytoca
atgcataaaacttttctgagttatcatcatgcaaacgaacaggatttgaagaacggaatcattgaagcatttgctggtgcgtcatttattaacaagtccgtcagtgacggggatatcagcactaatgtcagtgaagattacattatgcggaaaattcgggaggactatcttggtgactctaccgtaacagtagtactcataggtacagaaactgccagcagaccttttgttaactcagaaattcaagcatctttatggggggagaatcctgctggattaatcggggtaattcgagatgaaatatattcgagcgtgtttagctcgggtgtgtgtagtgatacctcttgcaattgcgggattggaattagaaccattgattggggttatgaacattatctcccttggttaattaaaaaaaatcatagtttttcaaaactcgtcccccactatgatgatatggatgtttattgctccctggttaagtattcagattttatagggaatagtgaattttatattaaccaggcatttgataaaagaaatattatggaacctgcagcaaagaaaaatcccgctgatgttcctgctataagaactaatttactatggtga

SEQ ID NO: 189042 - DNA, 513 bp, Klebsiella oxytoca
atgtataataccaaaataattaaaagaaaagtttttttaaactaccaccatgatggtgaccaatattactatgatgaattctcaagaaaatttcatgatgaatatgaggctgtaacggataattctcttgatcgtcgagttgacagtgacgatattgactatgtcatgcgacgtattcgtgactattatatcgcagggacttcatgttccattgtattggtcggtaatgaatcatggggaagaaaatatattgactgggacattaaatcgacgcttgataaacaacatggacttattggtgtccagttgccaacattgttatcaaattcttatggacaagtgactgtgcccgctcgactcagtgataatattgattctggatatgcgctgtgggtaagttgggctgattttacagctagcatttcatcgtgtagggaatatatcgaacaagccaattgtcgtagtaatactctgataagaaacactcgtgaacgccgcttaaggaatgcataa

SEQ ID NO: 189043 - DNA, 1194 bp, Klebsiella oxytoca
atgcttgagacgaatttggcaaaaccatttctggttgtttatatcatttggcacccggatttcgccggtggtgctggactggccgaaatattgcgtggacactttcgtcgggaactctatcagaatgttgctggaggaaccggtttaagtgttatttttcgttctgagcctctacctaaaacggggaagccgctgccgatcaatttttcagaatcagagaccaccgcagtcctcatacttgcagaatcatgtatggcaaatgatcctgaatgggggacttaccttcgggagctatccacgcagtcggaaatagctggactaggtacacatcttttccccattgctattgatggagaaggattaaatctgggactggaagagcaggcattacgctgggaccaatggatacaggatgggagcaacgatactgcaaaccttcatatacgattgattagtgagcttacatacgaattttgcaggatgctgcgccattacctggaacatctgaaacaaccagaaaaagatgaagatgagttgcttaattatctcaagaaagttcagatattccttagccattctaaacatgataaagatggagagcggattgctcatttgatacgtgagcaattacatagtggacatgggttaagttcattctttgatgtccatgatatccctgccgggcttcggtttcatcaggtgctattgaaacagctggcgcaaagcgcagttgttgctatacataccgactcttattcttcgcgtgaatggtgtcgccgagagattatagaagctaaacgtaatagtgtacctttagttgttgccaactgtattagcgaattggatgaaaggggatttccttatatgggaaatgtccccatagtgagaatggatccacagcaggctgaacgaattaatatcattattgcacgactgcttgatgaggttctgaaagattttctgtggcgctgtcgtatacaattggttaataccgaacaaagtgcagtgcagtttgttccgcgtgcgccggagttaatctcacttgctggcttaaagttccacggtatcgggcagcctacaattgtatatcccgacccacccttaagttcggaagaggagcgcttatttgaagaagttaaacccggtatcaggcttagaagttttaccgaatggctggcagagggaacatcatga

SEQ ID NO: 189044 - DNA, 819 bp, Klebsiella oxytoca
atgacttatcgtgaaatgcttagtcagcatgttattgcaatatctacatcagatagcccagatatgcctgtattggggttaagtcaacagcatttatatgacgcgatgacagaaattgcgcgtcatttattagccttgggagcccggattgtttatggaggagatttacgtgctaacggttttactgaactgttatttgagttagtagcacgccatagaagagatgcggatgagggggatgaacgttccagtatattgaactatctggcatggccggtgcatatgcaaaaagattccagtgacttggaaaggctcagtgcggacctgaaaggaatggcaaggcttgttttattcaatcgggatggcgagtcgttgccaatggcagaacgagcccattacatagcaactattccttctgatgaagattgggaaaaaggtttgacagcaatgcgacatgctatgttacaagacacacatgcccgtattattcttggcgggcaggtagataagtataagggggcaatgcctggtatagcagaagaggctatattatcacttcgcgctaaacaaccccttttcattatggggggctttggtggatgtgcaaaagatatcaccgagtctctgaatattgtggcatctgacggaatgcagaaacgtaactggagaggtcgggaagaattttctggtttctctttccaggatcttaataacggactcactgaggaagaaaatactgtgctagcacagactccgcatgtggaccaagctatcgccatgattttgagaggacttttccgattggtaaaacgttgctga

SEQ ID NO: 189045 - DNA, 1128 bp, Klebsiella oxytoca
atgaagtcagcggttcaaacagcattgcagaagattgacattcaacttgaatccattaaagaaagcgtaaaagaacatgcagttgaagtggctgaaaacacaattaaacatttacatgatatatctcctaatcttgctgccgggttaatcccaaagtttaaagtggaacctaagtgggaaaatattttcaagctaacattggaagatgatagaggaatcgctatcaataaacgtggtagtggtgttagacgtttagtcctgattagtttttttaaagcggaagcagaaagattgcaaaaagaattcccagataaaggagttatttatgcaattgaagaacctgaaacatctcaacacccatctaatcaaagacttcttattgatgcatttcaagaattagcaaatgctgataaatgccaagtattgattaccacccacgtccctgcacttgtggaaaagatacctacagaatctctacgccatataacccgaacactcgatgatggtttagaggttaaaaatggtaatgatgatgtgctaaagaacatagcgaatgatcttggcgtataccctgatagtagggcatctgttcttgtatgcgttgaaggccctaatgatataaactttttaaagaatatcggtaaaatttatctcgaccaaggtgttccaaatgttcctgatatgataaatgatccgcgtatagttttcattccaatggggggacatactcttaaagattgggttaataataattacttaaaaattctaaataaacctgagattcacatctatgatagagatgttgccatccctcctcagtatgaaaaagaatgtaagtcagtaaatgctagaaatgatggttccatagcattcatgactgaaaaaagggaaatggaaaattatttacatcctgatgctattcaggcggtgtttggtgtaaaaataaccatagatgatacgacagatgtatcaacagaggtatctgctttaacacgttataatgaaagtaaagcgaagaagaagataaataaatttgctacagcaaaaatgagttatcaaatgctcactgcaagtgatgcaaaaggcgagacattaacttggtttaatgctatatatgcgaaattataa

SEQ ID NO: 189046 - DNA, 204 bp, Klebsiella oxytoca
atgagcaagattaaatttaagtgccctggctgcggacatgatctcattgtacgtagtggaatcaaaatccagagcatggacgatattgagggaaccgtctgcagcaactgtgaccgaaccattcacaagaatgatctcgttagccagtcgagaaagtacgccgagaacctcgtccgtgacatgctcgggaagcacttcaagtaa

SEQ ID NO: 189047 - DNA, 591 bp, Klebsiella oxytoca
atgaaaagcaaaaggattttcgatttgtgcgcatcactacttctgatactaatggtttcacctgtcttaattggtgttgcaataattatttcattaagtggacaccctcctatttataggagtaaaagaattgggctaaatggatgcatgtttaattgttataaatttacatcaatgaaagacatatcaaccttgccaatagagacacaaaataatatattgaaagaattacatactaagggccacatgaagaatgacccacgtgtaactaaatttggaaaatggataagaaaaacgagcatagatgaattacctcaactatttaatgttttatttggaaacatgtcacttgttggcccaaggcctatatctcaatatgaagcagataagtacggaaaaaaaattgagtattataaaaagtccacgccgggtataactgggatatggcaagtttctggcagggatgaggtaaaatacaagcgaagagttgcaatggatattctttattataaaaaaggatgtttatatttcgacctatttattttattaaaaacaccggcagtggtatttaaaatgagcggggttaattaa

SEQ ID NO: 189048 - DNA, 627 bp, Klebsiella oxytoca
atgtcaagagcggtagaaaatgatatagaagttcacattgctgtagtaacaattaaaggtgagtggcatgtgagaaatggtatctatgttagcagtgaaacgagaaaaaaagaacttacaaacgccatgctcgaagccggggcgactcttcatatcataaataaaattaatgataatgaggattttgatttgtgttcatccagtaaaagtagatgtgtaaatgcgattgacttacttattgaaaatataaaaccagatattattttcatccctgtaccttcattccatcaggagcataaatgggtttatgaatgctcaatcgcagccaccaggaccacaaaaaatgctgattcacccaagtctgtaatagcatatgagtatccacctgctggctggggggattcaggatcatggagtcaatcatctggatctatttatgtagatataagtaaacatcttgagagaaagatatcaatacttggtaagcatgagtctcaaatgtcaaatgtagagaactcgctgatatcattggatgcagtaaggagattagcatcctttagggggcttgaatctggtgtgaactacgcagaattattttatctattaagaagcaaaataacatattaa

SEQ ID NO: 189049 - DNA, 672 bp, Klebsiella oxytoca
atgaaatcccctcacctaatatctactcaagcagcttttttctttgaagatacaataaacagacctgataagttattcaataaaatcaactcggatattggtgaattaatagattcaatgcctgagacaataaaccttcctcctatagcccctgcggacattcctagagtagtgggtcactcatcaaatggtgaatatgaattaagcgtatcactcaatcgagtggatataaaaaaacaatatgccgacccattgctcgaccaaggttcaattgaaaaattcagagcgatatgcaaacttataatactatcggtatcttcagatatgggtatatctcgaattgggttagttagcaacctttacattgaaagcagcaatccctctttagaaatatcgaggaaatatttaaagaaagaagatccaaacctccttgaaataaacctaagaacgaataaagagagtaaagaatttggcctgagctttaataatataattttaattcagatgggaaatgtacagtccccaagctataacggcaaagcaatcattgtgcaagttgacaccaatacgattgaaacaggtggctgcatacaaaaagatataattactgacatatttattaaaaaatcatccatatataaccctgctacaattttagaaaggatacagtga

SEQ ID NO: 189050 - DNA, 2844 bp, Klebsiella oxytoca
atgaaaaatataaatgtgacagtgaaagaaactggtgctgaatacaccgtcgatggcaatcaagttaatctcaatacgcagtcagtggtcctcctgcacgttaagcgtgaggatattcgttcatatacccgacaaggtaatgatcttgttctgaaactccaaaacggtgacaccgttacaattaaaaactttttcgttgtggatgagcatggacagcacagtgatttggttcttatggatgatgagaccggcgcgctatggtggctagaaggtgcgggtaccgatggggcacactattcgctgattagcgatctttcagaagtcatcgcgaccggtggcgcgggacaaagtattgccggttgggttatggctggcgcggctttgctgggtattgcggcaatgttcgccggcacctcaaacaaagaccaccactcttcggtttctgaaagcgattctgatgctgatagtgattcagactccgacagtgatacggatgctgacagcgatagcgactctgattcagacagtgattctgattcagatagtgattcggattcagacagtgattcggattcagacagcgattccgactccgacagcgactcggattcagacagcgattctgactctgacagtgactctgactccgacagcgactcggattcagacagcgattcggactccgacagtgactcggattcggacagcgactcggactctgacagcgactcggattcggacagcgactcggattcggacagcgactcggactctgacagcgactcggattctgacagcgactctgactccgacagcgattccgattctgacagtgattccgactcggattcagattcagatagtgattcggatgctgacagcgacgcggatagtgattctgatgctgacagcgactccgatactgataccgagctacctaccgcggcacagaacatagcggtcattgacaatgtgggccccatcaccggtgtgctgcattctggagatgtcactgacgatacgaccccggagattaaagggactgcagaggctggggcaacgataacgatttatgacggcgataccaaactgggttctgtcgtcgcggatgaaaatggcaactggagcttcacgttaccggagctgagcgagggttcccatagcctgagcgcgacggtgacggacaaagccggcaacgtcagcgagcgttcgccggcgtttgaactgaccatcgataccactgcgccagcagccagcattccgcaggtaaccgacaatgtcgcagagcacaccggccagctgcagagcggggatcttaccaacgatgcgacgcccaccctgaacggcacggcggaagcgggatccacggtgacgatctatgacggcgacaccgtgctgggcacagtggttgccggcgaggatggacgctggagcttcacgccagctagtctggaggaaggcgcccacagcctgagcactacggtaacggacaaagccgggaacgtcagcgaacgttcgccggcgtttgaactgacggtagacactatagtgaacccggttagcgatctgcaggtaactgataatgcaggagaagacacgggtacactgaacagcggtagcgtgacggatgatgatacaccaaccttgagcggtacggcggaagcgggcgccacgatcacaatttatgacggtgataccgtactgggcaccgcgattgcggacgaggacggacgctggagctttactcctggcgcactggctgaaggatcccatagcctgagcaccacggtgaccgatctggccggcaacgtcagcgaacgatccccgatatttatattaactgtcgatcttagcgatgacaccgactccgacagcgactcggattcggacagcgattcggattctgacagcgattctgactctgacagtgattcggactccgacagcgattccgattcagacagtgactcggattcagacagcgactcggattccgacagcgattctgactccgacagtgactccgactcggacagcgactctgactctgacagcgattccgactcggacagtgactcggattccgacagcgacagtgattccgactctgacagtgattcggattccgacagtgactccgactctgacagtgattcggactctgacagcgactcggactctgacagcgatgctgactctgacagcgattcggattccgacagcgattccgactccgacagtgactccgattcagacagcgattcggattctgacagcgattctgactcggacagtgactcggattcggacagtgattccgactctgacagcgattcggattcagacagcgactcggattctgatagtgattccgactccgacagcgactcggattctgacagcgactccgactctgacagcgactctgactccgacagcgattctgattctgacagcgactctgactccgacagcgattccgactccgacagtgattcggatagtgacagcgattctgactccgacagtgattccgactctgacagcgactcggactctgacagcgatgccgattccgacagtgattcggattctgacagcgattcggattctgacagcgactcggactccgacagcgactcggattcggatagtgactcggattcggacagcgattcggactccgacagtgattcggatagtgacagtgattcggattcagacagcgattccgactctgacagcgactcggactcggatagtgactcggattcggacagcgattcggactccgacagtgactccgactcggacagcgatactgaatcgccacggataacctag

SEQ ID NO: 189051 - DNA, 192 bp, Klebsiella oxytoca
gtgaggcacaaacttgtaaaaattaagaatatgctgcgcacgcggttcgctgaagtaaacgccacgttcctcgccgaatttcagatcatcaaggaagcgctggcaagcgaggcgaacaaattcgcaggcaatgatattccccgccacgacgcgctcagcgtagcgtatgccatctgcaactttagccattag

SEQ ID NO: 189052 - DNA, 246 bp, Klebsiella oxytoca
atggtcgaaatcaccgacgcccagcagattcgcctgaacctgctatccaccctgaactatgacactgccgccgcaaaagtcgctgtagagtttgttcaggatagtccgcttaagtaccagctattcatccagcaatacagccgtgtcacatcagagactgaagtggtggcaaagacgatgaaagcagtacaggaagcaactgaagcgctgccgctcttcgataccagcgctgaagcaaacagctaa

SEQ ID NO: 189053 - DNA, 492 bp, Klebsiella oxytoca; identical to SEQ ID NO: 83795

SEQ ID NO: 189054 - DNA, 498 bp, Klebsiella oxytoca
atggtaattagaatgataaaatttgtttattataaccaagataaaatcgttaatggtgtaaaatcatcaggaaatcagttcgaagtttttgaacatttaaaatcattctcagggattggggattttctagcatatcaaattttcatagatctgacatacatacccaactttccgtttacagaattgaactttgttatttcaggtcctggttgtgaaagaggaattaattggattttttctaatagagatggaatgaatagcgaagagtgtttattctggttcactataaaccaaaataatatcgctgaaaagtatagtgaaaattggaacatggatgaaatattccatttcctgcctaaagaagaaagagtttacactttaatggacatggaaaatagtggtgcatgcgagatagataaaagatgccgaactaaatttaacaataaaaggcctaaacaaaaatatcattttataattagcaaattacaaaggatttaa

SEQ ID NO: 189055 - DNA, 813 bp, Klebsiella oxytoca
gtgtcgcgtgcgcaactgagcgtcagggttcaccggccatctgactggcaggatcgcagacggcagtcccgttctgacgataccgccgtgttatcccggataaacacggcggtggcagagctgccgacgtatggttaccgtcgggtgtgggctctgctgcggcgggagtcagagcgggatggtctgcctgtggttaatgcgaagcgggtgtatcgcattatgagagctcaccatctgcttcttgagagtaaaccagcagttcctcacaggaagcgcgcccgcaaggggcgcgtagcggtaggtgaaagtaaccgacgctggtgctcagatggcttcgagttccgctgtgacaacggtgaaaagctgcgggtgaccttcgcgcaggactgctgcgacagagagattatagactgggcagcgagcacaggtggctatgacaaagagacggtacaagatgtcatgctgggcgcagtagaaaaacgcttcggaaggcaactgccaacggagccgctggaatggctgacggataacggctcagcctacagagcacatgaaacaagggcgttcgcccggatgctggggcttgagccatgcacgacagcggtgaggagcccggaaagcaatggcatagcagaaagcttcgtgaagacgataaaacgagactatatcagcatcatgccaaaaccggacagccgggcagcggtgatgaatctggcggtggcgttcagtcattacaacgaacatcatccgcacagcgcgctgggatatcgctcgccacgggaatatatacgcaggaagttatcgcaaccgtaa

SEQ ID NO: 189056 - DNA, 396 bp, Klebsiella oxytoca
atgtttaacaccagtcagaataataagatggttgaagtgttatcgggacctgagcggcgtcgccgtcgtactccgcaggaaaaaattgccattattcagcagactatggagcccggcatgaccgtgtctcatgtcgcccgacttcatggcatcaatgctaaccagatcttcaaatggcgcaggcagtatgaagacggctctctgaccgccgtggcatcgggcgaagaggtcgtccccgcatccgaacttgctgcggccaataagcaaatccgcgagctccagcgtcttctgggcaaaaagacgatggaagctgagatcctcaaagaggctgtggagtttggtcgggcaaaaaaatggattgcgcatgcgcccttgttgcccggggacgacgactga

SEQ ID NO: 189057 - DNA, 171 bp, Klebsiella oxytoca
atgtataacaatcagttcaatgcctcgacttttatccctgttgtcggtttgctaacgggcggttcccagactcagtctagaactctcgaaatcgacttcaatggagaaaccgtaagcaaatggacattctctactgataataacaatacaaaatctggcattctccagtaa

SEQ ID NO: 189058 - DNA, 870 bp, Klebsiella oxytoca
atggcctttaaccacaacttcttcctgcttgatggacagcggctggccggctgcgatgcgcagctgctctttaatcaggtcgacgccggtgatcatttcggttaccgggtgttcaacctgaatacgggtgttcatttcgatgaaatagaactcgccgttttcgaacaggaactcgaaagtacccgcgccgcgatagccgatatcgacgcacgctttggagcaacgctcgccgatatagcgacgcagttccggcgtaatgcccggcgctggcgcctcttcgaccactttctggtgacgacgctgcatggagcagtcgcgctcagccagatagatagcgttaccctgaccgtcagccagtacctggatctcgatgtgacgaggattctccaggtatttctccatatacaccatgtcgttgttaaacgcggctttggcttccgctttggtcatggagatggattgcgccagctcagcatcgctgcgcacaacgcgcataccgcgaccgccgccgccgccggaggctttgataatcaccgggtagccaatgcgttttgcatgggcgcggttaacgtccatatcttcgcccagcggcccatcagagcccggtacggtcggaacacccgctttcttcatcgcggtgatcgcagacactttgtcgcccatcaggcggattgtgtcagctttcgggccgataaagataaagccggaacgctcaacctgctcagcgaagtttgcgttttcggacaaaaatccgtaacccgggtgaatagccaccgcgccggtgatttcagcagcgctgataatcgccgggatattgaggtagctttttacggacggagccgggccgatacagaccgtctcatccgctaa

SEQ ID NO: 189059 - DNA, 243 bp, Klebsiella oxytoca
atgagtgtattaacagcacgacatgtgacagtttatgtttttatcttgttatctttaagtagtatatcatttttattaatcgcgaatagtgaattaacttcgaaaaaaaatcctatgacgtttgaacctataaacgataaggatagccgttatctgtttgatttgccgccgcctacaaattcacagattgaaggtactatacgtgttgcggccacgcgttactatgaatcgccacgggtttaa

SEQ ID NO: 189060 - DNA, 204 bp, Klebsiella oxytoca
atgggcacggttcacgtcatggccgcgaagccagcggaccagcgcttcgtgtccggagagggtattatcaaattttttacaacgatgccggccatcagggcgaagaatatcgacatccagtttagctttggcgacatcaataccgatgaagtggagttcattttccatagtgaaaccaaccttgcaaatacgggttaccggtga

SEQ ID NO: 189061 - DNA, 360 bp, Klebsiella oxytoca
atggagccgttctatttcgaaggcatcaacgtcgacccggcggatgaatcggatgaagaagatgcgactaccgacgtgaaccacgcgccgaaagccgccgttgaactgcgcgtcgtcggcggctctaccgtacagctttccggtgaaggatcctctgacgaagataaagacgatatcaccttcagctggggtgttccgtctgaaatcaccgtggctgacaaaaccgttcccgtgatcgagttcgtcgttccggacgtttccgttaaaaccaacttccagttcaccctgtttgtccgggatgtctggggcgagccttctactgaaccgtaccgggtttcttggagactaaactctcagtga

SEQ ID NO: 189062 - DNA, 522 bp, Klebsiella oxytoca
gtggctatacatgacgccgggatgttcacagtgaaagaaatcaaccgcctaaaaatccttcatgatgtcatcgaccgcggccccggacttctgaacttagctttgacaaatatgtgtcagccagattatgcggttgtgaccagaactcaggttaacccgccagggattctgctaatgctcccggcgtttccattcccgctgccgggatcttgcgacatgttatcgcttactgcctcccggatggtatatgcagcggtgttgttcttttaccggctcaagaaccagaaccactcaggatattctcagccaacgtctgacaacaaagacgaaaacgtatcgtctgcatattgccgtgctctcatgccaacatcctttctgaatttcttagacatggccacctggcttcaccgcaagtcttgctatcatgattcctgccaccaggataacgctggattaatcctgggattgccacggtgttcaccgtcattttttggcgatactgaaaatggatactatacttaa

SEQ ID NO: 189063 - DNA, 492 bp, Klebsiella oxytoca
atgatgggcggcgccatggtgctgggtaactggcagccggcggtcgagtttaatatctacgtcgacccggaagcggcagagatcgttttccagtccgggatcccggtggtgatggccgggctggatgtcacccacaaagcgcaaatccacgtcgaagatatcgagcgtttccgccgtatcggcaatccgatatccactatcgtcgccgaactactcgactttttccttgagtaccataaggatgaaaaatggggttttgtcggcgctccgctgcacgatccttgcaccattgcctggctgctgaagccggagatgtttaccaccgttgaacgctgggtcggcgtggaaacgcaggggaaatatacgcagggaatgacggtggtcgatttctacaacctgaccggcaagacgccaaatacgacggtgatgctcgacatcgatcgccgggcctttgtcgatctgctggccgagcggctggcgttttacgcctga

SEQ ID NO: 189064 - DNA, 1038 bp, Klebsiella oxytoca
atggcttttaatccgcaacgccaccgccgctggctgctggcatcccgtccgcacggcgagccgaccggggagaacttccgcctggaagagggagaggtcgcttctcctgggccggggcagctgctgctgcgcaccgtctttctgtcattagatccctatatgcgcgggcggatgagcgacgcgccttcctactcgccgccggtcgccattggcgcggtgatggtgggcggcaccgtaagccgcgttgtaacgtcgaaccatgctgattatcagcccggcgattgggtgctgggctacggcggctggcaggattatgagatttccgatggcagcgggctggtgaagctgggcgataacccggaacacccctcctgggcgctgggtatcctcggtatgccgggctttaccgcctacatgggactgctcgatatcggccagccaaaagcgggcgagacgctggtggtagccgccgccaccgggccggtcggcgccacggtcggccagatagcgaagctgaaaggatgccgtacggtaggcattgcgggcggcagcgagaagtgccgctatgcggtagagacgctgggtttcgacgtctgtatcgatcaccgcgcgcccgattttgccgttaagctgttagaagcgtgcccgcagggcatcgatatctactatgagaacgtcggcggcaaagtattcgatgaagtgctgccgctgttgaacacatcggcccgcgtgccggtctgcggcctggtcagcggttacaacgctaccgcgctgcccgctggcccggatcgtttaccgctgctgatggcgacgatcctcaaaaaacgcattcggatgcagggctttatcatcggccaggattacggtcaccggattgcggagttccagcaggagatggggcgctgggtgcaggcagggaaaatcaaataccgcgagcaggtcgttgacggcctggagaacgcgccgcaggcgctcatcggcctgctgaagggtgagaacttcggtaaggtcgtggttcgcgtctctcctgacgagtaa

SEQ ID NO: 189065 - DNA, 630 bp, Klebsiella oxytoca
  misc_feature (265)..(283): n is a, c, g, or t
atgctgcgcatctgtccgggctacaggttaccagccgtctgcggtctcgtagcccgggcaaggcgcgttgcgccgcccccgggagaaacgtgcagaacgtggcagacattcccggaggcgatgctgcgcatctgtccgggctggaggttaccagccgtctgcggtcttgtagcccgggcaaggcgcgttgcgccgcccccgggagaaacgtgcagaacgtggcagacattcccggaggcgatgctgcgcatctgtccgggctacnnnnnnnnnnnnnnnnnnnttcccggaggcgatgctgcgcatctgtccgggctacaggttaccagccgtctgcggtccggtagcccgggcaaggcgcgttgcgccgcccccgggagaaacgtgcagaacgtggcagacattcccggaggcgatgctgcgcatctgtccgggctggaggttaccagccgtctacggtctcgtagcccgggcaaggcgcgttgcgccgcccccgggagttatttggcgaatttatccagcacgcgaatcagctgggtcacgaaaccgtattcgttatcgtaccaggcgacggtttttacgagctggagatcgccaacttctgcgatctccagctgggtggcgtcgtaa

SEQ ID NO: 189066 - DNA, 2658 bp, Klebsiella oxytoca
atgaaacattacgcgaataaaaaaagaatgctaaaattaaatcctgttgctgcttcaatattactgcttttaccggtaatagcccaggctgatatctcaatcattaatgggaacgtcacgtcagcaaacggtgttcctgttgtgaatattaaagaagcaaatagcaaaggactttcacataacgtttacgaaacactgaacgtgggcaaagaaggggtgattttcaataactccgccagcgccgtgcaaacgactctggccgggcagattgaaggtaatgctaatctcgcggggggaaccgcgaaagttattttgaacgaagtaacttcaaaaaatgcaagtaccatcaacgggatgatggaagtggccggcgactctgctcatctgatcattgctaacccaaatgggattaccacccaagggggcggtttcatcaatgcggaaaaagggacgctgacgaccggtacgccaaatgtaaaagatggtgcattaacaggttataccgtgaagggcggcagtattactgttggtaacttccaaagcgaatcacctacagaaattttagcccgcagcgtcaaagtgaacggaagtctgagagttgatgagctatcagtcatcgcaggcaacaacgttatcgatgtcgatggttctatcaccggcacagtggaggccatcgataaagctgcttcctatggcgtggatgtctctaaactcggcggtatgtatgccaaccgcattaatttgattagcactgaaggcggcgttggggtacgtaacgaagggactattgccggcggtgccagtggccttaatatcactagcaacggtaagctaataaataacagcgctatgatccaatctagtggcgacatagctgtaaataccaatggtgctctggataatataaacggtaaaattaacagtgggagaagtattacaattgatactgccaaaagcagcatcaataataccactgggggaaatatttctgctgcatcagatattaacattctaagcggtgcactggataatgccaatggtaagattgcatctggaggaatgttaacggttaataccaacaataataagctgaacaactccggaagaagcaaaaacgctggtatcgaagcggcaatagtacttatcgagagcggtgaactcagcaatagtaatggtcaaatacatggcaattatattaatctaaagaatagctctatggctaataactctggcgttattgatgctgatggaaacgtagagattaatagtactggtaatatagaaaatataactggcttgattcgctccagtgcagctaatgtgaaaataacaactactaaagctgttaaaaataacaataataaatcactcgatccggccggtgcggaagccaaaggtataatttctgggagcggcacagacatctctgcagattatgtctttaataatgctggaacaatcgcctcagccggtgatattaaattaaagaccactagagatatcgataactaccaggggaaaattgaaagtagccaaaatatttcaatcgaaggtcgtgagctgcggaccagccaggccggaatcaatggtataaaaggtgttaatatcgagcttagcgacaaatttgatagccgtcttgctatggtaacgtctaccgagggtgacgtatcgattaaagctaacaaaatcattaatgacagctcattgattctcgccaaaaatatcaatgttgaatcaggctcatacctggatagcaagtattcaatgatggtctccgatgaaaatctgacgttaaaggcggaaggcgatattaatgttagttctagtaacatgtttggttattatgcagggcaatatttcggctatatcaatcaggaaggtggcataatcgccggtaaagatctgaatataactgcaaaaaatgtcaacaatacatctgggcgtattgtttctcagtcgggagatactaatattaatctttccgggaacctgacaaacaacaaagggcaggttgttgctaattccggcaacatgaatattgatgccaaacatgttgccgcggattattcaactatttacagtgcaggtaacatgaatatcaatgttgactcgctgtctttagaaggaaacggttctatcgctaaaaataccgcaactggcattatttcctcagatagagatattttcataaatgttaatggtgattatttcaataatggctggattagtggcaagggggatgtgactgtaaaaagtaccggctatttaagaaattctcataccattaatgctgacgggaatcttaacgttagtggatacacaatagctaacaataaagatatcgtttctggcaaggcattgacaattactaccaatactgacttgaccaacaatgctaatggtaatatcactgggtatacgaccagagtcgatgctaataatgtctctaatatgggtaacctggttgcttcatcccaactcaatttgaatgcggcaaataatatctataattattttaatatctataccgaaggaaaagcagtaatcaatgccaaaaaagttatcaatactggcttttgggctgtctttggtggggctcaaggacttcagacagctgcaaatataacaaatatatttggtactgttgttggtaaatag

SEQ ID NO: 189067 - DNA, 315 bp, Klebsiella oxytoca
atggatattcgatatattttcagcgcggccttgatattaatgagtttcagctcgaagacatttgcagacatgccgctcgggcgtatgataaaagaacagcagagtaataataatacatcaatcaaagaacgcaagattgaaaaaaaagatgttttttcgcaagccgtacagaaaatagcagtagatagcgattttccgcaagagacgccttgctataatatcgatgggcttattctcgaaaatgacttcctgaacgatcgctggatccgaaaaattaaaaaaagaatcgccggtaagtgtttggggggcaaatga

SEQ ID NO: 189068 - DNA, 225 bp, Klebsiella oxytoca
atgagcgaggtaatttttagctttgataattccagtgacgcagtacgagccggaaaagagatgaacaaggttgatccgtctctgcgttatatgcagatgcgaacaacagtatgtgtcatctggcatgcaaacatcattgcggccacacaagccgttttggatgcaggtatcccctgcacttttcagtactggaatgacatcaaaaatagccatcgcagagggtaa

SEQ ID NO: 189069 - DNA, 1077 bp, Klebsiella oxytoca
atgagtatcgttggagattatttctttgaattcccggcatcacgtggcgttcagggcggagctattgttcttatgatgacagtaccagcgcgaaccctagcacgcgtcctcgccagtgataattacggggatactttagagcgttctcaacgcgaaattaacccagcacgggccaagaaattctatgaatatctggtgaatgctcatgagaataaagaccccttcattatcccgccacttgtgggaaactgtaattcagatattgagtttcaggagttcggcaataccaacgttggtgttgttcgctttcctatggatgcagaaatcaaactttttgacggccagtatcgagctgcgggaatcgccgagttttgccgtaccgttggcgaaccgatccacgtaccattaatgctgacccataagctttcgctgaaaacacgacagcagttcttctccgacattaacaataatgtttccaaaccatctgcggctatcaatatggcctataacgggcgtgataagaacgcgcaggaaatggttagttttatcagtttacacagcgtgttttctgaaatcaccgattttgagcataacgtcgttcccgcgaaaagcgataagtgggtaagcttcaaggctcttagtgatgccacggcaaaattttcaggttcctgctcacaagatgatcttgaagggttatggaatgcgtggcttatgttgacaggtttagatgatattcgccgcggtacgaatcaggccgaatacaaacgcgagtatatccagttccatgcagtgatgattaatgccttcggttacgcagtgcagcggctgagcgaaggccggggagttcgcggggtcacgctgatgattgaggatcttgttatgaataccggcattgccgagcgtgaagactttttccttatttcatcatgggacggaatttgcgccagctgtgagaaagccaggccaacggtcattgcgaatgtatctgctcaaaaggcggctgcatcacgtctgatggatgccatcgttaataaaaacttgtccgttagtagcggtaaggaggccagccatgactga

SEQ ID NO: 189070 - DNA, 192 bp, Klebsiella oxytoca
atgattgatgaacgcttaacgcatgaagagttagaatcactatacttggcgatgaaatcacacttcgaggttatggctgaatccgcttcagaggctgaggttattgaatgcagccagatagtaagagcattgtgtgagttacaggaacgccgcaccacaatgctcgcagtcgctccacaggaggtgaaatga

SEQ ID NO: 189071 - DNA, 285 bp, Klebsiella oxytoca
atgaatgatccttattatgttactcacgcacaaattttggccctgagaaacgttgttgcttgtatcgtgcaaacaatgcctgaagaccaaaaaaaggacgtccttcaatttttagaaaaattcgctgaaataaaacttatggatggtatcgatataccttcaacaagtgatatcacttcagaaacagtagataagatgaataaggcctatgaggctgtatttagcgaaattattgacctttcaacacctgatttcgtacctggttcaacaccgtacctgcaatag

SEQ ID NO: 189072 - DNA, 489 bp, Klebsiella oxytoca
atggatcaggaaatcgcttctctgaagctgaatattaatcagctggcgggcataaccaatgtccaccgccagacggtggccgccaggctgaaaaatgtcgaaccagcaccgggcagcaacagcaaactaaaactgtttttagtgaccgacgttctggctgaattaatgatccccacggttgcaaccagtctggaggatatgccaccggcggacaggctggcgcactggaaggccgagaacgagcggatcaagtttgagcaggatacggggcagcttataccggcagatgaagtggccagagagttttcagtcatggctaaagccgttgtgatggtgctcgaaacgctccccgatgtactcgagcgagattgcgcgctttccccagcagcggttgcccgggtgcagagtgtgattgacgatttgcgcgaccagatggcccaaaaggtcatggaagccgaagcagaggaggttgagccagaggaggactga

SEQ ID NO: 189073 - DNA, 213 bp, Klebsiella oxytoca
gtgaataaaagtgatattgaggccatgatccagcgctatgccggagcggaaatggcggtactggatggcaaatccatcaaatttaatggtcaggaaatgaccatggaaaacctgtctgaaatccgcaaaggacgacaggaatgggagcggcgcctttcttccctgaataataagcgccggggacggcctggctacaaactggcgaggttgtaa

SEQ ID NO: 189074 - DNA, 1503 bp, Klebsiella oxytoca
atgtctctacttgatgatgcgattggtgtcatttcccctggctggaaggccgcaaggctacgctcacgcgccatgatacaggcatatgaggccgttaagcccacgcgcacccacaaagcccgtcgggaaaatcgttcggctgatcaactcagccagatgggggctgcctcgttgcgggagcaggcgcggtggcttgataataaccacgatttagtgattggcattttcgataagcttgaagagcgggtggtaggtaaaagcgggattatcgtggagccgcatccgaagctcaagaacggcaagatcgctaaaaagctggcggcggatatccgtcagaaatggggtgaatggtctattcgaccagaagtgacccatcagtttacccgccccatgctggagcgcctgatgttacgcagctggttgcgcgacggggaggtttttgcacagatagtcagcggcacaggcaatggcctgacgcctaccgccggggtgccgttctggctggaagctctggaagctgattttgttccccagaccagcagcgagtcggacaagctaaatcagggggtatataccgataactggggcaggccgaagggctatctggtctataaaagccagccggtctctggtcgtcagatggataccaaacggattgatgcagaaaatatgctgcacctgaagtttgtccggcggctgcatcagacacgaggtacctccctgttatccggggtgctgatgcgtctcagtgcgctgaaagagtatgaagatgccgagctgacagcagcccgcatcgccgccgccctcgggatgtatatcaaaaaaggggatgggcaaagctgggatgaaaacgccggtaaggatgatgatcgtgagctgaatattcagcccggcattatctacgacgacctgctgcctggcgaggatatcggcatggtgaaatccgatcgcccgaatcccaatcttgaaaccttccgcaacggccagctgcgtgccgtttccgccggcagccgcctgagtttttccagtaccgccagaaactacaacggcacttacagtgctcagcggcaggagctggtggaatcgacagacggttatctcattcttcaggactggtttattggggccgtgacgcgtccgatgtatcgcgcctggctgaagatggctgtcgccagcggccaaattactttaccacgcgggctggatatcgagtctttatacaccgcagtgtattccggtcccgtgatgccatggattgatcccgtcaaggaggctaatgcctggaaggctcaaatccgtggtggcgcggcgacggagtcagactgggttcgcgccagtgggcgccatccagatgatgttaaagcgcgccgcaaggccgaaatagacgaaaaccgtgagcaggggctggtatttgatactgatcctgccaatgacagaggaggcaccagtgccgatgccaaagaaacgggcatatcaacgtccgaaagccagcgtaaaaagtaa

SEQ ID NO: 189075 - DNA, 276 bp, Klebsiella oxytoca
atggctaaaaattatgtgcaggaaggaaagactatccctgtggagaatgccggacaggaaatcatcctgagcggggcgccggttgttatcggtcaaatgattgcggttgcgatcacggatattccgggcggcgatacaggtgatggccttaccgaaggagtattccagttggcgaagctggccgccgatgaaatcagcgcgggggaaaaagtgtacatcaaggcgggcaaagtacaactggaagccactgatgccgtcctggcgggtgttgcctag

SEQ ID NO: 189076 - DNA, 345 bp, Klebsiella oxytoca
atgccgtcctggcgggtgttgcctaggaaaatgctgcggctaacagtaccgtcattgatgtcaaaatcaatgcctaaccctttcgacaagatggcggcccggatggatgccgccaccctcaaaaaaatgggcagggaagcggtcattaacggcataagcgttgacgtcgtgcctgctgagttgctggaggagatgggcgcgttgtccggtaccgcaacggtgctggttgtttttgctgctgactatcggcccgccagaaacgatgccgtcgaatatgacggtaaagactggatcgttacccgttatcagctttttaacgggaagcctcaaatctggctggagtga

SEQ ID NO: 189077 - DNA, 579 bp, Klebsiella oxytoca
atgtcactgaaagatcttgagcgtgcgatccagaacctgaacagtctgagccgtctgatggtcccaacggctgccgcccaggcgctaaatcgggtcgccgggcgggcgattacgcagggcagcaggaaggtcgcaaaagaagcgacagtgggcgataaccacaaaaaggggttgccggtgaagctggtccgccagcgttcgcgtcttaagcgtgcaaagcctgaacggctggtggcggcaattcgtatcaaccgcggaaacctgcctgcaatcaagctgggtgccgcgcgtgtgcatctctccaggcgtaaaggagaaaagcgcgggcggggtagcgtgttacgtattggcccgtacattttcagaaatgcgtttatccagcagctggcgaacgggcgatggcaggttatgcgccggctgagtaaatctcgttacccgatagatgttgtcaaagttcctctcgtaaccccattaacccaaaacttcaccgcgatatcaaagcagcttatcgacagcgatatgccgaaggagctgtctgcagcgctgaagaatcaactgaggatccacctgaagcgatga

SEQ ID NO: 189078 - DNA, 402 bp, Klebsiella oxytoca
atgagcaaacacactgctattcgtcttgccgtactggaacaactaagggcgtccattccagatcgtgtgacatggtttgacgggcggcctgtttttctggaagagcaggacctgccggcgctggcagtctatttgtctgatgcagaatacacgggagacagccttgatgaggatagctggcaatcagtcctccatatcgaggtatttctgaaatccaccacgccggatagcgcgctggatgcgtggatggaggaaaaggtgtacccggcccttgagactatcccggcgctatctcccttaatcgaaacgatgatccccatgggctacgactaccagcgcgatgacgaaatggctacctggggatcggtcgacctgacgtacaccctcacttacctgagataa

SEQ ID NO: 189079 - DNA, 1191 bp, Klebsiella oxytoca
atggcaaacattagtgatgaactggcggccagtattcaaaagtgctttgaacgtacctacgtggatctggccaatcagcagcaatttttattcggctccggtaacgtgacggtaactaaaccggatggcacgaccgggactgtgaaatcgtgggcgcagttccaaagcgaatacgctacgcggcagacggctatcgactcatcaatcaccgcagccaataaaaaccaggcgaagactacagcggcaaacacatggacgcagacgcagacgttcagtaagggcgtaacgttcagcgctactattacagcagcggggcaaatactcaggaagaacagcagcacgcaattcactgcgattgatgccgggaatctggagatcagcagtgacaccacgccgtttattgattttcaccacaaaggcagcgctgcagactatacgcatcgaattatcaccgaagacggcgcgctggctgtttatcccggcttgcgcgtccgtggcggattcgggatttacggcgtttgcactcagtacggcgaaaactacgggcaggggttcatcgccaggttgaacacagatccgggtaacgtagctaacgggacaatcatcgcttcgcccaggatgaccaccagattcaacacgcgcggtaacgacagcaacgtggacggcgggcagggggctatgtggttcgaggagcaggtcggcacaaatcacaggctagttttcatgctgggcgggtttagtcagcctgttcagtattggcaacacttgccggacgggcggatctatagcagttcgcgcggcgatgttgcgttcaacgggacgtccgacgaacggctgaaacacagcattgaaccgactgacggccatttgtcagtcgatcgcattcgtcagcttgagctggtgacgttcgtctacaacgacgatgagcagaacaggacgcgtcggggaataatcgctcagcaggcacagcaggtcgatcaacagtatgttaagcagattaacacgtcgtatatgctcaacggtgagagggtggacgatgaccgcctgcagctcgataacaatgtgctcttgatggatacactggcggtggttaaagtgctaattcagcaagttgaagctctggagaaaaaacttcaagttcaggaggaaggctcaagacatgatcgacgtaggggtgaagacgatctgtaa

SEQ ID NO: 189080 - DNA, 1581 bp, Klebsiella oxytoca
atggaagataaactttataacctcatagaagttttcatcaagtattctttatggcctttgctttgcattcttgctttgatattttatagaaaacagcttggtgctatcctttcaaatttaagtggcgctagaaattttaaagtccaatcgcccgttttaaacattgaagcgactactactgttcaactcgaaaatgaagataacgcacctcccacagaaaatctccctcaaaacacgaaatctacaatatccaatgaaattaaaactgattggtttgctactgtatgggatttatttgatgaaggaaaatttgaggatgcacgtcattattttgatgaaacaatgaaacaacagcatcatcatttagaatacaataaagaatatccattcttcttattcgtaaaatatatgtttttaccaagcaatgaaattttaaatgaatttaaaacaaagattaatgaaataaacacttttcaaaacaaacgccattatattgataattatataagttgcttgacaaaaacaaagcaatactccaaagcaatatcatttgttaaagaagagttgcgtgctgttcattctccaatcgaaaaagcacatttaacacttaagttatcgcaattatacattgataactttgaagctattaaagctgaattaatcataacttccctgatagataatttagaaaccattgaaggtgatgaaagggatgaatatttatcccgctgctataaccaattggcagagattgaaaaaggcaaagataatttgttcaattacgcactctgcttagataaagcagcagaatactctcctagtgatatcgacggtatatttagcgcagcatacgaggctgctaacactccccttagggctattgaaatagctaattattcacaacttatcaatttagatcccaaaaacagcatgactttcaataatatgggtgtaactacaggaaaatgtggattaaaattaatctctagcgaatattttaataaggcggtggaattagataatacattggcgatggctaacattggcaatgctcttcttaatgctggattatctgatcaggcagatgagatgataaaaagagcattatctttcaaaaacccacacgaaaacatacatcaactgattacaaaattaaatacagagagggataatgagaagaaaaaatggagcgacctgcaaaaatacgctcagaaaaatgtaggcattctgcgaaaattcacaagagcatactacaatatattcgaaaaattcccttcacatcaaaactggaaatctgataaaggagagattatcgaaataactcaatcagaaacaaataacatttgcattaaatgggaatctaataattatgtcgaagaaatccgcggtttattgaacaatttagcctttaatgggacttatactcttaaaaataaaaaaacagataccttattgagtttaggattaaatgaaaataagacatttcaatgcgtaggttattacgatacaaaaaaagaatgtataattattacgtcagtctctgtgaccgataagtttaaagttgtgctcaataaatcctag

SEQ ID NO: 189081 - DNA, 558 bp, Klebsiella oxytoca
atgaatttggaaaaaggtggaagagcagcgatcgaaaggatggtcgatgcatatggatacactacaaggcaggcgctgtgtgatcacttgggagtctcaaaaagtacgttagctacacgctacatgcgtgattcattcccctctgaatgggtgatacagtgtgcgcttgaaacaggagtctctttgaattggcttgtcactggtactggtttaaagtacgaaaaagataccagtgatttaatatccattaagaaatgcaaaattattgatgggactatttaccaatcaagctatttgatgtttgacaaggcatttttgcccactgaattgacatcacccatatttattcaggatcatgaaaaatcctaccttgcagatgagacatttttagatatctcggatggtaagtggctgatacaagttgataataaattcagcattagagagattgcacgtattccgaacaacagagtaaaagttatcaatgattcatattcctttgactgcgatataacagatattacaataatcgcacgagtaattaaaaccatcctataa

SEQ ID NO: 189082 - DNA, 222 bp, Klebsiella oxytoca
atgacacctcaaatttcaatctcactggcagtaccttccatatctatcgaaaaatatagtgaactcacagggttatacatcgacaccataaatgacatgttggcggatgggcgcttgattcgtcaccgtcttcgtaaggataagaagcgcgagaaagtgatgatcaatattgccgcaatgtctgtagatgcactctcagattgcaaagtggtttttaattag

SEQ ID NO: 189083 - DNA, 492 bp, Klebsiella oxytoca
atgttgctatttaggaatacctcctgcgagcagtgccatgattttttcaaattttgtcagcgattcaatgtcgagccgcagttcaaccgatgttctgttacgcgcagggttgtagagggaagttggggcgctactgtcgaattcctccagttcagcaatgcgtcttgctatttctgcgttaggtgctgcggggatatcactgaggagtcgggagtatcgttttttctgtgcttctgccctggctgctttatcggctggtttataagcaacccggtaggcagaaaaaaacaccgccaaaataccgcacagccagccgaactgaacaccgatgcttgtaagtcctccggtgagtatgagcaaaaaattcataaggttatcagtacgccgattgaatgtttcagtcatcacttcgaggtaataacagtaggttgcttggaaaatcaggttaaccgttctatcccagccagaattaaagcccgcgtaatgcgctga

SEQ ID NO: 189084 - DNA, 783 bp, Klebsiella oxytoca
gtggattcaattgaaacgaaattatttggaagaatcaaaacgcccaggaatttagggcaactaattgaaataacagaagaacatgcagctaaccgaatgaatgtttatatgtggagagggcagggaaacgttgattgggcgattcacagtgctgcttatagacggttgaagtttactcaccgtaatgtctctgagcgaagaatgagaaactacgaggttgagttgttaagaaaagctcgccacaagggttatgggtatgaagagggaagacgtctagctgatttcgaagtacttgctaagcttcaacaccatggtgcagctactcgtttaatagatttttcaaggaatatgctggttgcattgtggttcgcttgccaatcagaaagaggaaagccagggttgctgtttgggattcattcagattctatatatgggcaggaaggagaaacagaggagcgcaactatgatcagatatttgagaaagggataagcaatggtggtgctacaacatgggagcctccagcggtaactaaaagaattgcagctcaaagtgcgcaatttatgtatagcatcgtaagtgatgacccaatgggaagtctcgattttgatcactcagaagaggcctatcttccaattgctatcacggcaagtatgaaagaagagtttttaaggcttctagaaggtacttttgatgttcgtcagcttactctcttccctgatcttgatggattctgccatgccaatacagaaaagaatgggcgctgggacaacgaacgatggtaa

SEQ ID NO: 189085 - DNA, 393 bp, Klebsiella oxytoca
atgggtctgaagtgcgcagcgctgctggagaatcccattcaaaccgcagagcctaactatctcagcaacggcaaccatctgctgtttagcctgatgggctgcgagtcagaaagggttgcagagctttacgattcggatgcgcagctgcagcagttcagcgagcggctttcggcagaaggggctaaaccctatattgttcccgtcggcggctcaaacgcgctggggtcgctgggctacgttgagtgcgcgctggagatagcggagcagtgcgagcagatgaatctcaaggtgcagtccgtggtggtgccctctggcagcgcggggacgcatgccgaataccgcagggatggaggcggtagcgttgctggcgcgtctggaggggatcatacttga

SEQ ID NO: 189086 - DNA, 690 bp, Klebsiella oxytoca; identical to SEQ ID NO: 28130

SEQ ID NO: 189087 - DNA, 561 bp, Klebsiella oxytoca; identical to SEQ ID NO: 5006

SEQ ID NO: 189088 - DNA, 1578 bp, Klebsiella oxytoca; identical to SEQ ID NO: 62825

SEQ ID NO: 189089 - DNA, 2943 bp, Klebsiella oxytoca
atggcacaaataccactaccaaccccgaccgacaatgacgtgccgagcaccgatatccgtgatgcagtttatgccggagcgatgctggataaagttgttactagcactgagttgaaatacaccgatcgcctgggaggtgaacattacaccgtcgatggaatgaaagcggagggggataaagtcgttgaagaaacaaggcagaacctgatccccctcagtcgtcagtacatgacgcttgaagcggctcaggctgatattgcaaacatcccggatggctcaacaacctatgtacgcagccctgatggcggcacactggcggatgagtacattaataacggtggcacgctggcggctacgggcagagctatgccgtctcaggtatatgttgatacgcaaattgcggtggttgataccagactcagcgataatgatggcccggtggatatcacagatgaactggactacatcgataaatacgttatttatgccgatggcactgtggacaccaatggtgacggatggcgcggtcttttcgttaacgtcaggaagggagagcagtatacctataaagggtcaatgggctcggttattcccggggataatattgctgtcatgtggcaactggacagtgcgggtaataaaattgccccgctggtaagcatggtctcgaccggagtggtgcaagccgatcaggagtattctgctacggccactatggacgggctgatttacatccgcgcccgctcccgggatgcctctggcgagttaacgcctttcagcgtgatttctaatcgaccatattatgtgccaggaaaatattttgaccgcatctctggcgaggcatcggtgacgcttggccagataaccgaggggaaattcttccgcgagcttggcgcagaagcagcgtattacggaaacacgtttatgtatgtggacgggagtatcaactcagccaccacatcatggcggtcctataaaatacctgtaaaaaaaggtcagagcctgatgtatgacggcccttacggaagtaatgtcgtgggcttcatagtcggactggctattcaacttgatagtgcaggtagctttgccagcgtacttcatcctgtgtttggcaccggcgaagtcacccggcgggatggcgtcatcttcactgctgaacaggatggctttatctggattaatgcccgcacggcgtactcgacggatattaccatttaccgggaagagcagcagagctggattgaaaatatcgcagcaggtgagaccactgactatgagcggattgataataccgtcattgaaggtacgagcattaccaaaacccctgccagcggtgagcagcacgcggtatacctgaaagtcgatccgggtgatacggtaacatatttcggctctcacggctctcgcacggcgggtcaggtcattgacatgattatccagcttgatgaggataagaatgttgtggaggtgctggccacgcatacttcacggggaacgcctgatttttacacctacacatccgctgttgcaaaacaggctggctatctgtacgttcgcgcacggtattctgactataaaatctttgccagacatcgtgcgtttgcaacggcagaagcgctgacagaaacgaaccagaaagcggataccgtcccacaggtttcctgtcagatggagcgtctcccgattaagcttgataacacctggaactataacgcaaccgcctttattcaggaccagattgtcgaggcaggaggatatcagtacgtggtggtcactgctgaggggcggctacctcacattttgcagcgcagcgttatgggtggcccttggtcagtcttcgatttaagcactgtgccagatctgaacccgggggccgaagggagcgttctgaaatcaccgacaaaagaagatggacactgtgtcgctgtaacgggtattaccaaaaatggttatattctggtagctgcaaaccatcacggcgacccatggcgctgcgtaatcagcgaaaacccgcatgatatttccgcctggaaacgcgccccttacgctactgattctaaggtggtgacttatccgcgctttgtcagctacccggacggcactcttcaggcattctggcgcgaaggaagctcggggaacggtgtctactacggagcaacgttcaatgatgaaacgatgctctttaaccccaaagtgctgctgattgatgcgcaggcatctaacccgtatgagcaacgcatcgttgttgatgatgccggcacgctccatctatgctggggataccgaaccgactctcaaaatgctgacacaaactttggcctgttctatgcgaaatccaccgacaagggcgcgacgttcaccagtgccgacggtagtcagcagtatgccctgccgctgagcggcagcaacgcggaaaaaatcattgatgcgcctgccggttcgggttactgcaaccagaacggggcatgtcatgacctggaaaacaactatcacacggtcatctggcagtacgaccgggatggtgccacccagatttgtcatatctggtttgacggtacgcagtggcaacaagagttagtcagccggtttaattttgcagtagcgctgaatgtgccaacgctggacggcgcgctttgtcgcccgctgattttctgtaccaatctcggccgcctgtacgccgcttatcatatgaccgagatgggaagacggaatgatatccgcgttattgacgtgacagagccaggcgctcccgtggattactgtgttgccaaatatgacgtgggaaccattgagctggctattaacaccgatatggttaaacgtgggggagacctctgcatgctggtcactcgcggggcttcaggggtagagcggccaggctataagcaattcgttgctgagtctgcgtatctgatgacggcaaacctgcctatgcaggcgtaa

SEQ ID NO: 189090 - DNA, 447 bp, Klebsiella oxytoca
atggcacgttatcgtcgcgttaatatcgacggtcagtctctgtacaagaccgaaaccaaactcgccgccaccgcgctacttcccggtaccgcggcggtaatcaattcttctggcgcttttgctcaggcagcagcgctaaccggccgcctctatatcatcgactgcgcttatcatcaggggcttggcatccgtgatgcggtacctgccggtgactctgctgtgggtaactacgtagaggaaggtcgcgaactggctttgctctgcgcgcctggtgcgtacaagaaagacagcccgatcaagctcggctctaatgggcagttcaccctggcaaccgctgacactgactcggtgatcggctacagccaggacgaatacaccgtcgctgcaagtaccaccgattacatccgcgtgcgtatgcgcgttggtaccgttgccgctggcgcataa

SEQ ID NO: 189091 - DNA, 1266 bp, Klebsiella oxytoca
atgccagcacaaattaacgtcaattcaaaggtaaatagccagtcaattcgcagggaaacctataacgggcgtgaacacgttgtgatcccaagctacacgcttccggccaatgtgattatgaacagggagttctaccctgaggcagagatagccgcaaactatcagagcatggaagggacgatagccccccttggtcaccccacagttgacggtgaaaacgtatcggcattttctcctgagggtctttgtactggatttatcggcgcatggaacaggaacgttagcctaaagggaaaccgcgtttattcggaaaagtggatagacgtagaaagagcaatggagtctcctggcggccagcgtctcatggggagaataacagccctggaaagcggggagtcatcagagccaatctggtccagtgtcgcagtctatcgggagcaattacccgccccggaggagattaagaaacagggcgctgattgggtagtaaaaattcacgccatagatcacgacgcaatccttcttgatgtaccgcccgctgccggaccagaaaaaggcgtcggtctgatggtgaatgcagaccaggcggtatctttacagcccaactcaggcgcgttaattggcgaatcttaccgcgagcgagagagtcgccttgaccgcgcggtgcgagagaaatttgcctccgggcctgaagtatatgcctgggtggctgattttactgacactcaagtagtcattgtccgtaacggtggaaaggccgaggtgttcggttattcagccgaaggcgggaaaataaactttgatgattccggcactccagttcagcggcaagagtcctgggtggcaatggccgctaacaaatttaaatcccttttcaaaccgcaggaacagcctgcaccaaaccacaaaacggagggcgacatgcctttaaccactgaagagaaacaagagctgatcagcgaaatcggtaaaggtctggccgccaacttcgcagaggcatttaagccgctgactgaaaaggttgacgctctgcaggccaaccacaacaaactcgcggaaactcttaccgccaactcccgcgctgaagaaaaaaccaagcgtgacgcagtagcgaaagttcacggtgagatcgtcgcgaacgcgctggcaggtgaagcgctggatgcgatgttcaaatcgctgggtgaagctgcggcactcggtactaacgcaggtcagcagcataaagaaaccggcgcgccggcagctgatgaacacttcaaataa

SEQ ID NO: 189092 - DNA, 636 bp, Klebsiella oxytoca
atgactgaaaatgacaatcgcagaccataccctccagtcaacttcactggcgaaaactggctgccatatacccggctgatccctgctaccgaaatcggcgaatgggtaaatcagaacatcctcaccgaagacggccgaatccataaccctgaccatgcgcacttggtcgatgctgatgtcgcgtttatgtgggcctctggctcattcgccaaaagcgggcgcattgtgctgggccagtgtgaacaggtaatgctccgcgccggtggctggcagaaatctcgcatggagcagcagatgcatgaatggttcggtcgcataccgaagttcatcatcaccctggctgccgactactgcgagaaatgcaacgatctggagttctgcgcactggtagagcatgagctttaccacatcgcccaggctaccgatgactatggcgctccgaagttcaacaaagagaccggtatgccggtgctcaaacttcgcggccatgacgtcgaggaattcgtcggagtggtccggcgttacggcgccagcaaagacgtgcaggaaatggtggatgcggcgaacaggccggcggaggttgctcatatcgatgttgccagagcttgcgggacgtgcatgctgaaactggcttaa

SEQ ID NO: 189093 - DNA, 171 bp, Klebsiella oxytoca
atgcacagtctgctcgctaaggtcatggatcgcggcatcttccgcgtaccggcgcgccgcaagcgcaaggtcgaagttaagccttccgacatcccgaccctgaaagactacaccgcccgcctggtcgataagaagtggctctgtctgagagcaaggaggccacatgcgtaa

SEQ ID NO: 189094 - DNA, 414 bp, Klebsiella oxytoca
atgaccagcaaattaaccagagaagagaatgttcaggctgtctttgatttaaaagccggctacacattggggctcgccgatgtagagattctcaagcgagtggcccgcatggcgctggccgcaatggacagcgagcctaaccgtaatcctgtgctggcgtatgccgatagttatcgtgatatggagaagcaaggcgtcgagtcagtcccaatatggagcgtcatcaccgacctagagcgaaacatagcgcctctctatcgccacgcgcagcagccggtagtgccggatgccgcagctgtttatgcccaattgtcagatcatgaaaagtggagcacaagccttgagaatgttaatcacgttcttaacgccttccgcgccgccatgctcgcagccgccccgcaggaggtgaaatga

SEQ ID NO: 189095 - DNA, 948 bp, Klebsiella oxytoca
atgacaactgatatcaccgaactggcgcagatcctgaaagcggcagccaatacaaccgccgatgctatcgaccgcctaaaagaattcccaggcgacgaactaattgacctttcacagcatgagggtgaacaggtcgacattgatatcacaacgatcaacgagtggtacgagttatcaagccccgccaacatcctcgcgctggtagaggcgctggagaaggcgcagcagcacattgcgcgtcaggagcaaattctcctgaatcaggatgagtccctgtctattcgtcgcggtgagcttgaggcggcgcagcaggagcgggagaactggcgtaccagctttgataacgagcggttccgcgctgataagctcaaagcgcatatcgacgatattgaacctatccgtgcagcagccgagaagttggttcgctgcaaaggtcgctatcacagcgagcagaactatcgcgcactggcggcgctgtttggcgtgaatactccagacctgccgccgctggatagcgagtcccgccccctgaagttgccccctgagctttacacaatcggtgagcttatcaggacgcaggacaaccgcattaccgatcaacccatgttcgtcgttttccagaagcgtgaaattatcggaagcgacgagcactcgcctagcagaatttgctgggtatgggatggtgaagaggtcagcgagctgagagccaaacgactggaggcgctttatcaggatggtcgtgacactcgcggatatgaccggtacgcaatgcaggaagttgatgagtttgttactgcctgctttaccgagcatggatgcaaagacttccttcgccagaacggacacaacctgcgccagccgtatatctacgcctgcggctctttccgaaataacgaatatcagctggttagaaattggctcgctggaatcaagtgggaggctgagtag

SEQ ID NO: 189096 - DNA, 507 bp, Klebsiella oxytoca
atgactatcacactacaggcagtaaacgagctcatcgcctccctggagagcgcaggcgagctgtcgatcagagagcagaagttcctggagctggctaaagcgtaccagcagctggctgcggagaatgtggcgctgaagtcgtttggcgacaagctgaatggtatgcataacgcactgaatggagaaggtactggcattcaagggcgtgcagaagtggcttgccagcagttcgcactggaagcggcaatggaagaattcgacgctatcgaaacccccgccaccgatcgcatcgtagccgggattaaggatgaggcaaaatctcatgacctcaacgcttttatcagccattacagcgctgaactcgatgaacatatcgccaatggtggtgatcaatttgatgcgacatcaattcgcctcagaggatttatcgtaggtggtcgtatgttcagagagaaacttcgtgatgaagataaggcattagcgctgcgcgagggggccgacaaatga

SEQ ID NO: 189097 - DNA, 435 bp, Klebsiella oxytoca
atgcaagttaacctagaaagaatatcgtttataactcctttttcagatagtgaggaccagacacagccaaagcttaattttgagtgcgtgaacttccccactcagttttcgataaatttccgggtgggaatggtaggtttgaagccaaatactcgctatcaactcggactgtttgttataccagctcatttatttattaaagaggggcaggagtttcaacttcctgacggcactcaggaatctgtttctgttaacattgatactaaagacagcaacatggtgacgggtgccagtggacaggttgtcattactctaaacgaaatgcgcctccctggtaaggggctgtatagtgtgactggcgtcttacacgccaacgattcgacaaaaaccgtgctccataaaaacgagtcatttttcactgttgataaattatga

SEQ ID NO: 189098 - DNA, 648 bp, Klebsiella oxytoca
atgagtgacgataaagaatcaaaaaatcaagagaatcaaagcgcgagaccaaatagcctaaggaggctgaaagttattggtggctcggatttcgatgctgaatttgataattcctcagagaaggtgcaagatcacttcataacgtcgcatactccggagcgagaagtggataggattagcagagaagaacttgaagcaaggctgtccgccaataaagcggaaatggaatcaatagcctcttcaattcgagcagacatggccttggccagagaaaacaccaatgtccagttcgcaaatctctcctccgcaattaactctatctcttcaaaaattgacggtaaaatggatagtgtagatggagaaatgaaagcaataactggtaagtttgatggcatccagggccagataactggcctgaacacagccattagcggaatccagtcaggtatatctacgcgactggcaatttttagcgtaattatcgctgtgattgtcgccttgcctgggattatctcctcatttaaggactccccagctaagcctgatgataatccctcacccttgattattcagatgccagcgcagcaacaaaatcaacaacccgcaccccaaaaccaacagaaagcatcgccaaatcagcataagtag

SEQ ID NO: 189099 - DNA, 159 bp, Klebsiella oxytoca
atgatgcgtaatcgccgcaccggcgccgcctggctggtcagcttcgactatcgcgacggcagttactggcatgagccgcagggcaatttgcgccacatccgccggccatacgcttcacgcagcattgagccgaacctggttccagccgggacgcattaa

SEQ ID NO: 189100 - DNA, 1122 bp, Klebsiella oxytoca
atgacatatcaattacatgtcggacgctgtgaagaagttctcaagacgctgccggataactcagtcgatgccatcgttacagatcctccatatgggctgagcttcatgaaccataaatgggattacgacgtcccgaccgtcgaccagtggcgggaatgtctgcgcgttctcaaacctggtggacacctgctggcatttggtggatcacggacctatcaccgacttgttgttaacgctgaggatgccggcttcgaaatcagggatcaaatcctatggatttacggtagcggcttccctaagtcacataaccttgatggtgattttgatggctggggaacggcgctgaagcctgcgcatgaaccgatcgtaatggctcgaaagccattgaagcaaaccgtgtccgccaacatgaacgagcacggtaccggagcaattaatatcgacgcctgccggataccgaccgatgaggcgcttaatggaggcactggcggcctgctttcgcatcagtgtgacggtacccaaccggttgccgactacgagcaggcgccggaaggacgctggccggccaacattattcacgacggcagcgaagaggtgatcgcctgcttccctgctaatgctggagctgcagcaccagtaaccggcaacgaaccttctgcagcatcaacaggtcaggtacttggaatgcgcaagcgtgtggccaccgtccaccatggcgataagggaagcgcagcacgattcttctattgcgcgaaggtcaaaccgaaggagcgcgacgaaggcctcgagcgattcatagcgacatcagccagcgatatgaccggcggacgcaaagagggaagcgtcggcattaacgacccgcgggccggtgcagggcgtacaaatggcgctaagaacaaccaccctaccgttaagccgatcgctctgatgagctatctctgccgactaataacccctccaggtggaaccgtgcttgatccgtgggtgggaagcgggagtactggccgggctgccattgaggagggttttaacttcatcggaatcgacctgaacccagattacgtaaccattgcttccgcgcggatcgcttactccttcaaaaaatcgacggaggcagcatga

SEQ ID NO: 189101 - DNA, 222 bp, Klebsiella oxytoca
atgacgcctgaagaaaaagaaaacgctctccgcgcccaggctcgtcgctgcgcagaagagataaccaaagcgatgagcgtaaagcctaaaccgaagtggaacgctgtatgcccccccatccttcgcaagcactacgagaaggtaaagccgatgggtgtcagcctggtgaaatttgtcagtgttattggtcgcatgaatgggcggtatggagtggaatcatga

SEQ ID NO: 189102 - DNA, 744 bp, Klebsiella oxytoca
atgaaagaacgcggaatgatttttaatggtgagatggttcgcgccattctcgacggtcgtaagacgcagacccggcgcccagtgaaattccctgtacatgataaaaaccttgggtgcgagttggctggcaatgaactggccggggaactgtcggcagggaactatctgaacagcgcatttggcaagccaggcgatcgaatttgggtgcgtgagacgtggggagtcgtcagccacgaactggatgaggatggtcgaatccgaccatggacgccagaccgaccggctgcagccattcacgaaatgccgtttggcaatggttatttctctggccacgccatttatgcagctgatggagattttacctggggtgatgacgatggttatgaagatggccgttcgtgctggaagccatccattcatatgccgaaagcagcaagccgcattctgctggaaatcaccgacgtgcgcgtggaacggctgaacgctatcagcgaagaggatgcacaacgcgagggagttcataccgaggtttgggaccaggcagtagtcgcaaggaattacgcggacagcgatgagtttttccagttctggtccgaagacatgccccactacgtagaaatgaatcaactgtatcggtcctcattcagaagcctgtgggactccatctacggcgaggaaagctggaaagccaatccatgggtttgggttattgagttcaagcgcattgaaggcggtgcagcatga

SEQ ID NO: 189103 - DNA, 219 bp, Klebsiella oxytoca
atgagcgcagaaatcatcgatcaggccaacgaactcgaagagctgcagcgtgaagccgctatagcgaagtatcgcatcgaccataacgcagtatcggcgactcattgtgtggaatgcggggaagagatactggcgcgacggcgggaactggtggccgtctgccagcgctgcgcggagtgtcaggaagtggaagaagaacgcgggaaacaccggaggtga

SEQ ID NO: 189104 - DNA, 141 bp, Klebsiella oxytoca
atgctaatcaatgagcgaaggcaatcaggccattccgaggcggaaaagattgcgcgtatccaaaaaaatatgttgagtacgtttgatcgctcgcaagccatcagccagcccaaccccgacgctaaatatagatatcaataa

SEQ ID NO: 189105 - DNA, 633 bp, Klebsiella oxytoca
atggttgactacgcctcgaaagcccgcgccctgcaaatcctgagtggggatgcggttcaactggatcagtgggcgcgccgcggtgagccgctgaacctgagtctcggtctgtatcacggggcctatttacgcataccggtgttggccgcgattcgttcctgggaacccccacctccgccacataaaccagcacaaaaaaccgtgccgaaaaccatccgcctcgacagcatgtcgctgttcgataccgggagatgggcgcttaagcccggatcgacaaagctgctggtgaactcgttggttggcatcaaagcaaaacccggctggctgattgtcgttgcgggccataccgacagtaccggtgaggaaaaagccaaccagatactttcgctgaagcgtgccgaatcggtgcgcgactggatgcgtgataccggagatgtaccggagagctgtttcgcggtgcagggcttcggcgagaatcgtcctgtagccaccaatgaaacggttgaagggcgtgcgctgaaccgccgtgtcgaaatcagtctggtactgcaggtgaatgcctgccagccaccgggcatgccttcgcccttatcgcgggagagcggcgcgtcaatcaatgaaacggagaagtag

SEQ ID NO: 189106 - DNA, 417 bp, Klebsiella oxytoca
atggggctttacaggagttcatcacatgtatattggcgttgcaaataccacatagtctggacgccaaagtaccgcttcaggatcttgaaagataagttgggtaaagaactttacaggacaatctacattctctgtggaataaaagattgtgagattctggagctaaatattcagccagatcatgtacatcttgttgtaatcgtcccacctaaaatctcgatatcaactctgatggggcatctgaaaggccgcaacgcaatcaggctctacaatcgttttccacatatacgaaaaaagctatggggcaaccacttttggtcacgtggatactttgtagatactgtcggtgtgaacgaggaaattatcaggcgatatgtgcggcatcaggagaaaacggaacaagcgcatgaacagtag

SEQ ID NO: 189107 - DNA, 435 bp, Klebsiella oxytoca; identical to SEQ ID NO: 177477

SEQ ID NO: 189108 - DNA, 1290 bp, Klebsiella oxytoca
atggcccacttcaacccggagatcgcgaaagagaacatccgtgccgtcttctcctggcagattgccaccgacgataaagtgcggccgcaggatgccgggttcattccggatctgatcgcctggaacctgagcccggaacgcggcggcgacggcagcaactggaacgagcgaaataccaaaccgagcctggcggcctggtcggtgatggaagtctataacgttacgaaagataaagcctggctggcggagatgtatccgaagctagtggcctaccatgactggtggctgcgcaaccgcgaccacaacggcaacggcgtgccggagtacggcgcgacccgcgataaagcgcacaacaccgccgatggcgcgatgctgtttaccgtgaaaaagggcgataaagaacggacgctttccggcctgaaaacctacgagcaggtgacggcgaaaggcgattacgacagcctggagatcccggcgcaggtggccgcctcctgggagtcggggcgcgacgacgcggcggttttcggctttatcgataaagatcagttggataagtacattgctggcggcggcaagcgtagcgactggacggtgaaatttgctgaaaaccgggataaaagcggcaatctgctcggctattcgctactgcaggagtcggtcgatcaggccagctacatgtacagcgacaaccactatctggcggagatggcggcccttctcggcaagccggaggaggcaaaacgctaccgggcgctggcgaaaaagctcgccgactatatcaacacctgcatgttcgacccgcagagcaaattctattacgacattcgcattgaagcgcagccgctggcaaacggctgcgccggtaggccgatcgtcgagcgcggcaaaggcccggagggctggtcgccgctgttcaacggcgcagccactcaggcgcatgccgatgacgtcatttcggtgatgctggacgccaaagagttcaacacgttcgtaccgctgggtaccgccgcattaacgaatccggcgtttggcgcggatatttactggcgcggccgcgtgtgggtggaccagttctggttcggcctgaaggggatggagcgctacggccaccgcgaagaggcgctgcagctggcggacgccttcttcaggcacgcccgggggctcacctccgatggcccgattcaggagaactacaatccgctcaccggcgctcagcaaggcgcgccgaacttctcctggagcgcggcgcatctgtacatgctgtataacgagtttttccgtaaaccatag

SEQ ID NO: 189109 - DNA, 531 bp, Klebsiella oxytoca
atgcaggaaatagttaagacagtgccgctgttatgttttttactgctgggctgtgatccggcagaaaaagaagcaccgcgcggcagcgggaagagcagctacgtggcggctaatctgctgggctataaccatatggcaggcaagaatatcaactggttctccgtcaacggctaccggggacacgccggagggtttacctgctgcatatcgctgccggaaaaatggcggcccaatatgcaggtggcagtggagtgggaggtggatcctgacccgtttccgaaaaatatgcccccaatgggaacaaaagaatttcgtgattatgcgaaagctcatgaagcaaactatcgccagtataaagcggtggccactattcccgaatatgaagattcctgcggcctgcaggtgcatttcttgccctgtcagcagattaaagtaacggccacctgccacggcgtggaacatcctgatcacccgattaaagaacctttcgacctgccggagcctgcccagtgcccgccagaaacgccatga

SEQ ID NO: 189110 - DNA, 1380 bp, Klebsiella oxytoca
atggataatgaactacactttgaattttgtaatgatcaccgtggagataccattaacgtatttattcatgggtactcagcaatccgatctgatgaagacaaaaaatttcttaagcaatgcattccggaaaggaaaaagaactcgacgagtatatttgcattttggccgagtggtaagattttcgaaggcatactaaaaccaaaaaatctaatcaattttataaaattaaatccagtagtcgcatgcgcgaactttggagttgcgattggaataggggaaataacaaaatttaaagctattgaaagcaaaatccctagtttaacttatgaattttttattaagctctgcgattttataaaaaaagaaaacttagaatatataaatattaatttttatgggcattcgttaggtgctagattaataatagaatcttttttacgtcttcctgaacattataaaaatattaaagttgataatcttgtttttatggggggggctagatgtctaagcaaagatgaatgtgagaagttattgtccaatatatctggtaaaatatataacattcactcctcatctgattacatattaaaatatattaaaccagattttgaaaaatgcatcggaatgcacccaattcaatcagcagaaagttcatctaatcgtttagaaaaccacgcatttaatttctttgggcatatggactactgggaaaacatgagagaaataattaattacttaaacttagataaggcaagtaataattttttggctccaaatcacaatactcttctgaagaattcctttcccgccaaagatacccctttatatctaccaatatgctatgcaactgactctgagaaagaaatcattgcacgtttaatttgcctgaaaaccagcagttcaatcgatataaatgaaaggaatccagtaaaacttactaatgaaatacaattaatgggtggtgactctatagctaacattaccagggggcatggagtaatatatagtgaaattgttcatgatattgctgagtatttgaaaattgctgggtatcaaacggctggatttaaatatttagaaaattcaattcatgaaagaatactatcaatgctaaaaagtaaatgtacacccaccaatgataacaataaaatattaatgacaaaaataattcaaacactctatagatatcctgaaaatggatattataatgaacattacattaacagctttatcaagcttactgacttattcagaaataacaacctaaaatctctttatgtccccggacctgcatactctgtaacaatccctattgtaattatgattcatcacataagaaacagacttttcgatgaaataggaaatacgtttttatcataa

SEQ ID NO: 189111 - DNA, 1236 bp, Klebsiella oxytoca
atggtgccgaagctgcggtttaaagaatatactgataaatggacattatccacactgtctgaagctgctgtgcaaataattgatggtgatagaggagctaattatcctagttcagatgatttttcttcttcaggatattgtttattcctcaacgctggcaatgttacgaaagatgggtttaagtttgacgatgttgcttttattactgaagaaaaagatgctttacttcgtaaaggaaaaatttcaagaggggatttggttctaacaacaagaggttcagttggtaacgcagctctgtataataatgatatttattttgagaatataagaatcaattctggtatggttattattagaactcaaaaaaaaatatctccagattttttatatgaatatttcaaatctaactttttctctacatggcttagcaaggttgcatttggaagtgcccaaccgcaattatcagtaaagataattaacgaactgtcaatttattttcctgaaagttcagaacagtcaaggataggtaatttcttgttcgctgttgacaagaaaatagctctacttgataagcagcataaactgttgcgtcaatacaaaaaaggcatgatgcagaatatttttactcaggaattgcggtttaaagatgatagcggggacgagttttccgactgggaagaggtagagctaaaaaaaatagcctcgaaggtaaatactaaaaatagagataattcagtaagtacagttctaaccaattctgccacgcaaggcatcgtaagccaagaaagttactttgaaagagagattgttacagagagcaacttaacaggatattacgtcgttagagttggtgatttcgtatacaacccgcgtatatcctcaacggctccagttggtcctataaaaatgaatgaactgactcaaggagttatgtctcctttgtatacggtttttcgttttgaaaaaggcttgttgaaattctatcaatatttttttgaaagttcagtttggcatgattacatgaaaagtgtagcgaatagtggtgccagacatgaccgtatgaatatttcaggagcagacttcttcgatcttccggttccccacccctctgatgaagaacaaaccaaaattgctagatttctctctaccattgacgacaaaatcactaccaaaaaagcagaactggataagttaaaaacctggaagcagggtctgtcccagcaaatgtttgtataa

SEQ ID NO: 189112 - DNA, 264 bp, Klebsiella oxytoca
atgaatcagactcacaccgttccggaaatctacaatcctgatgttccgtatgaagtaaaatgcgagatagtcttgcaactttgccgggtgcttgcctcccataaacagatctctctcaatgacttgagagagtatcttttggaaaaaattcacgttgattttgaaaatcttaaggacaaccaagttggtatgcttcttctgtatgagtatgtctattgccagcgtccagaagtctgctccaaagttaaaaacaaccttcactaa

SEQ ID NO: 189113 - DNA, 879 bp, Klebsiella oxytoca
atgtctacgttcccacaggggttactgcaggaatatcatcagcaagcacaggactatgtgctgtcggacatgctgcgcgcgcgacgcggcgtgttggccgccgacgtcgatatcgagctggatgaaccccaccgcgcgggcctgaagatcgtggtgatccgacgcgggcgtctgcgctgtgaaagcggaacagggccgcaggtggagctgaacggcccttcgctattgctggccgccggccggaacgactccgtgttgaacaacctgttccaagccggcgaaccgcttgattacaccctgctgcagttctccgccgcctggctggaacagaacgatgtccgcctgcctcccggtctcgatgggcggcggcaagcgcagttggtgccgctggcggcgccggcagagctgattggccaggcccggcagctgttcgcctgcccgttgcacgagtctcagcgcgggctgtggttcagcgctaaggccaacgaactggcggcacattgcctgcatcaatgctggaaccgcagcgcggccgcgccgtctgttggcgtgcgcctgtctgagcgggatgtggcgcgcctgcagctggcgcgtgaaatcctgttggcggagatggagcaaccgccgagcctggatcgactggcgcaacgcgccggattgaatacccgcaaactcacgcaagggttccgccagctgtttggcgccagcgtattcggtctgctgcaggagcaccggctgaaaacggcctggcgcttgctgagcgagcaggatctgctcgtttccaccgtcgcctggcaggtgggttatacaccggcacacttctccgtcgccttccgcaagcgtttcggcgtcatgccctgcgacgtcaaaaagcgttag

SEQ ID NO: 189114 - DNA, 1677 bp, Klebsiella oxytoca
atgctgaatgacctgtggacgctgacgcgtcctttccgcatcatgctgtattccgctctggcgctgcaggcactggccggcgtcagttctctatttccctggctggcgatcgcctgtctggtggacgccgattcggcgacctatcccttctggcttggcgtcgccgtcggcggactaggactgtggctgttcgcccaaactctggcgttgcacctgactcatctgctcgacacgcgtttgtgtcatcggctgcgcagccaattggccgccaagctggcgcgcctgccgctgaactggtttgtgcggcagggagagagcggcgccgcccgggcgctgtcgcaggacattcaggcactgcatcagttggtggcccatgcgccggcagatctggtgcagttggccgtcgtacccggctgcgcgctggcgatgctggcgacggtgcagtggccgctgctgctgttcatgttgataccgttgtcggcggccgcgctgctatttcgagtcatccgttcgccgcgcctgcgaccggcgtttgaacaacgcgatcgagcgtttcggcagttgaacgacgattatcggcaactggcggcgcatccgctgttggcccgccagtttcccgatgcaggcatcgaagcgcgcgcgcggcagagtctgcgggactttctagccgcctttcaccattggctgcagcatatcggcgcgctcggcgcagtgacccaattactgctcagcgccgcgctgtcggccggctggctgttgctcggggcccgctggctggcgcccaatctcacgctggcggagctggcgctgttcgtgttgctgttgcgcagagtggcgcaaccggtgatggcaatggggcacggcggcgatgcattgcgtgcggcgacgttggctgccggccgcattcaggcgctgctagcacatcccgaaatacgctggggagggcgctcggcgatcgcttcggcgccgcagggggcggcgctgaggctgagcgatctcggttgccgacaggacgaacgctggttgctgcagggcgtcaatcttgccgtcgagccgggggaattgctggcgattgtcggtgcgtcgggcagcggtaagagcacattgttgcggttgatcgctcgttatagcgagccggatagaggaacggtatcgctcaacggcgtgctcgccgacgagttctcggcgcaggcattcaatcagatggtggccgtggtgccgcaggagaatacgccgccggcaatgtcgctgcgcgacaacctgatgctgttcgccgtcgggggggaggcggcgcagctgcggcgcgtgctggccgaactggggctggcagagcgtttgcaggataggttggacgagacgccttcgctttccggcggggaggtacagcgtctcgccatcgcccgggcgttgctggcgcgacggccgctgctattggccgacgaaccgacttctgcgcaggatcgtcagaatcgcgaactcattctgacggcgctggcgcagctgcctgccacccggttggtggcaacgcatgacgcggaactgtgccgccgcgccgatcgggtggcggtgctggcggaggggcggctcctggcggtcggtacgcccgccgcgctggcgcaacatccggcgctgctggcggcattggccgaacgccaggaggcggatgatgaagcgtga

SEQ ID NO: 189115 - DNA, 1638 bp, Klebsiella oxytoca
atgaagcgtgatctggcgcgagcgctagctccggcgctgctgttgatggtgttggccgccacgctggaaggcgtctgcgccttgctgctggcggcagcggtggcgaactggcagaaaaatcccggccattggctagggctgctggcgctggccacgcctctctttctggcggtgcagtatgtggcggtcacacgcggtttcttcgccggcggcgagttgatgaatgcgttgctgcgggcgctattccgccgtctgccgtgcgcgctgtcgccgcaggaacaggcgccaggtctgttggccggggccatcggtcagatgatgttggcgcccgcgcacctgatggctccgttggttgacgcggtcgtcacaccgctggcgctgatcgccgggctggcctgcctgagcccgggagtggcgctgacgctgctggcggcctgtgcgctattggtgccggtgttgcgtggttcggcagcccgcctgcaccggcgagagcgagagctgggggaggccaatcagagtattgaaggggcgctgatgcagtttgcccgccatcaggcattgttgcgcggcggctgcgggcaggccgacgccgccgaggtattgatgcaacggttggatgaccatcatcgggctcacgccgcgctgctgcgccaaagcctgccatatcatctgttgtttagcgccgggctgcagctgacgctgttggcggcattgtggttcggcgcccatgaggtgttagtgcagcgcctgaacgtcgcccaatggctggcgctgatgattgtcctggcccgtttgttggaaccgctgcttcagctctcccaccttgaacaggcactgcgtcagttgaagagcgcgtgcgcgcaactgcggcagacgctggcagcgcccgcattaccgctgtcagaacgggacgacgccgcgccgcaggacgacggaatcgagcttgaggcactgagcctggcggcgatgcacggcggctggcggctgcgggaaataagcggagcctgttccgccggagagatgttggcgattgtcggcccttctggcgctggcaaaagcagtctgctgaacctgatggcgcgtacggaggatccgacggtgggacgggtgttctacggcggctgtgacgtgcgcgcgctgtcggcgcggcaattggcgggcggtcgcggcgtgatgtggcaagacaatcgcctgctgcgcggcagcgtacgctggaatctgactcagggacgaacggatatccgggatgagtgtctgctggcgctgttggcagcgctgggtttgccgcccgatgtgctggaggaagaggtcggcagcgagggcgatcgtttctccggcgggcagaaacagcggctgtgcctggcgcgcactctgctgcagggggctcctcgattgttgttggacgaaccgggcgctagtctggatcggcgtaacgccgagcgcgtggcggccctgctggccggctggcccggtacgcgggtcgtcgtcacccacgatcccgcgttggcctgccgggcgaatcgggtgtgggtgctggagtgtgggcggttgacggcgacgggcagcccggacgcactgcgtgacgccggcggttggttcgcacgtttctgtcagacgaaaatgaccggcgatcgatag

SEQ ID NO: 189116 - DNA, 159 bp, Klebsiella oxytoca
atgctagccctgaactccgggcacactatacgtaatatctccgcaccatacccggtctggctccggtacagcgaactgacgctcaagcagattcggcaggcaggtatgctcctgacgggcatttttatactgatgttttccgggctggctgctgcttag

SEQ ID NO: 189117 - DNA, 282 bp, Klebsiella oxytoca
atgaacaagaaaaacaaacgtacgttcacccctgagttcaggctgaaatgtgcacagctgattgttgataagggcaactcatatcgacaaaccagtgaagcgatgaatgtcggttctaccacgcttgagagctgggtgcaccagctcaggcgagagcgtcagaggattacgccctctgcaacacccatgactgcagagcagcaatgtattagcgagctggaaaagcagattcgccgcctggaggaacagaatatgatattaaaaaagctaccgcgctcttga

SEQ ID NO: 189118 - DNA, 576 bp, Klebsiella oxytoca
gtgagcaaaagactatatcttacagcagaagaaataaaagcgatgcttgatgttattagggggggagagaatagcgaacggaactattgccttattcttctcgcgtacaggcatggtatgcggataagtgaattattgtcattacgctataaagatattgatctaagtgccggtcgtttgtatgtgcgaagattgaaaaatggattttcaaccattcatcctcttaactcagatgaacgaaaagcgcttgatgaatggactgctgtaaggcgaaacctgagatattctgacagcacagaccttatattcatctcgctaaaaggaaaagctctctcccgacagcaggcttaccggattattcgtgaagcaggcaaaaaagcgtgtatttcagtagaggcgcatcctcacatgctacgtcattcatgcggatacgaacttgccgagcgcgggattgatacccgattgatacaggactaccttggacaccgtaacattcgtcatacggttcgttacacggccagtaatgccgcacggttttccagaatctggggaaaagatgaaaagatgactcgttga

SEQ ID NO: 189119 - DNA, 546 bp, Klebsiella oxytoca
atgaaaatcaaagcactggcaattatcgttctgtcagccctatctctgagctccaccgcagctttcgccgccaccaccgtaaacggtggtacagtacattttaaaggggaagtcgttaatgcagcctgcgcagttgatgctggttctctcgaccagaccattcaattaggccaggttcgttctgcgaaactcgctactgcgggcagcaccagctctcctgttggcttcaacattcagttgaatgattgtgacactgatgtcgccaccaaagcatccgtcgctttctccggcactgcagttgacaccactaatactaccgtattggccttgcaaagctccgctgcaggtggtgcaacgaacgttggtattcagatcctcgacagtttaggtacacctctggcattggatggcgcgacttttggggcagcaacgactctgaataatggtactaacactattccgttccaagcgcgttactacgcgacaggtgttgcaactgcgggcgttgctaacgctgacgcgaccttcaaagtgcaataccaataa

SEQ ID NO: 189120 - DNA, 513 bp, Klebsiella oxytoca
atgtttttactgccctcagtaacgatggccggtaatcaatcgaatgtcacgttatccggtggatatatgcgttttcagggaatagttattgcagagtcctgccgcgttgaagcgggtgaccgacaaatgacggtcaatatggggcaaatcagcagtaatcggtttcattcagcgggagaggataccaatcctgtccctttcgatattcacctgcaggaatgcagtaccgccgtgagccagcgcgttggcgtggcatttcacggcgtcgccgatggtaaaaatcctaacgtgctctcggtaggggaaggcccggggattgccacgggtgttggtgttgctttgtttgataaagacaatcgccaaatcccactcaatcccccccccactgcttggttaagattggattccgtgccaaccacattgcatttcgtggcgaaataccgtgcaacgggacatcaggttactggtggctcggccaatgctcaggtttggttttctctgacctaccaataa

SEQ ID NO: 189121 - DNA, 726 bp, Klebsiella oxytoca
gtgagtacaaaagggttaaacgtgagacaaacactggtaatgacgcgcagcttacttgcgggagtgatgatgatagctgccttcggattgagccttcacgctgatgcaagcgtggcgctgggtgctacccgcgttatttatcctgccggacaaaagcaggtacagcttgcggttactaataatgacgaaaagagcacttatctgattcagtcatgggtcgagaatgccgatggcgcaaaagacggacgttttgtcatcaccccaccgctgtttgccatgcaggggaaaaaagagaataccttgcgtatcctcgatgcgacggataaccagctaccgcaagatcgggaaaccctgttctggatgaacgtcaaagccattccgtccatggataaatcgaagctcagcgataacaccctgcagctggcgattattagccgtatcaagctctattaccgccctgcaaaactggctctgccgcccgatcaggccgctgaaaagctaaaatttcgtcgtagcgcaggctcgctcacgctgatcaaccctaccccttactacctgacggttactgaactcaatgccggtacccgggtgcttaaaaatgcgctagtcccaccgatgggtgaagccagcgtcagtttgccgtccgatgcaggtagcgagattacctaccggaccattaacgactacggcgcgctgaccccgcgaatgaaaggcgtaatgcagtaa

SEQ ID NO: 189122 - DNA, 2628 bp, Klebsiella oxytoca
atgtcacatcttaaatatggacttgaccgtttggatacccggcgtatgactccaggatctgcgcgcatattcgcgcagatccccattgcctttttacttgcctcacccgtattttccgcgcaggcagaactctatttcaacccacgtttcctggcggacgatcccgctgccgtggcggatctgtccggttttgaaaaaggccaggaactgccgccgggaacctatcgcgcggatatttacctgaatgatgggtatatgaccacccgcgatatcacctttaatgccggtgaaaacggccatggattgacgccctgcctcacccgcgggcagcttaacagcatgggagtgaatacacctgctatcccgggtatgagcgctctggcgtctgatacctgcgtaccattaactgaattgatcaaagatgccactacccgctttgacgtcggtcagcagcggctttatctgaccattccccaggtgttcatggggaatcaagcgcgcggctacattccgcctgaactctgggaccacggaattaacgccgggctgctgaactacaacttcaccggcaacaacgtccacaacggcgtaagcggcggcagcaactacgcgtacctgaacctgcaaagcgggctgaacctcggtgagtggcgtctacgtgacaataccacctggagctacagcagcagcggcagctcgtcgacaaatgaaaacaagtggcaacacatcaacacctggcttgagcgcgatatcaccgcgctccgttcgcgcctgaccatgggcgacagctataccaacggcgatgtttttgatggcatcaacttccgcggcgcgcagctcgcctccgatgacaatatgttgccggacagccagaagggatttgctccggcgatccatgggatcgcccgtggcacggcccaggtctccgtgaaacagaacggctatgagatctatcagagcacggtaccgccaggcccgttcaccatcaatgatctttatgctgcaggcaacggtggcgacctgcaggtgaccattaaagaagccgacggcagcagccaggttttcaccgtcccctactcttccgttccggtcctccagcgtgaaggccatacccgctacgccgtcactgccggggagtaccgcagcggtagcaatcagcaggaaaaaccaaagttcttccagggtacgctgctgcacgggcttccggcaggctggacgctatacggcggtacccaactggcggaccgctatcgcgcctttaatctcggcgtgggtaaaaacatgggcgaactgggtgccctgtctgtggacatcactcaggccaacgccaccctgcccgatgacagcgatcatgaggggcaatcggtacgttttctctataacaaatcgctggcagataccggaaccaatattcaactggtgggctaccgctactccacgcgcggctatttcagcttagctgacaccacttacagtcggatgagcggctacaacgtcgagacccaggacggcgtgattgaagtgaagcctaagttcaccgactactacaacctcgcttacaacaagcgcggaaaaatacaggccagtatcacccagcaactggggcgtacggccaccttatacctgagcggtagccaccagacctactggggcaccgataaggccgatcagcagttgcaggcgggtctgaacgccgccatcgatgatatcaactggacattgagctacagcctgaccaaaaacgcctggcagcagggacgtgaccagatgctggcggtcaacgtcaatattccgttcagccactggatgcgctcggacagtaaatccgtctggcggcatgccagcgccagctacagtatgtcgaacgatctgaacggcagaacaaccagcctcgcaggcctgtacggcacgctgctggaggacaataacctgagctacagcgtgcagaccggctacgcgggcggcggcgaaggcaacagcggcggtaccggctatgcggcactgaactatcgcggcggctacggcaacgccaacgtgggttacagtcacagcgataacattaagcagttttattacggcctgagcggcggcgtgctggcccacgccgacggtatcaccctgagtcagccaatgaatgacaccgtcgtgctgatcaaagcccctggtgcagatggggtaaaagtagaaaaccagaccggtgttcagaccgactggcgcggttacgccgtgctgccctatgccaccgaataccgggaaaaccgggtggcgctgaacaccaacagccttgccgataacgtcgatctggacgatgcggtggccagcgtggtcccgacccacggcgcgattgtccgcgctgaatttaaggcccacgtcggactcaagctgctgatgtcgcttatctataacggtaagccggttccctttggcgcactggtcacagcggatggcagccagggcagcagcatcgtcgccgataacggccaggtctatctgagcggaatgccgctgatcggcaaagtacgggcgaagtggggcgagggtccgaacgccagctgcgaggccgactatagtctgccgccagaaagccagaaccagactctcagccagctgtcagccgagtgccgctaa

SEQ ID NO: 189123 - DNA, 531 bp, Klebsiella oxytoca
atgatgagaaaaacactttacctgctgagcgcccttatatcgcttgcggttgccagcgccagcgcggcggacagcaccatcaccatcagcggttacgttcgggataacgcctgcgccgtcgccgctgaatcaaaggattttaccgttgacctgatggataacgccgcaaaacagttccatgcggtcggagccaccacgcccctagtgccctttggcattgttctgtcgccctgcggcagctcggtcactgcggtgaaggtgggctttgttggcattgccgacagtattaataccgacctgctaaaactcgacggcggggcgacagctgcggcgggcatgggcgtgcagatccttgacgggcagcaggcagtgctgccgctcaacgcaacatcatccaccatccagtggaccacgctgacccccggccagaccaatacgctgaacttttatgcccgactgatggccactcaggtaccggtgaccgccggacacgttaatgcaaccgcaacattcacacttgaatttcagtaa

SEQ ID NO: 189124 - DNA, 504 bp, Klebsiella oxytoca
atgaaatttacccacgctggatggcttctggccacggtgctggcagcgtctaccccgacgctacaggccgccgacgtcaccattaccgttaacggcaaagtggtggccaaaccgtgtaccgtttccacccttaacgccaccgttgatctcggcgacctctacacctttagtctggtgtctgccggctcctcttcgccgtggcacagcgtagcgctcaacctgaccaactgcccggtcggtacatcgcgggttaccgccagcttcagcggcacggcagatgccactggctactacaaaaatcagggtaccgcaggaaatatccagcttgaactgcaggatgacggcggtaccacgttgaatactggtgcgaaaaaagaggtccaggtggatgatgcaacccagtccgccagcttcccgctacaggtcagagcgctgacggtcaacggcggggccacccagggaactattcaggcagtgattaacgtcacctacacctacgcctga

SEQ ID NO: 189125 - DNA, 909 bp, Klebsiella oxytoca
atgagaaaaatattaaccctgctgatgacgctgctgctggcgggctggtcattcaatgcattatcaactagctgtaaaaccagagcgggcgctcaaattccaccaaattcgggagggggtacagctaatgtatatattagtttggatccatcaattggtactgagcaaaaccttgttattgatttatctactcaaatattttgtatgaatgaaattcctgataactatactgattatctttctttgggtgaaagctctaccttcggtggcgtacttaagaattttcgaggtgtagcagtgtatgatggttcgttatatgctttccccaatgcagttgaaacgaaaaaaaaggtgtataaaagcactgattttgagccttggccattagctctttacctaacaccaatcggtgctgctggaggtgttgtagtcaatgcgggagaacttattgccattttaagactacatcaaacaaataactttggtgattctcattattttacttggaacttgtatgccaataataatgtggtcgttccaacaggtggttgtaatgtatctgcccgtgatgttacggtgacattacctgattatcctagttcaattgagatcccactttctgtgtattgtgcacaaaaccagaatctggagttttatgtttcaggattaacgacagacagcgcaaactcgatttttaccaacaccgcctcagcctcaccggccggtgggattggcgttcagctaaagcataaaggcagcgtactttcgactagtaacacagtgtcattgggtacagtgggtacttcagcagtggaccttggcttgaccgctacctacgcccgaaccacaggccaggtgacagcagggaatgtacagtcgattattggggtgacttttgtttatcagtaa

SEQ ID NO: 189126 - DNA, 1239 bp, Klebsiella oxytoca
atgctggaacattcaagtgagccattacctatgctgattgtaagtcggagtccagtcagttggttgtggaatacgcttttgtatcaaatgatggattatcatcagcttgagcgtgtatgtgcagcctcctccgatctatctatttccagtatgagtattctgctgaagaactacattcaggaaagatacccttcccttaaacaaatggcacacgaggaaatgcagctattaggaaaaaaaatcggtggccttaccaggccagagctgaatgctattctcggtttattgaatggatgcagcgcgaatactcaggcaaaacgctatggcatcagtcacaaaacactttatactcagcgaactgcaggtctgaaaaaaatgataaaataccatcctcatcttgcaagtcagtttcctggcagccagacaaaaaaacaggagctagtaactgatgttgcgctttctgcttttgagagagaatttgttcatgccattcattgtagacaggttttccctgtttttcagcctatcacagatgaacatcttcaggtgcgcgggattgagatcctctctcgctgggatcgcaatggtagtgttttgcttcccgcggcttttttaccacagatacggtctgagtacgcgtggcttatgcttaccgcatttgtcctccaagaagcagtaaaaaaactcaatcagcatgagggggatttttatttctctgtgaatatccctgcggctattgccagtaatgtaaacctaatccgcatgatggaaactgctcgccagcagttgcatcagccacaaatgtcggccaggctggtaattgagtttgctgaaaatacagacgcatattgtcacaaagaaataaccaaaaatatcgccatgcttcaaaaacgcggttttcgtattatgcttgatgactgtttctcacaaggcagcgtgatgtttccggtgaggtcgatcagcttcaattattacaagctggatagaagtatcgtcaatgatatgtcgagtgaccctcacgcagctgccctgataaagagtcttgtttactactgtcagcagactggtagtagctgcattgcagagggcgtggacagtctagttaaatttgaaagacttaaagatttaggcatcgaatttttccaggggtattatatttctcctcctgttgagctggatgaaattgatggaataattaaagtgttattgcaaagcaaaaatcaggaaattcaggtttag

SEQ ID NO: 189127 - DNA, 222 bp, Klebsiella oxytoca
atgactaacaacggtaaccgacatgcattactgtcggatgttgtagttactgatctgagtacggataaaaaaattagtctgaatattaatacagttaatggctatgtgctacggaactcctataaaattttcccacttaacggcaacttctatatggctggacataaataccaggttacttataaaatgaaccgattacctgaaaaaaatattatgtggtga

SEQ ID NO: 189128 - DNA, 2430 bp, Klebsiella oxytoca
atgagtaacaaaaataggaaaaaatctgttatctatatgctgtttacccttgagtcccttactgtttcagtagcatttgcatctcaggtaaacagtttaaataatattccatcggtgcagccgggaacacaggtgcagtccgttgatatgtctttatatcttatgattaaaataaataatcaaagtactcaaaatttaataaatgtaaaatacagccagcagaaaaaaaattttatgatccgtgcggaagatttaaaaaaactgcgtatcaaattaccagagcttcctgcaggtaatccatgggtcgatatagcaaaattaaagggaatagagttcatctatatacctgatgagcagatgctaaatttatatgtacagcaggcacaactttcagcttacgagatctcattgagtaatggttcaaaaaatgacaatactttattgaaaaaaaatgcacttacatcagctattatcaattacaatctgtatgacactcactataacggtgatgattatatctctggcagtctggaggggttattaaattttggagtcggtaatttttatacttctggtttatataataataaatccaactatggtgatgagggcactgtccgcatggattcctactggcagtatattgacgcggagaaaatacgctcttacacgttgggtgatttcacaaccaatagtgtgagttggggaaatagcgtcaggatcgctggcttccagtgggccagcgcctattcgcaacgctcagatattgttaccaccgcgctgcctcaattttccggctcttctgcggtgccttcttcactggatctatttgttgaccaacataaaatctactctggcgatatcccgtcggggccatttgatattaaaaacttgccctttgtttctggtaatgatgtcactattgtgactaaagatgccaatggtcagcagatcagctcaacccattcttattactattcacctgaattgttgcgagaggggattaacgaattttcaatcgatataggtataccgcgttttaattacgcgactgaatctactgattatgataaaaaaatcgttttcatgtcaggttcaaaaaaatatggtctgacaaacagtactagtatgacattaaatggtcagggggccaccaacgggttgactaatagtggttttggcgtagcccaaagtctttttggagtcggtatattaaactttggcgtcgccggtagtcacttcaaaaataatgacggaatcctcgggcaagtcagtcttgcaggacgagtttcacataatatgacctttaacagcaattatcaaaaatctgggaataattattatgaccttgctaaggcatcgaactttatttatatagagaaatatcacaataatgctagtaatgacagtaaattaacctatgagtctcagtcgagcgaaattgctagaatcggagttaacttttctccggcacaaagttggtctttcgggacctattataatcacttagtctatccaaagagtcgttacaatttgatatcgcttaatgctaatgctgggataattcctgatctgaatgtctctgctaatatctataaaaatctttccgggaatgatgctggaggttatattgttatgacctatcagttaaataataaatataatatatcatctgcgatgaacaaagataatggacgtaacggctacactcagcaaattgatagtattcctaactcggggattaatgcttactcgtggggggtatcaagtacctgttactcagacagtatcaccagtagccaagtttacggtagctatcgtggtcgatacggtacttacaattcaagcttcaaaaagtatggtagtttgacagagacgtcattaagcacaagtggtgctctggtatttgcagatagaggcatttatccagccaacaaaattggtcagagttttgtgctggtgaaaaatgccggcccggggactcatattcttaatggcggagtagatcttggtgctgcagacagtcgcggtcattttctgattacagatatgatgccgtacaccgagaaccatattttcctcgatacaaccaatctgcctgttaactggcagataaggaatacagaaaaagttgccgtatcagggtatcatcagggtagtttagtgaattttgaaggcagaaatgatatttctgccactgttctactcgttgacaaggacaataacttattacccccgggatataaagttatattgaacaacagcagcgaaagtattactggatatggaggtgaagtctatctggaacagcttgcgcctaataataccctgatagtcaatctacttgacagaggaacctgtattacccattttagtcacagccctaaaaagtcatctaccgttaaggcagggccatacgtatgtcgttaa

SEQ ID NO: 189129 - DNA, 1047 bp, Klebsiella oxytoca
atgtcgttaactctgatttatcccaccgctgagattgtggaagcagcaaactccagcctgccaaaatgtgcgatcaataggtgggcaagaatattcctatttattatgctgttgctcagcatttttttatttccagctaaagtgattgcagcctgtactttcacacctacaacatcaacaacatcaacgttaacactgacgtcagctactatttcttcggcgtcttcacaaaccattacaggtacttggaaatgtacccgtacaccatcaactaccgcggaaatcaacccgtacatatgtcttaaaactatttttactggcactactagtgaaattaacggctcagctatgtcttatacagtctatggggctgcgggtggtgcggttacatcggccaacgcagttcccgaattctattatggcccggccagaacaatagccagcagcaatattatctctggatctgtcagattaacgattccagcttccagtacatattatcctgcaggaacatacactgctactgtaagctattatatcgatatgcagtttaacagtggcagtgtatgtgaaggcaatagcggagggggatgggattcgggctctcaaacgcttacctttaactgggtggtaccaggtgtctgctcactggtgtcgaccagcactgtagccttcggtacgatcaccgatattggtagtgcattaactaatcatgacggtaccggtgccatagtgactaagtgtaattatggaactggctataccatttatctgggcgatggtaataataggttatcaggtagttatcggcaaatgatattaggcacaagccttatgccttatcagctctataaggactctacatatacaactgtttgggatgacactgaaggaatctctacgacagggggcaccggtggcgtatcttcgactggcacgggtactaaccagacatttgtagtttacgggcgtatacctaggggtatcgctttacctgcaactcctggcacttattcagacactgttgttgttactgttacgtattaa

SEQ ID NO: 189130 - DNA, 519 bp, Klebsiella oxytoca
atggaaatttttttaggagtggttacagtttctttttttttcgcagtgcctgcggtgttagcgactattgtgaccggtagtttaagtgtcactacaacgcttgcgtccagctgtaccattaataccagcacaaccggtataatcacgaatgcagtactcaattttggcaccgtgacgtcaatggcgtctgatatttacaaaagcacgtcgtctgcaggtggaaataagatcactgtgctttgtagtaatggtactgcatggaaaattgcgatgaacgcgggtaataatgccaacggatcacaacgtaggatggttggaggaaattccgaatacattccctataacctttattctgacagatcctgctctacatctattaatattaacactagtacattcagcggtaccggaacaggtactctacaatcttttgacatttacggacggatccctgcaggaagcacttttgtcagtccaggtacttatatcgataccgtaacaatgacgctaatatattga

SEQ ID NO: 189131 - DNA, 822 bp, Klebsiella oxytoca
atgaaattagccagtcgttttggtcgggtgaaccagatacgccgcgaccgtcctttaacacgtgaagagctgatgagccacgttcccagtgtgtttagcgaagaaaaacatgaatcccgcagtgagcgttacacatacattcctaccattactctgctcgacagtttacagcgtgaaggttttgagcctttctttgcctgccagacacgcgttcgggaccagagccgacgggagcacacaaagcacatgctgcgtctgcgtcgtgccggacagttaactggccaccaggtccccgaaattatcctcctcaacagccatgacggctcatccagctatcagatgctgccgggtctgtttcgtggtgtctgcaccaacggcctggtctgcgggcagtcgttcggggaggtgagagttccgcataaaggggatgtggtggaaaaagtcattgaaggggcttacgaggtgctgggcatttttgaccgtgtggaggagaagcgcgatgcgatgcagtccctgatgttaccgccacccgcgcagcaggtactggcgcaggccgcgctggcgtatcgctttggtgaagaccaccagccggtgactgccgcccaggtgctctcaccccgtcgctatgaagaccgcagcaatgacctctggaccgtctaccagcgtgtgcaggagaacctgatgaagggagggctgccaggacggaccgcacagggtaaacgcagccggacccgcgccgtgaatggcattgacggggatgtgaagctcaaccgcgccctgtgggtgatgaccgaaaacatgctggccctgtctgaccgctga

SEQ ID NO: 189132 - DNA, 480 bp, Klebsiella oxytoca; identical to SEQ ID NO: 149421

SEQ ID NO: 189133 - DNA, 387 bp, Klebsiella oxytoca
atgcaaacgaaattacccttcatgcaggcggcatcgtcacgtccgtctcccgttgatgtctggcagactctcctgacctgcctgctggaacaccactatggtctcacgcttaacgatacgccgttcagtgatgaactggtgattcagcaacatatcgacgcgggtatctcgctggccgatgccctgaattttattgttgagaagtatgaactggtccgcactgaccggccaggcttcagcatcagggagcagtctccgtttattacggccattgatattctccgggccagaaaggctacagggctgatgaaccgtggcacgtataaagaggtgacggctattaccagaggacaacatccgcaggccagcacttcaggcaagcgatga

SEQ ID NO: 189134 - DNA, 276 bp, Klebsiella oxytoca
atgaacgagaagcgcagcagaggatcgaccaggcgcgcaatgatgctcttgatgctgccgctcgcgctggccggctgcagcagcagctcgttgccatccgtgagcagctcaggcagtataacgccactgtcggcgctgggacgtcagccgcagacaccggagttttgcttgccgacgtgctcgaaaaatctctcgaacgaaaccgacaactggcagaatacgctgaccgggcagcagaagccggaagggtatgcgaaagacagtacgatgaactga

SEQ ID NO: 189135 - DNA, 630 bp, Klebsiella oxytoca
atggacattatccagtttcagaaagctgctggcgtcagccaggatctggctactcgctggcatccgcacatcgaggcagccatgaaagagtttggtatcagcaagcctgaggatcaggcgatgttcattgcccaggccgggcatgaaagcactggctttacccggctggtagaaagtttcaattacagcgtggcaggcctggccgattttgtccgtgccggtcggctaactcagggtcaggcaaactctcttggccgccggcagggcgaaccatctttaccacttgaacgccagcgcgcgatcgccaacctggtgtatagcaaacgcatgggtaacaacgggccaaccgatggctggttttaccgcgggcgcggacttatccagatcaccggccttaacaattaccgggactgcggcaacggcctgaaggtggatctggttcagcagcccgaactgctggcgcaggatgagtatgctgctcgcagcgcggcgtggttcttcgccaccaaaggctgcatgaaatacaccggtgacctggtgcgggtcacgcagatcatcaatggcggtaagaatggtatcgacgaccggcgcgcgcggtacatcacagccagtaaggtgctgtcggtatga

SEQ ID NO: 189136 - DNA, 294 bp, Klebsiella oxytoca
atgacaggccatgatctgctgcttatcgccaacgccatcatatgcgcaggtattgcgctacgggtgatgttctttcagcgcaacggatcgcggcaccgccggtgggggggatggattgcctatttcctgattgtatcggcggccagcattccggtacgggcagcgtattcattcttctaccacttccccatggccgcagatctgtctgaggtcgtcattaatgcagtgatgcttgccgctgttctgaaaacgcgcggcaacgtcgtgcaaatcttcaagatatcgaggtcataa

SEQ ID NO: 189137 - DNA, 405 bp, Klebsiella oxytoca
atgtcaggaacgttaaccgctgacacagtaaatcaggggcttagctacggagcactggctgcagtcgtcgccggagttccgccggaggtggcgcttggctcactcgctggggcggtaatatttgtcacctcagcggttgaatatcctatccggcgccgcgttcttctgtcccttctcagctttctctgcggtcttctcttctacaagccaacggcatcggtccttatcgggctggccagcatgatcccgacaatcactcaggactctttcgagcgcggcattgtgtattccgccggcgctttcgttgcgtccattgtcgccgtgcgcgttggcatctggctgtatcaccgctctgataatccacgcgatttaatcccgggaggaaaagacgatgacaggccatga

SEQ ID NO: 189138 - DNA, 3186 bp, Klebsiella oxytoca
atgacggtctcaacagaagtcgaccataacgactacacagggaacggcgtaaccacatcattcccgtatacctttcgtatattccagaaaacggatttgatggttcaggttgttgacttgagcgaaaacattaccgtgctgactctcgatactgactatagcgtgacgggggcgggaacgtattcaggcggcagcgtggtgctttcatcgccgctggcgaatgggtggcagatttcgatatctcgatcgctacccgttactcaggagacagacctgcgcaaccagggcaagttcttcgccgaagtccacgaggatgctttcgataagctgacgatgctgatccagcagtgtttcagttttttgcggctggcacttcgcaaaccttctttcatcgctaactactacgatgcgcttaacaaccgtatccgtaacctgcgtgacccgtcacaggcgcaggatgcagcgacaaagaattacgttgataatcaaatcgttgacaatactaatgcctggaaagccggtgatgctgtccttgaccaaaaaattgatgcaaactttagacggtcgctaagaattcctgaatcttatgttcctgaatattttgtaaagtctatcaggtctaatatgctggttggctgtaacgatcagggtaactttgtgccaattgcaggacaaaccgatacggctgatctggctataaaattagcttccttaggaggttctagtctaattggcgggttggggtttcttactcctgaaatgtttggtgctaaacgtgatggggttagtgatgattcagatgcggtattgcttgcaattgagagagcatcaatcgggcccacgaaaataatatgggttggtggcgggaaatacctatgcgacccggtaaacttcaatataccttcgggggtgagtattataggtgggggggcaggttcaggtttcatattccctacgccaccgtcatcggcaatgcatgagttttttacattggctggaaacggctcactcctcaaagacttttcaattcagtttaatactggggggctgggatctatcggagctgtacaggcttacggcgtatggttcaaggatacagcgactaattgccgcgccgagggccttactatagatggtaagtacactgatactgttatgggatttagtaacggattccgactaacaggtaatgacaacactatcagaaactgtattgtcacccactgctcaatgggggccaccgttcgtggaaccagactaagtattctggacagctactttgataacggatataccactgaggacggaactgcctggacgcaatctaaaccaaggtgggatgggatcgcttgcgagggaatattagactgcctgatatccagaaatacatgcactaacaatggacaatcaggaatatatataggtggtggtggggctggttatagttcaggaaacatagtaactaacaatcgctgcttccacaactggaacaggggtattgatacaggtatatcaggtacgcaaagttcgacaaatgatgtgcgcgatattactataacctcaaaccacttacgagataatcgtgaaactcagctttggttgtatgggacaaataactcaagggttatcgataactctataattgagacagagcaatatgatattctctttggttctcaggcaagttcctcacgcgcaggaattgccctaggccagtccaattggtgtgtaaacaacattattgataacaacgatatccaactgcgttcaaatactccgtttggggttgtgttcaatggtcttggacatttgattgcacaaactaaccgcataggtggaggggcctctaattattggtttggttctccggttaacatggcgtacgctaataaggtggagtacttcaaagcaacattttccccggtcctgcgcgctggcgctaataacgtcacactgacatctggtactgcctcatacacgataagaggtaatgaggttgagtatgatataagccttttattatctggatctggtggtactggcaatctgtatataggaacgctaccagcaaccgtaggcgtgattttagatgctcaggaagtgaacgtcagttactggacaggattgaactggttgctaattcctggaagtttgttgcaatcgtattttctgtctgatgacccatcgcagattgctatagtgaggaaatatggttccgatacaataaatgatataccttcatgtattggttccggaactaggctcaggattaaagctcgtgccattgtcaatgtaaacacaaagacagacagtgccacaggaatttcatttttcggacattcattcctgtcagagcagggttttgccaatggtgtggcagagtctcttggtaaaagagcatataactttgcaagaggtggctcatccagtaccgaggccgctcttgtgtttggggctatacagcatagctatatgcctgttggaggagtgattcccgccagtgggtccgttgatttatctccaaatgaagatgcagtttggtatgcgggaagtagtatagctacggttacccttgcaggggttcaggggactatttcttctgtcaacgtcagcggtattacaaacaaattgatattcactcgttccagtgctggcgatcctgtttccgttcccagtcctgtgccaatgactgttttgccatgggtaagacaaaactcatggagcaccaaacgtctaacagagcattccacgtttaagaatgacattgttattatccagtgtatgcgcaataaccccagttgggctacagggctaaccgatattgcgtcgatagtatcctcacttgggaccaataaatttgtaattttacctgaatttccgtacgagactgaaactactggaacgccaggcgctacaaccgttaatagttataacgctcagttaaaggcaacgtacccaaataactattgcgaaatttctggtgttgatatgttgcaaaactttaaaaataacgccaacccaaattatccatctgatgttacagatgtaagtaatggggttacgccaagatctctacgttatgactcgttgcacccttcgcgatacagacaagagaatgctcttcgttctggagtgcaggtaaactcagagtttgtcgcaaggttcattaaatcaaaaggatggtag

SEQ ID NO: 189139 - DNA, 261 bp, Klebsiella oxytoca
atgccagagcggtaccgttatcctatagaagaaggttttgcagagcgcattcataccccggcaggtgtcagatctctggttgagcagtcaaagttaatggagcttttacgtgagatgcaaaaagacgggcacgacgtcagcggagcagcagcggaactggtggcgctggtcaactacgtgacaagttcgcaggtctctatgcgtgacctacagacgcatctggattactgcgcaatgcagttgcggcagcaactcagatag

SEQ ID NO: 189140 - DNA, 639 bp, Klebsiella oxytoca
atgccacaacaactgctgaatccagcaaaggttactgaggttttcgctcatctgaacgaaactccagacaaccgcgcgctgtattcagagttagtgaacggcagtgatgtcacatctgatgtcaaaggcgtttctctggctcctggataccgcgttgtccgtgtagacgatcgtaagaaaggtgagattcctcaggcgcactttgaactggcattgataaacgacctcaccgaagaggtggtgtattacaaccgtgtcattatccagcctgacagctatctgaactgccgacctgtcacgcagattctggtatggagaacccagaagcctaagcatcgagctgtgcttcatgacttcgctggcattattttcttgaactacctattggaacgctatgacatcatcgtttcagatcgaaatcaaacgcatgagggcatgtctttctggcaggcgagaatgtatgacgccatggaaatgggcctgcatctatacggttacgacatgatgacatgtgagttgatagagatgtgcagcgaagaagagcttgaaagaggtgaaacttggttatggggagatgctgaaaactaccaaaacaggttggctatcatttccaagcacagacttccattgcaagaataa

SEQ ID NO: 189141 - DNA, 699 bp, Klebsiella oxytoca
atggcaagccaattcccttctacttctccagaaatcatcgttagtcatggaaaagccgtaacgacgacccgatccgttgctgacttttttaccaagcgacatgctgacgtcatcagaaaaatcgaaactattgattgctcgaaggatttcactgaacgcaattttgcgctgagtgattaccaggactctactggccgcacgctcccaatgtacgaaatgaccaaaaacggttttgtgttcctggtcatggggttcactggcaagcgcgcggctcagttcaaggaggcctacattgccgagttcgatcggatggaagcggagcttaaccgatcccggtattctggcactctcggcgatatggtcggcaccgcggcgcaggacaacctgaatcagctggtggagcgcctgcagcgcatcgttcttgaaggtgagtttatcccgggcggcagccggacggtaagatacgtaatcgaacccagccgcaaaacaggtaaagcgatggtcggcgacttcatgacgcagagcgaagccagcccggtacaaagcctgatggcgctgctcggccacgacggccacgatatcaaatcggtagagcaggagatgcacgcgctgcgtgagcacattaccagactatctcgggccatcggtgatattcacacccacgcccagtacatcagccacgctgtaagtaaaatctga

SEQ ID NO: 189142 - DNA, 561 bp, Klebsiella oxytoca
atgaaggaaattatattttttgtttcaatattgatgcctgcattttcttttgcagggcaaaatgtcaaatgcgaacttcaatactttgggaatagcgataaatttaaggtgactgagttttcttttatggggattccatctgattcatacctttatacctgtgccgactgtggaggtatccagataaacgtgttcccatctattcagtctgtcgcttcctactcatttgaaaacaatattgattttgaaaggaaaatcaatgcagaatacaacaggaaagacatagctaaacttgaaatggaaaatgttactcaaggtggaagaataaattacttaatcaccgatactggtttggcagagttttacccagagggcaaaaagacaagttacctatactttttagcaaagcaacaaaatgttaaagaaccagtaggttattcaggatttgttacttctaacggtgataagtcatgctcaattattgtgacatacccgggaaaagaaatgtcttctcagggaagtaaatcgctaagctactttatgaaccatatttcaatgtag

SEQ ID NO: 189143 - DNA, 2547 bp, Klebsiella oxytoca
atggctaacgaatttctgacgcaatgcgaaatgaccgtcaatacagctgccgggcgcaagctgtctgaggacgaaatggaatcgctggtgcgtgacatgaacgacaccaccaaccggatcctggctggcaatgaagccctgacgctggaagaggctgcgatgcgcgccgcgcaagagcttggcaaccgtgatcaactggcaaaagtaatcgaggcacgcaacaaagctataaacacgcgcattgctgcgcagcgccttggcgagcttcgtaggacttggaaagacagacctgacatcgggcttgaggcaatgctggttggccgtaatgacgcgcgtaccggctcacgccgatctgtatcgtctgaggtggcccaactgcgcggtaagtatcacgccggtatcaactacgatttcgaccaggccggactggttaaatttattgccagcggcagcaacgaccgggagatcgctgacgctatgtggcgcatcggtcgcggacagaaaacggacggaatgacgccgcaatcagtaagcgccgctaagatcataatgaagtggcaggaaactgcgcgcgtggatgaaaaccgtgctggtgcgtggattggcaagatgcccggctatatcgtccggcagtctcatgacatcctgaaaattcgtgccgccgggtatgagtcctggcgcaatgccattctgccgcgactggatgatgccacctttgacgggatcacagacagagaagggttcctgcgtggtgtctacgacggccttgcctccggtgttcacctgacatctgaaaatccagactggatgaatggcttcaagggatctgcgaatgcagcgaagcgcgccagccaggagcgcgtgctgcacttcaaagacggtgtgaactggcacgaatacaatgagcaatttgggaccggaagcctgcgagaagcagtattcggtggcctgaacagcgcagcgcgcacgacgggcatgatgcgcgtgctgggcaccaacccgcagaacatgttcaagtacctgactgacaccatcgcaaaagacgtgagcaagcagagcaacccggcggcgctggcagacttcatgaccaaagtgcgtcggctgaatcggacggtgatgccccaggttgatgggtcgctgaatatccccggcagtgtcggctgggcaaatgcctccgctaatgttcgcggctggctgcgcatgagccagctcggcggcgcagttatttcgtcttttaacgacgtaccgatctcggcgacagaaatgcgttatcagggccagaactttatgcaggcgctgaccggcgcaatgaagggccgcttttcccgttataccagtgatgagcagaaggagatcctgtcgtctatcggtgtatactccgacacgatgacccaggaaatcatacgccgcatgtccggcgacgacagcatgagcgggaagatgggacgcgcacagcagttgttcttcaaatacaacctcatgaatttctggacagaatccgggcgtaacagcaatgccatgatgatcaccaactggctggcgaagaacgccgatcagcagttcactgcgcttccggaagacctgcgccgcgttcttgacctgcacggtatcggtgatgctgagtggaacatataccgcaacatggacatggcagacagcgaagggcgcaaattcatgacgaccagcggtatccgcgctgtgccggatgaagtgattggtgactatgtggcgtcaaaaggcctgaaggtcaccgagcgctctattgctgacgccagagagacgctggagagccagctgcgcggttacattctggaccgactgaacatcgccatgtcagagcctggcgaccgcacgcaggcgtttatgaagatgggcacggtgccgggcacggtggcgggggaagcggtgcgcttcgcagggcagtataaatctttcaccgccagtttcatgcagaacgttctgggacgtgaggtgttcggacgcggatacactcccgccgggcttggtgagtctaaaaccggatcgctgaccaatgcgttgttacggaatggaaagggagccttccttggagctgcaaacctctttgtctgggcaactatgtttggttatatctccatgcaggcaaaactcatgctgaaagggcagactccacgcccggcagatgccaagacatttctcgcagccgcatctcaggggggcggcctaggcatcttgggcgacttcatgtttggcgaagtcaaccgcatgggggctggtccagtgacatcgctgatggggccggcagcatcaaacgctgacagcattattacgctgttccagcagactacgcgcggcgatgcagatctgggtgactggtatcgcacagcgctggacaatacgcctttccttaacgtgttctggctgcgcacagcaatgaatggtttaatattgaaccgtatacaggatgctcttgaccctggatcactggagcgctatcagcgccgtgttgaacgggagcagggtaacgactttctaatcccaccatcgcagttcatgctagggaaataa

SEQ ID NO: 189144 - DNA, 1707 bp, Klebsiella oxytoca
atgccaatttatacagatgatcctgggcagggtataaaccagccgttgtcgaatgcccaggcagggctgggtgaatcgcttctttcctcactaaaagaggggttcaacgaagggcctgtcgtatcaggctatcggttttcccaggccgagaggctggcgaatgatcccaattcgaccattgtcgccaaatcggatgccgatgctcgcctgaaagagtacggcgtgaaaagcattaacgtaccggaaagtggcgtcacacagtcgtatcttgaccatgtgatcagcgagcgccgggaatcgctggcgaaacagcagatcgccatgtcggccccgtccggatgggtagccactccgcttaactttgcagcaaatcttgccggttccatggctgatccaggaaacgtggcgctggcgctggtcccgttcggtggagaagcgaaggcggcaaccatgcttgggcgtttcggcgagcgtttggctaccggcgcgcggcttggcgctggccaggccattgccaccgtgccactcacggcacaggcagcagcagcagaaggcgacgacttcacctatggcaatgcgctggagagcaccttctttaataccctggctggcgggctgatgcacgcaggcggcgggctgatcgctgatgtagtgcgttcccgcagggcggccgctggtgaaaaccctgccaccccggcagacgctcagcccgtaactgatgctcagccaacgccggtggtcacgcctgacaacatcccggcaggtgtcaatattcctgagtccggcaccaacgctgacctgtcagcggcaatcgcgcgggatgcagaggcctatgcctacagccgcgcctatgatgatgtcgttccggaatatctggcccgtcagcaggaggtacagaccgggcgcgtcgacaacgtggccgatctgcgcactgagctggcggccaacaaccggcaaagtgaagcgcttgacgctacgctggcccagcgtacaaaagagtaccaggcgcaacgtatgaacttcaaagcggcgcgtgccagggcacagcgtgatattcagggtgagaaagacactatcgccgcgcgtaatcaggaaattaaccagacgcttgagcgcaacgccgccgcagaacaggcgcgcggcagagagtcgcaactgtcacgaaaagagatccccgacgacctggccccattaatcgaccagcgcgcacagaagatccgcgaaagcatgcagatgtcgccggtcgccggtgccgttcgtacagcgtcggcagcagtgcgggaggccgactggagcgtaaaccagcaggcttaccgcggcgcgctggcgcacatgatggaaggccgctcgcctgacattgagccattctatgaccttcacaaaccagcgctacgcgagcgtgctatccagcgcatccagaacccggtgcggcaagctgatgaaggttcacgcgccgtcagtgaaaccgccgatcgtgtgtggcaggatacgcagaaggctgaccatgaaatcacagcggccactgccgatctggaaaatgaatttaatatcagtgacgcgctgctgaacgacatagccacagataaccctgagctggcagcgtcaatgcgcaagaacattgccgcgatccgtgcagaggccagtgacgactctatcggcaaagcgtatcgcgctttcgccgcctgtatgattaaccgggggctgtaa

SEQ ID NO: 189145 - DNA, 2622 bp, Klebsiella oxytoca
atgccagttgtaccaaccgtcaccggtcgccaggttgaaagccgcggcgtgcagaccggaggatttcagaccgttgctcagccaaatatcagcgatgcgctggtgaatgtgggtagccaggcgcttgacgtgttcgcgcaggccaagcagcaagctgaccttgctctaacccaagatgcgactcaaaggctttatgctgctggaagtggattgatggatgatcccaaagaaggtttaatgactctccaggggaaaaatgctattggtcaggctcctgggtatatccagaaatttgataacgagatacaaactattgctggcacgctacctgagtccgcacgaaatgtgttcttaaagcaggctcagcagcagcgaatgcaatttgccactcaagcagagcggcatgaattaggacaacgcaggcagtatgagtccggtcagcaagacggttatttatccttgcaagctcagcaagctatatctaatccacagttgttcaaccaatcagctttgaatgccagagcctcaattatggcttatggacgagctcatggacaaagccctgaagagatcgaggcaaactgggttcaatggcgtgagcaagcaggaaagcaggcaactgacgctatctatactgccctgtaccagagaaaaatggggccggatggcagaattgaagtcactaataccgcatcagaaggccaattattttctgcgatgatctggcatgaaagtggcggaaatcagttcagcaaagacggcgcaccgctggtatctccgaagggggctgttggcgtagcgcaggtcatggaagataccgggccggaggctgcgcggcttgctggcatcgagtgggatcgtgataaatggctgaatgacccacgctataacgcaacgcttggccaggcctacttcggcgcacaaatgaagaagtatgacaataacccggttctggcggtggcggcgtataacgctgggcctggtgcagtagatggatggatcaaaaagtttggcgatccgcgcactggtgctatcagtaatgagcagttcgctgctgcgatcccttacgatgaaacccgaaactatgtggcgaaagtcactggcagcgctgtaggtattccgcaggatgcaacaatggagagtttaatgtcgcttccatcatggaacgccatgaatccttcaaataaatcagcaatgttaagtaagtgggctggtctctatgatatgcaggccgcagcaggtcgtgtttcattgcagagtcgtatgcaggatgacatggcgaaactggaggcagggaaagaagtaactcccatcactgagcatgaatgggctgcggttatgccgttgcaggccagcccggcggaacgcattcagttgcgtgagtccttccagcagtaccagcaagcgatgacgctgcaacctgtttatcaaaccatcgtgcagggttctgcgcagcagggtatcgcagctgtacagtctatggcaccacaggaagatgatcctgacttcaaatttaagcagagcctttacgcgactgcacaggccaagctaaatcaggtgatgaaggcgcgcgagtctgatcctggaacttggctgcaaaccaactctccagtggtgaaaaacgcctttgagcagtaccagaacaatcaggtgtccggtgaatatctggtttcccgcctgcaagctgagaaagaccgcctgggaataaacagtaagaaggtacttcctgactcgatggtaaacagccttatttctcagatcgacaacaataaggaatccagcgttacagccattcagtcggtggcacagtcctttgggaaatactctgatcaggtcatgcaacaggtgcaaaaaagcgcctacccggcgttgcaggtcatcatggcgaccaataacccgcgtgctgccaacgccctctggcaaaaccgcagcgtcaaaaccgctgatctacgtggcagttttgaaaaaaccgacgccgacagcgccgactcatcctggaatgaccaggccaaagcctttgccggaacgatggttgtccagcctggtggagccgccgtgtggaacaacttcaacgagcagggtaaacgtctgacctacacctatatgcagcgcggcatgtcgccaggcgacgcggcaaagcaggcatatcaggacgttctgggcgagcagtatcagaccaacggcacctggcgcatgccgaacaacgccggacacgatattcgcgatgttaacgatggcgctaactactacctgaaaaaactgtcagccgaccagatcatgccgcttatcggtgattcccgcctgccggatgaggttaaccgcgagcagagcatttcacgcattcgtgataacgctcagtgggtgactaacagcgacgaaactgggcttactctgatgatgaacggtctgctggtcaacaatgctcagggacagccgatcaccgtgccgtttgctgatctggcgaaacttggcgctggcaaccgcacgacctggaacagcctgaccaaattcgtgcagacgccggttaagtacacgcctggccagtcgaagaattacacggcggaaagtcagcgcgacaacctgatcaacattatccagaacggccagcagacgggacgataa

SEQ ID NO: 189146 - DNA, 540 bp, Klebsiella oxytoca
atgtgcgatccagtaatcgctggcggcgccgtgcttgccctgagtggcgtccaggcgcttagccagtaccagaacggcaaatatgcctcagcagtagcgcaacaaaatgcaaatgtcgcagaagctcaggcgcaggactcaatcaatcgtggaaacagccaggcagaagaggtgcgccgccgcaaccggcaggcagccgggacacaggcagctaccatgggagcgaccggcgcggatctttcctctggcaacgctctggacattttcggcgatactgcccagttcggcacgctggatgctctgacgactgttaataacgctcagcgtgaggcatacggttatcaggtgcaggcggccaactatcaggcagaagccagctcagcacgtaagcaggggaatatcggggcagcaacaacgttactcacggcaccactgaacgcttatggggcttataaaaccttcggcggcacatggaacccgttcacgcagagcaccgcagcccctatctctgccgcagttggcacaaaaaccggtcgataa

SEQ ID NO: 189147 - DNA, 465 bp, Klebsiella oxytoca
atgattaacgctcagatagtcccggccacagcagcgcacatcgctgaaattatcccccgcgttcgccttgccgacatcgaggagtttgccgccaccaatggctggagtgctgcccgcgtcctggagtgcggtttacgtacatcaacattctgttgcgccgggctgatcaatggccgggtggtaactgtcttcggcgttgcacctaaatctatgattggcggcgccggcctcccatggcttgttggtacggatgatctggaaaaataccagcgtactttcctgcgtcgctgcggaaaggtggtcagtgcaatgctgatcgcttatccgcatcttgaaaactatgttgatgctcgcaaccacgtcgccaaagcgtggcttcactggcttggttttaccctggaagacccggcgccgtatggcgtgcaggggctaccgtttcaccgtttccacatggagagaaagtga

SEQ ID NO: 189148 - DNA, 2478 bp, Klebsiella oxytoca
atggcagttagctggatacaaccaagcttttctggtggcgagattgcaccatcattgtatggccgcattgatatggccaagtaccaggtggctctgcgcaagtgcgataacttcattgtccggcagtatggcggggtagagaaccgacccggcacgcagttcatcgccgcggcgaaatacccggatcgcaaatgccgcctgattccgttccagttttcgacggtgcagacctatgcgctggagtttggtcacaattacatgcgcgtcatcaaagacggcggcctggtgctgaccaccggcgatgtaatttacgaactggcaacgccgtatgccgatagtgacgttttcggcctgaagttcacgcaaagcgccgacgtaatgacgatcgtgcatccggcatacccgcctaaagagctgcgccgttacgcgcatgacaactggcagatcgtcgacgtccagactaccaacggcccgtttgaagatatcaacgtcgatgagtcagtaaccgtttatgccagcgccaccaccgggacaattacccttactgcgagctcggccatattcggggctgagcaagtcggaaaactgttctatctcgagcagccggcggtcgattctgtccccgtctgggagaccagcaaagataccagcattgacgatattcgccgcgcggacagtaactattatcgtgccaacactgcaggcaaaaccggaacgctgaggccctcacatacagagggtatgtcctgggatggctggggcggtaccggcgatgatgataccggcgtgcagtgggagtatctgcatagcgggttcggcattgtaaggatcacagccgtcgccggtgacgggcttactgcaaccgcagatgttgtctcgcgagtacctgaaaatgcggtgggcgttgacaaggacagctataagtgggcgcggtacgcctggaacagcgtagacggttacccggcgacggtggtctattaccagcagcggctgtactttgctgcatctcctgcatacccgcaaacaatctgggccagccgcaccggcgactataaagacttcggcaaaaataacccgattcaggatgatgatcggattgtttatacctatgccgggcgacaggttaacgagatccgccaccttatcgatgtcggttcgctggttgttctgacttccggcggtgagtttgttgtgaccggcgaccagaataaggtgcttacgccatcggcgttttccctgagctctcagggctcaaatggcagcagcgatgtgccgcctatcgccgtttctaatatcgcgctctttatccaggaaaagggtagcgtggtgcgggatctggcttactcgtttgatgtggatggcttccagggtaatgacctgactatcctcgccaatcaccttttccagaaacgcagcattgtcgactgggcattttgcattgtcccgttctccagcgcgttttgcgtgcgtgacgacggcaaactgctggtgctgacctatctgcgcgatcagcaggttttcgcctggtctccacaatccagctccgggaagtatgaaagcacgtgcggaatcagcgaaggtagcgaagacgcgatctatttcgtggttaaccgcaccatcaacggccagacgaaacgctatatcgagcggctcgccagtcgccagtttactgatgacctcgacgctttctttgtcgatagtggactgacctatgacgggcgcaataccggcagccgggcggcaactatcagcggcggcagcggcgactggagttatcaggttccgtataccctgacgatgagcggcagcagctatttcactgcaggtgatgttggcgcgcagatccagttcccctacaccggcagcgacccggacgatggcagcgatgttgccatgcagttgcgttgcgacattatttcggtggaaagcggtaactcggtgactgtgacggcaaaccggaatattcctcctgtcctgcgcaacaccgccaccactaactggtatatggcccggcagacattcgccggcctcgatcacctcgaagggcaaaccgtcaatattctatcggatgccagcgtagagccgcagaaggttgttaccggcggcgctgttacgctggaaaagcccggcgccgtggtccacatcggcctgccgattaacgcccagtttgaaaccctggacatcaatattaacggtcaggagacgctgctagataagaaacagctgatcaacaccgtaacattagtggtaaacgccagccgcggcatctgggcatcaacgccaggcggccagtggtacgaataccctcagcgcgaattcgagttttacgacgatccggttgacgacgccacaggtaaagtcgaggtcaaactcgacagcaactgggataaaaacggtcgggtaaaaatccgtcagactgatccgctacccctctctgtgctggcggtgatcccccgcataaccgtgggaggcttttga

SEQ ID NO: 189149 - DNA, 606 bp, Klebsiella oxytoca
atggcctcagttattgagatctgcaaccgcgcgctgagcaacatcggcaacaaccgcagcattaacagcctgaccgaggcgagcaaagaagccgggcagtgctctctttattatgagtctatccgggatgcggtactggctgattttgaatggaactttgctaccaaaaatattgctctcgccgataccaacaatccgcctcaggactgggcttttgcatacacgtacccgactgactgcctgaagattattgaaattccggttcccggtgttaggtatccgacatctgcgatgcgtgtggaatatgtggttggcgcggacagcgccggcactggacgcctgatttataccgacatcccgcaggcatggctgcgctatgttgcccgtatcaccgatgtgaacatgttcgaccccatcttccaggaggctctttcctggaggcttgcggcggcaatcaacatggtgattaccggtaacgccgatctcggaaataacgcgctgaatatgtacagccgcgtaatcctaagcgcaggctctcacagcatgaacgaatcgcaggagccgcaactgccggacgatccgtttaccgtagcgaggatgagctga

SEQ ID NO: 189150 - DNA, 324 bp, Klebsiella oxytoca
atggaaatggtcaatctcaaaaccggcaccgacagttaccaggatgaaagcggagagactaaaacccgcgacgaatacccgtggggactgtgcatcaccctgaataacgacacgctgaacaagcttaaggctcagcctcagaacgtcgggacggaagtgatgattactgccaaagcggtgatcaaaggcatttctgcccgtgaaggtgatgatggcactttccgcagcgcggatctgcagattaccgatatggcgctggcgcctgtttcgggtgaggcgccgaagacggccgcacaaactctttacggtgaagggggcgaataa

SEQ ID NO: 189151 - DNA, 345 bp, Klebsiella oxytoca
atgtctggtgaaaaagcaaaataccgcgttcttcgcttgtcacatatcaacagcaatctgtggccggaaggctcagaggttgaatatgacggcgagcctggtagcgctcttgagccgctgaacgatgcggcaaaggaagccaaggcaaaggccaaatctaaaggcaaggcatcagcaacggttaaggcggtttctgagccgctggacgatgcggatcctgatgacgatctggataagctccgcgaagagtatgaactgctctttaacgagaaacctcatcacaacaccaaagccgaaacgctccgcgagaaaatcgcagataagcgaaaagatttaggcgtctga

SEQ ID NO: 189152 - DNA, 438 bp, Klebsiella oxytoca
atgatcctcgacaaactgttgatgttctccgaagcgcaggcggttacagctactgctgcttcaactgatgtgatcgaccttggcccaatcgacggcacccgccgcgatatcggtattggttatccgctggaattctgggcgctggtgaacaccgccgcaaccgctgctggcgctgctactgtcaacgtgcagttgcagaccagcccggacaatagcacctggacaacgctgtatgacagcggtgcgcaggctctgtcggcactcactgccggtaagcgcattgtgtcggcgaaagtcccggcgggcgttctccgctatctgcgcgtgaactattccgtgggaaccggcccgcttactgctggcgcgttcacttccggtattaacctggatgtggatgcaaacacgccgtatccgatccgctccaaagtgacaggctaa

SEQ ID NO: 189153 - DNA, 987 bp, Klebsiella oxytoca
atggctgttaaaggcttaactgcgctgacgctggcagactggggcaagcgcatcgacccaaacgggaaagtcgataaaattatcgagcttctttcccagaccaacccaatcctgcaggacatgctgatcgttgaaggcaacctgccgaccggtcaccgtaccactatccgctcaggcctgccgtcagcaacctggcgcctgctgaactacggcgtgcagccgagcaaatcgacgactgtgcaggtaaccgatgccgttggcatgctggaaacctacgcggaaattgataaatcactggcagatctgaatggcaatactgccgaattccgcctgtcagaagaccgcgccttcattgaagccatgaaccagcagatggcgcagacgcttttctatggtgattccagcgttaacccgcaacagttcatgggcctgtcttctcgctactccagcaagtcagcaggcaacgggcagaacatcatcgacgctggcggcaccggaaccgataacacctcaatctggctcgttgtatggggtgaaaacacggttcacggcatcttcccgaaaggtcaaaaggctggcctgcagatggaagataagggccagcagacccttaaagatgccaatggcggccagtatgaaggctaccgcactcactataagtgggataacggtctgactcttcgcgactggcgctatgttgtgcgcatcgcaaacatcgatgtgagcgatctgtctgatccggcggcagccgcaaacatcgtaagcctgatggtaaaagcactgcaccgcatccctaaccgtggcatggggaaaccagttttctacatgaaccgcaccgtggcgcaggcacttgacctccagtccctggataaagcatctctggcgctgagcgttaaagagacagaaggggaatggtggaccagcttccgcggtgttccgattcgcgaaaccgatgcgctgttggaaaccgaagctcgcgtggtttaa

SEQ ID NO: 189154 - DNA, 690 bp, Klebsiella oxytoca
atgaatttatttgagcgcctgctgtatcgccgcctttgcaatgagcaaccagctgatggtggcgcggcgccggcggcatctgaacctgcagctcctgctggcgacacctctactccggcatcagagcctgcgcaacaggaaggcgataaacctgccgatgaaggcgcagagcagagcgataaggccgataagaaagacggcgaaaaaccagaagagaaggacgaacagaaaccggaaggcgcgccggagaaatacgaattccaggaaggcgaaggcgttgagctggacgccgaagcgctgaaggacttcgaaccggttgcccgtgaactgaacctgaccaatgagcaggcgcagaagctggttgatgcgtacccaaaaattctggccggtgtgcagcagcgtcagacagaagcctggcaggcgcaaactgagcagtgggccgctgacgttaaggccgataaggaagtaggcggagacaagctgacggcaaacctcagcgcagcgcagcgcgcgcttgatcagttcggtactcccgagcttcgcgaatatctggacggcactggactgggtaaccatccggagctggtgaaggcattcattaaggtcggtaaagcgatgtcggaagatggcgtgattactggcaaagaaagcggccagcgtagtgctgccgaagtgctctatggcaaataa

SEQ ID NO: 189155 - DNA, 324 bp, Klebsiella oxytoca
atgagccagttacagacccagcgtgtagttcgcctgaatggcgcaaggcaggttgtcgaggttcccgatccggcggcggcggtaattggcgcgccgacaacgactgattacggcggcgtgaagcttggcgcctctattgcggcggcggcagcagccactgcaacggcagatacagcttctgctgcaaccgatgttgccggacttcttgttgaccataacgacctggtgacgaaatacaacgcgcttcttgcggatgctgcggcgcttcgtacaacgctgaacgctgttcttgcgcagctgaaagccaaaacgatcccggtttaa

SEQ ID NO: 189156 - DNA, 300 bp, Klebsiella oxytoca
atgacagattttgacgatgaccagttagcggctgaatccgcgcgcaagaaggaaatccttatgcagcgcgacatcgacgacatccgtttcgtgatggatagcgcgcagggccgccgggttatctgggctgttctggagcaggggaaagtgttctctgcctgctttgcaggcgacccgcaggttacagctttcaacgaagggcagcgcaacctggcgctggcattgtttcagcgcgtgatggcgcactgcccggatcagtatctgaagatggccgcagaggctaatgaggaaaccaaatga

SEQ ID NO: 189157 - DNA, 1683 bp, Klebsiella oxytoca
atggcagcggaaaccctgaaagagcaactgcaaaaacagcaggatcaactcaccaatgatcgttcatcgttcgaaccgcactggcgcgaactgagcgacttcatcaatccgcgtggttcccgtttcctggtcaccgatgtaaaccgcgatgaccgccgcaatacgaaaattgttgaccccactgccacactgtcagcccgtacgctgtcgagcggcatgatgtcggggatcacttcaccggcgcgcccgtggttcaagctggcaacgcctgaccctgacatgatggactatggcccggtcaagctctggcttgaagttgtccagcgccgcatgaatgaagtgttcaacaagtcgaatctatatcagtctttacctctgctttacgccagcctggggaattacagcaccggcgcgatggccgtccttgaagacgacagcgatgttatccgcacgatgatgtttccgatcggcagttactacatggctaactccgcacgcggcagcgttgatacctgtttccgtaagttctcaatgactgtgcgtcagctggtgatggaatttggcatgaaaaatgtcagcacctcggtgaaaagtctgtgggatgccggtagttacgaaagctggatcgaagtggttcacgccgtttatccgaacatcgatcgcgatactgccaagctcaacagcaaaaataagccggtcaaatcggtttattacgaggttggcggcgacagcgacaaagtgctgcgtgagtcaggtttcgatgaattccccattatggcgccgcgctgggaagtcaacggcgaggacgtttacggctcttcctgcccgggcatgattgcgctggggcaggttaaggccctgcaactggagcagaagcgcaagagtcagctcatcgacaaagcgacaaacccgccgatggttggtccgtcatcgcttaagaatcagcgcgtttctcttttgcctggcgatatcacatacatcgatcaggtcaccgggcaggacggatttaagccagcctatctggttaacccgaataccgccgacctgctcgccgatatccaggatacccggcagatcatcaacagcgcctactttgtcgacctcttcatgatgttgcagaacatcaatacccgctcgatgccggttgaagcagtgatcgagatgaaagaagagaagctgctgatgctgggaccggtgctggaacgtcttaatgatgaatgcctgaacccgcttatcgatcgcaccttctccatcatggcgcgtaagaacctcctcccgccgccgccggacgtcctgcagggtatgccgctgcgcatcgaatacatctccgttatggcgcaggcgcagaaatctatcgggctatccagtctgtcatccaccgttggttttattggccagcttgcacaggccaagcctgaggcactcgacaagcttgatgttgatcaggctatcgatgccttcgctgaaatgtccggcgtatcgccgacggtcatcgtaccgcaagaacaggtcgagcagattcgccaacagcgcgcgcagcagcaacagcagcaacaggcgatggcaatgggcatggccgctgcgcagggtgcgaagactctcagcgaagcgcagaccgcagatcctagcgttctcaccgcactttctaacgcagcaggcgctcctgcaggtggtcagcaatga

SEQ ID NO: 189158 - DNA, 207 bp, Klebsiella oxytoca
atgtgcatcggaagttcgccatctgtacccgcagcgccagagattcaggcagcaccgcaggagcaggatcaggccgtagtcgattcccgtgatgaagaaacccgccgccgccgtgccgccgcaggcagagcatcgactctgctcactggtgcccagggtgacacctcaacagccaacaccagcggtaaaacgctgctcggccagtaa

SEQ ID NO: 189159 - DNA, 333 bp, Klebsiella oxytoca; identical to SEQ ID NO: 92931

SEQ ID NO: 189160 - DNA, 177 bp, Klebsiella oxytoca
atgcgaaaaaaaagaattggagccagggagagaaaacggaaagaggctgataagctggtgatggagcacatgaaaataattgcagacaaaattcatgaagttaaccaaagcattaagaatagtgagtttgaattaacagaaaccattctcaatactccatatttcaaagtcagataa

SEQ ID NO: 189161 - DNA, 1470 bp, Klebsiella oxytoca
atgacagccgcagccatgtcgccggaagagcagcttgtcgaggatatcgcctcgttcacctatgaccctctcggctatgcgctgtatgcgtttccgtggggcgagaatggcacagagctggcgcacgccaccggcccccgtaaatggcaggctgatgcattccgcgagattcgcgaccacctgcagaacccggcaacacgtcatcagccgctgatgctggcccgcgcatccggtcacggtatcggtaaatctgctttcatctcgatgctgattaactggggcatgtccacatgcgaggattgcaaggtggtggtgaccgccaacaccgacaaccagctgcgcaccaagacctggccggaaatcatcaaatggtcgaacctggctatcacgaaagaatggttcacctgcaccgctacggcgatgtacagcaacgatccgggccacgacaaacgctggcgtgctgacgcaataccatggtccgaacacaacacagaggcgttcgccgggctgcacaacgagcgtaagcgtatcatcgtggtattcgacgaagcgtccaacattgccgatctggtgtgggaggtagcagagggcgcgctgacggatgaagacacggaaatcatctgggttgcattcggtaacccgacgcgtaacaccgggcgatttcgcgagtgcttccgtaagtacaagcaccgctggaagtgcgcgcagatcgacagccgcacggtggaaggcactaacaagcagcaactgcagaaatgggtggacgactacggcgaggacagcgactttgtgaaggtccgcgtgcgcgggatattccctgacgcgtcagaactgcagtttatccctaccggcctgaccgacgaggccatgaagcgagtcgtcaccgcggcgcaggtggcacatgccccggtgattatcggcgtcgacccggcttattccggcgtggatgatgcggtgatatatctgcgccaggggctgcacagcaaggtactctggaccggcaacaagaccaccgacgatttgattatggcaaagcgtatcgccgactttgaggacgaatacaaagccgatgcggtatttatcgacttcggatacggtaccggcctcaagtccatcggtgacggatggggccgctcatggcagcttgtgccgttcggcggcgcatcgacggatccgcagatgctgaataagcggggcgagatgttcaactcctgcaaaacgtggcttaaactcggtggtgcgctggatgaccaggagacggcagacgacctgtctgcggcggagtacaaggtcagggttgacggtaaaatagtcatggagccgaaggaagatatcaaagagcgcctgggtaggtcgccgggcaagggcgatgcgctgctgctaacgtttgccttcccggtcgccaaaaagttgaatataccaggacagcagcagggcaaggccatcactgactacgatccttgggcgtag

SEQ ID NO: 189162 - DNA, 585 bp, Klebsiella oxytoca
atgccaaaggaccccaaacgcaaatccacgcagtacaagccgctgacggcaatgcaggaagcttacgcccaggaatacactaaatgccctgaaaatcagactcaggcagcgattaacgccgggttttcgcctaagacagcagccgtcaaagccagcgtcatgatgcgcgatgagcgcattcagaaacggatagctgagctgatggaggagcgtaacaagcgcctgcgcgtcagcgccgattacgtgctgctgcgcctggttgaaatcgaccagatggatgtgctggatatcctgaacgatgacggcagccttaagccgatccgcgaatggcctaagatatggcgcacaaccctcagtggctttgacctttcgtccacaatcatgaacatggatgagacatcgatagagaccatcctcaagaaaataaaatggcctgacaaggtgaaaaacctagagctcatcggtaagcacgtcgacgttaatgcgttcaaagagcgcctggaggtttccggcacagtcacgattgccgaccgcatggccgccgcccggcgccgcgtcaaagaacaggctggtggtgaagaatga

SEQ ID NO: 189163 - DNA, 330 bp, Klebsiella oxytoca
atgggttttccatctccggctaaagactacgcagaagcagctcttaccatcaccagcctttgcggctatgacggcaattgccgcacactggaaaccagcgcgggttacgcaatcgttgatatctcccgacgtccaaagcaaggggatcaagtgctaatcgctttttgcgggagtacgcaattcgcctttgttcgtggccaggcgctaatcacagacgacggtgaggcgatcgagggggaggccctcaatgatgttgaggtgaaaggcgtgattaggttcatgataaaccgggcaggctggcagaaagaagatgatattccgatcatgtaa

SEQ ID NO: 189164 - DNA, 339 bp, Klebsiella oxytoca
atggctaagacttcagcagagagaaaggccgcgcagcgcgcgcggcagtcatccgccggtgagcgcaaaattgaactggtgctggatgaacaggagcaggaaatgctggcgcgaagctgcgccgcccggcgccctggtcgtgatccctacgaaatgtccgagtacatcgcgttgcttatccgccaggatgatgcccgggtgcgcgggcgtataaaatcgatcagcagaaaacgttgcggtaagtgcggcgagagagttcctgtgaattcatgcccgtgtaatggtgactcgcaatgctgggtgaccaaaggctggcatgaaacgaaattaatagtgtga

SEQ ID NO: 189165 - DNA, 198 bp, Klebsiella oxytoca
atggataagtgccaaggtattttcggcaaaatttttggtcattcattccgcgtagcgataacaaaaggcgctccgtctatgaatctcaaggcggcagaagcaggtatttcgtcaattttgcaaatgatggaaacatctaggccagaaacctatcacggaatctactgtaaacgctgcgggaaggttatcaatggctaa

SEQ ID NO: 189166 - DNA, 189 bp, Klebsiella oxytoca
atgaaaatgggtgaacacatggagccagttatcgagctcctggaagaactgaacggcaacaatactgacgcaaaactaaagctactcgtcctggttatctcggaatacatgataaatgcggatgttactggctttgaggtcaccgcggggaagatgaaagtttccgtagatataagcgtggaggaatag

SEQ ID NO: 189167 - DNA, 831 bp, Klebsiella oxytoca
atgagcaatcaaatcaagcatccggctattcgttaccacggcggtaaatttcgcctggctccgtggattatcgagcagatgccggatcacgtctgctatgtggaacctttcggcggcgctgccggggtgttactccagaagccgcgcagctattcagaggtgtacaacgacctcgacggcgaagttgtgaacctgtttcgtatactgcgtgaccctgagatgaaccaactcctgcaggatgcctgctgcctgactccgtattcacgagatgagttttgtcacgctcaggagccagcgacagattctatcgaacgtgcccgccgtatggttgttcgtgcctgtatgggatttggttctgctgctggctgcggcggtcagtccggtttccgctgcgacagtaagcgcaaatacgctacggcggcgcatttgtgggagcgttacccgtcaaacctcgcagctgtctgccagcgtctgcagggtgtcattattgagaacaaagacgctctggcggtaatgcgcgcccacgacgcagaaacaactctgcactacatcgatccgccatatgtgccggaaacccgcgtacagggtaatcgttactacgcgcatgaaatgactgttgaagggcatgagcaattgctcgcagtggccagaacgatgaagggcatggtgatgattagcggttacgacactgaagtctacaacgacatgctatccggctggacgaagaccgagaaaacatcgcgcatcagcgcagggcgcggaaccaaagttcgtacggaatgcctctggcttaacccggcagcacagcagaaacaggagcgtgcagcatga

SEQ ID NO: 189168 - DNA, 402 bp, Klebsiella oxytoca
atgaataacgaactcacagcagcactgttaactatcgagaaatgccgcgagctttcaggctgcccggctggcgtagacctgcaggactgggtgaagctgctggcggcggagaatgttgggctaaaggagtaccggcctgaaccgtacggaattgcaatgatggaggcgctggatgtgttctttgccgatgaagaggttccggagcgcgcaatgatggcggcattcgaaatcctgtgcgctaagcgaatgccggttccggccaccgatcgcatcgtagcagaagccgaggcgcgcggagttgagaagttcgcgaaaaagcttgagtcacgtggaaggcatcaggactacgttgaaattgccaacgccttcgccaagcagctgcgcgagggggccgacaaatga

SEQ ID NO: 189169 - DNA, 132 bp, Klebsiella oxytoca
atggactttatgaatcacagcgggcgcactttacgggtgtatgcgctggcgttgaactttctggtgctgatcgcagttgttgtgctttcggcttttggtatctggcttgttaacgaatgggtggcagcatga

SEQ ID NO: 189170 - DNA, 345 bp, Klebsiella oxytoca
atgaagaaatcattgcaggcgctcgggagactcaaagccgggcagatgaataaaaccgagacggcttactgccagcacctcgaactgcgcaagcgctacggggaaatcgcctggtaccggtttgaaggaatcaagctgaggctggctgataacacgttctacacgccggatttcgcggtgatgctggcgaatggacagatggaaatgcacgaagttaaggggttctggaccgacgatgccagggtgaaaacaaaagtcgcagccgaccagtatccattccggatcatcggggtaacgaagctgccggccaaagcgggcggcgggtggaaggtcgaagagttctga

SEQ ID NO: 189171 - DNA, 771 bp, Klebsiella oxytoca
atggccagtagctggataaaagttgaggtaatcacgccagataaaccggagattttccagatagcggaaatcctgaatatcgaccccgacgcggtactcggtaagctcgttcgcatatgggcatgggcagatcagcagaccgttgacggtaacgctggcagcgttacaaaaggagtgctcgaccgtatcgcttttattacaggattcgctgatgcgcttatcgccgttggttggctcgcctacgacggcaataagcttttattgccaaactttgagcgtcataacggggaaagctcaaaaaaacgggcacttacaaacagaagggttgcggctcaccgtaaaaatgaaacgcaaaaagtaacgcagtcagcgttacaaaaagcgttaccagaggaagaggaagaggaagaggaagaagtaaaagataaaaacccccctaaccccccaaggggaagggagcctaaaaaatcatatccgtatcctgagcagctcaatgctgaagcctgggaggagtggaaggcctacaggtcagaaatgcggtttaaatcctacgcgccaaccgaacggagcgagggggcggcgatcaccgagttgattaacttatctggtggtaaccacgcgcgacagatgcagatcgtgaagcagagcatggccaaaggctggaaagggctgtttgagctgaaaggcggaacggaaaggcgagatgtaaacgccatctctgagcctgatacgcagatcccgccaggattcagaggcgggccgacacactga

SEQ ID NO: 189172 - DNA, 639 bp, Klebsiella oxytoca
atgaaagaacgtggaatgatttttaatggagaaatggtgcgtgccatcctcgacggccggaagacgcagacgcggcgcccagtgaaattccctgtacatgataaaaaccttgggtgcgagctggctggcaatgaactggccggggagctgtcggcaggcaactatctgaacagcgcatttggtaaaccaggcgatcgaatttgggtgcgcgagacatttcgtgtccatagccgggctaccgacgtcgccacactggtatacaaagccagcgtgcgaaattcctggacggagcaaacccaccgcgtgcctgtatcggtctgcaataaaccggcaacgcctgagaagtggacgccatcgctgcacatgccgcgctgggccagccgcattctactggaaatcaccgacgtgcgcgttgagcgtcttaactcaatacacgatgtcgatgctatgcgagaaggaatacagaacctgacgacatgttcacacgctgatttcggcattcctggcgtcgtaaatgcgcaacatcctgtacgggcgtttcaactgctatgggaatcaatctatggcgctgacagctggaagtttaacacctgggtttgggttatcgaatttaaggtagtcaattgcggaggtgattga

SEQ ID NO: 189173 - DNA, 204 bp, Klebsiella oxytoca; identical to SEQ ID NO: 103258

SEQ ID NO: 189174 - DNA, 234 bp, Klebsiella oxytoca
atgagcgaagaaaataaatttaatttcaaaaagtgctggcttgatttgtcgcccgctgagcgcgaggcgtttgctgcggaagccggaacgaccagccattacattcagacccatctcaccgggcgccgcaagatgccacgcaagcgtttgatggacggactgtttaaagcgtgcaaggcccgtgaatggaccaggaataaaaacgacctcgtcctctacttctgcgacctctga

SEQ ID NO: 189175 - DNA, 588 bp, Klebsiella oxytoca
atgaaaagcatctacgacatacgacgtgataacctcaacgaaataatccggcagaacttcgataacacgcagttgagattcgccgaaaggattaagaaatcgcagaacctggttaacaggtggtgtaagggtacgaaaaacatcggcggcaatgccgcacgcgagattgaggctttcgcaaggaaggaacgtttctggctggacatcgatcacatgtctgatgcacccgcgcaactcgggctccttaacccggatgaatggagcgtggaaaagcaggcatctttcaccctcggcctctggatgggttcgcacccgactctgaactctgagaaaaaagtctctgacgctgccggtattggccaggccaccgttaaccgcattctgaactgcgacggcagcaccagcatcggcgtactgcatgcgatagcgcgggcctttggcagagaagcctacgagctgattatgccgtctgacgcgcgcggcatgattgagtatgaccaccaggctttcgaaaaacttccgcaggaagagaagaacaagatcaccgcgttcattgacttcattttcagtcagaacagagaaagctga

SEQ ID NO: 189176 - DNA, 150 bp, Klebsiella oxytoca
atgcaatggcaaatcattaacggctggtactgcgtcacggcttgcgggctgatgagctggaagtttcgcacgctgcaggaggctatcagctgggcattcgtcagcaaactggcggcaaaaacggaaatggatatgggggtgttcaagtga

SEQ ID NO: 189177 - DNA, 303 bp, Klebsiella oxytoca
gtgatctcgactcaacagcaacgcaatctgcaaaaaatcatggccggtttcgacagcgactatcgcatcgccgaagtgttgcatgccaggcaggtagagcttcaggaaacgcttaagactgaatacctgctcccggcattcgacaatctacgccgcgccggggttcgccaggacgtcattaacgctgcacttgaaagcgttgagtttgaagaatcactggcggcattcatcagcgaactgaccgggatcgtcggaaagtgggatcttgcagaccagatcgacagcgcgaggacagcggcatga

SEQ ID NO: 189178 - DNA, 822 bp, Klebsiella oxytoca
atgaacccaggtatctatttcgacatcagcaacgaggattaccacgccggcgacggcgtgagtaagtcgcagctggatatggttgccaaaaaccctgccctgctgaaatgggttaaggcagcgccggaagatgaagagaaaaagtccgcactggacatgggtaccgccctgcactgtctgctgctggagccagaggaattcgataagcgcttcatcaaagagccaaaggtggacctgagaacgacaaggggcaaggcaaccatggctgcatttaaagattcaataaagggatcgaatatgacgccaatccctgatgaagactggagaaagctcgggttaatgcataagagcgccatggctcacccggcggcgcgttggatgctggaagccccgggttactgcgaagcatcgatgtactggaatgacgatgaaaccggcgagctgtgccggatccgcccggataagtggctcaatgagcacaacgtgatcgtcgacgtgaagaaagtagccgacatggaacgctttgcacggcacatcgaggaattcagataccacgtccagaacgctatgtactgcgaaggcgcgcaaaaggttaccagagaagtacacggattctttttcctggccgtcagcgaaagcatcgactgcggtcgctatccggtgcgcgtgtttgaacttgatgcgcctgatgttgataccggaatggcgctgttccgccgggatctgaatacctatcaccagtgtcgcctgtcagatgaatggggcggcgtggaaattattaaacgccctgaatgggcacgcaaacaggatctgtacgtatga

SEQ ID NO: 189179 - DNA, 882 bp, Klebsiella oxytoca
atgagcaacgacatcacaatcacttctcaaccaggcgctaccgtcggaaccgcggcggcaatattcagtccggaaggtatggatcgcctggtgcgcttcgccaccctaatggcagacagcaaagccactgtaccggtgcaccttgctggtaagccagctgattgcctggccgtcactatgcaggccgcgcaatggggaatgaacccgttcgcagtcgcgcagaaaacgcacgtggttaacggcacgctgggctatgaggcgcagctggtaaacgcggttgtgtcctcatccaacctgctttcaacacgcctgaactatcgctgggatggtgactggtcaaaggtgaatggcaagagcgacaaatcaccttcgctgacagtgacggtatcggcggttctcaaaggggaaactgaacctcgcgaactgacaataagcatggcgcaggcaggtgtccgtaactcgccgctatgggagcaggatccgcgccagcagttggcttacctgtgcgttaagcgttgggctcgccttcatgctcccgacgttctcctgggggtatacacgcctgacgagttacaggagaccgcgccgcgcgtagagcgtgatatcacaccaccagcaagaaacgccgccgggatgaactcgctcatcaacgctaagcctgatcagcaaccggaagaacggaccagaaaatctgatgcccgcgatccggatgaaatgctgacagccttcactgatgcagcaatgaactacaacaccattgccgatctggataaggcatacaaatacgtcgctaaaaatctggctaacgatgatgagcgtctgtcgaaagcaaccgacgtctacaccatacgccgcgatgaactgaccgaaatcccgatgtaa

SEQ ID NO: 189180 - DNA, 249 bp, Klebsiella oxytoca
atgaaaggtgcattaggcaaaaaggaactgctggcggtggtgccgttatcaatgagcacaatcgatcgcctggagaagaacggccagttccctaagcgctggtatatcactgacaagcgctgcgcatggactcaggaagaagttgagaaatggcttgatgagcgaatggctgccagcccggtagagtttggcggaaaaaagccaccggttgaacagcgagtatttcgcccggtaggtaacgctgcgtga

SEQ ID NO: 189181 - DNA, 294 bp, Klebsiella oxytoca
atgaaccgtattgaaaaatatcacgctcagtacgctccgcagcgtagagcatcaaaggtcatcgccgttacacctgcagcccttgcgtttgaacaaagagcgatagagcgcgaaaacaaaggccagtatcgcctggccgcccgcctgtggcttgagtgcatggatgccgcgaccggagaggttgagcgcgcacgcattgcggtacgcagggatcagtgcatcggcaaaggtaatggcctgcgtcgtggcggctatgctgggatctgcgctactgccggggtggtttatgactaa

SEQ ID NO: 189182 - DNA, 594 bp, Klebsiella oxytoca
atgaaaggaaaatacaccctgatttatgcggatccgccttgggcatatcgcgataaggcagccgacggcgaccgcggcgccgggtttaagtacccggtgatgaatgttatggatatctgccggctgcccgtgtgggagctcgccgccgacgattgtctgctggctatgtggtgggtaccgactcaacctgtcgaggcgctgaaggttgtcgaggcctggggattccgtctcatgacgatgaagggattcacctggcacaagatcaataagcacaaaggaaatagcgcgatcggcatgggccacatgacccgggcgaacagcgaagactgcttgtttgcggtgcgcggcaagttgccagaacgtatggacgcgtcaatatgccagcacgtcacggcgccgcgcctggagaactcgcgcaagcctgacgttatccgagagaaactggtgcagctgctgggcgatgttccgcgtattgagctattcgcgcgccagtcgtctcacggtttcgacgtgtggggaaatcagtgcatagcgccggcggttgaactgcttccaggctgcgccgtgccggtagtaaaaacggaggctgcatga

SEQ ID NO: 189183 - DNA, 294 bp, Klebsiella oxytoca
atgaatatttcggaagaggcgtcgcttatccgccagctcgaagaggcgcgcgccgttatcaatcagcgcaatggggaaatattgcgtctgcagagagaggcggagcgctaccgagaacagcgtgattctgcaaatgcgatggttcagtttctgcgagagacctttgagaacagtaccgctacgcatctgcgaatttgtccttattgccagcagatccatgatgacagattagcgtgcccagcattcacgaaaacaggtggattattgttcggtcatccacctttcaaacgctga

SEQ ID NO: 189184 - DNA, 1251 bp, Klebsiella oxytoca
gtgcttaccgataccaaattaaaaaacctcaagcctcaggccaaactctacaaagtttcagaccgcgacgggctgtatgttgctgtgctcacgtccggcagtgtctcgttccggtatgactaccgaatcaacggccgccgggaaacgctggttattggtcagtatgggcgtgacggtatcacgcttgctcaagcaagggatgaactgatagccgctaaaaagcttctcaatgcaggccagtcgccagctgcggcgaagcgtgacggtatcaaacggatccgcggcgccgaaacattcgcggtacataccgacgcctacatgaaacatgtagtccttgctgaaagcaccagggcaatgaagcaggcggttattgacagggatatcctcccggcgctggggaataagctgatgtctgaaatcactacgcctatggtgcgtgacctctgcgatcggatagttgagcgcggcggccgtgcgacggcggtgcaggcgcgcgaaataatcagcagcgtgtaccgctacgccaatgaccgcgggcatgggttattcaatcctgccgcagatatcaaaccttcggcgatcgccatgtttaaaccgcgagaccgttgcctgcagccggaagaaattggcgttctgttcagggcgctggataccgtcagcacgttgccaactttaaaactggcggtaaagctcatcctgattactatggtgcgcaaaaccgagttcatcatggcgacgtggaaagaagtggatttcagcaaaggcacctggacgataccctctgacaggatgaaaggcagccggtcacacgttatttacctgccgacacaggcgcaggatctgatggtaggtctgcagatgtgcgccggtggcagtgactatcttctgccagggcgctacagcaccagtaagcccttatcgaatgcagctcttaactcagttatcgatcgcgcggtggctgctgccgtagatgctggagagaacctgcaacctctcactgtgcacgacctgcgccgcacagcgagcacgcttttgcatgaagcaggtttcccgtcagactggatagagaaggcgctggcgcatgaacaaaaaggcgtgcgggcggtttacaacaaggcggagtattcccgccagcgcgcctacatgctgcagcagtgggccaatatgattgatgcatggatagacggggagcattacgacctgatgccgttctccccttcagcgtttgaaaggtggatgaccgaacaataa

SEQ ID NO: 189185 - DNA, 1119 bp, Klebsiella oxytoca
atgaaattagtcccatttttagcgctctgcggatggatgattagcggcgctgcagcggcattgacacccgttggcccgactccgacagtctcgacgctgcaggattatgaaatcccttccggcgcgccagccgacatctatttatggagccaggactatgccggtacctatggatattacgacggcggcggcacctatacctgtcagtttaacgatgtacagcaaacctgcagtcatcaaaagaatagctcaacgattacgatgatcctgaaagaaaagcgcagcggcatgacgcatcctgtgaaattacaggcctatatggatcagctgtattataaccaagcagacccaacgcaatcaaaaatctgcggctctacattaccgttgaatagcgcagtttatactagctgctacaccagcacttcaggttacaaaactaacgccaggttgcttaccgtctggcttccgcagagcgaaatgaacaatcttccgatcggcgggatatgggaaggccagctaaagctcaaatatgctacatatagccgtaacctgaactacagcgccaatatcaccctaaaggggaaagcgccctcccgacaggacatctttttcccggaatttaacggcgcgaatccactggtgcagcttgatctgcaccctaccggttccgtgaccggtaataacctggtggaagatatcaccacgctggatatgtgcctttatgatggttttaactccaacagcgacagtatgacgctgtccttcagagatgagggaaaaggcgggtcggcacgaaaaagcggcgagttctccatctataacaccgcatactccgggaccggtcagggcgagcggatagactaccgggtagaaatgtttaacccccatacccacagctggatgacaatgaaaaattcagaaacagtgaagatctcggcgggcgctaacggtcaggatcaggtgcgtccggtacgcctgccgtcaatcacctatccggtactctgcgctccgacgccgctgcggctgatcgtcagcaaatttagtgtgtcgcaaaaatcagccggatattataaaggtaaactgaccgttgaatttagcccaagtctgaacagcatctga

SEQ ID NO: 189186 - DNA, 126 bp, Klebsiella oxytoca
atggatgatttgggcgccagcgcgacgccggctatttattacatgaatgagcagaatgagctccagcaggtcatcggcatgcccgacgaacagcagctgcgggagatgttcgggccagcgccctga

SEQ ID NO: 189187 - DNA, 699 bp, Klebsiella oxytoca
atgaaaaagcactatctgttgttaatgttgttgatttccgggctggcaggcgcaaatgatgtcgttgatattaacgttgaggtgactgccgatgccgccgcctgtacgcccgttctgagcaataatggggtggcggattttggcactcgctatgcgggaagtttatctaagggagcgtttaccccgctgggccttcgcgatctaactttaaccatcacctgtgaatcggcgacaggtgtagcaattactgcccgcgattcgcgcgtagattccatgaccagcggaaaagacagtagcggaaaggcgggtgttaaatttcaggttaacggtggcggctacatcagtgatgcctcacgactgtttggattgggcatgacgccggaagggaaaaagatcggcagctatgcggtacaaattaacgcgggttcggttgtggtagcggatgccgatgctgaagttaaggtagacatggccgggtcgagcgataagaatggcccctggtcagccgtcaacatgctaccccttccgaccaatcaggattatttttatacctttgtacaaaaaggaaccatgacgcctcagccgattatgacggccagcgtgccgctacaggtgagcgccgccgtcgcgccgaatatcagcagcaaccagaaggtgaagctggacggagaagccgtgattacgctggtatatctttga

SEQ ID NO: 189188 - DNA, 528 bp, Klebsiella oxytoca
atgaagcgcctatttcttagtattccgctgctgctgtacgtttccctgacgtcagcggagtgccggctcttacagagtcagcagaatctgagctatggccacttaagcgccgctgagcgccaggcccaaggggaaattattgcgctcccggagaaacaggtagtgcttaatattacctgcgacgaaccgcaacaaatccgtctgtttaccggaacggcgacgcctgaaggttcgcagttcgcttttggtgagcacgggaggatgttaattactgcttctcaggcggtggttgatgataatcctgttcgtctggcggcggtacatgctggtgacgcctcgctgatgaccaatggtgcagaccggataacagcacaggtcaatcagggaattgcttttgtgaatggtcaggagctgaaaggaaaaacggcttcggtgactttaacgattaaacccagctttaaaagcggttccatcaccgataaaacaacctggcgcggcaacctgcgcgtaaggatggtgacgcaatga

SEQ ID NO: 189189 - DNA, 2379 bp, Klebsiella oxytoca
atgcataacaaaacgctgctggcctgcctggtaagcctgctattaatccatcaggtcagggctgcaggaatggatctggcggccgttgacttcgacgagggtacgctcaaaactctcggcatcaacccaaacgtagcccactatttttcgcgtgaagcgcgttatctaccgggtagtacgtctgtttctcttaatattaatggcgtcaataaaggcagtgtgatagcccgctttaatgacgatggcgaactctgctttgataaagactttctgcaacaggccggattgaaaataccctcggactatcaggacggctgctatccttacgctcgggcgtttccgggtacggtagtgaacgcttctcccgcccaggaaacgctgactgttgttgttcccgctgaagcggtcgcacgcgtcgatgcagacatgtcgggttatacctcgggcggcacggcagcgctgctcaactactccctgatttcatcgcgcaatgaatttgccggcggtagttctgactattcgcaggcgcagctggacggcggactaaattttaacgactggctactgcgcagccatcaattgctgagccgctcggatggtcgctttaacagtgataattcatcaacctatttacaacataccttcagcggtttgaagagtaccgcccgttttggtgaagtgaacctgaataatattctgttgcaggggtcagggatctatggcgcggagtttgcgccggaaagcgcgcttacgaaaggaggtaacaatgtacggattcaggggatcgccaacactccgcaggcgcgcgtggaggtgcgtcaacaaaacgtattgatttactctacgctggttccggcgggggcatttacgcttaccgatattcccatgcgcaacctcaacagcgaccttaacgtgacggtagtggagaccgatggtagccagcacggttatgtggtgcctgccagcctatataatcagaccgttggcagtactggcggcttatatgtttcattcgggcgggtcaatgatgattacgatcgtacgccgtgggtgatgagcgcagcggacggctggcagattaataatcgcctgaatgcaaatgctggcttgctgctggcggaagattatcaggcgattgccggaagtatggatacgctaccactcccggatcttagtctgcgtatgcaggcgaaccagtcaaatgattccagacagtcgctgcaagggcagaaatatacgctttcggcgaattatgcctctccgttcggactcaatttaaccaccatgtcttcctggcagacccggaattaccgtgagtttagcgatttccttgacgatgattttaatcagacgacgaaaaatgaatattcggtcgggatcggctggtcgcatccgttaatcggcgggctgaatgctagtctgtacgaaacgaagggctatgatagcgtggatgattcacgctatgtctccgccgggtggagtaagtcgtttcgctatttttcgacttctgtaaactggcagcatcagctgtcatcaggtaatgacaatgaagatgatggcgatctgctctatgtgaatatcagtattccgttcggtaaccacagcgtgaacgcatatagtcgtcgggacgatcataaaacccgctatggcgcatctgcgatgggaatggtgagtgataatacctcttattctgtcggtgctgagcgcgaccaggatctgggacagaacaacttcaacgccggaatcagcagcaatcttcactatacccagttaggccttaatgtcagcgtcggtagcgaaaataatcgaagttattccgggacgttacagggtggtattgccgcccatagccagggcgtgacgttatcaccgtgggcaatccgcgacaccttcgctatcgccgcactggataagcccgtatcgggagtcaagatcgataccccgcagggaccggtatggaccgattatcgcggtatggcggtgatcccatccgttggtgcctggcgaacctcgcgcgtagaagtcaacaccgaaacgttgccgaaaaatatggatatcggcaacggaacgcgaatgctgaaacagggacgcggcgcggtaggtaaagtgggtttcagcgccgtcactcagcgccgtgctttgctgacgattacaatggccgacgggcgaaaactaccgaaagggatggcgatctccgacaacgatggcaactatttaaccacctcagttgatgacggtattgtgttcctcaatgaggtcaaggcgcagcagacgctgacggcgcaactagataacggtacctgtcagttcacgttagacctgcccgaggaagctaacccggatatcttctacgaaaccgctaatggggtatgcaaatga

SEQ ID NO: 189190 - DNA, 750 bp, Klebsiella oxytoca
atgggcgcggtaatatttaccgcgtcggttgtaagcgcgatatttaaaggaatggataccttgaaaaagataaacggatacagtaaatttacttttctcgtggctctgttttattccgtaaatggttttgccactggcatggtcccggaaacgtccgtattgctggttgatgctaaaaatggcgaagccagcatgaatgtcactaataccgattccctgccttctttgctgtataccaatattgtcgatctaccggacagcgataaatccgtgcgtttaattgtctcccagccggtagtccgtgtggaaggcggccaggtgcaacgtatgcgttttctcctacaaacgtcagcaccgttgaaatatgagcagctaaagcgcgttacctttgaaggtattccgcccaaagagaaagggaaagatcgcgtgtccgtgacggtgcgtcaggatttgccggttattattcatccggccggactggtcgaagaaacccagccgtggaaattcctcgaatggaaaaaagagggtgaccgtttaatactcagcaaccccagcgactatgtcgtgcgtatgactcaggttattaaaaccttaccctcgaataaaaccggcgcgttgaacaaaacgtatatgttgccgcataccagcacgacggtgaagcttcccaccgctacggatacacagatcgagttttatccggccagccgttatggctataaaggcgagagccagattgcacaattaaaataa

SEQ ID NO: 189191 - DNA, 735 bp, Klebsiella oxytoca
atgaaaaagttacttatcgccgcttcactgagcgcggcgctattttcctcgtttaatgccagcgccggcaacgatgtcacgctaaaagtgaccggtagtattgtgccgggcgcctgtgtcccgacgctgcctgacggcggtattgtggattacggcactatccgtaacgggcagattgcgcccaccggcacatccaacgcgctggtacagctgggacagaaatccattaatttaacggtaacctgtgatactgaaattgccgtcgggatcacctccacggataaccgccatgacagtcgtgtagacctgagttcaaaacgttatattgaagatttggtaggaggaggaaacacaacttcaacgagtaatggttttggcttaggcaaagcgcctgacgatatcaccaatattggctcatatactattttagctgatccagcttcagcgacagcagatggaactgcggtggatgtgatacgcacaaatgatataactgccgaaacattaacatgggaaacaactccatcgggtgctttttgcccgctgaatggtggttgtaattctgctaagttagcgatttccgttgcgaaaacaggcaccctcgtaccgcagccttttaaagtgctgaatatgccgttgctggtgaccgcggcggtagaagataacaccgtgctgggcaccaaagatacgatcactctggatggtaacgcgaccatcagcctggtttatctctga

SEQ ID NO: 189192 - DNA, 1026 bp, Klebsiella oxytoca
atgaagaaaatactcctttttattagtttactttttataaatataccggttatggcggactgtagttatgatggtagttattcatcggtgaacgttgtatttagtccagcaaagattctatcagattctaccttaagagccgggagcgtactgggagtaagaacagtcggtggaaatgtggttaatgcgaaaaattttagtaactgtaaagcaaatgacatttacgctattatcgccacgcccggcgtcaatctcgctcctggcgttaccggagtcctcggcggtccggtgtatgaaacagggataccgggtattggttttgagatttcggagatcacaaagggcgttaatggtcgtcctgttccggcaacattaggaaccgtatctgcctacggtctcccagatgcaaccgttgaacagttaaccgtttggttaatcaaaactcaggatgatattgataccagtttctccggtaaaaaagagattgccgtatcctatcgggcgggaagcgtcaatcaggtgaatgcaaactctgcaactgcccgcttattacaggcaaacatcaaactgggtcctttcacttacagggaaactacctgcaatataaatccacggggcggtagcaccgtcaatctatctaatatagaagcatcgcagcttaaagctatcactcagggcggagtaactggcaagcagaaagactttacgctcgatattagctgccctgactcatccgttggaaccaaatatacctactggtttaatcctataactgagaactcagcgtcaaaagatggcgtactgctaaactccatccctgacactatcggaggagccaaagatgttggtttcataattaaacagggttccagccctatcaccttttttgattataaaaactactctattgccagtgtgaaaaagagccagtctcttaccttcactgcggactattacaagctatctaacactataacaccaggtaacgttcgagctatatttgaaattattctccaggaagaataa

SEQ ID NO: 189193 - DNA, 369 bp, Klebsiella oxytoca
atgaaacaattaactgtttttgaaatggaagctatttctggtggctattcttgggacttctcttcactcggctcagctctttcatctctggtttgtaacggtgccgaagcggttgccagcgctgtattagcaggaacgatggccggtatgtatggttccatcattggtggtgctcatggtagcaatgggggcggtatctttggcgttggctccgctgcagcaggtgtagggatgatctggggcttagtagtcggcgcaattggtggggctcttgctggagcttctgttggttgggatgtgacttttgaaaaaacgatgggtatggttgatggtctgatcgatggcaccctgactccctggacaaaataa

SEQ ID NO: 189194 - DNA, 912 bp, Klebsiella oxytoca
atgaaaataaccaaagaccaggtggtctacgccatgtcgcgcgataacgcacctgtcgctaccgtcagcagcggaagcgaagtgctgtttgaaacctgcgactgcttctccgaccaaatcacctccgccgatgccgtgttcaacgagctggactggcagcgtatcaacccggcgaccgggccggtgtacgtcgagggtgccgagccgggcgatgcgctcaaggtcaccatcaagcgcattaccctggcgagcaatcaggcggtgatggtcaccgcgccgcagctcggagtgattggcgatgagcttgatgccccgaaggtcactatcgtccccattgaaaacgaccatgccatactgcccggcaacgtgcgcgtcccgctcaacccgatggtcggcgtgatcggcgtcgcgcctaccggggaagccatctcctgcggcacgccggatagccacggcggcaatatggactgcaaaatgattaccgccggcagcaccctgtggctgccggtcaacgttcccggcgcgctgttcgggctgggggatttacacgccgcgatgggcgatggtgaagtctcggtctgcggtctggaaatccccggcgaagtgctggtcgaactgacagtggttaaaaaccgccgcctgccgctgccgatgctcgaaaacagcgagaccctgtttaccctcgcttcggcacagacgcttgatgatgccgccgccctggccacccgtaatatggcgcattttatcgccgacaatacctccctgacgctggctgaagcgatcagtattctgagcatcgccggcgacctgcaaatctgtcaggtggtcgatccgctgaaaacctgccgctatgcgttacccaaatcggtggcgaagcagctctccctgagcgtcgaaggggagcaggcatga

SEQ ID NO: 189195 - DNA, 378 bp, Klebsiella oxytoca
gtgagaaagccagagagcatggtgcagttaacccctctggtgaagcctggcagcgaggaattgctgagaataaagcttatgcaggtacgttggcttcagcgggggctaatctacctgccgggtggaatgcaggttactggcgcgatgggcggaacagcaaatgctggtattcagtatcttattaatggagaagttaatccaacggatgtgctcattgcgacgtatgttggagcttttaccagaaatacaggattaaagggaacaatgagctggaacgcggtaggcggtgcaacatccagctatctgaaaggggataacccttttacaggtggcttaattaatggtatggccatctgggaggggctatggtgcagataa

SEQ ID NO: 189196 - DNA, 252 bp, Klebsiella oxytoca
atggtatggccatctgggaggggctatggtgcagataaactagttgaattgccgtttgataaagtccttaatccaatgaagccatggaaagactggatctggacagatgtcgggatgggaatatccaaaccgctgccgattaatccagtacctggtattgctggtaatgcctcgggtcgtgcggtgacagagatcctcaatgatcaagcgggtaaaacaggtgtgaaattccaaaaaagggaacaaaaatga

SEQ ID NO: 189197 - DNA, 717 bp, Klebsiella oxytoca
atgaatgttgtgaggctaaatagcctggctgaatccatgacgattctttggctccgggttaagcgtaacttaagccaggtcagcgataatgacgaaaatatgaccgcacgagctaccgccatgaacgcactggaaaccttaaatcaaagcctctttttagcactgaatgcctcgcccggctcaccggacgcgatcctgttattggctcgggttgctgcgagcggaacgatcttcatggtgccggccgttctgctctggctgtggttttccggagggcaccaggggcatcgacaggcgctgttttgtagcttgagtattcttatcgcgctggggctgggagccatctgcggaatactgtggtttcatccgcgtccgtttatgatccctctgggccatacctggatagctcatccggcggataacggttttccgagcgatcacggtacggtgatgtttagcgccgctttggctttattgtcggcgcgcgcgcgggcagttgggatactgttgctgctggcggcgctggccgtggcctgggcgcggatctttcttggggtacatttcccgctggatatggtgggggcggtatttatttcagcctgcggcgtcggtagcgcgcagcttgtctggcagggcgtcgggcgacgattaacctccctgtgcgaaacgataagtaaacgcctgttcgcctggctaccgccgcgcttcacgccctga

SEQ ID NO: 189198 - DNA, 330 bp, Klebsiella oxytoca
atgaaggatatgatcgtcgaaatactacaatacaccctgaaaaaagattctggatctgactttcatcagatcatgcatgaagtcagtgttccacttcatacccggaacggtatcgatgtggttgcgtacggaaactctctgcacgatgctgacagctactacctcatacgggcttttgaaagtgaagaacagatgaaaagcgttcttgaggatttctacacaagtgcgggatggcgcagtggcccacgagaagcaatcatcagtcgaattgaactcagtttaaaatcagttctatcactaccacaaagcagcattgatggattgagataa

SEQ ID NO: 189199 - DNA, 204 bp, Klebsiella oxytoca
atgaacgaaagaaaaagatttatccgtttacctgaagtattaaatagaactggcctttgtaaggcttggatttatcgcctgattagtcgtaatgaattcccggcccaagtaaaacttggtgaaagagcaatagcattcttagagagtgatattgataagtggattgatgaaaagattactttatcacgtaataaagtagcataa

SEQ ID NO: 189200 - DNA, 315 bp, Klebsiella oxytoca
atgaatactgaagaactaaatgacattaaggactcatcgactaaagtttttactgctatggcgaagaatctttatatcacaggaatacgtatatataaagaacaagaagaatatgaggtattggcagccataatgttagatagtgatagaacggagtcatatattttgcatgttaaagaatatctggcaaaacgctttgatgaacatatggaagaagtgggtaaaagagaaaggcttatctatgttgatatggataaagtcatgtgtgaaatgagatatgttcatactcaagcattacttttcagtatgagttaa

SEQ ID NO: 189201 - DNA, 297 bp, Klebsiella oxytoca
atgtctaaagagaagataggtgttaataaatcaaccgaactgttctatgaccttgcatgtagatcgttttccgcaagctggagtatgttcatggaagttaatggcgatggggatgctaatgattatttgaatgatccggattttatgagtccatttattatccatgtgattgaccatatccagaacaaatttgaaagattcactgcccaagagggtaatagcggtgatattaatcaagttaactttgaacaggttgctgccatgttagtcgagtattcagacagctttaggaaataa

SEQ ID NO: 189202 - DNA, 264 bp, Klebsiella oxytoca
atggtaaacaacaacgaacaaagttctatgacaaataaaatatctgtagtcgtaagtatgttgtgtgaaggaaccccgaaagtaataaatactattcaagaaagctttgatgtgtttgttgcccttagtgggtattcagtagaagaaatgataggggataagaacttgattggtgctttaaatcgacatatcaataacgatttagttgatgagttagatctggaatatggttccgtcatcatcaatatcgtttataacaactaa

SEQ ID NO: 189203 - DNA, 267 bp, Klebsiella oxytoca
gtgagaaaaaactcagaaccacaaatcataaacttaatcgtctacccagggacatgggttgcggaggagcaattaatagcactgaagggaatcaaaaaagggacgcttaagaaggcccgggaaaacactttcatggagggaagagagtacaagcatgtggcattcgatggaaaaccttgggataacagcccgtgcttttataacattgacgaaattgatcgatggattgagcgacagtccattgctcggccccggcgatatagataa

SEQ ID NO: 189204 - DNA, 192 bp, Klebsiella oxytoca
atgttagaccgtcacaagcttgaattaacgttgctcgagatagcccggcagaacgatgaaggagtggacagccacactctttacaccattcgcaacggcgtggcgcaggtgttgcaggccaaagagcgccaccactgcaggatgagcgcaccagcctaccagtggaagaagcccgccgcgccgcgcagataa

SEQ ID NO: 189205 - DNA, 1005 bp, Klebsiella oxytoca
atgacagtagataataatgaagacgtagccccaccaagcaaacccaaaaaggtcactcttcgggcttttcaaattaaaaatgacagtctttcaaaagcatccagtgatgcaaagtcacaattgttagcaaagctaaatgaaataaaaatagcgaaagaaaggtgtatgttgctcagtgcagatgacccaaaccaagagagggatgtgttatcttattttaaagaatcgccggttagtaagtctattttttgtacaatgttacgaatcacatctgacaaagacgttcaacacataactgaaaccctttttgagaaagatgtcttcaccattgatgacatagaaacttcccatattgatgcttctgccatctgtaaacagcactattacttttcaatgactgatgactttttagtcacaaatctgcctctaaataaaactgtgatccgcttgcaaacttacctaagttggtttactaacaacgaattgctggagtttaccccgatgatttcggcaaaagggaagaccaagttaagtgacctgaaagcaatagtagtaaaagatcctgaaccactcagtaacgactccctatcaggacacaattcaggcaaaacaccagagaacattcaaagccagaagtccatcagtctttcaaaaaaggttctcgatattattaaaagttcaatgtcggatacagagcaacttaatgatattgctttaagtcagatgatttccgctgagttacttatcaagttcacaaaacctagaaaaatgacagataacgagtatgaaagggtacttggcgcatacctaaaaccagtcagcgatttagacaacgtgtctttcaaacgaaaagataacaaaactgagatcaagggcaaagatttactgttaactaaagcagttgacattgaaacaactcagtcaggaaagcttgtcgagcaccaattactacaagagatgagcaagtttctggtagaattgagtgatgctaaagctactagttag

SEQ ID NO: 189206 - DNA, 180 bp, Klebsiella oxytoca
atgaataatcccaccagcacaccgctgccaaatcactcctaccgcgacgcgcagggccagacggtgaacgtcgtatctgtggcgcacaaccgagtgacgttctatcgcgaggggtaccagttcccgtgcgtacagcccattgagcgcttcattaaggagtacacggaggtgaggcaatga

SEQ ID NO: 189207 - DNA, 432 bp, Klebsiella oxytoca
atgcaaaaagaaaaccgcccgttacaggcggctaacacagatattcgcggatctgatgttacgccaccagcctgcgccgttcaagcctcaagacgtactccgaagaaacaccgcgcccgtacctacatgctgcgctgtggggctggtgggtggacagaaaacgatatcctgcgcaattgcaacctctcatctggccggaactatgccactgaggtcgaacgccgccttgatatcactctggagcgcatcgagcagaagaatccggacggcatcggtgcacatctgcgctaccggtttgcctgccgcgctgacgtgttgaaggttatccagtacgtcaaccatatggccgctattaaccagcaccacggcctttctgcgcaggatattaccgacattttgaacctatacccggacaacttcaccgccgcataa

SEQ ID NO: 189208 - DNA, 198 bp, Klebsiella oxytoca
atgtcacaatcttttattcgcctatccgaggtgcttcgacgcactggctacagtaaagcgtggatttatcgccttcttaaagaaaaaaggtttcctcagcccgtaaaaatcggttcgcgttcgatcgcatttgttgaaaatgaaattgatgaatggattaaccaacgcattgctgaatcacgtggtgaggtggcctga

SEQ ID NO: 189209 - DNA, 978 bp, Klebsiella oxytoca
gtgataaaaagtaagcttctgaaaataaaaaaatggattgatgctaatgaagccgctgaacgtttatccctatctcttgaagataaagtgtctgccttagaccttctagagctagcattagataaagaaattatcttatctgtaaaattccccagaacaaaacattttgtcataagggaagtaaaggtagcatcaatgccttatgttaaacgcttagaggagactttcgatttttatttgatgggtaagttcaagaaggtaacagggtgtcctgagagaggtagctcggaatataattctttgtttgaggcttatttagtcgatgaatgtttaaaaaataacttttctcttacgccttctaatgaatgtggtttggcgggagagtttccttctatttataatgtcgagtatgaatatttcgattatgctaaggacttggaatacatggatgatgttatttttgaacttccaatgattggtgctgagtttattgacataacatctctaattgaaacaaacaaaaaaagaaagccatctgaattaatgaatattgatggtgtttttctgcgttcttcagatggtaagctttataatctgatgaatcgatttgacgaaagtcatgcttctatttttgatggcaaaaaagatgacgggaaaaatgttggctatctagataatagaaattactatcctgccgaaggcctgcctgctggatgtgaaattggtatttcacctgcaaatctttttgattttgaaaggcgactctcggacgatggagatgagattgatgaagacatttcaaacaaagcgttagttgttttaggcgcagttcttcaagaagttacggagcgaccggtaaaatggagtcaagggaagttagctttatcaattgattctaaaaatattagtggtatgaaggaaagaactgtaaatggtatcttttctcttgctaacaaggctttaaaatcaatttgttag

SEQ ID NO: 189210 - DNA, 681 bp, Klebsiella oxytoca
atggctgactggtttattgcgactgaaggcgtgaaggtggtgaaggacagcgccagtctgtggccgcagatcatcacggcggtttcgtccgccggtgctgccctgggcggtgtgtatctggcccactactttacccggcggcgtgaagaaagagcggcggcggtgaagctggccagtgagcgactttttattgctacggagctggtctttttgctggagcagtttgctcaagagagtgcagcggttgcaaccgatgacggttacgagaaccaaaacgggctaaccgttccagcgaaaaaatatcctgtcctcaacatttcagccattaccggggactggcgagtgttgccggcaaagctaatgtaccgcatccgggagttgccggtgatgcaaggtgaggccgatcggacagttaatgaggctgagcttattccccctgactatgatgaattctttgaggcgcggcagtaccagtacacccgtctgggtctcaaagccctcatccaggcccgacgactgcggcggttagtggggctcccgcatacccgccttgacgcaactcgctggtcggcacagaacgtcctctggcagaagtggcggcaggaaagaaaacgccgatgcgttcaggccgtcttgatagcacaggtacaggcgtcttttcagttcaaggaaaagccatga

SEQ ID NO: 189211 - DNA, 414 bp, Klebsiella oxytoca
atgactgaggcttttaaatatacctggctgcttctgaaagaagagccggtatacataccactgattttcatgattacgggtactggagttatttctgttttttttgttctgaaggatttcaggtcatggtggagtaaactaatcctcctggtaattgatgtcttattttgtttgtttgtatttattgctgcacttgaacctgagtctacttataaaaacattcaacaaagaaaagaaaatatttcctttacgcttaaaaactgcaagatctccgcatttgaagcacaacaggcaggattattcgggacaacaaaagatgcctggtcctgccctgatgggataacccgctaccttcctgttaagtacagaccagaggctggttcgtctgaaaaaatgcagagtgaattgcattga

SEQ ID NO: 189212 - DNA, 2829 bp, Klebsiella oxytoca
atgacgccacttgaaatctacaccatcgccggcggcgactggctgcggggtaatctcaatgccatcgcggcgttcatggggaccgccacctggtcgtccattgagaaaatgtgcatcgcgttttcggtgctgattgtggccgtcagctgggtgaaaaaacacaacatcatggaccttgtcggttgggtgttttccctgaccctggtctcgatgctggttgtcgtccgtacacctgtacagataatcgactacagcaacgtggcgcaggtctacaaagtggataacgtcccggttggcctggccattccggcgtcgctgaccacgcgtgtgggtaatgccctggtacagagctacgagatgattttctccctgcccgacagtgtcacctacagtaagaccgggatgctgtttggcggaaacctggtggcgaaaagcacggattttgtttcgcagaaccccgaaattaccacgctgttctccgactatgtccagaactgcgtgatgggtgacatctttctcaatggcaaatacacccttgaagaactgatgaactcgcccgacccgtacacactggtgttttctaatcccagcccgctgagaggggtattcgataaaaacaacaagttccagacctgtctggaggcttcacgtgatttgaagtcagcgttagcactcgactctcagaccggcgggaaaacatggagttattatgtacgccagctgtttggcggcaaaccgaatccggacctgctgttcagccagatgataggcgacagttacagctacttctacagctcaggccagaatgccgggcagattatccggcagaatgtcaccatgaatgcgctgcgcaacggcatccagagttacgcggcccgcagcggcgacacggcaagtttggtgaacatcgccaacaccacgtcgctggagaaacagcgcctggcacaggccacgatggggcatcaggccctgcgctccctgccaatgatgcagacggtgatcatgggtatcatgattgggttgttccccatactgattatgagcgcgatgttcaacatgatgacgctgcaggtgataaagggctacgcgtttgccctgatatggctgcagtcctggccgctggtctactcgatcctgaacagcgcgatggcctactacgcaaaacagaacggtgtcccggtggtactttcagagctctctcaggtccagctgaagaactcagatattgcgaccacggcggggtatatctcgatgatgataccgccactcacctggtatatggtcaagaacatcggtgccggcttctccagcgcttacagccactttgcctcgtccggactcagctcgacgtcgcaggccgcatccggtgtcgtcgatggcaactactccttcgccaatatgcagatggagaacgtcagcggctacaactggggcaccaacagcacgaccagcttcgggcagatgtcgcggcagctggggaacggggcaatgagcacgcagaccagggatggctcaatggtctgggacagtggtggtgcaatgtcaaaactgccagtggatatcaacgtcggtcggcagatagccagtgcgcagcagcagatggccagagagtcggatgtgcaggctgaaagtgcgcttcatggctataacagcagcgtgacaagtgcctggaacagcctgcagcagttcggcacaaataaagggaacagcgcgtcgacaacaaccggggccgataatactgagtcgtcgcaggattcaatggccagaagcaagatgtggaatgccgttgtttcaaatgctaaagccaataacatcagcaacgagcaatccttccagaatcttatggatgaaaatacgagaggttcggtcaatggtgaaatttatggcagcgctaaagtaagtggtggatttgaagttttcggtaccggaggacgagcggaagccggtggaaaaatttcaataaatggtactgctagttctggttcaacagattcggttggacaatcaggccgtaaatcagaagacagtcgtcatgatataagtagtcaggcagctaaagactttaaagaaggatcagattactttaccagtcgaaaaaattccacatcaggcaatattacggataataatgccagttcacgtgttgaccagtttgcagcatcactctcaagtgctaaaaacagctatgaccagtatacgaatagccggacacgcagtcatgaatacagtgaaatggcttcacggacagagagcatgagcggccagatgagtgaaaatctgactcagcagtttgctaactttgtccagcaacgttcaccgcagaatgcagaatccatactgaccaacacaagttcgccagaagttgctgcgcaacgtgaagccctagcgcgtgagttcgtcaaagctcaggttgagcctaagattgatggtgcttaccaacaagggcgagagtccattggccagaacatgtctggtgtatcaggtggtggtgatcgtggtacggtaatgaacgactacggacataatgctggtagcattgataccatgactcgggatgctggaattaaagataatgttggtcagtcagttgatacaatgctgtctaaaaataaacaggcgcaccgagaaagccaacagggaattcagcagcagggtggtgaagtgaagaaacaacagagcgatctggaaaatcaccacaaaacagcaggaaataaatttgaaagtgaatataatgtcagaagggaacatcaagagttaattcccggggctgattcccgagatgagttgacgaaaaaggctctcgatttccaggagaagcataagcgttaa

SEQ ID NO: 189213 - DNA, 630 bp, Klebsiella oxytoca
atgaaaaatatgtttatgtcgatgatggtatgcctttcttgtttatcacatggttacctcctgattattactattttcctcactgctttatctgtaatttggtttgggatttttgaatatgtaaagtttgttgttaagaggaaagtgaaataccctccattttgtagtaataatttaaagtacatgagctttgtgctcctttttgctctgatacatcctgctctgtgtttaatgtttgtatttttctttcatcctttctatctaagcagaagcctgcggttgacttctcaaacgaacctaatctctgtaaggaatagtcgtattaacccacgccgttacggtaatgactcttcgtttgctcaggtagaaccgtttgtagcaagtggcaaagttatcagtagtaatccatcgtattgcttaaacgaattttcagattctctaagctatatgggtcgagaggatttttctattagtaatacttccggttcaggatgcgaaattcatatgcccagcgttccagattttaatggcagcatttctgatgtgaatcctgcaagtggactgccaatgattagcgacgtagatgtttgcggaaactcctatggtataaacagccatgcagattattga

SEQ ID NO: 189214 - DNA, 672 bp, Klebsiella oxytoca
atgaaaaaatacaatattttgatcggtgggatttttctttttacgctatttaatgcatggtcaaacgatgactattatagcaagattaagaaagatgcaattgcaggcgatgcacaagcacagttcaaaataggcagaatgtatatgatagtgtccggggattatgaaaaagctttttactggttaggtaaagctgcaaagcaaggcaacgctgaggcgcaggcagatataggctctttctattattacgggacaggtgtcaagaaaaaccgaaaaaaagctgaagagtggttagttaaagcctcgcgtaatggtgaaccaagggcgcaaaatgatttggcgatattatattcggagtcagagtctcgagatgcacgctgtgataggatatgggaacttttatcctcgtcagcagccaaaggttatgatatggcatatcttaatattggtaattactacttacgtggagtgtgtgtagagcgtagcatgagtaaggcggtagactggtgggaaaaagcagctgataagggaaatggccaagctgagttcaacctatatgtttcatactctaatggtagcggtgtatctatgaatcagcataccggctatgtatatctgagaaaatcatgtgagcacggatataaaaaagcttgtgatttaatcaatgaatag

SEQ ID NO: 189215 - DNA, 864 bp, Klebsiella oxytoca
gtgactgacattcagaccctgtttacccattaccggcaggtcaaaaatccgaatccggtgttcacgccgggtgaaggaaagaagacgctcccgttctgtcgtaagctgatggcgaaagccgaaggcttcacgtcgcgtttcgatttttcaattcacgttgcttttgcccgttcgctgggtaagcgtcaccggatgccaccgctgctgcgccggcgtgccatcgatgcgctgctgcagggactgtgctttcattatgatccgcttgccaaccgggtacagcgctccatcaccaatctggccatcgagtgcgggctggcgaccgaatcgaagagcggcaatctgtccatcactcgtgccacccgtgcgctgaagtttatggcggagctggggctgattacgtaccagacagaatatgacccgcagattggctgcaacatcccgacagatatcacgttcaccccggctctgttctcggcgctggatatttcagacgtggcggtgctggctgcacgccgcagccgcgtggagtgggagaatctgcagcgtaaaaagcagagcctgctgccgctggagatggatgagctggtagcgaaggcctggcgttttgtgcgtgagcgattccgcagctatcagtccgaacgtaaatcacatggtctgaaacgcgcccgtgcacgccgtgatgcggacagaacgcgccaggatatcgtgacactcgtgaagcagcagctgacgcgtgagtacgccaccggacgctttaccggcggtcttgatgccatgaagcgggagcttgagcggcgcgtgaaagagcgcatgctgatgtcgcgcggcaataactacacgcggctggccacagtcccgatataa

SEQ ID NO: 189216 - DNA, 621 bp, Klebsiella oxytoca
gtggtgcatcctgtctttatcgcgttagtctgtctggaaaggatcacaaacaagaagttctgtatggaaattattttaatgcgtcatggaaagcctgcatttaagggatctgcaaaggtaacgagccgtgaaatggccaactggattgctgaatatgatctttctgatacaggagaagatatcccgcctgagtccagtaaatcattagcattcagcgcatcgcgaatcataagtagtcctcttcccagagccctttcttcgctgagggcattagggtgcgagccggacgtcattgatgaggtttacagggaggctggcctgccggtatttcacatgcccggtttaaggttatctccaaccgtgtgggcagctatttttcgcgtcatgtggctatgcggcctgtcccgtaatgtagagcgcatgggaaaagctaagcagcgtgctgctcaggctgcgaatcgcctcgtcgggttggcaaaagcatccgacggccctgtgctttttatgggtcatggggtgatgaatcggctaattgcaagagaactgaggtcgttgggttttaaagaatctcgttgtcagggtaatggttactggaacgcgagtatctacaggctccagtaa

SEQ ID NO: 189217 - DNA, 501 bp, Klebsiella oxytoca
atgggaaattattcagatttcgagaccgaatttgttcagcgaacactggcacttatcgatcagtataacgaaatgattgaggtgcagggcaagcccttcagggagcagtacaactacacgctgaccctgaattgccttctgggtctcatcgtgctgccgaaagagagggcgctctctttcctgcccgctgaccgtttaacgcagcagcttaaaacaagcatggggttacaggagtcgcagctacccggaccggagatgactctacgtgcacttatccttaaaatgaggaattctgtggctcatttcagcgtccaggttgtatcagtcagcgacgagcgtctcgtcgatctgattgctttcagggatgatcctgaggatgagaatgcctacgccactttcagcgccccggaacttttaccctttctgaaatattacgcagcgcagttgctcgggaatatggctcgtcgtcgagcccctgctgttaacgcagtggatttgtaa

SEQ ID NO: 189218 - DNA, 765 bp, Klebsiella oxytoca
atgttgatcctcgattgctcctcacgctctcaggcgttgaatacactgtctgccgggtttggctgtccccctgaaaagcttaaaaatgtgcttctgtcgctcgatctggagcatatctacgaaacagatcaaagcattatggtggatgcaaatcagtatctgaaagattatgtcagcgcggaactgggcgaaccaggtcccttctcccgggctttctggtttcatggcacccggacttttgccgggaatgctttcccgggtgggttacttgcgctgaatcattcgaaatcgctcgcgataaagatgctggtagacctggctccggatgagttagtccgtaaacgcctgcggcagtggtttgaaacgggaggtgttccgaatgcgctgtttcagatcagaaccggcgacagcatgcactgggggccttatggccatctggttcgggaattgcattttcatgcccgagaaaacggactacacgattatctccgcttgcctgagttggtagaggatgtctgtaacgcctatctgacgcagtatggtcacgatcttacggcctattaccttaaggtgctgcatccttgcattatctggttccaggcggatatctcttatgaaagaggagcgattgaaacggccctggcatatgcatatacgtctgtccgggcgcttccgccggactgccatgcaactatcggcatcgactgtgaagggaaatcggtgtcgaggtcgtccattgctaaaatcgagtttctgccgccctag

SEQ ID NO: 189219 - DNA, 1134 bp, Klebsiella oxytoca
atgcacttttatgtggatgaaaccggtcataccggtccgaatctgtttgaccgcacccagcctgtactttcttatggcgtcttgtcttcacccgatgacctggacaaggttgcagaaactgatctggccggtttgcgcaaaaaactgggagtacaacgcttacacgcggctgaactgggcatgtatcgccttgatgaggtggtcgatacgctgcttgtcctgcagaagaaacaccggatacgatttgatatctggcaggtagttaaacgcgatcacgccattatttcgttcttcgaccaggtctttgatcagggacttaatccggtggtaccctggagcgcatattggaccccactgcgctatccgttgctgctgaatttgtccaatttgtttgatgatgagctggctgaaaaagcgtggcgtgcccgtcttgaggctcatgatgaacgttctttctcattattcagtgaggtttgcggagcgctgcttcagcgtgttcactctctgggtgatgcccggtcagttgaactcattaccgatgtcctgtcctgggcgatggccaacttcgatgagcttgggtacaactgcaaaaccaataaggaaaaattgcagatcatgcccaacatgatcggttttcagtccgttttgcacgggatatgctctcgtctgggggcaccgaaccggaaagcagatatcatcgttgaccagcagtcgcagttcaacaccacccagcgcgagctgaacgagttttattaccagatccgcgaacagccgtgggctctggggcctggtttgtccgtcatggatatgaagaacatgccggcaaaaccgcttttcttccagtcgggaacgatgagtgccggactggagctggttgatatttatctctggatcttcaaacgatacatggaacagaaggagcttaccaaacctctttcccgccttgtctacaccaatcttaagacagcgagaactgacagtatttccctgcagtctgtcgctaaacggtttaaggagttttttgaaaaactgcctgagccaaccgcagaaatgatggaaaaagcaaaggaactcagggccgtggaagaaacgcgtcggcttgctcatcgtgtacaaagtctgtcgcaatcctga

SEQ ID NO: 189220 - DNA, 327 bp, Klebsiella oxytoca
atgaaggcagaaagtgcccgtcagattcaggagctgattaatctcgaaaaatttaaccctgaaacactgtgctcgggcgagagctggatggcgccctcagctagtgaagtcggcgtgttccgggcgctgatccccctgacggacatccagctggcgaaccggctggatgtggacgaacggaccatccgcaagtggaaattcggcgagacccggatggtgttcgccacctggtgctgcctgtgctggctggccggactggggatgagagcacggagaacatttcttgaaccgagcaagggaaattactcacaccatttgctatgctaa

SEQ ID NO: 189221 - DNA, 1101 bp, Klebsiella oxytoca
atgccgttagcacaagtgatgcgtgacactctttccctagttaaacaaaatggcgtcaggaccgatgggataaaggggagcgttcaaaaagataggatttacattcatcgaagcgatattgctattgataagaacgatcttcttatacgcagtatgccgcatggcggtactgaagaatatattgtgatcgaaccaaatttcagaatgggtatcgccgggcttcctggtggctatcaggcagaagttagacgtaaggaagatacaactaatgaggaaattatgtcatccccttcaacaaccgtgccggaagcagctattgccattgtaagatcattcattgctttgtgtgtcactatcgtaaatgagggctcatccagtcctaataaatatgtttctcagtttcattccttgcgtcaagaattacttgaactggataacatcatcactattcctacatggatccggttctctcaggcacctgctgacgttaagaataatgttggcttaaacgtcaaaggtggcgatggggcatgggaacgaagacgtcagtatttacagcaagaattgctgaatatgctctcaagctataaaaacacaccaatcattgagcattctgttagtgaaaataaattaaagaatacagagcgagttagtgggttaactacgatagcaagcgagacagggctaaacatgaaaaagaaagtattcattgtgcatggtcatgacgacaaactaaaacatgaagttttcgttttcctgtcaaatgaaggtttcgatcctgtaattcttcataatgaaatcaatgaaggacagaccataattgagaaacttgaaaggcatattagcagtgcagcctatgcagtagtgctttatacagcctgtgatcaagggaaagctaagaatgcgactgaattaaaaaaaagagccagacaaaatgttgtttttgagcacggttggctgatttccaagctctcgcgcaagtacgtcgctgcaatagttgaagatggcgttgaatttcccggagacctttccggactgatctggatatctaaatcggactggaaatatgatttgtctagagaattaaaagtgcttaagtaa

SEQ ID NO: 189222 - DNA, 282 bp, Klebsiella oxytoca
atggccctgaccacggaacagataaaccgccggcagcagctcgtggcaactggtaccttcaatgtccataccctgctgcccggtgaggagtgggtcagggcagaaattgttgacgtccggcatgtcttgtcgctgatcgcactgaatgatatgcaactggccgatcggctgcacgtcacggaacgtacggtgcgaaaatggcgttcaggggaaactagaatggttttcaccacctggtgctgcctgtgccaggtggccggactgggctcccttttggaataa

SEQ ID NO: 189223 - DNA, 291 bp, Klebsiella oxytoca
atgtctacatttttagctgcagtatttgctgtcatctttaccctaatcgccatcggccagttcatctgggcaatcgtggtcgcttaccgcggcctaacctggtttttgaccagttttgacgaccttccacatatctggaaacgaaactggcggtactatcgccgtttcatgttccctgagatgaaatgcaggctccgcagatggttcagtaaattattccaaaagggagcccagtccggccacctggcacaggcagcaccaggtggtgaaaaccattctagtttcccctga

SEQ ID NO: 189224 - DNA, 3126 bp, Klebsiella oxytoca
atgtctggcatactgcttaatcgcctcactactaaagtcagagcacaactcaaacgcaccctcaaaggaaataagacatataagaagcatcgctggaaccttgttgaaagggcgcaggtttactgctccacgcattatctgaaggccatgtttttgctatggtctatggcaggcagtgctgtcctcatagcgataggctttcgtgctgaatttagtagctttgcggctaattacctaaaaaacgtcactaaacttcctgaatggatgtcaaacctgctgggcgcccagctgacgataatcgggattgtgttcccgcttgttgtcggactgatcagtgtgctctttcagaaaaaatcctcgcgaatccacattcagaccgcctatcagttgcattcgggttatatgtttgcgggactcagtgggctatcacttgctgcttttatactgataagtgggttatttttatctgcaggtgacaaatatcttgatacggcatttgcggttacggccttaatctggatgcttttcaatattgtactttcgatatggttctttattaccagccttaacattttagatgacaagaaacgcgatcacctcatgctgaagtattttcagtcccaaattgtagaaaatcatattctgcattcccttaaatgctcatggataaagtatcctggttcacacataggtaaggattatataaaaggaataaccattcttccctactctgtctcaagcgaagaaagtttggactcggttaaattccatattgaggatcatatggaaatcagcgatgtgtatcttggaccactaaattttcttttacaccggctgaaacctgtgcaggataagaatggctcgattgttattctgccgtccctggcaaaaagggataacaaaatgacactgtttacctcaactgacgtgattatccctgggtggtggccgttttttttcagaaaatgttttataaaagaccagaaagtaaactggaaaaagtacagacacattacccgtgatttttatggtgaggtttatgatgctctgggagacaaaaatataagtacctttatcatcgcaacagaccggctgattgatacatacacaacattgaaaaaaagcttcgggtatgctgatggaaattatattgatgaatgtcatggttcaggtatgtcatttacattcagccagtcattctatcatgatttttacagtttcagtaacgaggtggtaaagtcactggaaacaacgggtgaatatttccgtaaaattattgatgtaccattctctgtatatcgtgattcagacagccgtgaaatcgtcgattttcagcagtgtatggaatctcttttctacgtgtggtacgtgttgaacaactggaaaagaggatatggagaaactctgtcggtcagtcaggagcagcgtcacagggaagttgtcaaagattttataggtgaatgggaaagctggtacatgtggcgacgtattaaggcccgtggcgagaaccggtttgatgatgactcggccgaactactttatcatctttatgagacatcccggatagtcatgacggctgtgatgtcagacgaccgctatgcctcagatcacagtgtggatatgcttttactctggttcagccggaatcggtttaaacagcactttgaacaataccgctggcacagctttttcctgacgccgtcgtatcttactcaggcatctgacaaaccggcctggcaggccatcctcagaggaaatgcatattcagaaacagctgcacgggcaatcatttttttcaatgcactgacagatattcgactgcttactgccggatatattctttcgcatgttcagcagaaaaaaaatgtacgtctgaaaaatgttataaagcgacttcttacttctgaacctgtctatccgacaggtgcgcatgatctcatgacgacgtcgctaacttcttcgactgatattattgacattattatcaggctggaatgtcgtccgtgcgacagtgtggactcatggtacaagacgatgtctaatctcgtaaaggcgttttcatcatttaatgaaacggagatcatatcaggacgtatctatatgggaacctatgaagatgtcaggaatatttatgccagttatgcagatatcgctttttatctttccgctaagtccctgcctgtcacccagcgcgtaaggatggcactgaacgacaacctgtttacttatcatcagaaggaacagattatttatcaactccagcgtttcaaacgccgtgaagacagcccatcggatggatatttaatgtctgataaagcctttaaagataagattatccgttttaacgaaaccctcgatgcctatattcaggctttcagccggagcatgcattcagagcttcttaacgctgatattgatactgagctgctgaaaaataccgatcttactcttacccgagaactacccttaatgcttgcccgggatgcactgctttcacaattttcttacagtacatcaaacagcggggagatagcgtggacagccaagtcagttaacggaggcatgtccaaagatatcttagcccgtgggatcagcagcattaattcggtaatactgacacctgtttctgacattaaacagactctgcttggtgatgtttaccatgaactgagtcagctgcagcccctccggacaatcaacgtccgcgacgaatatgaactgctgaagaatttaagggatataactgccgacaacgaagactatacgctgattttcttcggaacccatctgggaagcgagctacgtgagatgagctaccacgcagaaaggtttgcggaactggggatcatactggatatgaagaatgctctcgatggccttatgccagtcaggattaataactgtggaatctatcaggtctgggataatgatggaggttattactccctgcttgtccggaacaatgtctttggttcccttaacatgctgagcgatcccgacggacggcctttcagtacctcgtggcatgcaagtgatgaagaccctctgtcgggctgggtgactaccagctggaaacaggaactcgggattagtggttccgtcgtggcaagatttaatcactcctga

SEQ ID NO: 189225 - DNA, 303 bp, Klebsiella oxytoca
atgagtgaattaactttagtcattgagtttgaagatggtaagaagtcgccagtacatgcccatatggaagtatttggcgggaaggttgtagctgtagcgtttcggaatattttagatgatgacgataacgatgataccactggtaagcagttgaccatcagcctacccgacaccagctcaaaagctttctggagcggtacaggcaagagcgaagttttccatccagagacttacaaacgctggactaaggaagctattgaacgttattgcgccatagctcggattaaagtggaggtgcggtaa

SEQ ID NO: 189226 - DNA, 225 bp, Klebsiella oxytoca
atgaaaatcgactttaacgaccagggcgaagtatcgacggttaccgtcaccagcacggtatttgagtttcgccgccacaagcaggcaattgatgtcgccctcttccttgttcccggcatggacagcaatagtagcggatttctcatcatgaaaacggtattgagcggtcagacaaaacacgcgctgcgagcctacaaacatctgctgcgggaggctaagcgatga

SEQ ID NO: 189227 - DNA, 582 bp, Klebsiella oxytoca
atggatcactcagcatttaacccggagccaacgtcgaccggcatccgaatatctgaaaaccgtgtgattggttactcggctgctattcgcgaactggataacgggcgctatgacaagaatatcgccgcaggtatggaaattctggcttgcattatagaagcggtagagagcgggtggatctcgctcactattggcaagcaaatcatcgtctggcgctggttactcgtcgctgtcttcattaccgaagagcaggagaagaacggcacgatcgagattcctaatgaagatggcggcatcgatacagccgttatctattcaggccagcatggcgcgattagcatctatccagggcctgagcgctttgcactcgctaaccatattgaggccggcgccatcgagaaatacgggcctgaccttggtcagcagctggcgctgcgtatgtatcaggacatggttgtgggtgatgaagaacacgggtaccggttgtccctaatgggccgggaggggttcaaccttcttcatgacagtttcatagaacaaatccagaccgatggcatgccagacatgccggttatgcactga

SEQ ID NO: 189228 - DNA, 444 bp, Klebsiella oxytoca
atgatgattgataatcgcaccgctagcgcaattgacctggcattacaaaaacaccccacaccagtgggcaacctgtatgctgctaaacgtcacggacgtatgaagcgctgttttagtcgggatactgctatccgttatctggcgttcttcatgaccactgaagcttttagacgctcggggtttaaacaacgttacccggatgtagaaaaaattcacccaacaaaccctgagctgaattgttgggaacggggccagacaacaaacgaatattaccaggcccatcgacgctgtattcgccgtcttcgtcgaatcctcgcacgcaaatacgaaatgcggaaatggtgcgacaaatgggattccatccatgaccgctatttgaaagagcgcgaagaactcaaggccagcaaaccaaaagaggtacgcaatggatcactcagcatttaa

SEQ ID NO: 189229 - DNA, 186 bp, Klebsiella oxytoca
atgactgattctaccctcgctatcgagcacgaaaaaatacaagtcgttttaactatagaaaacggcaaggttactagcgctcgcgatcttcgtgataacgaattgattgcaactatggacacttttttctggatggctaaaaaagccgggtttcaggtaatagccccaaatgcggagaagcaatga

SEQ ID NO: 189230 - DNA, 348 bp, Klebsiella oxytoca
gtgaaaacaaacttaattgaaacgcgtcgccgccgtcttgttcaggcaaaactcgactcaatgatgagaagaaccggaagccgttttcagttagttaaattagacgatggcacaacattaccagttgaacttgatgaagacatattaacgaaagcactcattaagatttttgaggcgatggtttatgacacacacaagcgcgaacaggcagagaatttaatttctgagcattattcgaattgcatgggtgtgaataaattaacgcccaatggggtggattttataaatgcacttattgcaacgctggccgagtattcattaaaaacggagaaattaactaatgactga

SEQ ID NO: 189231 - DNA, 210 bp, Klebsiella oxytoca
atgtgggacccggcaacagatacatccattgaagatgcagcgttatcagcaaatggacttaatgaattattagatctgatgcacctgagttttaaaagaatgaatgcccctcaatgcgaggcgttgctggggcttgctcttaatctttcttcagatattgcagtttggttaagggaggaggaaaagcgccgtgaaaacaaacttaattga

SEQ ID NO: 189232 - DNA, 540 bp, Klebsiella oxytoca
atgaatactatcgaactccaaaaatatgacagcatcagtgtccgggtgaaaccgggaagttacattactttccctatcgttgataacaagggtttattccctcaatacattagtggaaccgactttgcggattcctatttattggaaacattctatggtgaggatttaaacacgtatggaatatataaagtacaaagtggacttaaatttcttatctgtgcatttacatgtcaggaggagattaatgaccatgcaatgaatgctatattcaatcacttcacttttataattgataaattaaaaataaagactaattttgaaatgaatttaaacgtttcggaattaccttattacgactatgagttagcggtcaaagttggtgataaatactatagaaaattcaaaataaaagaccctcaaaatctatcgaacgaagaactcaaagaaataaatgatttccccagggccttggaggttgtgaataaatacaacaactacattactgaaatgactgaaagggcattcttaaaaaacaaatga

SEQ ID NO: 189233 - DNA, 708 bp, Klebsiella oxytoca
atgaaaactccaaaacgcttatccgaagaacaactcaacgatgcggctcgtttgaaagccctttatgaagccaagaagaaggatttgggactaacccagcaggacatcgcagatgagttaaacattactcagagtgcggtaggccattacctcaacgggagaaatgcacttaacgtaagttcagctgcgatgttcgctaggcttttaaaggtccaagtgaaggatttcagcccccacctagccaaagaattagagctaatgcatgccgcagcgcaaaatgttgagttcttgggcggctatcaaaaaagacctaaataccccctggtaagttgggtaagtgcaggattatggagtgaagcatgcgagccctacactctcaaagatatagatgaatggtatgagtcgagcgcgcatgtagaaggtactggtttttggcttcgcgtccaaggcgactcgatgacttcgccatcagggctgagcattcctgaagggatgctcattttggtcgacactggcaaggagcccaaaaacggaagtctggtgatagcgaaacttatggaagccaatgaagcaactttcaaaaaattagtgtttgacagcgggcaaaaatttcttaagccactgaacccacagtacccactgatgcctatcaacggaaattgcaagattttaggtgtggttgtagaagcaaaatatctcttcgcttaa

SEQ ID NO: 189234 - DNA, 204 bp, Klebsiella oxytoca
atgatgacgttcacgctcaaggattacgtggcagagaatggtcaggttagggctggtaagcacttaggggttactcaaattgctataagtaaggccctgcgctcgggtcgatctatttttgtacaaatttcttcggagggaaaggtttctgcctacgaaaccaagccgtttcctgccaaaaagaatgatgtttcgcttcgctaa

SEQ ID NO: 189235 - DNA, 1614 bp, Klebsiella oxytoca
atgctgaatatcgaaccgaattttgctcaggatcgtgcgcttaactcgctgcgccggaagtggaagcaaaatagcacgttcatggtctatgcgccgaccggcagcggaaaaaccggtctggccgctttcatcactgccggccatatcagccgcggtaagcgggtcatattcatcgcaccctataccattctggtgcgccagactatggcccgcttcgttgagtacggtttacctgaagatgagattggcattatctggcgcaatcacccggattacgctccagaacgcctgattcagatcgccagcgccgacacgcttatccgccgcgatttcccggacaacattgacctgattattgtcgacgaggcgcacatgaagaaacgtgcgttgctggaggttatccggaactcaggaatcaaagtgattggcctgtcagggactcctttctctccgtggctggggaaatattattcctcccttatcaagcccaccacgattagcgagctgatccagcgtggcgatctcagcccctatgaattctacgcgccgacaaagcccgacctgaaaggggtgaagtcagctacctccgaagagtacggcagcgactataacgaaaaacagctatccgagattatgtgcggctccgatctagtgggagatatcgttgataactggcttcgcaatggtcgtgaccttcctacggtggcgttctgcgtcgataaggatcacgccaactttgtcactctgcagttcaaccgcgcaggtatcaacgcggaggttatggttgctgaaaccccgtccgatgagcgccacctcatcattcatcggtttgaaaacggcgccacaaaaatcatcgttagcgtgggtgtattggtggccggtttcgacagcgatgtccgttgcatcatctacgcccgaccgacaaagagcgaaattcgttggctgcaggcgcttggccgcggactgcgtactgcacccgggaaagacgcttgtctaatcttcgatcatagcggtaccgttcaccgtctcggcttccctgacgcaatcgaatatgacgaactaccgtctaaaaacgatggcatgaaagaggcagcagctcgcgcagccaaagaacgcgaagagaaactcccgaaagaatgtcctgaatgccacttcatgaaacctgccggtgtctacgcctgtccgaaatgcgggtttaagccgctggttggccaggatgttgaaacagacacgcagcgcaatatcaaaaagctcagcaagggcgaaaaggtatacaccaaatcagataaacagtcctggtggagccagatcaaattctatcagcgtcaacgtacatcaatgggtaagccagtcagtaatggctggtgcgcccacactttccgcgagaagttcggagaatggccgaacgacctgagcgacttcccaatggaaattacccccgaggtaagcaattacatccgacacaagctcatcaaatttgcaaaaggaaaggatagggcgacatcttcagccgccacaactccttcaccagattcagacacaactagccaggtaatcagagcaaaacgccaggtagagaatattcgcagtatgcttgggagaaaaacagcatga

SEQ ID NO: 189236 - DNA, 969 bp, Klebsiella oxytoca
atgaaaacagcagaagcggcaaaaggtcgctggactgaaattttagagcactacggattaccgccagtaaccggaaaaaaccattacaaaggtgagtgtcccgtttgtggggctcgcggcaaattccgtattgatgatcgtaatggcacaggaacgtggatctgtgtatgcggtaacggtgacggaatgaaactgctttctctcacccaaaccggtaaagccttttcggtgctctgcgcggaggtagataagctcattggcaatgactaccagcgtgaaaagatccccgttagtagttctgccgcaaagttgcgccagcgaaccaccagcaaatttgcaaagctccagccactatatggcacccctggggccgggtatctcctccagcgtggcatcagaaagttaccgactgatgccatcaagttttgcgaaaaacaacgccatgcaggcagggtttaccatgctctctacgctctcgcgacagatgacaaaggggagctgtgttatctccaccgcactctgcttgagggggaacagaaagcactgctgggcaagagtgccaaacgccagaattccctacaggaagataactatctccaacacgcccgctcagtagcgatccgtatgtttccagtttcctcaacgctggggatagctgaaggcatcgaaacagctctctcatgccatcagatttatggcgtaaacacctgggcggtgatgagcagtaattttatgaagaaattccgtgcaccagatggggtgaagcatctgattgttttcgctgatatggataagcactcagccactggccactcggcggcgttcgaatgtgctcacgctaatctcatggcgaaaaacgacattgtgaaaatcagtgtccgctggtgtgacggcggcgattttaacgatttgctagtcaatggtgatcaggtacgtgagttggtcttttataagaaggtggcagcatga

SEQ ID NO: 189237 - DNA, 816 bp, Klebsiella oxytoca
atgaaactggaatcctcactcaaacacttcagccctcagggtatgcatattagcgatgatgtgaaaagcacatcgccgaatcgcctgaacggtacagacattatgacagggatcggagtgaccagcagccgggcgcggttcgggctggcggcgttcttcggtaaggctggcatcagcaagaccgatgagcagctggcagttcaggcgctggcgcgatatgccattgatacagcaccaaaaaacgtgcgtaaagctgctggtgactcgttggggcgctgctgccttgtgctggcgcagtttgcctttgcggagtattcccgatccgcagaaacagcgggagcctgtaaagcttgcggtggtaccggaaagcagcaggcaaccaccacgcaacgaaaggtttcttacccgtggggaaaagcgccatattgggcgaagatgtcccgggccgttcgtccttctgactgggaaaaatggacagaggtaacagctaccgccagcgccagatgcgaagcctgtgatggtaaagggaagattaatgcccgctgccggtgtggtggctccggccaggttctggatcgtaaggcgactaaggaacgaggggcgccggtatataaaacctgtgagcgctgttcagggaatggcttcaccagcgttaaatcagcgaatgcccacagggcgatacagatacacataccagacttgcatcaatcctcctggtcccgtaactggaagccattttatgaggggttggtggatatgctccataaaggggagaaacaagctgcggcagagtttgagaaggtgacccgttattaa

SEQ ID NO: 189238 - DNA, 261 bp, Klebsiella oxytoca
atgtcaaaggaaaaaaacgagccagtactcgctatctgcgcatggaaaatcataccaatggtcgagcatggtgcgattgttttcaaattcgactacacagagccgccgcacaagccaacatctaaaacgaaaactacaccggcattttcacttcccgcagagcagctcaatcaactggctattgctctacagcaaagccttgctgttcttcaaggtggtgatgaaaacgcaacgctgctgactcaaaaagatctgcactga

SEQ ID NO: 189239 - DNA, 471 bp, Klebsiella oxytoca
atgaaccgggaagaaatgctgtatcagattttatattcacatcatctggaaagaatgttcagcaccgttacaagccgaattgataaagtgctctcattttttctgattcttctcggttctggtgtgattgtcggtttcggttatcccgtcattacaggcttgttgattgcagggatttcagccataaaaatggcttttcactttgaagcaagctcagagcgctcccgaaaacaggctgctgcttacctcaagctgtttaatgcgcagcatctgattgaatccgacagtgaccttcttaaaaaaataaccgagcttcaggacgaagatcacatcctctggtctgtgctgatttacccggcaatggttgccactcagattgagatgggtaaaacacctacaactcgattaacatttatagaacggctctttgctcgcgtaagcggtgcaatcgttcagactcgctctgtatga

SEQ ID NO: 189240 - DNA, 348 bp, Klebsiella oxytoca
atgcaaaaccaattaccgccggagtggtggggaccctctttacgtttttttcatgagaatagcctggcgatcaaaggggcgctcactgcgttctttaccgcactgctgttttcattatgggatggcgagggctggcggcggtcaataaacgcagggcttatctgcttcattgttagtgctgcggtagtcagcgctatgcaccagctcggacttagtgaacaggattggtcattcatcatcggagctacggtaggcggtattggcgttgaccggtgcagggcgttcgccgtctcaatagtgacttacattgctgatcagcgggggattaaacgcaatgacaaaagatga

SEQ ID NO: 189241 - DNA, 618 bp, Klebsiella oxytoca
gtggacctgacaaacgagcaaaaaaaacacttcgacgccctgaccccactgcaaaagaaattcgttaccagtcttctggagggaaacaaccagacagcggcatataaaaaagccggagggaaggcgaaaacagacgaggccgccagagtatccgcgagccagatcataacaaaacttaacgttcaggcctttcttaagtctgttcagtacgaggctgttagtgatgcgatcatgacgcgcatcgaagcgctggagcgcctgacagtgatcgcgcgaacatctatcagtgacctggccacgtttgggactcacctggtgggtgaagacgacgacggacggccaatagaacaaacggtctggaggtttaaaaattcagacgaaatgacaccggaacaaatggcggccatttctgaattaaccgccggaaaagatggattaaagattaagctccacgacgctaaagcggcgattaagcagatggcggaaatgcagggctgggaggcgccgaagaaatccgaggtgagcgggccgggcggtggccctgttcagactcatgcaacggttacggagctgagcctggaggatacggcggagctgtaccagaaattaatgaaataa

SEQ ID NO: 189242 - DNA, 174 bp, Klebsiella oxytoca
atgaagcaaagcgagttcaggcggtggcttgaatctcagggagtcgaagtttcaaacggtactaaccacctgaaactgagatacaaaggcaaacgtaccataatgccacggcatcccggaagtgagataaaagaaccactaagaaaggcaatcattaagcagttaggcctttaa

SEQ ID NO: 189243 - DNA, 408 bp, Klebsiella oxytoca
atgcgatatcctgtaaaacttgagccggacagcggcggatacgtggtttcgtttccggatatcccggaggcgttgacgcagggtgacaccagagaggaagcgttagaaatggcgcgtgatgctctggttactgcgtttgagttctatttcgaagacggcgagcgggtaccggcgcccggcgatattaccggggatttcgtggaagtcccggccagcatcgccgcaaaggtgcttatgctcaacgccttcattgattccgggctgacccaggtcgaactggccgcccgcatgggggtgaagaaacaggaggttacccgcctctttgatctgcaccattcaacgaagattgacaccatacagcgggcgctggcggcgctgggcaaaacattgttgcttgcagctgcctga

SEQ ID NO: 189244 - DNA, 1566 bp, Klebsiella oxytoca
atggtttttgagtggaggatggagcgcctgcagcgtatcaggcaaaaccctgacgttctccccgcgctcaggcagttttaccgcaacgatccggcgcagttcattatcgactggggtatgacggttgacccccgaaacatcgattacggcctgccggtcaccattccgtttttgttgttcccgaaacaggaagagtggatcaactggataatggagcggcggcgcaatctcgaaaacgggattactgacaaggcccgcgaaatgggcctgagctggtgctctatggggctggcggccacgctatgcctgttcaataaggaaatggtgattggcgtcggttcgcgtaaagaagagtacgtggacagcaccggcgatccgaaagcgctgctctggaaggtgcgaaaatttctctcactggtgccggttgagtttcgcggggtatgggaggagaaaaaacactcccagtatatgcgcgttgagttcccggacagcggctcaatcatcaaaggggaggcgggcgacaatatcggacgcggcgaccgtacaacgctgtatctggtggacgagagcgcgtttctgatgcgaccgctgctgattgatgctgcgctttcgcagaccacgcgttgccgtatcgacctgtcgtcggtcaacggcatgaataacccattcgcgcagaagcggcacagcggcaaactcccggtattcaccttcccctggaccagcgacccgcgcaaagacgaggcctggtataagcgggagtgcgagaaaatcgacaacccgatcattgtggcgcaggaattagacctggactacaacgcatcggttgagggcaagctgatcccggcggagtggatacactcggcgacagatgcccatatcaagctaggtatcactccgactggctcccgtgtctccgcactcgatgtggccgacgaaggcatcgacctgaacgcctgggcgagtcgtaccgggatcctgttggataatctggcggcgtggtccggcaaaggctcggacattttcgccacttccgtgaaagccataaacctgtctgacgctcagagcagcgattacctgctgtttgatgaggacggcctgggcgcgggcgtgcgcggggattcacgcatcatcaacgaagagcgggtgaaaaacggtttaccggctataaccgctataccgtttcgcggctctggcgcggttgtggatcctgaccgtctggtggacccctcgggcgagcgcaagacagaccgcaaaaataaagactatttcgcgaatctgaaggcgcagagctggtgggcgttgcgtaagcggttccgggatactcaccgggcggtaaccggtgaaataacaaagtatgacccggacgcgctgatcagcatttcctcagatttaccggagaaagaaaaactcatcgtggaactggggcagccgacctactcaatcaacccggccggaaaaattatcatcgataagatgccggatggtcagcgctccccgaaccatgcggacgccgtaatgatttgttatgcgccggtgaaaggtctccgccgtagtttctttggctga

SEQ ID NO: 189245 - DNA, 1551 bp, Klebsiella oxytoca
atgggatggttttttaaacgcaaaaaagcggaggataaagcgaataccgcccagccgcgggaaagctttttcagtacccaccgggaaagcggcgatccgtcggcggtctcgaccgcactttccagggtaacgcaggctatcagggcatccctgccgcgtgcggtcgccagtgacgggaccaatgacagctatgatgatgacggcaacctggtatcacctcacgtctccgctggtggcactgtcagcgatagcctgtttctctggtacgccaacaataatttcatcggccacacgatgtgcgccatcatcgcccagcactggctggtatttaaagcctgtgatatgcccggccgcgatgccatccgtaacggatacaccgtacagtctgaggacagcgaagaactgccgcccgaagcggtcaagatgctgacccgttacgacaagaaatttaacatcaatgaaaagttgcggaacttcattgcctttggtcgcgtattcgggatccgtgtggcgctgtttaaggtcaaaagcaccgacccgaaatactacgaaaacccgtttaacccggacggtgtgacacccggcagctataagggaataacgcaaatcgatccgatgtggtgcgtgccggagctggacgccgacagcgtgagcaacccggcgagcctccacttttacgagccaatttactggctgattaacggcaagcgctatcaccgatcacacctgattatctatattccgcaccctgtcgcctcgattctgaaaccgtcttatcagtacggcggcgtgtcggtgccgcagaaaattatggagcgggtatacgcggcagaacggaccgcaaacgaggctccggcgctggcgctgagcaagcgcaccaccgtgtataaaaccgatatggccaaatttatggccaacgaggataaagccaccgcgaacctggcgaagtggatcaagtaccgcgataacttcggcgtgaagctggccgacagagtcgaagacgacataagccagtttgacacggcgctggcggactttgacgccctgatcatgacgcaataccagattgttgctggcgttgctgaggtgccggtgacgcgcctgatgggaactcagccgaagggatttaacagcaacggcgactatgaggaaaacacgtatcacgaaacgctggaatctatccagacccacgacatgacgccgctgcttgaacgccatcacctgctggttatgcggtcttacgtcgcgccgaagctgcgtattgaaccggtcgagacgtcagtgaactggaatacgctggaaagcctgaccctgaaagaaaacgcagaggtgaacgaaatcaacagccgcaccgatctgaacctcgccaacgtgggcagcattgaccagtacgattcacgcgatcgtctcatcagggacaaggacagcggctacagcaatcttgcaccagctgagccgccggacgacagcggcttaaacggggagggtaacgccaatggcgaaacgggttcgaaaaatgccccgccgacagcgcccgatatcacgcgctaa

SEQ ID NO: 189246 - DNA, 870 bp, Klebsiella oxytoca
atggcgaaacgggttcgaaaaatgccccgccgacagcgcccgatatcacgcgctaacctgctacgcggcgcggcggtatttgtcccgatcagcgccgggcaggagtaccagcaccgcatcacccgcgaatttgacctgatgcgcgcggacgtcctgcagcaaattaccaccctctttaaaaccaccgattcccctgtcatggatgccaccctggacgccagcatagtgaacgctgcggccgggctgttgcgtcgtctgcgccggacgtggcaggggctttttgatgaaatgaccgacggcgccacgaaatggatgattgagcgggtgaccggcagcgccgggactgcggttaaacggtcgctggaggaaattggcgaaggcgtctccctgaatctcaacatgcagtcggcggcggtgcgggaggttatccgggcgggcagctacgaagccgcacacctgattaaaagagttccggctaaatatctggacgatatcggcgatgaggtcatgcgctccatttccgccgggcgtggtctggctgacctgcaaccggcgctcgattcctacggggtgaagatccggaactgggcgcggaatgtcgcgctggaccagacccgcaaggtttacaacagcgttacccgggaagggttcaaaagcgcggggatccggcggtgggagtgggttcatagtggaggcagtaacgaccctcgcgagtatcacctgctcgatgctcctgcaggtctgaacggcggcattttcagctttgacgatcccccgattattgacaaacgaaccggcgagcggggtttccccggccagttgccttactgccgctgcacgctgcggccggtcgtggattttgaggattag

SEQ ID NO: 189247 - DNA, 1191 bp, Klebsiella oxytoca
atgccagacgacacaaaacgcgtttacgacgtcaacgggtgggctgagatacgcgataacccgatattgcgcgccggtatttttgagtacctggggcgcaatcttcctggcgcaccggaccccaacaaagtttacagagtctggcgaccggaagaagaactggaagacccggagtgtgcggcatccttcaggctgctgccctggattgatgatcacccctccggactgctgggcgaagaggaggacggctacacgccgcccgaggatgcaggagtacacggcacgatcggcgagagggtttattaccgcgacggcgtgctgttggggaatatcaaattattttctactgcgctggccgggctggtggctgcggggaaaaaggagttatcgccggggtatcgcgcccgatacaaatttgtacccggaatagcgccaagtggggtggctaaaggccagccttacgatgtgatccaaagccgtctacggggtaatcacctggcgtcggttttagaaggtcggcagggtccgtcagtggcggtactcgacggcataacgttagatgcaaaggatttatatatggcagatgaaaataccgaaaacacaccagttgtggcgactgatggcgagactgccagcaccgtatcgctggaagagggcatgaagatttttttaaccatgctccctgtgttgcaaaaactgattgcggctaccagtgaaacaccggcagaaccggcaccgacggaaacgccagcgaccgccgataacgaccagacgctggacaatgacgatgaagaggacggcacgcaggacagcgaagacggggacggcgacgataaaaccgccgttgcggtcacgctggacgccatggacaagcggatccgcagcgtggaaaccaacagcgttaaatggatgatgcgcgaactgaacaaccgtaacgatctggttaatcgcctgtcgccgcatgttggcacgttcgacgccaaagacatgactaccgccgaggtggccagctacgggctgaaaaagctgggcatcagcgcgccaaaaggacaggaaatgacgtatctcagcgggtacctgtccggtgtggaaaaagcaccgacgcgggctgtcgtgcagtctggcgcaacgctggacagcgctgatgctggtggggctattggtcgttacctctcaggggagaagaaataa

SEQ ID NO: 189248 - DNA, 498 bp, Klebsiella oxytoca
atgaagtttcagcagaaagtaaattttgattacggctttggtattcctggcgaggtggcctttgacggcccgacccgggcaaagccgggcgtactgaaaagcgacgacgagaaaaacaacgttttcgggcgcgtttttacgctgaacgccgacggcaaaaccattggcgcgggtggtgagggtgtgttctggggcatcctcggtgacccgaaaacccatacctataccgggcgcgttggcgacgatgcctccagcctgtacgttgcaaacggcgttgtcggtacgttttatgatatggccattatcaacgtactgaccagtaaggcggcggagatcggcgataacctctggtacgacaccgacaccggcgaaatcatcacgcaggacgagaccgtaactaccctggcgggtcacctgcaggtaccaaacgccaaagttacgcgcctgccgcaggaaagcgccaccggcggcctgattgttgcgcagcttaccaactaa

SEQ ID NO: 189249 - DNA, 1134 bp, Klebsiella oxytoca
atgaatgaatcaaaagtgcttagctcgctggcgccgcgtaacgtccgaccgctgcaactgacgcgagacgatatcgcggccagcgcacatcgcgaactgagtttgctggggattaacattcctcagaatatcatcggtgacatggtagagggcatgggtcttgacagtaatgacgttggcctgatgccgtcgccgctgccgggtatgcttccggcggggtcggcaacgccgatccagttcctccaggcatggctccccgggtttgtgcgcgtcatgacggcagcgcgcaaaattgacgaactgatcggtattgataccgtcggagcatgggaagatgaagaagttattcagggtgttattgaatttgttggccaggcggtaccttacggcgaccataccaatgttccgctcgcgtcctggaatgtgggctatgcgcgccgtactgtcgtgcgctttgagtcggggatcaacgttggccgccttgaagaagcgcggtccgctcgcggtaacattgcatcggcagcggaaaagcgcgctggctcgggcctgttcctcgaaatccagcgtaaccggatcgggttctacggcttcaacaacggggaaaacaacacctacggattcctgaatgagccgagcctgttaccggcggtgaccgctgcggtcggggctggtggctctacaaaatggaacgctaaaacgttcctggaaatcaccgcagacattcgccaggtggcgaacctgctgcaggtccagagcatggacaacttcgacccggggacctcatcatggacgctttccctcccgaccggtactaaccagtatctgaccgtggtttccaactttggcgtttctgtccgccagtgggcgcgcgagaactacccgggcctgcgctttgtgacggcgccggagcaacaggcagctatcgggggggccgatgtgatgtatggctaccctgagactttcgacgatggctccagcgatggcggcaaaatctggcagcagctggtgccgagtaaattctatgcgctgggcgttgaaaaacgctctaaatcctacgtcgaagactattccaacggcaccgctggcacgctgctgaaacgccctgtaatggttgtgcgcatggttggcatttaa

SEQ ID NO: 189250 - DNA, 363 bp, Klebsiella oxytoca
atgttttacgtattttccacaatgtccacagacgttgcctacgcggtgtacggcgagctggtcaacgatatgccgacgattgagcgacagattgtgattaatggcggcgcgaatgtggccacaaaaaacctgatcacgccccgcggtgtgatgacttccgtcagtgatgaagatatggagctgctgagcgctgatccggtattccagatgcacaagcaaaacgggttcattgccgtggagaagaaagcggcagacccggagaaagtggcggcgggaatggaggcgcgcgatcagtctgcgcagctggaggccggtgattttgaggaaggcaaggagccaaaaacgaaggttaagaaaaagtaa

SEQ ID NO: 189251 - DNA, 432 bp, Klebsiella oxytoca
atggactacatcattgatgttagccgatttcgtaagctgttcccggcgatggccagtgaaaccaaatatccgcctgaggtcatcgaggcgcagtggttccaggcacaatgctttatctctgagggaaaaacgcttcgcggcgcctgtttcgaaaatgtgttgtacctcatgacagcgcacctggtctggtcgaactggttaatcagccaggggcagacaacggccaacgtagtaacgggggcgaccatcagcaaagtcagcgtatccatgcagccacccccggcgaaatcggcctggcagttctggctgtcaacaaccccttacggtctccagctctgggcgctgctgaatatcaaagccgctggtggtgcgtatatcggcggcctgccggagcgtaccggattccgcaaagttggcggggtgttttactga

SEQ ID NO: 189252 - DNA, 501 bp, Klebsiella oxytoca
atggctgcggggcgctggaaatcaaccggcggcgagcgggtgaggctgttgcgccagcaaatcgctctggcccgcagactggaaacgcgcgtcgggtggatggagagcgcccgctatgttgatggtaaacccgtcgccgggatcgccgtggtgcaggagtacggcagcgagaaaaggaaaattccctcccgttcgtttatgcgctccacgcaggcggagcaaaaggcgaaatgggaccgttacatgtaccagggattttctgcggtgatggccggtcggcgagggacgcgggaactgttcgaggcgatcgggcagattgccgccggggatgtgcgtaaaaaaatcaccctgatttacactccgccgctggcgaccagcaccctcaaagcgcgcgcacgtcgtgccgggccgggggcgaaaataatttctatcaaaccgctgaacgacagcggatacatgctcgccacgctgaccagcctggtggtggaggaaagcaaatga

SEQ ID NO: 189253 - DNA, 390 bp, Klebsiella oxytoca
atgataccgggtatcaacctgttaaatattgcgctgggcgtgatcggttcccagccggtggagtattaccgcgacactggggtaagcgtcacgctggaaaatggcgtggttcgccggaaatatgccgcaggcgtaactatcccgaaatgcagtgttcaggctgtatcacgcgacagcgcagatcggcgcggcctcgatgtgaatgctgattatgtcgaatggttcgtaccgcgagatattgtcggtctggggcgggataagtccggcgacgaaatcgagtgggacggtcgccgctggaaaatcattggacgctacgagaactgggccgggcaggatgggtggtgctgcgggctcttccaggagattaaaccgaatgccagtcgatcgtaa

SEQ ID NO: 189254 - DNA, 180 bp, Klebsiella oxytoca
atgccagtcgatcgtaatcgttacgttagatttatcctcgccccggatttgtcgaatacccgccagagcatcattccccagcctgataagaaaggtttttatctgctcacggagaagggccaggcactgctgacagaaaacggcgtcgggctggagccggagggcgacgatgacggataa

SEQ ID NO: 189255 - DNA, 540 bp, Klebsiella oxytoca
atgacggataaccagttattttcgctgctacgtaccagcctgctggctgagttcaatatgatgcgcggcctggtgccggaggtgcgtaaagcgtaccagccagagccggaaggtatcccgctggccccggcgctgtacctgcacaaaatcgccgacgtgcgcgccggtttccccggtttccgtgaggaaatggatagcgttaatcaggttatgcggcaaatcaccacgcaggtgatgatcgccacatttcaggtatccgcgacggtactcacggatgacgctgatccgcatgcgctgaccgcgccggacttgctgaagcaggccgcgatgatcatgcagtcgcgggagtttcagggggcgatgctggccgctggcgctaactttctgcgtgtcagtcagatccagagcgtggacgtttccggcgactacgccgggcgagaaattcagcccttttttgaattctccgttaaccacaaagatgaatcagtaagagaaattcccttcgttacccgcaccggttacagaatcgtgcgcatttaa

SEQ ID NO: 189256 - DNA, 1494 bp, Klebsiella oxytoca
atgtcaatcgcaattgatcactacgtgaaaatcacgtccggtgtgggcggtgtcgcgcaggtgcgccagcgtgacctcattctgcgcctgtttacgcctaacgtccttgtatcgcctgacggcgtgctggagttcaccagcgccgatggcgtgggagcatacttcgggtatgactctgaagagtaccggcgcgctgtttactattttggctacgtctcgccatccatttcaacaccatcaaaactgtcattctgtcgcgatcaaaaccaggcctcgccgccggtagtgctggggctgtccgcaacctggaatattaccgccctgaaagccgtcagcggcacacttgagggaacggtggacgggcaggccttcaccacggcaacggtgaatctctccgctgccacgtcgctggccagcgtcgcgtcacaggtcaccaccgcattacgcgcactgagctacgacgtcatgaaagccgcgacggtggaatatgacccgctccttgcgcggtttgtgtttaccggcggcgcaaatgccggggtggtggtgaaattcaccggcggcgccgtcgcagaggctttacagcttgcaggcggtgaacctgtcgcgggtgtggctaaaccgctgtcagaggcggaaaccgtggccgtggcggatgatatttcgaataactatggatctttcctgtttatgcgcacgctggacctggcgcaactaatcagcatggctacagcgaatgcggcgaaaaatattcagtttatgtttttggctggctgcacgcgggcgcaggccgaatcgtacagcgctgcgctgttgtcgatcgggagtatcggcctcacgctgattgatgctgacaataccgaatttgacgaacaaatccccggtatcctgatggcggccacgaattacaacaaaaagaacggcgtcattaactacatgtacaaacaggtagcgaacgtcaccccgaaagtcaccaccacgccggatgcgcagaaattcgacgcgctgcgcatcaactattacggacgcactcagaacgccgggaacaccatcgatttttatcagcgcggttcgctcatgggcggcgggacgtaccctacggccatgaacgttcacgcgaatgaacagtggctgaaagatgcgtgtgcggcggtgctgttaagcgaccagcttgcgctggagcgcattccggcgaatgaaaccgggattacctcggtactgactgcgctgcagggggaacccatcgcccaggcgctggaaaacggcgttatcagccagggtaaattcctgaccaccttacagaagaaatacatcacgcagatcaccggcgacgataccgcctggacaacggttcagaccgctggctactggctggatgctgtggtggaaagctacatcaacgacagcggcgaaacagaatatcaaatcgtctacacgctgatttacggcaaagacgacgtgatccgcaaaatcaccggtacccacgttttaatctaa

SEQ ID NO: 189257 - DNA, 447 bp, Klebsiella oxytoca
atgagtaatgatatttcaggatttggcctgcgggtgactatccgggcctcagtgatgttccccgcgggtatcacgatcacgcagtttgctgacgatgccgacccgctggacagtccgtcgcagcagttggccgacgtcgggatggggctgaacggcgacatggttcactggcgcaccgcgcagcctatcccggtcactctcaatgtcctgccgaataccggcgacgacaggaatcttcgaatcctggctgacgcgaaccgcgtggcaaagggcaaaaaccccactaatgacgatatcacgatgacgatttattacccgtctggtgagacgcgcatgctgaccggtggcgttattaccgacggtatggtggggaacagcgtggcgagtgccggccgactaaaaaccaaaccctacgtttttaaattcgaaaatcaggtgactgcataa

SEQ ID NO: 189258 - DNA, 435 bp, Klebsiella oxytoca
atgttagaaccactcaatcaggaatttacctgcggcgacgggaccaaaaaaaacttcattctctcgaagttcccggccatcgccgggcgggagattgtcacgcagtatccaatcactggcgcgccgaaaatcggggagtacaaaacgaacgaagcgctgatgctcaagctgatggcgtatgttgccatcgagacgccaaacggtcccgtgatgctggttacgccggagctggtgaataaccacgtcccagacttcgaaacgttgctgaaaatcgaatgggccatgatggagtacaactgctcttttttcaggaacgggagcgccttacgctccctcgattcgctgaaaacgcggttcctcagctcgatttcaaaaacgttgacggagttattggcgcaattgtcggggaaggcctcgccaccctccgggagctga

SEQ ID NO: 189259 - DNA, 1608 bp, Klebsiella oxytoca
atgagtttattagaggcgttttattacacatttggcgctgatgccgatccgctcgacaaagcgctaaaagagtcagaaaagaacactgaacgcctgaaggcaaaagtcagcgcgacagacgaacaggccacgaagttgggcacgtcgtttgtcagcctggcgcgcagcgctgcggggctgctgggcgtcacggtcacgcttgccggaattaaagcgctggccgtaactacggcggagacgacggccgcgctggggatgcaggcgcgggtgatgggggttaacgtctcgacgctggacgcctggcgcaaggcggtgacggagagcggcggggatgctaacgcattctcatccacgctgggcaatcttgcccggcgcttccgtgacccggaggcggctctgctgcgtctgagcggttcgctggggaaaatgtcggcataccgggcgcaccgcatcggtaaaatgctcgggctggacgagtcaacgatagaactgctacggcaggggcgcgtaaaagttgaggagctgattaagaaacagaaagagatgggggtgatcacaaaagcgcaggtagagcaggccgagaaattcacgctcaaattacgccagcttaaaggcgaatttgaaaacctgaaaatgcaaatcggtacagccctgatccccgtcttcgaaaagctgttagacgcctggaataaaacttcgaactggttaaaggaaaataaagaggcggcgggtgatttcttcattgccctggcaggaattatcacagcttattatctccccgcaatgatccgggctggtatcgctacgctggcggcgacctggccaatactcttgatcgttgcagcgttcgcggcgctggctttagtcgtagcggatgtgattggttatttcaaagggatggactctgttaccggcgatttggttaagcaatttcctttattaggggaaattttagatgtcctgaaaacgactgttctcggtctgtgggacgcattcattacattgctgaccgatccgcttcagtacctgcaaaatctgaaaactgagcttaaagagttcctcgacctgctgtttggagagggggcgggagacacaattttcacctggattgaaaagggcgctgacggcgttgcggaagtctggcgggaactggaaaaaatcattggtagggttgttgagctggcgctaaaaggttttcagtctattggcgacgcatggaaaaaagtaaaaggctggttcggcgctggtaaagatgaggtcgagcaggccaaaaaagaggcgaccgaccctgatattaaaattgaagggtgggaagatgaagactatctgaacgaaaaaaagaatgcgcaggccgggaaacggcaaccgcctgatttaacgtatggggggcaggcgtactggaaccagttagccagtaatccggttaattctctaaccagcaattctatcagcaatatgaatcgctcagagaataaagagcttaaatttaatattgaaaaaatagaggtaaatactcaggcgactgatgcgaaaggaattgctgatgatatgaatggagccgttcgcgacagcacgattagtcattttgctgatggacttgtggggtaa

SEQ ID NO: 189260 - DNA, 522 bp, Klebsiella oxytoca
atggcagaggttaccgaggtctttgggatatatagtaataaattccagttacgctttgaaaaaattaaattactgaaagcgtcgataatgcgtgaggcaaagttgatggagcatccgctggaagatgggagcacaatagccgatcaccgcattctactaccaatagaaattgagcttcccgtattgctcccggctggcgactaccagtcattataccgggagattaataaggcgtggatcgagacggaattatttactgtccacacccgagcggggatatttaaatcaatggcgtttgctgcgatgcctcatgatgaaaaccctgagcaggttgatgtgatccctatggtactaaggtttaaagaggtacgccttatcaccacccagtaccaggcgttacccgcgcgaaaggtggcccgtccgcgcgatcaaagtacagtgcaccgaggagagcaaacaggagtggtgaaaaaaaataaaacatttggtaaaattcttaaaaataaggtaacaggtggatga

SEQ ID NO: 189261 - DNA, 321 bp, Klebsiella oxytoca
atgatgaaagaaatagattttagtaatgcgattttaattcatcttgagacgctaccaaatcaatcactgactattcgtcttgcaaatagtcgttatgagataaaattaattaccatcagtgatagtctgatggctattacaatatcaagggatgatgttgtacttattcaaaataaacgccttatatcatctgtcagtttgctagcacagcataacgctaaagggcatggtaattttgtttttatcactcccgatgaaacctacccctattacactgagtttaataatggtcatgagttatatttcataccggaggggtga

SEQ ID NO: 189262 - DNA, 843 bp, Klebsiella oxytoca
atgtccactctcgatcctcgaattattcgttgtgaaatagaaatagatggcaggctacatgtatacgaaaatgtatatattcaggcatccgggcagaaaacagcgaataccctgcaaaacgaatgcacgataaaaatcggtaacctctctaaacccgttcgtgattatctgataacggaaacatcaccctataactggccgcgtaagcgaaagcgcgtccttctgtatgcggggcgacaaagctatggcacctttaaattatttgagggggacataatcggatgtacccccacgcagccgcctgacgtcatgttaacaatgaaagcaaaaaccggtgtcttttttatgagcgattttctcacggggagttacgcagagccggtaccactcagcgcaatagccagtgacacagcaaagagtatggatctgacgctggattttcaggcccaggacaagctgatcagcaattacaactactcaggggcaaagctgggacaagttaataagcttgcagaggccgggagttataacgcctacgtcgatgatgatcggctggtggttaaaaacgcagatatgccgttaagtagcctggctgtcacgctgaataaaaatacagggatggtcggggttccagaagttactgaacaggggatcaaggttaaatatttactggacccgcagagccgccccggtgcgagcctcacaatagagagcgaacttaacccggcggcaaacggcacgtttgttatttacaaaacaactttcgatatttctaaccgcgataccgcctggtacacaacagcggaatgccggaggcctgggctatggcggacactaatttaa

SEQ ID NO: 189263 - DNA, 678 bp, Klebsiella oxytoca
atggcggacactaatttaactgatgccgatcccggtcaaagcgcgaccctggccggggtcattgagtatgtattcaaaaaaatgcttcaggggattgatggacaactacccgccgagattatcagttatgaccgccagagcaatcgcgccactgtccgcccgctgattacccggataactaccgccggggagcgcgtcgagcgcgctacggtcgccagcgtgcctgtgctggcgctgggcggtggtgattttgggataacgtttcccctcaaggctggggacaggggctggatagaagccagcgaccgcgatatctcgttattcttgcagggtaatgaaatgtcacgccccaacaccctgcggcttcacaactttgctgatggtcgttttattcccgatctgatggctgattatgacctgccggcgggccacgatggcgcgctggttatccagcataaatcgggggagtctgcgctgctgctgggcgagaaatcgctggaactccggatcggtgacgtatctgttacagccactgaggacgggataacactaatggcaggcggcgcctctctggtgctcactgccagcgacctgactcataacggaaaaaatatcggcagcacgcacacgcaccctggtgttttgcgtggaggggattccacctacgaaccggagtaa

SEQ ID NO: 189264 - DNA, 354 bp, Klebsiella oxytoca
atgacagaaacgctcagcctggcgctaaaagggcgcaatctttatcttgatgctgctggcaaccttgcgactaaaacgggcctcgcggcatgccttcagaactgcgaaaccgcgatgttggcacagcttaacgaaatgatttacgcgatggatgagggcatccccagccgggaaacgctctgggacaactaccagccagcacaatttcaggccgccgccgttgcgacaattgaagatgttcccggagtgctccgcgttcagtcattttctgtaagccgcggtgataacgagtttaactataccgccgttatcgtaacggaatggggaaaggggacgattaacaatggcttatga

SEQ ID NO: 189265 - DNA, 1191 bp, Klebsiella oxytoca
atggcttatgaatatatcaacagcactggcgtaattgtcccggatacagcagacataaaaagcgaagtagagcaggagttcaaggcagcgctgggcgatagcatgtctacggcagacgacactccccaggggcgcctgattgccgctgaaacgtcagcacgccgatccgttgctgaaaataatgctctgttagcaaaccagatcaacccaaaagattccgtcggggtgtttctcgaatccatttgcgcgtggctggatattgagcggaaagaggaaagcgcatcgacgatcgccagcgttacgcttggcggtattccgctggtggaaatcccggccggatcacgcgcgcggagcggtgacggtgatttgtacgcaaccacccgctcagttgtgttggatactgccggacagggtagcgtcgattttgtggcggtggaaaccggcgcgctgacatgccctgtgggtgggctgacaacgattatcgatccgatattgggctgggagacggtttataacagcaacgccgccgtaccaggttccgcggctcagagtgatgaagcgttacgcctgcagcgcgagctgcgactggccagccaggggatttctaccgttgaggcgcagatcagcggtctgtatggcgttgatggcgtgcgctcactctcatttctggaaaatatcagccacgaatttcagacgattgacggtatctacatgaagccgcacagcgtgtgggcgtgcgtgtacggcggcgctgatgatgatattgctatgagcctgctcaggaataaaaccgacggttcagggtggaatggagctgtctctgtgacggtgacagagccgaatgctgaaataccttacacggtgcagttcgacaggccaaaagaggtttctattactgttcaagtcaccgtccggcgtggacagagtaccgttaacccgactgaagctatcccggaagcgctcatgcagtacgccagcggagaaatcgacggggagcgtggttttgtggtgggcgcgaatgttagtccatttgaactttcaggtgctatcaatattattcatcccgaaattttcgtgagaaacgtgctgatctcaagaaaaggaagcgccttatctgctggtgagatcgaaattatgagaaatgagatacctgttttagatgccagcaatgtaactgttgttatagactag

SEQ ID NO: 189266 - DNA, 813 bp, Klebsiella oxytoca
atgaataagttaaagttaatatctatattgctgggtttttcaatttttggaaatgctcaggcttatacacccaaaaacatggacgtttttaataatgtagtagataccatatttcaagaggaaataaccggatttttgtctaatatggatacagcgatcggtgatgcagtcactaatgctaatgcatctaaaataatatcggtttaccacaataatgaaatggctggtgataagcaactcaaaggaaaagctattcgaataaagactatagcttcagcaataaagacagatttttcaggtgatgcatatatagttgctaatggtcgtaatagctatgaaagtgttatgttgaaaattgataaggatgacgagcgaaatcttaaaataaataaggggagtaagatagattttgtgtgctttggtggtggtatggttgttaatactccagttcttaattcatgcatgtaccctaaagattttgctacaatggtttatgataacatcaaaaaggatatacagagaatatctaataaaaattacaagccattatctttccttgaggggcaatatgcttatgttttcattgcaattgaagataaagttcaagattcttgtttgagtgttggggagaagtgttcaaattctttacaaaaagtttgggatagctttgatgacacaaaaaaagataattactcagatgaacaaatgaaagaaatgaaaagaattaaggtgtatataaataatgaaaaaaatcttccatatgcgccagtaaaacccaaagaaagcaccagacttaaaaaattacttggctga

SEQ ID NO: 189267 - DNA, 612 bp, Klebsiella oxytoca
atggctgaaactatccccgagattgaaaacagcgttgacctgctgagaaatatcatctggcagaccgacgaaaccaatatagaaacactgattgaagcgaaacaggcctggtacattaaagagcaatcacagttctggtctgactggtatcgagacgttttcgacatcaggacagctaacgatttcggcctgggtatttgggcgcgggtgcttcgagtgtcgttcacgctgcaggagtgcccaagcttttcactgactaccgagcaaaagcggctggtgtgccgcctgcgctattaccagctgattacccgctgcacgatacccgaagttaacggcatcctgaaagacctgttaggggacgagattaaggcctacgcgctcgatcctaatgacatgtcctgcatcatgtatgttttcgatgaacaacccagcgatgatctggctgtcatcctcgcgaaatatgacctgctaccgcgcccggcgaccgtgggcattaaatttcgtgttcttgattatgagccgttcgggttcggcccgtacaacatgaattttaataatgcgccgttctggtggggggacgggcttcactatgactttaaatgtccggagtaa

SEQ ID NO: 189268 - DNA, 1032 bp, Klebsiella oxytoca
atggcgaatgaagacggaattaagatttcagaattagacgatgcggcagcgctaacgggtatagaaaaacttcctgttgttcagggtggtgatacagtagccgcaaaaattgaccagattaaggcattgatacccgccggagaaaagggcgaaaaaggggataaaggtgacactggggctactggagctcaggggcctatagggccagcaggtcccactgggccgaaaggtgacaaaggtgataagggcgatgagggcagttcagctaatatagttattagttctgaatctaataatgctctcgttaataacacggacagcgcagcaggtccgcttggtttgaaagtacttgtgtctaaagatattcaaaatgaattattcattcttgaggatgatactaacccagggctatatgctagaccaattagtgccatgctttttgctgaaaatgattctatcaaaaaaacatcctcttatcagggaaaccctaaaaatgcggctatcagcgtgagggttagcaataaagaaaataataatctgaagttgttaagttatgctgatgcagaaaatgaatatggcctttatgctgaaaaggcggcactcagtaggggaacgggcggagggagttggtcgtttgggtatcctgatgtgaaatccgcggcaaatgcatgcggccatctcggaagcggtgtttactggaagacaacaattactcttagtgctgcgccagtcggtgatgtgggggttcacgtcagaatttggttacgagaactaccatgtgatgaaaatggcgcgatcgtgccacattcaatcattaccgattacatagaggcaccttcaaatacaacaccaaaagttgcaatctggctaatatgtcagtcggcaccaagtcatttgctgaatatcaatacaggagaaatcctacaaataactagaagcccagacgcaattacttcaggcttacctgaatatactacttccggtactcataaagaaccgtcatatgtacgagagtatttttttatcaaataa

SEQ ID NO: 189269 - DNA, 249 bp, Klebsiella oxytoca
atgcgtgtagaaatcagcattgccaaagagaaagccgggaagatgccaaaaggttcaatgcctgcgcttcaggaagaaatgacccgccggatcagcagacagtatgacgatgtagaagtggtcgttaaaacagcaagcgttgatgggcttagcgtctctcaggcttctgataaaggtaccgcaagggaatttgttgaggagattctgcaagaaacttgggaaaccgcggacgactggtttgtgcgctaa

SEQ ID NO: 189270 - DNA, 1215 bp, Klebsiella oxytoca
atgacaccgacaccactcacctcccgcgcagccggctgggtaatatttatccttgcgctcggcgcaggcttcagcgttgccgctatctattacgcgcagccgctgctgccgctaatgggagcaaacctgcatttgagcgttgagggtatgggtctggttccgaccctgactcaggcgggctatgcgctgggtatactgttccttctaccgcttggcgaccgtcacgatcgcagaaagctgatcctgatgaaaagcgccgcgctggcggtcctgttgctgctctgcagccttaccggtcagctcacctctctgttgatggttagtttgctgatcgggatggctgcgacaatggcgcaggatatcgtaccagctgccgcgattctggctcctgcgggtaaacaagggaaaatggtgggtacggtcatgactggcctgctgctggggatcctgctgtcacggacggtgagcgggctggtgggtgcgctattcggctggcgggtgatgtatcaggccgctgcggtcagtattgcactgattggtctgctgatgtggcgcgtgctgccgcgctttgaaattcactcagacctgacttatccgcagctgatgaaatcgatggcccacctgtggaaacgctatccggcactgcgtcgcgccgcattcgcccaggggttcctctctatcgccttcagcgcattctggtccaccctggcggtcatgttactggcgcactatcagatgggcagcgcggtagccggcggctttggtattgcaggcgctgccggggcgctcgccgccccgctggctggcggcctggccgataaattcggagccgaaaaagtcacgcaaatgggcgcggcgctggttaccgtttcttttgccctgatgtttctgctgcctgcgctaccgccgcatggccagctgatcctgattgccatctcggccgtcggttttgaccttggactgcaatccagcctcgtggcgcaccagaacctggtgtatggtctggagcctcaggcgcgcggtcgtctcaatgcgctgttgtttaccggcgtgtttatcggaatgtcgctcggctcagtgctgggaagcaaactgtatgtgatagcaggctggagcggtgtagtgactctcgccgtcattaccggcgctatcgccctcggcatccgcctgatagaaagcgcgagggtcgtttcggcgcaacgaaccgtcaggtaa

SEQ ID NO: 189271 - DNA, 1629 bp, Klebsiella oxytoca
atgaaatcacaaaaatataatcacatcacgcgggtactgctggctgtcggtctgttctcaatcactctcccggcgctggccgcgcaggtgccgccgggaacggtgctggcagagaagcaggagctggtcagaaataacggcagcgagccgtcgtcgctggatccgcataaagtcgaaagcgacgttgaaaacaatatcattagcgatctttttgaagggctggtcagcgtttcgccggcaggcgacattcagccccggctggcggagaaatgggagaataaagataacaccgtctggaccttccacctgcgtccaggtgcgacctggtctgatgggacggcgattacggcgcaggatatcgtctggagctggcagcgtctggtgtcgccgctcacggcgtccccttacgcgagttatcccggcaatatgcatatcgtcaacggtgcggagatagcacggggtcaaaaagcgcccgagacgctgggcgtcagagcggttgatgatgcgacctttgaggtgaccttaacccagccgaatgcggcgtttttggccatgctggcgcacccgtctctggttccgctcgataaagtcctcatttcgcgctacggcgacaagtggaccaaaccggaacatatggtaaccagcgggccctacaagctgtcgcagtgggtggtgaacgagcgtatcgtcgcagagcgcaatccgcgttactgggataacgcgcataccgtcatcaataaggtaacctatctgccgataagctctgaagccgccgatatcaaccgctacaaagcgggggagatcgacatcgtctataccgtgccgattaaccagttcgcccagcttaagaaaactctgggcgaacagctgaatgtttcgccgcagctggcgacctactattaccagttcaataccacccggccgccgtttaatgacccgcgcgtacggcgggcgctgaatatggccctcgataaagagattatcgcggagaaggtactggggcaggggcagcgtcctgcctggcttgtcagccagcctgatatcggaggggtgaagctgcacaatcccgaatatgccagctggccgcgcgataaacgtatcgccgaggcgaaaaaactgttgagcgaggccgggtataacgagacccatccgctggtatttaatctgctctataacacttcggaatcgcaccagcgaattgccatcgccgccagctcaatgtggaaaaagaatcttggcgtcgaggcgaagctgcaaaatcaggagtggaagaccatgctcgacaccatgcacacgcataattttgacgccgtgcgctacgcgtggattgccgactatgacgatgccgcgacttttctcaataccttccgtaccggcgatagtgaaaataccactcagtacagtaatccagcctacgatgaggcgttgcgcaatgcggcaaaagcgtctgataccgcggcgcggggtcagttctaccagcaggcggaggatttactaggccaggatgtcccggctattccggtctatcactatgtgcgtacccatctggtgaagccatgggtcgggggttttacgccggataaactggggtattactacaccaaagatatgtacatcaaaaaacattag

SEQ ID NO: 189272 - DNA, 1023 bp, Klebsiella oxytoca
atgggaagacctcgtttaaataataaagataatcgccttccaccacgcgtatataagtataaatatagttatgtctggaaacccaaagaaacaggatctagtgtaactctcgctccagtggctgggactagcatgtctatgttatgggcaaagtatgaagctgaaatagcaaagcgttctgacgtcatgacgttatctaaactttggaatctttttctggagagtcctgtttttactgagttggctccgcgaactcaaaaagattatcgtcaacatcagagagcattattaaatgtatttggcaaaatgcgggctgactcaataaaaattgagcaggtaaggatttttatggacaaacgaggccttgaaagtaaaacacaggcgaatcacgaattagcaagcttaagccgcgtttacggctgggggtttgagcgaggatatgtaaagagcaatccttgtaagggagtgaggaaattcactacaaaggcgcgcactgtgtatattacagacgagcaatatgcagcaatttatcatgaagcgatccctgcgttgcggatagcaatggagatatcctatttatgtgctgcccgtcttggggacgtcctggatctacgctggaatgaagttatggatgccggcctatacatagagcaaaacaaaacaggcgcaaaacagattaaagaatggtcgccgcgtctccgttcggctatccagttagcccgcaacactagcacctcaggctctgattttgtgataaccaccagcaagggaagcaaggtaatcacaaaaaccctgaataactggtggaatgatgctaaacgagcagcagaacaaaaagcaggtatgccgtttggatgcaattttcacgacatcaaagccaaaggaatttctgactatgaagggagcagtcgtgacaagcaacttttctctggtcacaaaacagaaagccaggtgttggtgtacgacaggaaggtgaagatcaccccttctcttgatgccccacttcttgaaaaacaggcataa

SEQ ID NO: 189273 - DNA, 318 bp, Klebsiella oxytoca
atgacgaaaaataacctgttaactgacaatcgcatcgcagaaatactacttcgcgctgaaacttgtgacgactcagttttaaccgattacgccgacatagctgcagcgatgcaagagttacagtacaaccgaaaaattagtaatgctatacagaatgatatgaagttagcgatagaagcaatgctggatatgcatcaaagagtgatgaaacaaacgaatcacagtgcttccttttttgacgcagaaactattttagctatgaactatgcacctattcaggcgaaacaggcgcttgaaagagcaagattgcgtaagtga

SEQ ID NO: 189274 - DNA, 261 bp, Klebsiella oxytoca
atgaataagttaattaactcattaacccattcatataaaacatggcttgcggtagcagaacaaaacggaacaaaacttattgcgtataactgccccgcttgccttgaaaaattaaaaacagtacagccacagcctggcgaatattgggacactttctctacctgcccgttctgtcaggcgctgttatttaaaataaccaaatgcgacaaagtagagattgaactcattacaaagattggagcagaaaatgacgaaaaataa

SEQ ID NO: 189275 - DNA, 561 bp, Klebsiella oxytoca
atgagtactcgcacaatagatttagcaaacgagattagcaaaatcctttcacttgctgaaagtggcgaaatggacccacaaactattgcggatacactggaaggcatcgaaggcatgatggaagataaattcgatgccactatgtcagttattcgcgactttgaagcaaacaaaaagaaatgcaaagaagaagctgcaagactcactgaacgctcaaagcattgggatcgtcagagctttaaccttaaaaaatatctacttgattgtttaattgctactggtcgcacatccttcaaaacggcagtcaatacttattcggtgagaaagggaagtatctcacttgatattattgatgaaacattattgcccgatgattatgtaacgtctcatacagagatagttaatgaaattgataaggaagcaattaaaaaaatccttactgaaaacttgaaagctattgaagctatgcgagcaaaaggcgaagaaccaacaccagagcaactgaaccttattcctggtgctcgcgtagttcgcggagaagacactctttcagttcggtaa

SEQ ID NO: 189276 - DNA, 189 bp, Klebsiella oxytoca
atgaatactctgttcgcacttgtaatgactgtttatttaactaccggagaagtacaggatcaggtaatcggtgtttatgacagcttttcagaatgtaaagcggttgcggttgaaaaacacattactggcgaatgttatccggtagaaggcattattcggaataatggagaaacaccagcggggttatga

SEQ ID NO: 189277 - DNA, 300 bp, Klebsiella oxytoca
atgaagaaaaaagcagaccttcgcaaagcagccagagggcgtgagtgtaccgtcagaatccctggtatttgcaatcataaccctgaaacatcgtgtctggcacattaccggctcgcgggaacgtgtggcacagcctgtaaaccggacgatgaacagggtgctattgcgtgcaataagtgccacgacatcattgatgggagagtaaaaaccactgaatacggttatgaagagctgaggcttatgcacgccgagggtatcctccgcactcagttaatctggagaaaggaggggctacgatga

SEQ ID NO: 189278 - DNA, 672 bp, Klebsiella oxytoca
atgaacgctcagcagctcgagtatattcggattaagctgcgccaggcgctggtggatgactcaggaaacaccaaaggccagcttgaggcattcgcagaacacccaccagctgataaggaccgcaatccccgcaagcgcattcatgttgtagaactggacaacgggcgcgggggcgtgaggtgtgttaaagcagaaaataccacgctgtatgtgcttgggacacgaagccgtcgccgcccaatgcctccgattagagaagaggctttcacttcatgtgcatggcgtagggctttccttatgcttgatataagccagagagcttggctgaaatactgttatgggttcgatttgaatttcggatatcaaactgagatctgtcaacatgtgtggaagaactatgagaaaaagctaatgaatgtgaggcttcagaagcgtgttaagcaacgtctcatatcccttgtatggctagcggttcaagaggttgccgctatgaataacaatgtgttgtacaaagaatatgcagctacggccctcgcaaattttctgtcaatccaccgagactcttggtatcaaacgtatgcagaagcatggaaagattttaaatatttttgtaacaagctagatatagcgtcactgagtgaaattgattctgcaatgaatcgcttagtatga

SEQ ID NO: 189279 - DNA, 336 bp, Klebsiella oxytoca
atgaaaccatatattatgttgtatagcgaaacaatggatataattcgccataaaagcgacgtttatgaatcaactacaaggacattttctatagagacagatgacgatgattatgttggctgtaatgcctggacaacgattacaaaaactagtgaggcgagcgatgatgactatatttactgctttcctcacagcaatttaaaggataacaatgaaaatcatagcacaattataacgcgctcattagaaaatgaggatactgattacttatacatgtccacaattagaacaaacacaatagaatcaagcgatgatgattatataatgttctattga

SEQ ID NO: 189280 - DNA, 606 bp, Klebsiella oxytoca
atgactgcacaagatattacaaaattggctaatgaatatgaatatgacacgctaaaaaaaatcaataccgaaacaagattaagacaagaagaatttttaaaaatgagaatctcagaaaacaacgatgcattaaacaatattttcaataaactaaattactacacgaccattatactcgcattctcagccgccttagtctatgcctattccaaactaaatgaaatacctttaagcatagccacgactataatatattccattgtaataattaatgtattggacatatttgatttgattttactactgcgccgctctgtttctatatctggatttataagatcaacatttaagaatttacgcactagcaatgataattactcacttactaaatctctctattttgattggattgcgagcactaatgatgttaaatactatgctggactgaccaagaatgcggaaatgagatccgtcagagttatactaactggttttctcttgttaatttgcgcaaccttaacatttaattctattgaacaagaaaataatggaagccttatgtacttacaaaacctcacatcaataaactatgaaggtagcaggtag

SEQ ID NO: 189281 - DNA, 393 bp, Klebsiella oxytoca
atgactgggccgggaaattacgtcatgctaacctggctaaataaagatgcttttcagtttgctgctgccgacagaattccactgcttctcgatagttttgataagcaatttctttcccggtctgctgagttgaaattcctggttcgtccggaactggttcgttatctggctgaatgccacgtggagtttattttgatccatccattcagagaaggtaacgggcgtctttcacgactgctttgtgatgtactgtcggttgtggcgggtaagggcttactggattacagtctatgggatgagcacaaggccttttatttcagagcaatacaggcaggcatatcaggaaactatagccctatgatgcaactgatgagcgatatcttaccagattaa

SEQ ID NO: 189282 - DNA, 516 bp, Klebsiella oxytoca
atgattttattcatagcaggtgcccatgcagttggaaaaagttatctatgtaaaaaattcttagaaaatcataatgttgaccatcacagcgctagcagtttgatagcaaaaggaagagtcgaaaattggggggtagataaaaaaaccggcaacgccgaggaaaatcaaaaaatcctaatagaacaattagctagcttcaaacacaataaacgagatttacttctcgacggtcatttcgtattagtctcaaaagaaaatcaatttatcgaacttgatcattccgtattccatgaaatgggaattaatgcagttattcttgtcgagtcagatgaaacaacaataataaaaagatttaaggaacgcgaagccaatctaagtttttcccctagagaattaatgactctagaacgtaaaaacgcaattgccgttacaaaagaattaaacatccctttagtaatacttaacgcaccatcaaaagaatgttttagtgatgttatagaatctattctttcttaa

SEQ ID NO: 189283 - DNA, 372 bp, Klebsiella oxytoca
atgaaagtcttgttgtcgattaaacctgaatatgctgaatcaatacttttaggcgataaaaagtatgagttccgaaaaagcattttcagaaataaagatgttaaaactgtagttatttatgcgactatgcctgtagggaaggtgatcggggaatttgagattgatggtatcttagctcttgaccctacagaattatggaaaaaaacaaaacgttatgcggggatttctagagatttttttgatagctacttctctgaaagagatcgcggttttgcgattcaggtaaaaaatcctaagcgttatgatatcccacttcaccttagtgaactcgttccaggtgcagtccctccgcaatcatttcggtatatataa

SEQ ID NO: 189284 - DNA, 582 bp, Klebsiella oxytoca
atgaattataaaaattatcctatgataaaaatgcaagagcgaaactttctgttaggaatttatcctaaatggcatacccgtctctttcccgagtcgatactccggaacgaaaatgaatctatcattgaagatgtttctcatactaatagtattcataaggtctatttaactaaaatgcatggagttcctcaacttcgtgccggtgataacctgcttatttatcgtacaagtgatgggcagggaagcgctagatttcgctctgttgctacgtctatgtgtgtcgttgaagaatacagaaacattcatgagtttgggactcttgcagacttcaaaacatattgtgcaccatatagtgtttttagtgacgcagagctgaatgatctatatcgtagaaaaacctacccatttattataaaattcagctataatttcccattaaagagaaaagttattaggcaaaaccttatggatattacgggttatgcggatggagattattggggttttttaacattaactaatgctcatttggttgagattcttagggctggaggagttaatgaaagtcttgttgtcgattaa

SEQ ID NO: 189285 - DNA, 471 bp, Klebsiella oxytoca
atggcgcttgaatatagaaaatttagggatgttaatttatctgacactttctttgattctctgaaggaagattatcccgagtttgaagattggtttgtaagaaaaggaaatgaaaaagcatatgtttcattcaatgagcataatctcattgatggtttcctttatctcaaagttgaagatgaagcgttatcggattgtaccccaccgtattctaaaaaattacgaattaaatgcggcacatttaaaattgatgcgcatggaacaaaactaggggaacgatttgttaggaaaatttttgacttcgcatccttgggggatgcggatgaaatatatgttactattttcgataagcatcaagggttaattaatctgttgactcggtatggattcagattaatatcaagaaagaacaaggaaacgttgagtggtcaagaaggtgtatacctaaaagattttatttggagggattga

SEQ ID NO: 189286 - DNA, 210 bp, Klebsiella oxytoca
gtggatagagagttaaacgagcaagtcatgattgaacgggtcgagatgattgcgcgcctgacgacagagggggcttgtcaggaaagagatcgtgaaatcgcgcttgatttaatcgctgtactggcaaaagtagaaatattaaaaaacaaagagttatcaatatttttttctactacccaagctgagggttgtgaatgtccagaactgtga

SEQ ID NO: 189287 - DNA, 870 bp, Klebsiella oxytoca
gtgcagggcctcaaggaaggcggcaaccgtgagttaaagcgctggcgcacggtggcgattagtactggggaaatggacatagagacattccttgcggccggagggctgaaaccaaaggcgggccagctggtgcggctgctgaatatcccgcttgaaaaagccaccgtgtttcatgggctaccgtcgggaaaagcgcacgccgacgcgctccgcgaagcgtgccaggagaaccacggcgcggccggcagggagtggattaaatggcttgcagaccaccagcaggaggcccgagaggcaacaagccaggcgcgggaacgctggcgcgggctcatccctgaaagccatggcgaacaggttcaccgcgtcggggagcgattcgccatcatggaagcggcgttattgctggcagtcgatataaccggatgggatccacaggcctgccgggatgcaatacagcggaactataacgcctgggtgaaggagttcggcacgggcaataaggacacccggcagatcgttgatcagacagtagagtttctgaacgctttcgggatgagtaagtttgcccccctggattataatccccgcgatttaccaatccatgaattatatggatatcgtgatgacggaaaggggattgatgagccgatgctgttttacgttcttccgaaaccgttcagggatgaaatagccaaaggacataacaaagattttgctgcaaaaacattatatgagtccgggatgttgaagcggcctgctactgaaaagggctggcagcgtaagacgccgcgccttaagcatatgggaggtgcgcaaccgtgggcttatgtcctccttttcatacccagaataatgaaagtgaagagttaa

SEQ ID NO: 189288 - DNA, 297 bp, Klebsiella oxytoca
atgaccccgaaaggtgcaacaaaactacattcaatcatcattaaagagatggtgcccgctaacgtggattggtgggtaacggaagatcagcattcttttccggtggcgatgtgggccaggtgcgatgttcattgggatagtgaggaagaggcttcttatatcaacgaacgtgaccgaatattgccgtgtatcgcttgtggtggggagataaaaccccgcgccagcgcggacgctgtttttatcaaaagcagaaatagcaatcatacgccggattattccggcgtttctcatttctga

SEQ ID NO: 189289 - DNA, 282 bp, Klebsiella oxytoca
atggaatatacgcagcaggaagagatcatttattcgaaggtgaacctttacaaaattattgagcaccaggcgcttttcggtatcccggatcatccctcggatataaaccggatgccgtctaatctgtatcgccagatggttgggcgggaggcttttttctttgttgaccacgaaggccgcctccggcaccagttcacgggggaatattatgctaccagtaaagagcagtttgatatttttattgatgagctaaagaaactcagagatgaaatgagtgattaa

SEQ ID NO: 189290 - DNA, 663 bp, Klebsiella oxytoca
atgaaaaaactgattgaattacgccgttctaaagccacaaaaatcaccgaagcacgggccattgttgacagggctgatagtgaaaagcgttccatgtccgacgatgaggctaaacagttcgaagccatcaaggtgcaggttgatgcacttaacgaagaaattaagcgctatgaagacctgctcgacttggagcgcgaagaagataaacagcccaaaaacgataaaggcacccgcagcacggtgagcaatgcagaaatgcgccattacgttattacaggcgaaacccgaaccctgagcacggctaccggcgcggacggcggatataccgttattcctgagctggataaagaaatcatgcggcaggtaactgatgattctgtgatgcgccggatctgtaccgtcaacaccacctccagcggtacttataaaaaactagtatccgttggcggggccgtggttaatcacggtgaggaaggcggcacccgcaccgaaaccgccacaccgaaaatggaagaagttgctatcccgctgtacccgatttacgcctacccgaaaacgacccaggaaattctcgatttttccgaggttgatatcctgggatggctgtctgaggaaattggcgacacgttcagatgcacggcgaggccggaggccgggaaataa

SEQ ID NO: 189291 - DNA, 342 bp, Klebsiella oxytoca
atgaaaatattactggtttacgcccatcctgaaccgcgttcgcttaacggcgcgctgaaagattttaccgtgcaacatctacaaaacgccggtcacgacgtgcaggtgtccgatctctacgccatgcgctggaaggcgggatttgatgccgacgacagcagcgccccgccggtgggtgcaagctggcgggcgacgcgagattcgcaatatgccttcgctcacggcacgcagagcgcggatatcgtgggcgaacaggagaagctgctgtgggccgatacggtgatttgtccagttcccgctgtggtggttttcactgcccgccatcatgaaaggctggattga

SEQ ID NO: 189292 - DNA, 264 bp, Klebsiella oxytoca
atgcggctaatcaacgattatactcccccaacctcggacgatctcaaccgccttaaggaagaattgggattcaccgggaatcaaatggctgaccttgcgggggtcgcaagtaacagccagtggagaaaatatactggtggagaatctccacgcgctatgtcgccgcatatcctgttctatctggcagcacaattggccctgacccccgaagaactggatcgagtaatcaagaaaatgcagcaaataggcgctacgacgaaataa

SEQ ID NO: 189293 - DNA, 498 bp, Klebsiella oxytoca
atgtctccggcatttcggaaaaccgttcttgcggcggtcagcggtggggcgattgctatagcttcagcactaatcacaggcacgaccggtaatgatggtcttgaaggcgttcggtatgagccttaccgtgatgttgttggcgtttggacggtctgctatgggcatacaggaaacgacatcatacgaggaaagacatacacaaaagccgagtgtgacgccctgctgaataaagacctggctttagtagctcgccagattgatccgttcattcagaaaccaatcccagaagcaatgcgcggggcgctgtactcattcacctataacgttggtgcgggaaatttcaaatcctcaacactgctacgcaaaataaaccagggcgacatgaaaggtgcttgcgaacagcttcgacgctggatatatgcaggaggaaaacagtggaagggactgattacccggcgcgagattgaacgagaggtgtgtttgtgggggcaggaatga

SEQ ID NO: 189294 - DNA, 357 bp, Klebsiella oxytoca
gtgggggcaggaatgaagtgcgtaatagttctttctgttgcggtttggattgcggttatcgtcctttcgtggcgggctggctggaactcccacgctgaccacgtaaacgctatggcggcaaagaaaagagaacaggccgaaaaatcaatacagcaggttgagaaaaaagctgctaacgctactgaaaccggaaaggtcatttacaaaacaataacccgtgacgtggtgaaatatgtacagactccgaatcgcactgtgtgtcagtttgatagtcatgctgtgcagttgcgccagcgtgcaatcgacgctgccaacaccatccccggatttgatgaatcctccttgcggggccagtaa

SEQ ID NO: 189295 - DNA, 792 bp, Klebsiella oxytoca
gtgactgaacaaaaaatttctattcgttattttgagcgctcaaaattaaaaccgtttgagcgcaacgtgatgatccattccgatgctcaggtggcacagattgccgccagtattgaagagtttggatggactaatcccgtcctcgtggatgagcagcaggagattatcgccggacacggacgcatagctgcggcggaacggctgggcattaacgaagtaccggtgattgtcctggctggcctgagtgacgagcaaaagagagcctatcgcctggctgacaataaaatcccgttaaacgcgggctgggatgatgaattattaaaactggagttcgctgaattacttgatagcggctttgatatttctctgacgggttttagtaagctggaaattgatgatttgctggtggaggctgattcaacatcagaaggggatgaggagcgctacacggcaaaaatcgactctcctgtgtatgagccgtccgaatcggtgccagagatttccgagctttacgatgaacagaaaactcttaggctggttaacgatattcgctcggcatctctgccggcagacgtggaaaagtttctgctggccgcagcggaacgccatacggtttttaacttcaacaaaatagcggattactactcccacgcaccggacaacattcaggccctctttgaggcgtctgctcttgtgattgtcgattatcagcaggccattgagaacggcttcgtacacatgacgaagcggatggttgagataatccacggcggggatgaatgcgatgcgtga

SEQ ID NO: 189296 - DNA, 870 bp, Klebsiella oxytoca
atgcgtgatgacttctgcgctttcatcctgacacacgggcgccctgataacgtcctgacatacagaacgcttcgacgtgcaggttataccgggaaaatattcatcgtcattgatgatgaggacaaaacccgcgaacagtacattgagcaatacggcgatcaggtactggtattcagcaaggccgacatcgcaagccgctttgatgaggctgataacttcggagacaggcgctctatcttctacgcccgcaacgcctgttttgaactggcagaacgtgtagggtgtcagcattttattcagcttgacgatgattatcatgaattccagtttcgggtaggcagtgacttcgaagcggattactccccgattcgatgtctggatcaggtgttggcagagatgtttgcctattaccgctccatacctgcggtatctgtcgcgatgtcacagggcggtgattttctcgggagtggtggagatggcaatgcggcctggctaaagcgtaaggccatgaacagctttatttgctctatcgatcgcccgtttaagtttgtcggccgtatcaatgaagatgtgaacacgtatacaagcctcggacgccggggggaattatttctcaccatcggcgctgtacagctcggccaaaagcaaacgcagaagaatagcggcggcatgactgagctttatcttgactccggcacttacgtaaaaagcttctactcggtgatgtattcaccctcatgcgtaaaaatcggcttaatgggtgccaatcacaaaaggcttcaccatcaggtaacctggaataacgctgcagtaaaaataattcacgagcgacataaaaaaagtttttccgagtcagggggtgaacagtga

SEQ ID NO: 189297 - DNA, 1179 bp, Klebsiella oxytoca
atgcggatcacggtaacggatcggctgtctttccgcgtcgattctcagcgaaaaatccttgataacggttacctgtcggtaccgggaagagtggcgcgtgctggtgtgcagcaatacacagcacaagagctggaattaacggacaggccaccgaacgaattagttaacgtttatcgcccaccggaagaagtatttaagccggaaagcctcgccagttatgacaactgcgatatcacccttcagcatcccgatgattttgttgactcgaaaacttacaaagcggtttccgttggtcatgcaacatcgccagggcgcaaatttggtgaatttgttgttgttgatctgctgattaaagaccagatcgcgatagacgctgtaaacgctggaaccgctgagttatcagcaggatatagcgctgaatatatccgtaagccaggcattgccccgtgcggtacgccatacgaatttattcaagccggaattctcataaatcacacggcgctgtgtgactccgccagggcggggcatcttgcgcggttgtttgactcaaaaaaaccaaaggagcaaaacctcatgccacaaatcacccttgatagcggcgcaaaagttgaagtggcagatcaggccacagctacgctgattcagaccacgctagacagcctgatgaagcgcattcgtaccggagatgaaagccaggaaaaactggaaggagaaattgccaggcttgaagtcgcgctggagaaaaaagaagaggaactggaagtactgaagtctgaaacctctgactctgctattcagcgccgcgtagatcaggttgtcgatgcccttgggggggcgagaaaaatagcagggaaggaattcacctgcgattctatggaccctctcactattaaacgtgcggccctcgatgcagccggtattaaatgcaaaaagtatgcaacgtgggacaaagccccggatgcctatatttccgcgtggtttgatgcagaggaggagcggaccgaactggaggatgaagacgatccagatgaaaaacccaccaacgattcacatcgtcgctttgcgaaagatatgaataacgcgattacacgcaatacgggggacgctaaccagcagcgcgtcaacgcccgtaataacttccttgaccagcgctacggtcgccaaccagagggtaaataa

SEQ ID NO: 189298 - DNA, 504 bp, Klebsiella oxytoca
atggctatagctcaggattcttttgggatgtttaacggacttggttatgaaggccaggtttccactatcgaagttaacaaaattgtgtcacgccttgttgaagaggaatttattccattcggtcgggctgtgattcgtggcactgcccgccgttcgtgtgcgcctgttgaggctgcaacggtagcggctgacattatcggctttaccgttcgaagcatggctcaggccagcccgacaccgccaaatgatgaacgaaaatatgcaagcggctaccgtgtcaatgatgtggcgtcagtcattgaggatggagcaatgtttgctttgtgtgttgatggtgctgagggcggagattcggtagaggtcattgtaagtgatgccacgaatttaggtcggcttacagctggtggtaatggcgtggtactcgacttggttaagtgggttgacgatgttgaggctgggaaaattggtgaaatacgtgttcatgggctgcttaccactgcgtaa

SEQ ID NO: 189299 - DNA, 963 bp, Klebsiella oxytoca
atgcgacgtaatatttttgatatggctcctaccgctgcgctgggttttttgattcagcaagcggcgcaccttgagcaaaaggtgtatgaaaaaaaatacccgcaatataaatatgacaagctggttcctctggacgattccgctccagactggaccgatgttgtcgcgtttcagaccacagatgcgcgcggtgatctgcaacttttagggccaaattctacggatgttccgactgtagatatcgcaatggatgttggtttccataaaatcaaaactgcggcccttggctatacctacacgctggaggagatcggacgcgccaagctatacgatgtgccgctggatgctcgtaaagcaacggccgttcgggatgtcactgaacgcggtctgaacaaaatttatctgtgggggcggcttgttggtgaagggctttatgcaagccccaacgttacacgtgaggttgcaacgaatactcttcgtagtttagttctggcgatcccaactaatggcacacagcctatcatcgactttttcgctcacgcctataaccaggtctatctgacaaataccaacacggtattccgtccgactgattttgttcttcctccagaacaaatgcagcttctcatgcgtacgatgctctcaacgcataacgcgtcgaactacacgctgctgatgttccttcaggaaaactttaaggatatgacttttacagatgacattatgctgtcggtgaatgttaaagatgatcaaggccagccggaggatacgccacttgaagaagatcggctggtggtcttctgcaaagatatggaggttgtgaaaggccatgacaccatgccgatccagttcctggcaccagcaacagcggataatgtgcatttcaaagtacccgcaattatgcgttcaggtggtaccgaaattcgagtgcctggagcagttcactacattgacaggatttaa

SEQ ID NO: 189300 - DNA, 306 bp, Klebsiella oxytoca
atgcaaaccattatcaattggactaaatcaccaattgttgttgaagatgaaaatggggaccgtattactattccagcgggcaaacaaagacctgttgctggtgatttcagtaatcacccctgggttttgaatcgtcgtctcgaggttactcaggataatagtgagtatgttgatgacggtgatgatgttgaactggaggagcttcgtcagcagtaccagaatatatttaacaaaaaaccacacaagaacgctaaggcagacactcttcgacagaaaatagaagaatggcgagaaggtaaggaataa

SEQ ID NO: 189301 - DNA, 540 bp, Klebsiella oxytoca
atgagagaaattagtgagctttatgaactgctgcaggggctggtttcgatttgcacaggtttagataaaccgcgaatagtgctggcgaatcagggacaggcaccaccgaaaggaaacacactttatgccacgtataaccccatccccgtccgagcatatgggcaaccgcgaagggtcctggaatacgtggacccacttgaagagttcgacccttctcttggaactgactggcaggatctggaggaaattaccgcaagctcaatggaatttatggtttcagtaaatttcttcaacgagggtgcgcagcaggcagcaatgtggctgcataacgcaaacttcagaagtccggttagtgattaccttttcctgaataagctggcgttccggtacgtcagcaacccccgcaacctgagcacacactatcagtcaggcatccagccgcgatggcaggctgacattttcatattcgttgaacatgaggtgggcgacgacgttcttcgcgctgccgggttctctgttgaatttttacgagaggagtaa

SEQ ID NO: 189302 - DNA, 1251 bp, Klebsiella oxytoca
gtgggctactcagtagacaatattattccggtcaattttattttgaccgcctcggggctgggatatgctgacttcaccagcgcttttgcgtttgctgaagcgtctgatctggatggcattgaaggagccattttgacggaagacggcagcatgatcacgacagagtcaggacaaccgctggtcgtggaaacggcaggagtctcaactcgcgcagccgatgatttcgcgatagataccttccgtgattactcgtctgcaactgaagttggcgaggacttcccgacaaccagcgacatctacatgatcgcaaagcgctatttcgcgcagataccgcgccccaaaacgttatccgtatggatgacaaaccctgacgacgccaatcttattgagacgataaacaaagcgaatgaggctgcatggcggtacaactactttttcaagaagtcatcattgaccgatagcaccctcctgcagttaagcgactggagtgataccacggatcacccggtctggtataccgacaccgctgagacagctatcgagaacaacagcacagatatcctttcccgtctggctgcgaaggggaacagacatatgttcgctggatggcgcactccggaatcagtagatgctgaaccttcgcaggtgtactcgatggtgcaggtagcagccacgttcgcgaaatttcggcctacaggactgaatactgctattacagctgaataccaggtcctgccgggaatcgacggtgatgagttaaaagaccgtcactataaagctttgaaagcgaagaaagctgttttctttacacccgtagagctggctggggagaaagactcatgcagagtgattaacagcgtttctatgtcggcctatggtgagttcattgacgatgtggtgaacctggacattctcaaaaatcacctgcaggttgacggttacaaccacattgccaacgtggggacgaagcgaccgctgacgccgaaaggatacgccggtctacttaacgtgctttcgaataccctgaagcgattttatgacaatggcgtgctcggtgagggatcgtataccgatgaggaaaccggagaaacaaaaattgcagagtttggttttgtcatcaagtcaaaagcggaggacgtgctggagctgacatctgcacagcgcaagcggcgtgaatacccgccgatcaagattctggtcattctcgccagggctggacatgttgctgaactgaatatcaccgtggagtaa

SEQ ID NO: 189303 - DNA, 1689 bp, Klebsiella oxytoca
atgccagaaatgaatcccaacaatgttgttgatagtttactcgtatctctaggagttgacgttgacgataaaagtttcaaggcggcaagtgacacatttaatgggctgaaatcaacgatacttcagttgggggctactgcgggtgtggggtttggttttaaagcactgacttcagatctttcggcatcggttcttgaaatggataggttaagccggattacagggttcaccatcagacaagtagaaagcttaagacatgcgatgcgacagtctggactcaatcctgattctgcaaatcaattagcgcaaaaaatcccggcatggaggcaggccgccaaacagggagagctgggagatagggcatattggagtggtaaatttaacccggtagaattattaaataaatcagaccaggaagctctggagtatatagttagtagttatggggtaatgaataatgaacagagacgtactctacggcagggtttagggattggagataatgacgatacgacaaggctgttcgagaatggaatacagggtttacaaaatgcttatgaggaatttcaggagctgtatcaaccgatagaccagaaacttattgatgctgcaaatgagtttaacaaggaaatggcaaaattaactcttaattttgaaagccttcaaaaacaaatcggaggtcctttacttactgatttaaatgcatgtctgaaattaattaacgattttcttaaagaaaacaataaagaaatatcatcaattgtttctggtgagtggtatgacgacttgatgaaatattcagaggatgctggcaatacctttaggagttggttgaaggaagtatttgtaagcgagagtgaccctgtgcttgcaaataatcttgctacgcaggggacttttagaggatattctgaaaattatttatacaatgcaatgaatcgacttccttcagcctattcacgagaaattcaaagtagggaatcaattaccccaggtgtttttgaccgaacgtattatactgaggctagtgttagtggtactgaattaaataacacccagggaggtcgttcggctcaacctttaggaataagaaacaaaaatcctggaaacctaagatttgccaatcagtatggtgcaatcagaggtgagggcggttttgcaaagtttggaaacgacgaggctggtatatctgcgttgcatcgacaattggggctttattttggtcgtgggcttaatacaatttcaaaaatagtaaataaatatgcgcctgcctcagataataataatgttccagcgtatataaatgcattaatgcgggctacaggtaaaggtgctcacgaaactctggatttcggggatacggaaacgattatttccctaatgaatggaatcataaatcatgaggtcggtcgtgggcactattctcgcaatcagatagccggagtagtgcgtcagaattctgcaggagtgcccgcagtgaatctcgatgcttacaatgcgacggccaatacagttccaagattacctgaactgacaggaggaaaccgaggaaatgatgtgaaagtgacaaaccattattccattgacgcgcgcggaattaattctgacgagttaatgcgaagggttaagcaagaacaggccgaggatttgaatgaggcacgggctttaacgcacacggacaattactga

SEQ ID NO: 189304 - DNA, 315 bp, Klebsiella oxytoca
atgtcatcagctacgtcacaggatgaaattaacattattccgatctccagcggatatgcctttcagcgatttcgtgtacaactaggaaatcattatctggtattccgcttacgctggctaactatgtatcgttatttctgcgtggatatttatgaaagcggagtgccggtaacgcttgggcgtgctctactgccaggaattaacctactcgatggcctgaataccgggataggaaaaattattcttaggggagtggaaccgaccccagagaatcttgggatcgataatcagcttcagtgggtggagtatgagtaa

SEQ ID NO: 189305 - DNA, 603 bp, Klebsiella oxytoca
atgaaagacacaaacccttacctttccctcattaaagacatgaagcgagtattgctactcgatgtaatggtcggtctgcctggaaaagttctcagctataacccggatacacagagagcagttgttgagtgtgggatccagaaacatacaggcggtggagagttcaggactattccaggaattgagcatgtgccggtacagttcgccgggaccgcgcagtggatagtttttcatgagttgccggaaggtactgagggctatattcatttttcgcaccgtgctgtcgattattggatagaccagggaggcccggtgcgtccacttgatgccagaatgttcgattcctcggacgcgttcttcgccccgggttaccgctcacgtgcgacctgcattcctggactacccaccagcgggattgggatgagcagcgccagcggctccgtgaggctccatttaaccgatggaggaatagacttgcaggtaggggatcaaacgctctcactgtcttctgaggggcttaaacacaacggtaaaaatattggcagcactcacacgcaccctggtgttgagcgtggtggcagttctacctacgaaccggagtaa

SEQ ID NO: 189306 - DNA, 1488 bp, Klebsiella oxytoca
atggctatttttcatcttgattttaaaattgtgaaacgttcagaaggcagatcttccgttgcgaaggctgcttatcatgctcgttgcagaataacagatgaaagaacaggtgatacctatgattatagtcgccgtaccgatttatacgggcatttcatattagcaccagttaatgctccagaacatatcgtaaaagactctacagcattgtggaatgaagttgaaagagttgagcgccagagcaatggtcaaacatcccgttatttcgatgttgccatacctgccgagttaaacaatgacgacaagaaaagacttgtccttgagtattgtcagaaaaatttcgttgataaaggcatgattgccgatatcgcttttcacgatcttgatagcgataatcctcatgctcacgttatgttgacattaaaaaccataggccctgaaggttttggtaaaaaagaaagaagctggaacgacagaaaaatgtctgttttatggcgcgaatcatgggcagctatggcgaacagctatcttgctgctgctggttcatcagaacgtattgatcatcgttctcttcaggcccagcacgaggaagcgttagaaaaagtagcagtagctttagataatgaagaaaaagcgttatggcttgctaaggccgctgaaacaaatcgtcccgcaatgaaacgtatccacagcgctaaatggcgtagtaaggcggctcaggaacaaagagccacagaacaagctgttcgtgatgctgccaagcaggaagcagttgaagtctacaaaacattcagcgaacttgatcttgaaatcgtcattgatgtcagaagctttacgattacacatcttgctgaaccagaagagatcgtattaccagaaacgcactccggctcttctactcatgaaacacaaaggcctgtattggtagcaccagttcctcataatcgtgtgcgtggtgttaaatcttaccgtgataaatccaaagtcagtaaggtcattgctggtaagaagccatcggcaagtatttctgattctggaataaatactattctgaaaacatcctcctctcaaaacccaaacagggcatccagaagcgcccctgaacgtgtcaagaggaaacaggctattccacggcaggataatatctttaaacgcttcacaactcttgtcatagattttttcaagcagaagtttgtatgggctaaagcaaataaatcccaaattgatcttatcagtgaagaacatgataaacgtattgctgaaaactacgtctttgacgaggtattaggccgtcatatctctcgcactgaatatgagaaaaaagccaagtttaaccaagatgactataaaccaacaccgggtgagatcagccgtttcccaagtcgccctaagaacgaaccgccggaaagcgatcatcgcatggatctcataccacatgccagcaaagataaagccccacgaataaggccaccgggttatagaaaataa

SEQ ID NO: 189307 - DNA, 660 bp, Klebsiella oxytoca
atgaactctatctattgggtgattttcatgggactgctgttaaacataccatcactggttcctgttttgtttctccataagactcaaaagaacgtgaagatatctattgcgatcagactgtttctacttaacgctttctttgtgctgtcccttgtgacgctatcgcaaaatatcacgcaaaaatacgggctgtttccagtatggctggtgttagctgcaatagtgctgtttgcggtcacgctagtaccaacggtaaaattcgtgcgtaagcatttgactgttgggaaaagtcgggctgttatactctcatcattcctgattgtctatgctgtcaggtttcatggcgtgttttcagatttgaatggaagtggatatacgattaacggctataacacagtatggacatccttcttcctgtttgcctgtctactggcttatctcggttgtgctggacgtaaaacgtattctggttcttctgaatcgtcatctgcatcacaatcagattattttaagccgaacaaagaatatgaaacacaatctcaaattgactacgatattgctgtgaaggggcggagtgttatgtctgatcccaatctgagtattgttgagcagcagcgttatcgggatgctcttgagaaaaaagaaagagaagactcgtaa

SEQ ID NO: 189308 - DNA, 567 bp, Klebsiella oxytoca
atgaaaggacataacttattaccactggcggtctctctggtgtttctttctggctgccagcagctcaacgatggcgtgaatacagttaatggagcaatcagttcttcgttgtcttcagtaggtaaagcgctggggggaactgccaccactcaaagccttggcccggtaccgccagtatctggccttggtgctgtctgcaaagactatgaagaaaatgcaatggcagcagaaaagaaatggactggcaaaaggatctctatcatcaatgccactgttctcgagtttacgaagggcagaagtgccagcgatatgatgacgggaatgcccatgtcaacccctaactattacctgctattcaaaacagccgatacaagctattgtggtggtatggtctggattgattactattctggccttgatgatgcggttctgacttacaaaaaaggtcagaaagtcagtgtcactggaacagtcaacaacttcgaagttcgtggcttcgctaccgtcaacagtgccgatatgccagttcgtttggttgttctgagaaatggcactatcaatcattaa

SEQ ID NO: 189309 - DNA, 423 bp, Klebsiella oxytoca
atggaaatcttcgaaaaagatcaaaaaatcgcttttgttgactcgttcagcgatgctgctttgtcttacgaatacgaacaggcgggcttcaccattaatttaatgcaacgctcggttcttctctttaaccataatataaagaaaaacgtaactgccaagcagttgcgtaaaaataatataaagaaaaacgtaatgtcttcgacattgcgtaaaaatatgaacagcacatttatatatccatatagcaacatcagggaaatcaactactcgctgcctgattgcagatccgatgatgccgagatctgtattatgactgatgatgtattaaatccagtctggacgttcagggttccatctcacgcacattatatttgcgagaaatgggtggaagtatttaataaccgtattttctttgacccataa

SEQ ID NO: 189310 - DNA, 477 bp, Klebsiella oxytoca
atgtctggaaaaaatccattttggaattatgattataatgcagcacaacgtaacagagaaattgtagactcttaccaacaggcaaatgaggcaaggctggattctcaacagtcgcagtttgaagcgtctatggctaatgacagggttagtagaatacagatgcagttgaataacacaatcaatagccataagaaggttgtcgctgattatgagcaacgtctacagaagactaaaacggtagcatttaaattagctattcgttctaatatatttgaaagaacattaactcaacttcaagatcagtggcctgataaaaaggaaaatattttagatgagattcaacgtcaaaaaaatcactgcacaacacaagaatacagagacaactggtggggttgggtaagtcagaacgatccttcttcagataatagttatcttgattttccatttcccgacagggaactaaaacataagccataa

SEQ ID NO: 189311 - DNA, 429 bp, Klebsiella oxytoca
atgaatactccatatgacgaaccaaaaactcaagaagtcaacacatctaacctcaaggaacaagatactctcccctcagactctaagagccaaaaaaaaccaaagtgtaagatactggcattgatcgtttttgtattaatcctgttaattgttgccatatatgaatacttcactctaggaaaacaattaaataacgcatcaatcacctttcttattgttatggttttttcattggctataacaataaagaaaataaggcaaatagaagaatataatgacgactcatttttcataaaaaccttaagagcaaaaaaactattatcaaaagctaaaaaattagtgcgatggttgaataccattccattatggcagcgctatatgatattcttcaccatatttattatcggatttctgatgatggttatataa

SEQ ID NO: 189312 - DNA, 408 bp, Klebsiella oxytoca
atgtctgatgctttaaaggttatcaacaatattcgcactctccgtgctcaggctcgtgaactgacacttgaaactttggaagagatgttagaaaaactcactatcgttgtagaagaacgtcgtgaagaagaagcctcatttctaaaacagcaggaagagaaacaggcaaagctggaagcattccgtcaaaagttgctggaagatggcatagacccggcagagttgctttcaactgtcagcccatcgtcttccaagaccggagcgaaacgcaccccacgtccagctaagtataaatacatcgatactgatggttctgaaaagacatggacaggtcagggccgaactcctcgtgctatcgctgctgcgctcgaagccggtaaaacgctggaagatttcgagatcaagtaa

SEQ ID NO: 189313 - DNA, 1251 bp, Klebsiella oxytoca
atgaggaacaataaatttaaagtaaagagaatagcagtggtttcgggtttatgtttttctgtgttatatacaaatacagcttttgctgtctggcccgtcacagaagaggttttgacaccgtatcttatgggggcttcaccccaatctatgggcaatggaatgattgaaacattagtttcaatgaacgacaagctggcacaagcaactataacagcaaatgagaatcagaagaatgctgttgtcagtaatgccagtcaggcaatccaagaacagcgtatgaaaaatatcttaaacagaatacctgatgcctacgcctgtgaagaagtcacgagcgcaggtggtcgtggtgcagcaggatcgaatacaagctcagcgaaagaggctttatctgaaaacagcgttaagatgtttacacaagcaaataccggaataaatgaggccaagaaaaacatcatgggcagagtatcaataaatgtttgctctgaagatgatgtgaaatataacagaggtgggtgcaatactataggtcagtatcctgataaagataagtcggcatcaagcctaattacaccaccattatcaaaagccgatgcattgtctaataaggtttcgaatcagtcctattctgttgagcagattgaggttgctgaagcggcaaaaagaaatcttatagggaacttgcccgttgaaccattgaagaacaaaggattagaagacacaaatgaaggtcgagaatatttatccgccttttcgagctttgtctccagaagcactgctggaacaaatgctattgattccgtactggcaatgaaaaaagcaagtaatgtatcagtgaactccagaggggccaaaataggatccacattaggctctacgcatggagcaaaccttgcttggtcagatgcttccgtaaaaagcaagtatgcgacgctattccccggcacaacattcccggataatccctctgagtgggaaatgttaagatatgagatctattcacgctatgcggatacaacaggtgctgacgcttggcaggtaaaaatcagtagtgctgatgaaaaagaaactgcgcatgagcaggcaagaatgcaggcacttgatttaagattacaaatgcttcaaatcgaaagaacagaagacacaaatattttgcttgcggctctgttaggacaacaactgcaaccggttgataagcagatgctgaataatttaaaaactaatgcaacaagagcgactcaggcaacaaaataa

SEQ ID NO: 189314 - DNA, 450 bp, Klebsiella oxytoca
atggttgaggaagttatttttccgcaagaaaaacaacagattctggatgaaataaatggatggcttaacacagtctatccttataaaaaatcacctgcatatctttgcgattctattgagttctccgaaccctattttcgtatcatggctcaaagaaagaaatatgacatatacatacgattcggaaaaacatggatttccgatgacataaaatccatagtagttgcaaggatagggttcgatcagcaacgtagcggtcatggcactaatttattaaaacttttagtgagaattgcaaaattaaacaattaccagtctatcggtatcgaaagtgttaatcaaaacagtaaagcatttgcacttacattcgattttgaagaacatacgagcagtagcagaaattacgttatctcaacagacaaactgagtaatgctcttgataataaataa

SEQ ID NO: 189315 - DNA, 2652 bp, Klebsiella oxytoca
atgatgataaatataaagaaaaaagaagtgtcgatattattagcaatattagcttgcctgttattaactcagtcagcttatgccgccgatttatttactgtcccggagacagacaaatcaaagctgtggtttctggatatcttattccccgacaatttagcggaaagtcccttagccagcactatgacgatcctcaacagtgctgttttgcttgttggtggtattctggctgcgtatacgctgattgccggaaccatgtcaacggcacatgacggagaaatgctgggtaagaaatggtcttccatgtggttgcccgtaagaaccgcattaggcacggcaatgatactcccggcagcaggtggtttctgtgccgctcaggttatggtgctgtggatgattaatcagggagtcggtctggcggataccgtctggaatacttatgcctccaacccctcagacggggctgttatcacaacatcagcgtcttatcaggaacttgaccgtatagcgaaaactgcctttatcaataacgtctgtatgttaaaggcgggtgaattatggaagaaatcatcagcagccgatcctttcccacatgtcacgcctgcgtttgaaatgacaccggcgaaaggtgcctatttatacacatacagttatggagccagcaatgccggtaatgatatgaataaaaatttactggtatccaaggctgcatgtggaagcatcacgctaacagaccccaaggccaaagcttcttatgatgaacaggctaaagctcaggcaaccattgctgctggcggcatgtatatggcctatatgccacaggatataaagacgaatatttcagatgttattgaggcacacaatgccgcattcatcggccttgataacagtatgaaaacgctggctgaacagtatgtggctgataataatattgatattcagaccggaataaacagcgcaacagcctcatatgtatcgattattgatactgcagtgcgaacagttttctccactggcgatcagtgggacgatttcaaagagaatgtccagaaagatggatggtttatggctggcgcatggagtatgaagcttatccgtgttcaggacgcgattaatggagcagctcataatcttcctgtcgctggacaacagactatggaatacggcgatatattcgataacagcctgaacgcaattatggcaaaagtggctcaggatatggcgaaatcaacgacagcttcaagatatgcgaatggtattgatgcgcaaaacagaacagaagccaataccagtggtaaaagtgataaaggttcgaaaacagcagatgccagtaaaattgtttcgtctcttcagagtgaagctaataagagcatttctggtgcaatggcgggtttcctgagttccagcgtaatcaatggtagaaaacaagggaaaatcgttgcattttcaaccgacacaaccgctgccaatttacaggcgataaacccgttattagctgttaaaggacttggggatacgatcagtgccgctggctggacgttattagggagttctgcggttgttggcgcaggtcttggcgcatggacatcagcgactgcaagctgggtatcgggtgcatttggcgctatggggattgttatgccactggttatccctttatggatagctggcgataccttagccgtcgttattcctatgttgccttacgtcatgtggtttggtgtttgtatcggctggatgatcctgtgtcttgaggccatgatcgctgcaccactatgggtaataacacatttacatccagatggtgatggcgtagtgggtcgtggtggcgcgggttatggtctggttttatcgttaaccatgcgaccagcgctaatgataacaggattgatagcagcctatacgatgctccctatccttggtgggatcgtcaatgaaacgttctcaggggcgtttggcatgatgtcagccaatgccgggataggtatcatcgagtcactggccctcattgctgtatatattgccatgatgttcacggtagtgaagaaatcactttcactgattcacatcatccctgatgaaattatgaagtggcttggtgttcatggtggtcagagcatgtcgggttacgcacagtcggcatcaaaaggtgttgaaggtgctatgttcaccaaaaccgtgttggatcaggtttctcatacctcaaatgcgatgggtaatcaggtcaggaatgcgcaaatcaacaaagaccgtgaacagcaacgtgagcttcagcaacatcaacaagctcaacaggggaaagcacaggcggctaataaagccaatgatacgggatctgcattcagaactcacatgagtaatgcaggccctctggatcagcaggatgaatatcaatctcttgaaagtgctaactcggcttacaatgcggctgaggcagcagatgctgttggtgatacagcaggcgcagcaggttatatgaatgtagcccaaaaggctgctaacagggcagtatcatttggtgagcataacagaccgttgttgcctgtaagtttacaagcccaagcatcttcaatagagaatttcaaggctcctgatagaaaagggagcgaggatgataaaaatagagctacaagtggcagcagcattaaatga

SEQ ID NO: 189316 - DNA, 525 bp, Klebsiella oxytoca
atgtataaacttaataaaaagaaatggcgaacaaatgtctgtatccgcattttcaaaataatccttcccgcaacaatattaatttcagcaaccaccgctaacgcagcagtctgcagcccggatgtcagctcatcattaaaacaagcgcaatataacgcaatgaagcaggatgcggctcagttagagccggtagcgaagaatttcatagataacatcaatcagtcgcttgagactattggctgtacggacgcatggcccgccggaaacctcggcattaatcttccctctgtggattcaataattaaaaaaacgaaggaagcggcaataagtaaagcctgttccattgcgagagaaaaagtcagtcaactgaccggaagtatatccgaaagtatttctattgatatgcccgtgattgggaatatcgcaagcggaagtatttctacaggaactggctcgtcatcaggatcgggagcaaccgtcaacggaaacgatgtctggagcagcatcagtaattcaatgaagtaa

SEQ ID NO: 189317 - DNA, 954 bp, Klebsiella oxytoca
atgaatttcacagattggttaatcctaaatcaatataatggtgatatagtcaaagccatagagtcactacgaccatccactgattacgttaaggattacattttccccgttgcgatggcgtttgcttcagccttttttggtggggtatctgctgtttatattaacagaagacaagaactacaaaagattgccagagacaatctaatgacatctatacaggctataatccttgctcatgattgcctaaataatttggtttctatcaagactaactatctcaatatagacagcgatgaaccacttatcagatttagtcaatttacaacaataattactaagtttgataatataaccttcaacagcaacagtctttattttatacgacaaataccaacggcgaataaaaatctaattgaatcttttatatggaaggttaaacatcgtattttacggatgaagataaaaaatccatcatccgaagatctaagaggaacatggcgtaacactgtgagagttagcgctatgttcggaaactacaatgaagcaatgagtttacttaagtttagaaatgagttgaatgaacaagttaaagataaggttttgatgtacggtcatggtgatgacatagcatttgaagaagttcaacacatacttggtaaaaaattatgtactggaatcattgacataactgaaacatgtatagcattgatagaccatttaattgtagagttttatcattttttactagaatttcccgctgtagcagagagtaatattgaattaggtagagtaagggagtggggaagagtgccaacatacgaaaataagcaagagatatttttgaaatgtctggaaccgattaagcaaccagactttaaaaagttctttgcttatacagggatgacagaacaggaagcccgggtaaaatacacgttcaaatcatggtttgactga

SEQ ID NO: 189318 - DNA, 546 bp, Klebsiella oxytoca
atgcttggtgatgttattcttggggtcaagccccctcttatttttgaactggttgccgataggactaaagacgcgtttatcgacgaagatagtcgtgcgaacttcatatgtggtgaagtaaaaattcattgcgataatcaagaagttgaagatccagaagagaaaaaaattgccttctatctaatgcgattcggtcggtgggattgtggcaaaccagagggggtattggatgataatggagagcttcatagcgtgcgcttcaaattttacccggaatcatcagaaggctttgagcgagatggttttgccatgcttggtagcatcagttcaatgataacagaagcatataatgaacatacagtttatgagcaagaggtaactgccattagtacgaaagctgagccagatgtattttcggttgatattcccaaagattacaagggagaagttcttggcttatggcgtttcgctatgcaagcaaatcctgaattcaatatggattttgagggggtggggaaaaataaaatttcggtggaaaagtcatga

SEQ ID NO: 189319 - DNA, 282 bp, Klebsiella oxytoca
ttggatgcaatctggcgcgacgatcatcgctatcagaaagccggagtgatgctcagcgacttctacagtcagggcgtggcacagctgaatctgttggatgaaaacgcgccgcggcagaacagcgaaaagttgatggaggtgctcgaccaccttaatgcaaaagaagggaaaggaagtctttattttgcagggcagggtattcaggctgcctggcaaatgaaacgtgatatgctctcccctagatatacgacaagatacagtgacctgctcaaggtcaggtga

SEQ ID NO: 189320 - DNA, 978 bp, Klebsiella oxytoca
atgtttgcgctctacgatgtgaactcgttttatgccagctgtgaaacggtattcaggtcagatttgaaaggacggccagtggtcgttctgtcaaataatgatggctgcgtaatagcccgttctgccgaggcgaagcccttcgtcaaaatgggggagccgtatttcaagcaaaaggatatgtttcgtcggcatgggatcattgcgtttagcagcaattacgagctttacgcggatatgtcgaacagagtcatgacaacactggaggaactctcgccgcgttgcgaaatttacagtatcgacgaagcattttgcgatcttactggtgttcttaactgtcgagatcttaccgacttcgggcgggaaattcgcgagacggtactgcgcaggatgcacctcactgtaggtatcggcatagcccagactaaaactctggcaaagttggccaatcatgcggcgaaaacatggcagaggcagactggaggtgtggtcgatttgtcgaatctggaacggcagagaaaactgatggcgttgcttccggttgatgaggtgtggggagtaggacgccgtattagtaaaaagctggaggcgatgagcattaacaccgtgcttcaactggcagatacagatattcgttttatccgaaaacatttcaatgtggtattggaaagaacggtacgcgagcttcgcggcgaaccttgtcttaggctggaagaatttgcgccggtaaaacaggagatcgtgtgtagtcgctcattcggaggccgcatcactgaataccatgaaatgcgccaagcgatatgttcatacgcatcgcgcgcatcggagaaacttcgtggcgagcatcagtattgccggttcatctccgcgttcgttaaaaccagtccgtttgcgctgaatgagccatattacggaaacagcgcatcggtaaagctgctaacgccgacacaagacagcagagatatcatcactactgcatag

SEQ ID NO: 189321 - DNA, 420 bp, Klebsiella oxytoca
atgcagttctacacgcccgtcgaattacgaaaaattactctaatccctttgttcggttaccctgtgcagtgcggttttccaagtcctgcacaggattacgttgagcaacgtattgatctgaatgaactattaattaatcaccccagtgcgacgtattttgtgaaagctgctggcgatagcatgattgaggggggaatcagtgaaggggatttacttgtcgtcgatagctcccgcaaacctgagcatggaaacattgttattgctgccgtagacggcgagttcaccgttaaaaagttgcaacttcatccacgggttcagcttaacccaatgaacagcgcctattccccgattatcgttggtagcgaagatacgttggatgtattcagcgttgttacatatatcgttaaatctgcaggctga

SEQ ID NO: 189322 - DNA, 1740 bp, Klebsiella oxytoca
atgctgaccgatgccaatgcaaagccggttgagcgcgatgttatgaacggcgttctgaacgccatcaccggcgctacccggcagtatcagacgaacggatacccggagtggattaccagcgccgacaataacggcgtttcattcggctatgacgctggagtggtcgtgggttataacaacgcgctttatttgtcgctagtggctggcaatacggcaacgcccggcgctgatgctgctaaatggcaaccttatattcagcgtgaggctacagaggcggaagcgctcgacggtaccggctcaacgcaggtgatgacgccgaggagaacaaaagcgcttgctgatagtcttgatgaaaaactgtttacgtctattgagccgtacacggtgccggtcggcgggataatgctgtggggtactgtgacgccgccagagggctggctggaggcaaacggccagagttttgataaagcgaaaaaccccaaactctcagtcgttttcccgagtggttttgtaccggatctacgcggtcgctttgttcggggctgggctaatggctcacctgtagatcctgactcaagcaggggaattttaagccttcagggaatgcaacagcagcgacataatcatacaagcccggttgagcgcgcatctgatggtattgacggcccggaagagatccgcggcttaatgtggcccggtagtccgcgaaaaaacatgacatgggcggggacgtcgtatgtcggcggagatgagacccggccagcgaatatcgcggttatgtatatcatcaaaaccgaccaggcagagtcgagcggcggtgaagctggaccgtccgggattattatcacacctgcaactgacgcgatcgaggcaggaaaagcgcgtcagttctccgcgatcgttgttccctcgaatattgggggtaactacccaatatcctgggctgtatctgataagtcgctggggtcgatatccagtgccggactgtatacggcaaacccgggagcgagcgggacccagaccattatcgcctctatttcaacgggccttacctccacggcagttattacgcaaagtgtctggctaaccagcatcacgatcggcagcattccatcggagctgctggccggcaatacatacaacgttccgatcacctactcaccaaccggatacacagagactgttctgtcctcatcgtcggatagtagcgttgcggcgttgagtagttcgggtgtgctggacatatacaacgcggggacggcgacgctgacgctcacgggtgcaagttcaggcgtcacccgctctgtgactgtcacggcgacggaagctgtggtgccagaaatttatctgacgatcagcaataacctttccgaaatccaggaaacgggaactgcggcgcaagcggaggcgcgcggaaatctggcgcttggttcactggcgacgaaaaacagcctgggcgctagtgacgttggcgctgtaccgctggcgggcgcaacgttgccagcaggcactgatttggattctgtaactacccctggtgagtatttccagagcgtgacgagcaacgctacaacggcgctgcactatccagaggctgtcgcgggagcgcttaaagtggttgctactggcgtcagcgctggggcttgtcgtcagttctactggccgtacaactccagcaaagaataccgccgatttgggtacggatcgccgctagcattcagtgaatggagtgagaactaa

SEQ ID NO: 189323 - DNA, 1434 bp, Klebsiella oxytoca
atgggctggtcattaccagaggttcccgcgaggcctgatgcacaaccatggtcaccctggatatgcctgtcaattactttcgccggtgtatttatcgcgttagtgcgggtggtactgtattcaccctccggtgatttaccaacgcttgcaagcggttactggctaccactgaccggatatactttggtgggtgttactgttgccgtaaccttttatttgttatggtgggaaatacagactttccgcgtccgtaactggaataactggcgacgaaatatgcatctggcatggcggcatcaagcacacctgcatttatgcgtgaccagatgtgtggtattaaccgcagacccacaattgctttctcgactggcgggtgttatgcctgaaaacagtgacgaaactcctttattaacattgcttcctgaggaaaatttaattcctggtatttcacgctttgaacaactttgtcgtttgttaataaaccagattaaaacaatacttttccagtcctgtccttcaggtccgttaacggtggtaatacagacatctgctcctgataaagaacaggagctccagtatttttcccttctctgggaagatgaagaattaccatggatgccagatattcatgccttacccagttcgtcaatttttaataactggaataaattcctgtctactgctcgttatccactactggtgctggcgctgcattaccgccagccggaagaaaacttaccggaatttgcctgtgcgttgctgctgttgcccgatgcgatgctgaaatcgtcagaacagcgcgatgcggtgcgagtatttcgcgccatgccgctgaatactgatgcattgccccgtgaattgacggaattacgtgatatggcgcagcagcctcccggggtaaaacatctggtctggcacagtgggttatctgcgccgtccgcgcaggcgctggggcgggtggttaatgagttacctttgcccctgcaggctgatatcgccgccggtggtattgtcgattttgagaaaatcagcgctaactacgggcccctggccggatggctgatggtggctgcggcagcagagatggtcagttacggtccggggagccactggctgctacaggcgcatggcaaacaggccagtgcgatggttgtcggcaacagtctgccggttacccatgatgaagatgtaagattggctccgttaccttatccggctgggtcgctcagccttgcggtattgctcaatattgcggtttttggagcaactgtccgttttttcccggactggctgttttcctggtacggcgtgttcagcgtgctgctgtcgctggccgtgtctctgcccggcgctgttttcctgctgcgccgtgccctcactgctctgcaacgcccccactttattcaggcagccggacttgcccgcaaggaataa

SEQ ID NO: 189324 - DNA, 885 bp, Klebsiella oxytoca; identical to SEQ ID NO: 54013

SEQ ID NO: 189325 - DNA, 1200 bp, Klebsiella oxytoca; identical to SEQ ID NO: 6086

SEQ ID NO: 189326 - DNA, 678 bp, Klebsiella oxytoca; identical to SEQ ID NO: 54015

SEQ ID NO: 189327 - DNA, 243 bp, Klebsiella oxytoca; identical to SEQ ID NO: 15164

SEQ ID NO: 189328 - DNA, 768 bp, Klebsiella oxytoca
atgatgaatgaaatggaagttgacttggatttaggcttaaatcctttttgttttgaaacagagctaaagattgaaacacgaaagaaaaatctgactgtttcaagaggaacagagcttattgaaaagaaagatacaggtaaaagctatttcgccaatatcgtgcatactcaagaagtcgataaagaagagttcattaaactctatacatcccagataaaagcatactttgatctcacgaaaacagcatacaaagtatttttcatctttttacgtatttatcaggatgcgataggaaaagatcacttttacctgagttgtaaaaaagcaatgtcgcttgcggaaaagatagatcactttgtcttgtctgaatctatcttttacagagggataaaagaactcattgaaaaacgtattatagctaaaaccaatgaaaaaaactggtatttcattaaccctgctattgtcttcaatggtgatcgtgctcgctttgtttcagagattataaaaaagaaagaagcaatggaagaacaacccgaaagcatagtcgtcaatggcggcggtaatagaaaacttaaagataaaaacaggtcaattgaagcagttatgcaagaagttaataaccaagaagacatagatttgttaatcgcaagattgcaggctaaaaagtctcaagggttagtgaagagtgaaagtataaatgaaatcccttctatagagaacacgagtcttgtgccaccagaagaaccgttagattgggataatatttag

SEQ ID NO: 189329 - DNA, 693 bp, Klebsiella oxytoca
atgtgtataagagacagccttagcagtttatccccctttcagctaacacagtatattgatgatcatcttttcactaatgaacagaaagtgcagatattcgaacattatcacagcacacataaagacactaccaatatctattcgagaaaagaaaacattaaatctattaaaaaagatattgattatgtccatatgttcacaaaaaacttccagcaactcgcagaacttgatatttccaagaatgagttgaaggttatcgcaaggattttaaacatcatggagtttggaaactgctttcatatatcacaagcaaagctatgccgcgacttagatattaaaaaatcaaatatgtctcttgtctttaaaaagctcaaaaagaaagggatcattattgataaagatggagatctctttatgaactccaacatatttcttaagggacaagcgcattctatcaatgccaaacaacgccctaatgttaaaaaggcacagggatttaacgctaataatgaaccagtatttggtaatgtttatacatttaatcaaacaaatgattctgacaatcaacctacagagggaacgactacatctgagccaccaaaaacatctgatagctgttctaacaaagaaacagatccagcactgacgctgcagtatcctaaaacagcagagccagcttatgatgatgtttaa

SEQ ID NO: 189330 - DNA, 267 bp, Klebsiella oxytoca
atgaatgataaaactaagaggtttaatatgattgatgaattccacgttatgtatatgtatagaaaaatccaagctgaagcggctaccactgatataaagacattgaaccaactcttgaagaagttccgcaaggtagtagcggaacggcgggaagaatactatcaggagattggtgagaaaaaggcacgtaagtcaaaaatgaaaaagatcctcaaattgatggagaaggataggatatcaccagaggatctcattgactggcagtag

SEQ ID NO: 189331 - DNA, 351 bp, Klebsiella oxytoca
atgaaagagattatattgaatagtaatgaggaaacaaaaaacgaacttattgccaacatcttacaaggatactgtgatgaaatatatgccatttatgaaaaacatcctgaaacagcaatcgatattttgaatgatggtttcctttcaagcattacatatgatgttttgataactcgtgagttgaagaaatgctctatcaaaaatgatgtatctgatattaatagaagagatttaaaagccacaatattgtattggcatcaagaacacatcattgaacttgtgtcaaaaaatataaatcatgatgaaaatgaagatccgatttactggaagctaaaaatgacagttgtttga

SEQ ID NO: 189332 - DNA, 786 bp, Klebsiella oxytoca
atgtcccgcagtacgtggtatcacaatatgaatgccctgaagcgagtggacaggcatgccggactgaaagacaaaatcagagagatttaccactatcacaaagggcgttatggctaccgcaggatcacgctctcactgagaaaacagggagtgttggtaaaccataaaacagtgcagcggctgatgacagagctgtcgctccgctctgtgataagggtgaagaaatatcgttcctggaaaggggaagtgggcaaagctgcgcccaatatcctgagccggaactttggtgcaacgaaggccaacgaaaaatgggtgacggatgttacagagttcacggtacagggtaaaaagctttacctgtcgccagttctcgatctgtttaaccgggagattatctcctacagcctgtcagaaaggccggtgatggagatggttaatacgatgctgcacgatgcgttctcagtgctcggaccggaggatgcaccattgctgcacacggatcagggctggcaatatcgaatggcaggctatcaggcaaagttaaaggcccatggaatgacacaaagtatgtcacgcaagggaaactgcctggataacgcagtgatggagaacttcttcggcacactgaaatcggagtgtttttacctgaacaggttcagcgatctgaatgaactgaggaaggcgatagaggactatatccattattataacaacgagcggatcagcctgaaattaaaaggcctgagtccggtagaataccgaacccaggccctgaaagccgcttaa

SEQ ID NO: 189333 - DNA, 525 bp, Klebsiella oxytoca
atggcaaagccaaaatattctctcgaaaccagattagctgtcgttaatcattatcttgccggacacgatggcgctcgtcgtaccgctgaacgttttggtgttgaagaaacatcagtgcgacgctgggtaagagcctggcaactccacggtattgatggtattacatggaaaaatgaccgccactctcctgagtttcgactgacggttgtcctgaaggctctgagtgaagaacttaccatgcgcgaggctgccgcacggtttaatatctcaaatgaatctgttgtccggcactgggtgaaggtttacaaagacactggtgaagaaggacttctgaacataaaaccaggccggagtaaggacatgacaaaacctcaaaaaacacctccacttaccgatgcagaactggaaaagttatctcccgaagaactgcgagcggaactccgttaccttcgcgcagagaatgcctatctaaaaaagctgaaggccttagttcaaagcgagaaaaacggcagaaagcccggataa

SEQ ID NO: 189334 - DNA, 714 bp, Klebsiella oxytoca
atggatcctaataggattgaagtgagggtcttatccgcctttaaaaaatatcttagtaggttggttactggttacgttggcattagttcttttattaaggatctgcatttaacggcaggtttttttaaaaaagcttcaagtgcaagaatttataatcctgtagttataagtgaacatactgaaagtaatatagaaaaaaataagcatgtgaaatcaataggtttcataggtcgattatctgaggagaaaggatttgacatattctgtgacattgcttctgcaaatagtcatcgttataaatttttagctgctggaggatttaccaattcaaatgataaagagaaatttgatgagtcatatagcgatgttattcgcttacttggtattgttgaacttgaagatttcttaaagcaagttgatgcggttatacttcctgttaaatggaatgagccttttggtcgggtaattgtagagtgtgctaaggcgaataaatttgttcttacatcacccaaaggaggaattactgagcttaatgagttttttccaaatgtttacctttcaaatgattggcggaaagattttaaacaatttgattttgcaaatgcaatttcagaatctagttcatgtcaaataagttttgaagctaaagaaatagctagtcagtaccgcgaattttatattaaggttctatcatccgaggtgagtaatttgtga

SEQ ID NO: 189335 - DNA, 312 bp, Klebsiella oxytoca
atgagtgatactgataacagtagaaaaccacgaacagaaaaaacagtaaagcaaaaaatagcatcagcgcagatgcgtttgaatcgtctcaagaccaaagagaaatctttgtccaagagtgctgagactcgcctgaagatcatccttggtgctgaagttgctaaagctgtgggctgtaaagtagaagaggtggataaagatttaatattaggactgatattacaattaacgaatattagcattgaagataaagcaagattaaaattgcgaggaaaaaggtttcttgaggatatggttgggaggcagaaatga

SEQ ID NO: 189336 - DNA, 222 bp, Klebsiella oxytoca
atgagttatttgactgactactttttcaagaaagcttgcttttacattactatttttttcagagtgcaatatgtcttttatgtatactatatttacatcatcgctttctttaactgcatcgtcatcgaaagacgtcatgacaaagcatggaaaaccatccctaatcgaagtgaattttttaaccaactcaatgccattatactcaacaccatatttgattga

SEQ ID NO: 189337 - DNA, 207 bp, Klebsiella oxytoca
atgtatatgtatgatagattgaaactctatctcaagcgttatcaagtcatatggatgttagaaaatatttttattaaaatggagttaattaaaaatgctcttgatagttctcctgaagggcaacagaaagatgagcttaaatgcgtaatgtcagatctagcctgtcttatgcttgagtataaaaaatatctttccgaaaaccaataa

SEQ ID NO: 189338 - DNA, 255 bp, Klebsiella oxytoca
atggcaagaaaatcagtaggttcgttcatccttactgccctgatttccactcctccctgtagctttgccgcgcaatatccgctcaccgtcaccgatctcgacggccgcgcgattacgctccagcatgagccacagcgcattatcctgcaggatggtcgcgatattatggccatggctctgctcgaccgcgacaaccccttcaggcgcgtcgtggcatggaataacctggccagaaaacaggacatcaatacctag

SEQ ID NO: 189339 - DNA, 3714 bp, Klebsiella oxytoca
gtgcgccttttatatagggcgacatgcacaatggcacaagtaccactcccaaccccgactaataatccggtacccagcacggatgtaagggatgcagtttatgccggggctatgcttgataaagcgatgacaggcactgaattaacgtatacggatcgagagaatgttgagcatgatacctggcatggtattgagagaaaggcagatgatgcgcgtcagctttttttagaaagtggcggggtttctgtttatgcgactgagtcagttttgagggcatcccccccagttgaccagcataaccttgcggtagatcggtcagctggggattattatgcctgggacaatgctgctatttctctccagagcgaaaccactgcgttgcttgccaggctgacaacccagccaactgaaattcagaaggctgctatcaaccggctgtattatgacctcaagcaggctggcatcctggctaaactcgacggattgtggcttgggatcaataccagcagggctgatgcgcgtctgaatatcgtcaacagctccctgccgctaactgaaaatggcaccatcaatttcaacacatcatctggctggacattttttggagatagctggctggataccggcttcaacccatctactgccggtggtcattattcgaaagacagcgcttcttttggcgtgatggtggctggagcagataattcaggcgtattcatgggcgcttatgacggtgcaaatggactgaccatgtccaggaccgataacatcctgaatgccagaattaataacaacgaattgcttaccgggcaaatatcgccttccggcacgactcttttttcagcatcacgcctgagtaacgtaacagcggcgttgtactcaggaagtaaagttgtcgctgtaagtgattcaccgtcgctgtccgtgatcaatgcgtctgtgaatataggtcgcgccagggcagcatctggctggtataccagtgccaatatttgcgctgcgtttattgcttccggactgacagagtctgaaatgtttgctctgaacgatgctgttcagcgttatattgctgggttccgtgccgcagcactgcctacaggcgtctgggttcagatgccttattcactgattaaacctgctgacatagtctcgatatcttcgggagttgtggataagaagacggtcctgctggccaatgcacttatttcatatgacaactatagcgaaataatgaagctgtctgtcacatctcttgatgtgcgtgcgatcgacgaatctaccggtattgtctatgagccatctgtcattcccgatactaccctggcagagacgacagctcttgtcgccagaatggctgtaaagcccaactctgttcagcagcttgcaatcaatcagctgatttatttgctaaaaaatgctggaatctgggcatcacttgatggactttggctggggatcagcaccagttacgctgattcgttacttaatattgttaagaatgcttataacctgactacagatgctccgccagcatggagccagtcaggagggtggacgttctccagaacgggactgacctaccttgacactggctataatcctgccctggtcgttgggaaaatggcccttgaagatgcttcttttggcgctttgctcttccctccttcagggatggtggctaccggccatatcatgggcgcttttaatggtgcggagggtattagtctcgcgccgcgacctacttccgcaactaacagccctatggcagtcaggttaaaccaggctaatgcttttattgtcggtgactacgctacacaaaatgctgtttacggcgtgtcccggatgaatggcgagcttgccgtgtatcgtgagggggtgctgctgggatcggctgcgagcacagcaacaaagttaacggattcgaatatcctgcttggctgttctcaaaaatcatccagttaccacatgttcgacggtgcgctagcggctgcctgggtaggtgcctccctgacagcgaaacagatgcagacactgaccaatgcaatcaggcgttacaacgatgtattccgtaaccgcatgtcggcttttgctgcatggtggtctgccaccgatcgtcgtctttattctcaggacgaaatcattgctatcgccggtagcgcgtcaagttcatcatcacttgaaccgccagtatctgatgcaactatcagtgcagatatagctctttcgctgagtgaacacggacaaacttaccgcggtgggtacattgagattcagccagattcattcatcggcggaaccgagcccgccaccgacagcacaacagcactttggggtttcccgcaatcgctgacagcctccgagcaatcccggttacgtagcatgatgttccctggcaacggatacggtatttactatattcgtctcccgctcgggtttgcctatcgcggttttcgtaatatcgatgcgacgacaggactggctaaaaatatcggtgaacgttattcggggcaaaatgctgcgctgaaacgtctgatagcgaatattgttgaggcggggggcggtctggcaccggagtactggtgtcctgcaccctactggatgacgaacggcaaatatgccgggacccctacatcatataaccaaccgtgggctggcggaacatatccgcgcagtacaacgctggacagtatcaagggcagcgatccgacacaatacgcagcacaaatcgaagcgctgtcagatgccatgctgaatgacttcgaatacctgcatcaaaatgttggcccggtgcgcatgtatgggctgcagaatgagcctcagtatgggcatgagctgtatggtgtgtgtaaatacactgaccgcgtatacagcgacgtgctggcagcactgcaaccgaaaatagcagccagctctattttgtcggagtgggaaggccaggcaaatacgccgctgttacatgtttcatctgataatgactggcatatcgggcagacctatatcgatgctcaccctgcaaccatctggggatacagccatcacaatatcactgccattgccacggatgccgactggctcaaatcctccacattcctgaccctgaagggcacaaagaccaacgtttttgtgaatgaaacggagtatatgtacccacaaaacagcagtaatgcatggaaatgcgcgaacaacatgttgcgggacctccacagcctgacgttcggcggcgcagaggtggttatgcccattatccacgtctgcaaacaactgggtgaaagcagcagctatacgtcgaatactgacggctacgcgattatgaagtgtaacctgcagcagcagtatggaataactccgggacaggaagggaataaggacatgctggggtatggtacattcggggaaaatgcctggaactacaatgcgtaccggctcaccggggataatctgcctgtaggtgcaattcgtgtgggtggtcaaccgacgatatcgacagcgggaattggtgttgcggtattcagggcgggaggaaaactgaaactctttctggttaaccgtaacagtggcgtggccgcagtcacgatatcacttggcgtagccaaaactctggtgggacgacactatgacctctcgcatgccggagatgccttaacgtcaagaaccggcagttcgattacttttgttattccagcgtatagcgggcaatgctggtcagaagtttaa

SEQ ID NO: 189340 - DNA, 471 bp, Klebsiella oxytoca
atgccgacattgagagagtggaaagagcgcaggccggcgagtgacatcaaacagaccatcgagttttatcacccggcgttcggctattaccgagtggtcaataagctgtttcgtgaagcgacgttcggcgggaacgtttaccagcctgcggccttcgaaattacagagcccacacagaacggatcggccatcatcacaatggctatcacctttctgcagggtgctgaagatgtccggaacacgctgaagagctggacgggtgccgggcgaatgacgcccattacctgcaaataccagcaatggaatgcgatcggtgacgctacgcctatgaagacgtggtcgctgtttgtgaaagacgtcggcgcagacggcagcaacgtcactgtgaactctggcaagaccaacccgcttacgctggccaaccccatcatttacaccacgaaagactaccctgggctaattacggtatga

SEQ ID NO: 189341 - DNA, 477 bp, Klebsiella oxytoca
gtggcaacagtttcatacccggatatgctgccgcttcctcagcgcgcagatcagaacatgacgcaggacacggcctggcagacgactacgccggcagtcggccccgtcatcttcacgccgttaaccactgacctgaaatcgacctggtctctgcagtggaaattcacgctgcagcaggccgagcgctttaaatcgtggctccgatcgccgacgtactgcgaccgtggccgtaactggttccagatgcggattgatctcggcgatacgcagggcgtgcagctgcagaccctgcatttcatcagtatgccggtacagtctagcaaaaacgggaacatcgtcacctggaccgctagcgtcatctgtaacggcattgaggacatcaccgaggattacgacgactggatcgtcgaggcgccagagaactacggctactggctggattacctggtcacatccgttattccgagggctgaataa

SEQ ID NO: 189342 - DNA, 381 bp, Klebsiella oxytoca
atgaagaaaattttagtcgcatcagcgattgctttaactctggccggctgcgcttcctcaggaaaccagcaactcagcaaagagtcagaaacaagcgtccagtcaaagcttcaggaaggaaaaaccaccaaggcagaggttaagaacaccttcggatcgcctgataacgtgtcttataccgacggcggtaatgaaatctggaagtattccttcgctaaagtgaaagttaatggcacctcattcattccgttctatgggcttttccataacggtacgaacgggacaaagaaagagctcacgatcctgtttaaggatgatgttgtggcgaagtatacgatggctgaatctgccattaatacaaagacaggctgggctgactga

SEQ ID NO: 189343 - DNA, 1353 bp, Klebsiella oxytoca
atgaataaaaacctcacactggccgtcaaccacgcgttgaacgacgccaggcttgcccgcgcccgtatgggtttgctgaatcccactatgggcctggacaataagcgccattcagcatggtgcgagtatggcttccctgagcaggtcacctacgaaaacctctacgccctgtaccgtcgcggtggtatcgctcacggtgcagttgagaagctggtgggcaagtgctggcagactaacccggaaatcatcgagggtgacgacgccgacgaaagcgaagatgaaaccaaatgggaaagaaaggccaaacaggtattcactaaccgtttctggcgctctttttctgacgccgaccgccgccgcctggtaggaaggtattccggaattctcctgtacgttcgcgataatcaggactggaatcttccggtaacgagagggcgaggacttgaaaaaatcgccgttgcatgggctggctcactcactgtcggcgaatgggataccggcctgaactccagaacctacggccagccaaagatgtggaagtacacggaaaggctaccgaatggctcaacacgccgggttgacattcatcctgaccgcgttttcatcctcggtgactataccgatgatgctatcggctttcttgagccagcatataacgcctttgtcagcctcgaaaaagttgaaggtgggtccggtgaatcgttcctgaagaacgcagcgcgccagcttaatgtcaactttgagaaggaaatcgactttaacaatctcgcgtctctttatggcgtgagcattgacgagttgcaggataagtttaacgaagttgccggggaaatgaaccgtggtaacgatgttctgatgacaacccaaggggccacggtcacaccgctggtgactgctgtagctgatccgtcagcgacctataacgtcaacctgcaaacagccgccgcaggggttgatattcctacgcgtatcttggttggcaaccagcaagccgagcgttccagcactgaagaccagaaatatttcaattctcgctgtcagtcgcgccgcgtagacctcgctttcgagatagaggacttctgcgacaagcttatcgacctgaagataatcgactctgtgagccagaaaactgttatctgggatgacctgaacgagcagagcggtgtggaaaagctcgctaacgccaaagtcatgggcgaggttaaccagactatgcaaggcagcggcgagaatcctgcatttagccgtgaagagattcgaacggccgccggttacgaaaatgacgatgaagagccgttaggagaagaggatggtctcgaagaagaagacgaaaccgccgattctgccgcgtaa

SEQ ID NO: 189344 - DNA, 690 bp, Klebsiella oxytoca
atgacagcgcaatatttagaatttgtacgccagcagctgatagtggccaccgccgatctgagtggcgcgacgaaagggcagttggtagcctttgcggaaaacgcgatgtttgaggcgacagcgcgcagcagtaagcggaagaaggtagtcgacccggcaaccgggagaatggttaagccgagcaatccgccggtaccggggaaacagtcccgcgcgaaaggttccgcaatctccctcgttatgcccgttgagtactcgacagccagctggcgccgcgcgctgctgtcgctggaagagcaccaaaaagcctggctgctctggaattacggtgaagaaacaaaattcccacaccagacaaccatttgccaaatatcatggcaggagttcaagcgccagatagaaggggagaaaattgctgcaaaaacgctgggtagactgaaagctatgatatggcttgcagcgcaggatgttaaagctgaattggctggaaagcgcgtatatcagcaacaggagcttgcatctcttaccggtaccgcgccgaacaactggagtacaaactacgcatcccgctggcgggcaatcagagagatatttctcaagctagatcgtgattcgctacttaatgtgacaaaagcacgatcgcaacaaaagtcgacaaattaccattcaggtattgcaaaaatgaattaa

SEQ ID NO: 189345 - DNA, 675 bp, Klebsiella oxytoca
atgagcatgtatcaacgcatttacggcgctgactggcgcaacgtatgggtagttggcgatctgcacggctgctacaccaacctgatgaaccggctggacgctgtcgggttcgacccagcacaggatctgctggtttcggttggcgaccttatcgaccgcggcaccgagaacgtcgaatgcctcgacctgattaatcagccatggttccgcgcggtgcgcggcaaccatgagcagatgatgctggacgctatcgcagccggatacggcggcaaggagattcactggaggcagaacggcggatcctggtactacttccttgacccggagcaggagattttggctaagtctctaatccccaaggtggcggcgctgccgcttatcatcgaggtaatgaccgagggcaagagggtggtgatctgccatgctgattatcctcataacgaatatgcatatggcaggcccgtcgatgcagaacaggtgatctggaatcgtgagcgagtgagcgcggctcaggatgggattgtctcgccgatagccggtgctgatctgtttatcttcggccatacccctgcgcgccagcccctgaagtatgccaaccagatgtacatcgacaccggagctgtgttttgcggaaacctcacgctggttaaggtgcaaggtggtgaccatgagtaa

SEQ ID NO: 189346 - DNA, 171 bp, Klebsiella oxytoca
atggccactccactttcccgcatcatcacaaacgaaatattccgcgttccggtgcgccgcaagcgagagccagcggttaaaccgtccgaaatcccgacactgaaaggctacaccgcccggctggtagatcagaaatggctgcgtctcgcggcgaggagaaaatccgcatga

SEQ ID NO: 189347 - DNA, 564 bp, Klebsiella oxytoca
atgactgatatcaccgaactggcgcagagagtcaagcgcataatctcagatgtgaagctgaaacacggcggtaatgatacttacgcgccaatcatgaaatgggatgaattcctcgcgctggtagaggcgctggagaaggcgcagcagcacgaaaacgaatggaaatcgctatgtgaagcggcagcggttgaccttgatgactggcgcgaaattgacgataaatcgcgtgatttactctgcaaactggctgatacggttattgctaaagctgagcaaagcgccgaatgggaacgcaaggcaattagcaattttgaagattgtgcggaaatgtcgtcgcggcttgaagagcttgaatcacagcgattactggctttcgccgccagtaatcgctgggcggataaattcagagaggccgagaagcgcatcaccgagctggagtcccgcaccgtgaagctgccagccgccgtatcggttgcagactggatggtgggcatcgatgtatatgaagcggatttagttctggctcttctggccgccgctggcatcaaggtggaggctgagtga

SEQ ID NO: 189348 - DNA, 234 bp, Klebsiella oxytoca
atgagcattcgagctaagtacggattcggacctgtgactgtagaggttaattggctagataagtgccctaattgcaacaacagaacagttagagtcaccggttggtctaccactccagaagctctatgggctggcgataaagctaagtgctcaaaatgcggccataaaggcgagattgatgctgatggcgacaatgcctgggtggaatgggacgaaatcaaggaggcccaatga

SEQ ID NO: 189349 - DNA, 228 bp, Klebsiella oxytoca
atggcacctaacagtcttggcgaaatcatcaaaaagattcgcgttcctgttgtggcagaagcctgtggttgctcgccgcgcgcaatttacaaatggattgccaacggaagcctgccgagaacggattacaccgaagagaccagctacgcagaaaaaatcgcgctcgcttctggaggccagtttactgctgctcagatccgagaagtcagcaagcctaaagccgcctga

SEQ ID NO: 189350 - DNA, 165 bp, Klebsiella oxytoca
atgaccttaatttttatggataactacccggtagtgggctttgaagaaggtaccctcaacatcaccaatcttgagaaaagaaaagttgccatgatcacaattagccaacaaaaggctaagaagttttatgattctttaaaaggtatattcgaagaaaaaaaataa

SEQ ID NO: 189351 - DNA, 528 bp, Klebsiella oxytoca
atgactattggaacacacgttcccccgtcaaagaaaactggcaatttgtttgtagcttacagcgatgaaacaggcgcctccgttggcattgagttttcgtcaacgacgcaggaacgagctaccgccatcatggccatatgtgcttccacttttggagataatccaggaaagcttgtcacatctagcatttcaagcgatacttcctcaacaacacttggtgggggagacaatatggaaacacggttagcagttcttgaagccgaagttgctcacatcaaaacggatgtgtctgacataaagtcagaactgaaaggcattgcaacgaatacagcaagtgcaaactctgacattaaagttgtattacagaagcttatagatatcgatgcgaacttaacagccaaggcaggcaaggattttgtagactcgaaagtcgacggagtgaagtcttggctgctggggatattattcatttcgatcgccatgcccgtgataacatttctcattaatttatacctcaaaaaaccataa

SEQ ID NO: 189352 - DNA, 123 bp, Klebsiella oxytoca
atgagtatgcgcatggatattggacgggaagagcgactggaggccaagctacgttctgtaggcaatgtgattcgcaaggggttactgcgggatgcggcggagttcgtgagaaaggggcgataa

SEQ ID NO: 189353 - DNA, 543 bp, Klebsiella oxytoca
atggattataaatattctttggaccagtgcatctggccagcgcatgacagctattttttaaaaggactcgctgagctaattattgatattgatgacctgatttacctgtcgcttgaaaaggtacgccgggagtttgtatttattaatcttagcgccagttcgctgaactattttatccgccgcgatagcgagtggctggctgaaatgaaaggcaagcaaattgtattaattgccgcgaggcgctcggaagcgctggccaactactggtattacaatggtgctattcgtggcgtggtctatgtggacttagccaaggatattcgtcaggagctggcatacgttatcaacggccgttttctacgtaaagatataaagaaagacaaaattaccaacagggaaatgcaaataattcggatgacggcacagggaatgcacccgaaatctattgccaagattgaaaattgtagtgtgaaaacggtttatacccatcgacgaaatgccgaggccaaactgtattcaaagatatataagttagcgctgtaa

SEQ ID NO: 189354 - DNA, 843 bp, Klebsiella oxytoca
atgaacagttccctggctgcggtggcagaaaccgattatcaaccgtttacgccgccctttatcgaccggcagcgtaaggtcctgagcgtacgcaacctgagcaaatcctacagcgcgcagcaaaccgtactggacggcatcagtttcgatcttcatgcgggcgagctggttggcgtcattggccgctccggcgccggaaagtcaacgcttctgcacgtactgaacggtacccacagcgccagcggcggcgagatcctcagctatccggaagtgggtacgccgcaggacgtatcaaagctgtcgggccgcgcgctaaacgcctggcgcagccagtgcggcatgatctttcaggatttctgcctggtcccgcgtctcgacgttttgaccaacgtgctgctgggtcgcctgagccagacctccaccctgaaatcattattcaaagttttccccgacgcggaccgcgcccgcgccatctccctgctggaatggatgaatatgctgccgcatgcgctacagcgggcggaaaacctctccggcggccagatgcagcgcgtggcgatttgccgggcgctgatgcaaaacccgggtattttgctggccgatgaaccggtcgcttccctcgacccaaaaaatacgcagcggattatgaatgtcctgcgcgaaattagcgaacagggtatcagcgtgatggtaaacctgcattcggtggagctggtgcgtgaatattgcacgcgggtcatcggcgtagccaagggcaagattatttttgacgatcatcccacgcagctgaatcaggatattctgcatcggctgtacggcgatgaaattagccaattgcattaa

SEQ ID NO: 189355 - DNA, 210 bp, Klebsiella oxytoca
atggcgtggcaggcaagcgctgctgaacagccgaaggaattaaatctgggcatccttggcggtcagaacgcaacccaacaaattggtgataaccagtgcgttaaacagtttcttgataaggagctgaaggtcgatacaaaattacgtaactcttccgactattccggcgtgattcagggattgctgggcggaaaagttgacgtgtcttaa

SEQ ID NO: 189356 - DNA, 756 bp, Klebsiella oxytoca
atggcaaccttaacgtgggaccacgcggtccagtttgttaatcagccggaagcggcgattcaggcgctgagcgggcaaaagctcaacgcggtggccggtgggcgccacccgggctgggggaccaggaatgcgctgagctatttcggcctgacctatatcgaatttctggcgattgccgatgatgcagagctgctttccgccgcggagacgtttttactctcccgggatgcgtcgcggctgctgccggataatgaagcgctgtatcgagtggcgctgcgtagcgacgatattgagcgcacgcatgcggagttgcgcgagcagggcctgcgggtttcgccgatcgtcaacggccagcgcgacgatccgcagggcaacgttatccgctggcggatcttcaccattgacggcgattttgacggcctggtctatcccttcattctgcaatggggggaagaggatgacgcccggctgagccgcctgcaggcacaaggtctcgctgcgccgcatccgctgggggagattgaactgcagcgcgcggttttcacggtacagcatcctcaggcgttgcgcgaccgctggcagctgctgtttggctttgccccgcaaggcgagcaggggctggcggtgggcggtcgagagtttcttttccgtcagggcgcggcgaaccaactgactgaactggtgtttcgcgttgctgacccggcgctcaaaggccgacgctttcgcgttggcaacggcgaatatctttttgaataa

SEQ ID NO: 189357 - DNA, 1206 bp, Klebsiella oxytoca
atgaagttaacagcccgtcaagttgatactgctaaaccgaaagaaaagccttacaagttatctgatggcggtggtctctaccttgaggtagcgaccagcggctcacgttactggcgtttgaagtaccgttacgctggtaaagaaaaacgcctggcctttggtgtatatccagaagtctccttagctgaagcgcgtgataaacgtgaagctgccaaaaaggtactggcggcgggtaacgatcctggtgaagtaaagaaagcggagaaaatcgctcagaagctaggctttgaaaacacttttgaagcaattgcgagagaatggcatcaggtgagagctgaccgttggtcgttgcgctatcgtgaagaaatcattgatacgttcgagaaagatgtttttccctacattggcaagcgtcccattgcagagataaaaccgatggagttacttgaaactctgcgccgaatggaaaaacgtggagcactagaaaagatgcgcaaagtcaggcaacgctgtggtgaagtattccgtcatgcgattgtgaccggacgtgctgaatacaatcctgcccccgatctcgctactgccctcgctacacctaagaaaacacattttccctttctgaccgctgaagaactaccgcacttcctcaaagatctagctgggtacactggtagcattattaccaagacggcaacccaaatcatcatgcttacaggtgtacgaactcaggagttgcgtttcgcccgttgggaagatatcaactttgaaaagcgactctgggagataccagctgaagtaatgaagatgaaacgaccgcatatcgtacctatgtcggatcaggtagtagcactctttgagtcactaaaacctattactgggctatatccacttgtattcattggacgtaatgatcgcactaagccgatctcaaaggaaagcgttaatcaggtgatcgagttattaggatacaaaggaagggtgacggggcatggttttcgtcacacaatgagtaccatactacacgaagaaggttttgactctgcgtggattgaaactcaacttgctcatgtggacaagaatgcgattcgtggggcttacaaccatgcccaatatctggatggcaggaaagagatgatgcagtggtacgcggattatttatttagtctacattccaattcgtttaacacagcaaaagcccttgtataa

SEQ ID NO: 189358 - DNA, 903 bp, Klebsiella oxytoca
atggcggctaacgccttatccgggctaccggcggtctgcggtcccgtagcccgggcaggcgctttgcgccgcccccgggggaagcgtgcagaatgttgcagaattttcccggaggcgatgctgcgcatctgtccgggctacgcatccccggcggtctgcggtctcgtagcccgggcaggcgctttgcgccgcccccgggggaagcgtgcaggatgttgcagaattttcccggaggcgatgctgcgcatctgtccgggctacgcgtccccggcggtctgcggtcccgtagcccgggcaggcgctttgcgccgcccccgggggaagcgtgcagaatgttgcagaattttcccggaggcgatgctgcgcatctgtccgggctacgcatccccggcggtctgcggtctcgtagcccgggcaggcgctttgcgccgcccccgggggaagcgtgcagaatgttgcagaattttcccggaggcgatgctgcgcatctgtccgggctacgcatccccggcggtctgcggtctcgtagcccgggcaggcgctttgcgccgcccccgggggaagcgtgcagaatgttgcagaattttcccggaggcgatgctgcgcatctgtccgggctacgcatccccggcggtctgcggtctcgtagcccgggcaggcgctttgcgccgcccccgggggaagcgtgcagaatgttgcagaattttcccggaggcgatgctgcgcatctgtccgggctacgcatccccggcggtctgcggtctcgtagcccgggcaggcgctttgcgccgcccccgggggaagcgtgcagaatgttgcagaattttcccggaggcgatgctgcgcatctgtccgggctgctcgtccccggcgggaaaacccatcaaccctacgccgaattaa

SEQ ID NO: 189359 - DNA, 1746 bp, Klebsiella oxytoca
atggataagattactagttcacttcttgatacattttccgaacaatatgaattaactcgtttagataaaagtgaaaggttcgaacatttttctaattttgcaatagtatctaaactgattagaagcacctttgatttagaagacattcacacaggagctggtaatgattgtggtattgatggaattatcatatctataaacggaaaaattattgattctgtagacagctttaatgatttcttaccaaactgctcttatattgatgttgatatcttgtttattcagtcaaaaacaacgtcatcttttgatggcgcgcaaattttaaatttttgtcatggtgtaaaagatttcttcaccgatccttctacgctaccacaaaaccaaaaagtccaagatataaaacaactatggaatgagattctattgcattctgatatgatgcattctcgcttaccaatcatcaggttatattatgtttgcactggtgtttgggtcgatgacccgcatttaacatctctgatcgagcagtcaaaattagaaatacaaaaaatggctctttttgatcgtgttttcttcaaaccctatggcgcaattgatattcagaaattgtatcttgatacaaaaaacaaactttcaacaactatcaatttcccaaatagaataactcttcctgacataactggaattaaagaatctttctttggtgttgtgccgttcccagaatatattaagttaattcaagatgaaaatggcacgatttacaatatattttatgataatgttagggattttcaaggtgaaaacagagtaaacacaaaaatcaagaccacgcttgaagaaggaaaatttgacctttttagtgttcttaataatggcgtgactgtggtaactaattctttgacatcagcaggaaacagattcacattacgtgattaccagattgttaatggatgtcaaaccagcaatgtattacatagttgccaaaccttagcaggtattgaaaacgtaaatattcctatcaagatcatagttactgatgatgatgacattaaaacagacattactttagctaccaatagccaaaccgaggtaaaacctgaacaacttgaggctttgagtgtatttcaaaaacaactagaactttattacaatacagaaaaatcggtttccttgtactatgaaagacgttcacagcaatataattccttatcaataaagaaaacacagatagtttccattggaactcaaataaaatgctatgcttctatgtttttatattcacctcatttagtaagcggttactatgggacaatattcaatcgctttaaagacaaaatgtttaatttaaatcataaattactaccatactacatatgctccttaacattatttagaatagatcaattatttagaagtgaaaatctaagaaaggatcataagaagtataaataccttgtgttaatggtcattcgtataattgtaatggacaaaaaaccattgccaccgaacagcaacgaacttgaacgaaaatgtgacgaattaaaaaaaatacttgttaatgaagcttatagctccttacttataagcactgcaattcatattgtcatgacatcgggcattgatatatcacgtgatagatataaaaccgagaccgagaccgaaatggttataaagaacgcagaaaaatacatttctgaaagcggaataatttcaaaagacgttttacattcagctctaaaaccataa

SEQ ID NO: 189360 - DNA, 840 bp, Klebsiella oxytoca
atggccagcacgactaaacccgcccgcaaaaagtttcgcgttgcggtttccggcgccaccgttgacgggcgcgagatccagccgcagcacctccgtgatgcggcagcgagctatgacccggacgtttacggcgcccgcgtcaacgtggagcactatctctccatgctccctgacagcaattttggcgccatgggagatgttgccgcgctgagcgcggaagatatcaccgaagggccgctggccggtcggacggcgctctatgccgagatcgacgcgtcgacccgcatgaagcagctcaccgatgaaggtaagaaagtctattccagtattgagctgcacccgcagtttgccctcaacgggaaagcgtatgtggttggtctggcgatgacggacaccccggcgagtctgggtactgagcgcctgaagtttgccgcgcagcagcgcgcgcaggtgatggcgttcaacaaccagcagactgagccgccgctattctctgatgcgcttgaagctgaagtggtcgaactggcggcccagcgcagcgaggagggcgtcaactggttcaaccgcgtgatgggcatccttggtaaaggccagaaaactgacgatcagcgcttcacccagctgcatcaggttgttgaagccgttgcacaatctcaggccgatcagattgaccgattcagcgcttcggagctggaacgccagcaggacaaagcggccattcagcaactgaccagcgagcttaacgcgctgcgcggtcagcttcagctccagcccgcagaaaattacagcgcacgaccggcggcaaccggcaacagcagcgcacagcttgcagaattctaa

SEQ ID NO: 189361 - DNA, 1728 bp, Klebsiella oxytoca
atgattcaggatgcgtttattcgattgagggcaaagcagctctactggcagggttacccgcccgccgaaatttcgcgactcatgggtatcaactcaaacacggtttattcgtggaaaaagcgcgacgcatgggatgacacaacgcccatcaaacgggtgacgcaatccattgatacccgtctctgccagctgagcgcgaaagacaataaaaccagtggcgatttcaaagagattgatctgttaacccggcagttgaaaaagctggataccgggcaggcctccactaccacaggcgctaaaaaaaccagtcgacgcaagaagaaaaatcacttctccgaggagcagatcgaggcgttgcgcttaaaaattctcgactctctcgcatggcaccagcgcggctggtacgaacagcgagatcagcgtaatcggatgatcctcaaatcgcggcagattggcgctacctggtactttgcacgcgaggcgttgctgggcgcactgagaacggacgttaagcacgactaccagcgcaaccaaatctttctgtcagcatcacgaaagcaggcgctacagttccgcaacttcatccgcaaagcggctgaagaggtggacgtcgaacttaaaggcggcgagcaaatcacgctgtcaaacggcgcggagctgcattttctcgggacatcagctgcgaccgcgcagtcctacacggggcacctgcgatttgatgagtttttctggaccggtaactttatcaatctgcgtaaggttgccggcgctatggcaaccctcaaaggcttaacgcgtacgtacttctccacgccatccagcgaaagccatgaagcctatcagttctggaccggcgatcggtggaatgcgaaacggcctaaagcgcagcgcgttgatttcgatgtgtcctggaagaaaacgcgtagcggcgtgctttacccggacaaaacgtggcggcagatcgtcactattcaggacgctatcaacaatggctgggactacaccgacattgatgaaatccgggacgaaaacagccctgatgaatttgaaaacctgtacatgtgtgagttcgtcaaagacggcgaaagcgcgttcaatcttagccagttactggggtgcggcgctgacgggtatgacgattggcccgactggaaaccgttcgccagtcgccctatggggcaacgtaaggtgtggctgggctacgacgccaacggcggcagcggcaatggtgatgccggtgctctatccgtgacggtccctccccttgtggctggcggccggtttcgcacggttgaattgaagcaactacgagggcttgagtttgaacagcaggcggcggtcatcaaagaggctgccgagcgctacaacgtcactcacatcgccatcgatggacaaggcgtcggggaggcggtctggcagattgttaaaaactggttcccggcggctatttgctaccagatgagcctctcttccaagcgcgcccttgtcctcaaaatgttgcaggtcatacgcgctggccgctgggaatatgaccgcagcgagcagggtctggtcagagcctttaacgctgttcgcaaagttgttacgcccggcggtttcatcacttacgaaacggaccgatcgcgcggcgtaagccatggtgatatggcgtgggcaaccatgctttcgattattaatgaaccgttgggccaggaaagtggcggcggtggtttcgcaatgggatggtaa

SEQ ID NO: 189362 - DNA, 1434 bp, Klebsiella oxytoca
atgcgtttttcggaattttttggaattaaaagaaatcaatcggaattggatttcgtagatgttcctttagatacagatattgaggtttttttagatccagctgcaattaagtctctcaattcgccttggggtgttgagttatcctctcatcttcaaaattattttgaaacagtactaaagctaataaaagaaggtgaggatgttaaagcgcaaaatcttctttcatgtttaaacgaaaggaatgagtatcatttgggatactctagtggaaaatcaagaggccatggttttggtgaaggtgctgcgaagactgtttggggtgctttaacaaaaagtaaggccgccaaatctggtctattacaggatttagaagatactgctttattaattgaaggcattggaactgatatgatttctgatgccgtttcaaacattttaagaggtccattaataaaatatacacaagacatttgcaattattatggtattgaattaactgctaacattccatctgggcctatctggaatccaagagaagaaaaatgggaacaaggatatgtgtcgttgcctatgactaatgaaggtaaagtaatccttgttccgaaaatcattgtaaggcatcaaataacatatcagcatgatgagtactataggcattttttactacctgagatgcaaaaacaacatttaaaagctggctcagaactgattcagttattgaagaatggtaagcatagggtaactaaaaaaagtctaatggataaatatgggaaagacaagcttgcgatcgttgagcaaacgcttaagtatcctcatgttcttgatgaatatagagtgaggaaaaatgattctccttctgaaccattaccacactctgattttgctgaaatggaaaacgaatcccctaaagtagattttcaaccatttattgatgaattgaagtctatagttcctggaagggatgatgcaactaaatatgaggacttaattgaaaagcttttttcaattttgttttacccttctttttgtcatccaacaaagcagcataagattcatgagggaagaaaaagaattgatatttcatattgcaatgaggctacatttggtttttttaaatggattggtatgcattatccctcttcaatgatatatattgaatgtaaaaattatggtaaagaagttggtaatccagagttggatcaattgtctgggcgtttctcaattagtagagggaaggttgggatcttggtgtgtcgaagtatagaaaataaagagaaattatatcaaagctgcaaagatacagccaaagacgatcgtggatacattctgccattggatgatgaagatatcttaatgcttattgaagagtataagaaaaaaaatgatcaactgttcccgcatctacgtaagctatggatgtcattaattggctaa

SEQ ID NO: 189363 - DNA, 270 bp, Klebsiella oxytoca
atgaccacgttcactgtagaaattcatgaagatatcgttacctggcttaaaaagagtactcgccctgagatagtcctggatctgccatcagtgccggccccaggcgacaatctatggctgaaaagtacgagaggtacacatgttgtcgaaacagaatggtgcatgatagtggcgtcgagccgtgtttcacgtttgcgcccgactgtgcgtctggaaattgtctttggtattgtaactaaccattgggccagtgaattttgcgaacagtga

SEQ ID NO: 189364 - DNA, 2628 bp, Klebsiella oxytoca
atgtctgattcaactgctttagcatggagctggaacgccgaacggcaggccgttaacccaaacgacgtcgaagatcctgtaattgagtatctcaccccaaaaggtgagcgtaaggcgctcgcctatagcgatcttgttgacgtcgtttatcgggcgccaatgcgccctcgtgaaggcgaggcgcgcaaatcattcgatcgcgcaaggcacgctcgctacctgcgtcgacatgtgcaggcgctaccggcgtttatccgtaagcgcttttcccagcgcctggagtctctggagcgccaggatccgaagcaggctgtgcgctggttattcagtacgtttgagcgtcatgtattacgccgcgttgatgcggtaaatgcgcaatacctgccacaaagcaacctaccggcaatcctgtttccgcttcgtgatgattttcatttgctgccctgggcagacaaaaagcgcctgaaacgactggcctataaactcgccaacctgatgaaaagcgagtttatgcgcgagtttgatttccagcacgataaaaccgccgatgtggagttttccactatctacgcctatggcgccattgccagcaaggcgacggctctcaatattgcgatcccgggctgggggcaatattgcgatgaaacactgagtgctgatgatgcgttgcgcttttttgcaaggcttcaaaaggaaaagtggtggctgggtaaactccgcaaaatccatgaccgctggcgcgagcacctcatgatcgccacgacttacgtcagtaaagtgtcatcaccttattgctctgaaccctgcctcagagagtggacggctcaaaagaaggccaactttgaataccttcaggcgatggagctggaagaccaggacactggcgagcgtacctccttgctcgataaggtcatgggcagcgtttccaacccgaagatcgcccgtaatgaattgatggtgcgtatgcgtggctttgaggatatggctaacgagatgggactggcgggcatgttctacacattgacagcgccgtcacgttatcacgccacgcatgtacattccggcaagcgcaacgataaatactgcaacgcaagcccgcgcaaaactcaaaagtacctttgcaatgtctggtcacgtgtccgcgccaaatggagaagggaaggtatccgcacatttggttttcgtgtcgccgaaccgcatcacgacgggacaccacactggcacctgctgttatttctccgacctgaagaggtagagcttgccactgatattttccacgagtacgccctccaggaagatggaagcgagccaggcgcagctgaatatcgttttactgccaaaccaattgatgaagagtttggatcggcaacgggatacatcgcgaagtacatctctaaaaatatcgacggttatggcatggatggcgagtttgatcacgaatcaggcaagcccgttaaagagatggcaatgcgcgtgcgggcgtgggcttcacgctggagtattcgccagtttcagcagattggcggcgcgcctgtatctacctggagggagctgcggcggctggggagtcgtgagcttgtcttgcacccggaacttgaagcggcccgcgctgccgctgatgcgcccgactggccgggatatgtcaacgcccagggcggcccgtttgtaacccgtgattgcctgcgcgtgcgtctcaattatgaatacaccgaaaacggcaatgattatggtgacacggtcgccaaaatcaccggcgtttattgcccttttacgatcagtgaatcggtcatttatacccgcaccaacgattacaaaattgtaccgaagcgcaaaccgtcgccggtcgagaatttgaccttagaaggccgcgacgcggcccctcggagttctgtcaataactgtacggggcgctccgattggaatgaaaaaccacaatcagaaacagcagtactagctaataaaacatcgccagacgacagttcaatgacagaacttccgctgaatatcgaagatttaaggcgatattcacgccagcaaaggctggagatcaccagtcgactaagaaaatccgcccgcgaaaattcagaccaagccttcacgcgtactgcgcgtggcctgcgttcgtcgattgatgacgaaaccgcgctggcgtgggggccaaaagtcaccgccgcgaaagatatgaacctgacgcaggaagaggcagagcagcgctggcgcgagcagttacggatcgaggcgctgcggcgtgcggacagttacgccgcagcggcttcggaattcaaaaagaaaaattcagaggcagctttacttcaacagaacggcacggcagcgaccggtcaagggcgaaactcaccgcagcaagggattagcgggatctcgcaagaagtgcctgaccatgcgatcgccgaactgaatagacgtaatatcattctcagtgacggggaggttagattattagtaggtggttgcattctgtcgcgtggcgaaatggaatttgccatcagagaaggggagttaatagtggagcgccggttgtttaaacacgccaaccacgccccggtatcattaatcaaacaaagtgagctgcttgatcgctgtcaaagggctatcaggaagaagttatga

SEQ ID NO: 189365 - DNA, 156 bp, Klebsiella oxytoca
atgaataaagaaatcagttctcgccggttctggcgaaacctcgtgatctgctgcgtgctgtgctcgctgctgttctggttaccgatgggttatatcgctttccgtgtcggggcggtggtgtgggaggcgctgtggttgcttattacaacgaaatag

SEQ ID NO: 189366 - DNA, 297 bp, Klebsiella oxytoca
atgaatacgcttgccaaccctgtttgggtgtccattgatccggcggataagtccgccgactcatcatcttacgtgactgttttggtgcatgacgcggtgatttatcgcattaccaaacgttggaatttgcatgatttttggatcgtcaattacgaagcgttcgacattcaagagcggacccactttagcgatgaattaactttcagcaccgcccggaaagctcacagcctcaagcctgggaggcttatcaaacgttgcctcctcgatcctgactcaatagaggatatccctttctga

SEQ ID NO: 189367 - DNA, 237 bp, Klebsiella oxytoca
atggcgagcttactggaatttttagaggtcgttggtatggagagcatcacctgccagcccgttcaccagtgcataacgggcgcccaaatgaaaaagggcggtgagacagaggttaggtttcttacccgcgagatcactcccttggacctgaccggaaagatgcgccgcaccggattaattgtctggatggatgcggacaagttcgacgcggcactcaaggagattaacggcaaatga

SEQ ID NO: 189368 - DNA, 228 bp, Klebsiella oxytoca
atgtttccgcgcctctccgttgtctgtagcgcgccgctgccagtctgcaccagggcgcttaccgcccttaaatgctttgctcgcggccagcgaaattactcccgcataaagcctcattcctatctcgtgatccgcattggtcgccgctggcgcttgctcagtaagaacggcggccagcagtggcgactcatgacccacgaaacctataaccaggaataccgcaaatga

SEQ ID NO: 189369 - DNA, 489 bp, Klebsiella oxytoca
atgatgatggtattcgggatgtttgtttttacgctgcgcactgtcccgtatcagcagctgcggcactcgcaggagtggcgccacgttaagaatgaccgggtcaatcagtcagcggcctggcagtacatcgggcccggtgacgacacgatcacccttgacggcgtgctctatccggaaatcactggcgggcggtggtcgctgtcggcgctggagacaatcggctttgccggtcgcccctggccgctgattgaaggtgacgggcagatttacggaatgtacgtcatgacgcgcctggagcgaggaaagacagagtttgaccgctacggcaaccccaaaaagattgagttcacgatcagcctgagtcgcgcggatgcagattttcgcgagaagctacagacgtcctcggtcagtgacgtgctggatgatctcaaaaccagcgcaaccaaagccgttaactcggtatcaaactccctcagcagcctgttttaa

SEQ ID NO: 189370 - DNA, 2721 bp, Klebsiella oxytoca
atggatcttagtattcgcgttgcgttcagtgctattgataagctcacccgcccggtcagtgccgccagcaaagcgattggcggcctttcggactccctcaaacagacgcagggttcaatcaaagaggttgagcggcaatctgccgccttcaaccgtctacgcgacagcgttaaaaaaacctcccgcactatcgacgacaccacccgcacgctggaaggactgaagcaagcccaacggtcaggtgcgacgctgacagataagcagcgccagcagatgaccgatctcgcggcgaagctggatcgccttaaagtccgacgcgataaagagaccgaaagcctccggggagcctccgaggcgctccgtcgccacggcgtttcccttgcgggcggcagtcagaccattgccagcgccattcgccgaaccgagcaatataaccagacccttgagcgtgaacgtcgccagctcgcggcggccacacaagcgcgcatgcagtatgaccgcgcgaaagagattgccggcaagatgcgtggtgctggcgtggcgatgacggcgaccagtgccggggctggctatctgggcgcgcggctgatggcgccgcaaattcagactcaggagcacgcctccgttattgccgctcagaatggtgagagcgcagcatccggcggtcgctactctcgcatcattcagaacattaacgccgctggcgtcagtcgcgatttagcccgtatatccgaggcggtggcgggtgttcgcagcacgctgggcgcgctcggtgcggtgggtgacgaggaactcacgcgcatttcccgcaaggcgctggatctgcaaaccgcccttggcggggatatgacggaacatatccagatggcggcgatcatgatgaaaaacgggctcgcccgcagcagtgatgaggcattcgaccttatcacgtcgggcatgcagcgcgtttcgactcagatgcgcggcgagatgccggaaatccttcacgaatattctacccacttccgcaatatgggctttaccggtgcggaaaccatgtcgctgctggtcaatatggcgcagcagggtaagttcgcgctggataaaaccggggatgccatcaaggaattcagcattcgcggctcggatatgtcaaaaaacagcgtcagcgcctacaaggcgatcggtcttgacgcggcagccatgtcatcggcaatagccaccggcggcgaaagtgcgcgtaaggcgatggagaagaccgcaaaagggctactgtccattcaggatccggcgacgcgggctaatgccgcgatttcgctttttggtaccccgattgaagacctgtctatcgatcagatcccggcgtttctttcggcgttggcgaatgtttctaatcgcctcggtgataccaggggaagcgccgacaggctgggcgataccctgcgcgacaacctgcccggcgatatcggcaagctgggtggtgcgtttgacggactgcgcacggaagtgctgacgggaatggataaaagccttcgttctcttgtgcaggcgattacggccagcgttaacagcctgcgggcatgggtcaaagaaaaccccggactcacaaagacgcttgtacttgtcactgccgcgctggtatcgctggttggtgtgattggtgtggcaagtctggttgccagcttcatacttggcccgttcgctaagctcaagcttgctatcagcatgatcggcctgtcctctatcactgcgacctccagtattgccaggctcaatctggttctttccgggacgcgcatcatccttgcaacactactcggcatccccggactgattgcgctggcgtttatcgcagcagggctgattatttggaaattctgggagcccattaaggcattctttggcggcttcctccgtggagtctggcaggaactggcccccttcagaaatgcattctcgtcactgataccggtattttctgcgctgggtagcggcatcaaagcggtatgggaatggttcaaaaacctgttaagtccgatgcagaccagcaaggatacgctggataagtgcgcctccgcaggggaaaccttcgggcgggtaatgacaatggcgctcggctttatgctttggccgctccagcagttaatgaacggtgtggactggctgcttgaaaaactggatgttatccctgacgggattgagagagccagacagcaggctgagaaggccagtcaggcacagcgcgaactggaggcttcggcggcggcgctggccgggcatcagctcccattagcgaaggcagatgtgtacaagcccgctggcggcgataagccgccggtcattaccggcgttcagggccacctgaaaaacatcgatacgaataccaaagcaactgccaacaacacgaagaaagtcggccctggcgacattgtctttaaaaacctgccacgcgcactggcgctgcgtggtgcctatcaggaggcgcgggttattccgcaacctgtgccgcgcgtgtctgcggcggcggccggcggcgtgctgtcggtaccggcggcgatacagggggcgacgtctgcgccggtcgccgcggcttcgggtgcggtgccgttcttccagctggtctttaacgacgtcggcaagcgttcggatcaggaacttgaaaagatggttctcaacgccgtgcgcgatctgatggccaacacccgcaaaactaaccgtggttcattccgcgatcgggagtaa

SEQ ID NO: 189371 - DNA, 300 bp, Klebsiella oxytoca
atgtccgttattctcagtaagccggttaagcgcggcgatcaggaaattatcaccatcactatcaccgacactatcaaacaggcgggatcgctgcgtggtctgcgtctggttgatgtgctgaacttcgattttgatgcggtctccaccctgctgacgcgcaccaccagtccgcagctgaccagcaccgaaattgccgcgctggcaaccggtgacttcactgcactctgcgaagagatcacgccttttttgacgaaaccggcgccgtccgtaccgaacgcggcggagacggggagcgaataa

SEQ ID NO: 189372 - DNA, 1650 bp, Klebsiella oxytoca
ttgagtacgttaataaaagtacctgcgctttccggcagggcggaaaattggcaccagattaactggcgtcaggtacaccgtcaggtcagagggctacagatacgaatcgcaaaggcaacggagcagaagcgctggcgcagggtaaaagccctgcaaaggatgctgacgcgctcgtttgcagccaaagcactggctgtcaggcgagttaccgaaaatcgaggcaaaaagacagccggagtggatcgccagttgtggaacactcccggaagtaagtggcaggcgataggtcagctaaaacggacgggttacaaaccgtctccgttaaggcgtgtttacattcccaagagtaacggcaaaaaccgtcctctgggcataccgacgatgaaagacagagcgatgcaggcgttatacctgctggctcttgaccccgtctcggaaacaacggccgatcgcaacagctatggattccgtccggcacgttcagcggcagatgcgattgagcagtgttttgttaatctcagtcgtaaaagctctgctgaatgggtactggaaggcgatataaaagggtgttttgacaatatcagccatgactggttacttgccaacattccgttggacaaacaggtactcgggaaatggcttaaagcgggattcatggagtccggtcggttacacccaacggaggctggtacaccacagggaggtattatttcccctgtactggcgaatatggcactggatgggctggaagcggtgttagaaaaccattttgggaagaaaaacaccaaagctagttacaaaaccaaggtcaattatgtgcgctatgcagatgatttcatcatcactggcatctctcaggagttgctggaaaatgaagtcaaaccccttgtcgaggcctttatggctgagcggggactgcaattatcaccagaaaaaacggtggtgacgcatatctccgaagggtttgattttctggggcagaacgtgcgcaagtaccatggcaaaatgctgataaagcctgctgctaagggattgcgtaatcacctccagaaagtccggcaaatagtgaaacgcaatgcggcgtcaaaacaaggtgatctgataaggcaacttaatccggtactgcggggttgggcaaattatcatcgccatattgtcgccaaagagacgtttagctatatcgactatcgcgtctggaagttgctctggcgttggtcatgccgtcggcacgggaatcgcaacaagtactgggtgaaaaggaaatattttcacgcggtcgggtgcgagaactgggtattccagagtatcgatgcggaaaacggcctgcaaaggttggtgtcttgcaaagatatcccgattaaacgtcacattaaaattaggtctgaggctaatccatacgatccagaatcggagctgtactttgagcagcggcaagttagtcgctggaaagaggggaaaatgcagcgaggaaaactgcggttgatatgggagcgacagggccatcggtgcccgatctgccaccagatattcagagataatgatgcttgggatgtccatcacattgtcagacgtgtagatggcggcggtgacgaaatcgataatttaatgatgctgcatcctaactgccatcggttggtgcacagcaattga

SEQ ID NO: 189373 - DNA, 900 bp, Klebsiella oxytoca
atgtggagcgaaatagcgcccgaccggtgccataacattgcggtggaaggctataacgtcgtggcctatcagtttggcgacggcgatgagaccgttctctgcctcaacggcggaccggggctgccctgcgactatctgcgcgaagcccacgcctgcctgaaacagcacggctatcgggtgatcgcctttgaccagttggggaccggaaagtccgaccggccggatgacgccagcctgtggacgatggcgcgctatgtgcgtgaagtggagaccgtccgccggactttgggccttggtcaggtgcatctgcttggtcactcatggggcggatggctggcgattgaagtggcattgcaccatcctggcgcaattcgctcgctgattctggaaaacaccgtcgccgatatgccgcatctggtgcaggagctgaaccgtctgcgcggggcgctggggccagaaaccgtcgcgatgatgcagcgctacgaagcgctcggctggctagaccatccggcctatcaggcggcgattacgctgctgaattaccgtcacgtgtgccgccttgacgtctggccagagccggttatccgctcgcttggggactggaatatgggcccgtatatcaccatgcaggggccgaacgaattcctctataccggtaatttaaaaaactggaaccgcagcgctgagctggcgtcaatccgcgtgccctgtttgatcaccagcggccagcacgatgaactgacgcccgcctgcgccctgaaaatgaagcaggggctggcgaacgctgaaatagccatttttgccaacagcagccatatgccgttttacgaagagccgcaggcttactacccggtgctgctcgattttctggcacgccagcgcgacgcgggaggctgttaa

SEQ ID NO: 189374 - DNA, 1050 bp, Klebsiella oxytoca
atggttaacgctcgctggccgctgcttgaggccgataatctttgcgtcaccttcccggtttccggcggcctttggcggccgaagcgggtcgtacacgcggtaaaccgggtcacgatgcagatctttcctggcgagacgctgggccttgtcggcgaatccggcagcggtaagagcacgcttggccgagcgctgttacagcttgaacgggttgctgatggcgaggtgcggttcgccggacagcgcattacccatggcttaaccagcgatattgcccgtctgcgccagcaaagcgcgatgattttccaggatccctatgcctcgttgaatccccggcagaccgtaggagaaagcatctccgaggtgctgcgcgtgcatcagaaaatcccgcgcgggcaggaagcgctgcgggttgcggaactgctcaccctggtcggcctgcgtccgcagcaggccagcgcgaaaccgtctcagctaagcggcggccagtgccagcgcgtcggtattgccagagcgctggccatggagccgcggctgatcgtggccgatgagtgcgtcgcggcgctggacgtctctattcagggacagatcgtcaacctgctgatggatctgcgggaaaagatggggctggcgattctgtttatcgcccacgatctggcgattgtgcggcggctctgcgatcgcgttgcggtgatgtatcttgggagaattgtggaagaggggccggcagaagcggtcttcactcgaccgctgcatccctataccgccgcgctggtctcggcgatcccggaaatcgacccggataaaccgctgccgaaaaatttgctggggggcgagccgcccagtcccgtagccgttccacaaggctgtgcatttcatccgcgctgcccttatgcgcaggtgcagtgccgcaccggcgcaccaccaccaacccggcagattgccgatcgcgcttatgcctgcgtgctcaacctcgcgggcgatgagaccgtttttccgttaactgggggatcttttgatgaagctgtagcgcggcgttttttttcgcactga

SEQ ID NO: 189375 - DNA, 243 bp, Klebsiella oxytoca; identical to SEQ ID NO: 107987

SEQ ID NO: 189376 - DNA, 657 bp, Klebsiella oxytoca
atgctgactctgacagtgactccgattcagacagcgattcggactctgacagcgactctgactctgacagtgactccgactctgacagcgactcggattccgacagcgactcggattcagacagcgactcggactccgacagtgactcggattctgacagtgactcggattccgacagtgattccgattccgacagcgatgctgactctgacagcgactccgattcagacagcgattcggactctgacagcgactccgattcagatagtgattcggattcagacagcgactcggattcggacagcgactccgactctgacagcgattccgattccgacagtgattcggattctgacagcgattccgattccgacagcgatgctgactctgacagtgactccgattcagacagcgactccgactccgacagcgactcggattccgacagtgattccgactctgacagcgactctgactccgacagcgattcggactctgacagcgattccgactccgatagtgattccgattctgacagcgactccgactcggacagcgattcggactctgacagtgattcggattcagacagcgatgccgactctgatagcgactcggatatcccgcaggccaatgcggataccaataccgcgctga

SEQ ID NO: 189377 - DNA, 702 bp, Klebsiella oxytoca
atgaagaggaataatcactcgctgctccgcgatgaaattttaagcaaagtcgtgaaacccaccgatcatattgaaaaattgattgagataatcgctaaagagcatatgccctgcaccattagcaaaaaacgcaacatcagcctgacgcggaatggtgaaagacagtgcctcattttattcgacgggagcgtggcgttaaaccgcataagcgatgggatgatccttaatgctgaaagcgcaccgtttatttttggcgccagctgccagctggcatatacccgccatctgtatgttaaaacgaaagaaacatcgcgcttacttttgattccacaacgtttttttcatgagcaggtcgtcaaatatcatctctggcaatcgctggcgatgctgcaggattatagttcggccaaagtctatgctcattgcatgacgatatcacaactctccgcatacgaaattatacgtagccatcttctcgaacttattgatgaaccaaatgtaattaaaaacaacatcactgccgtgaattatattatggaccactcttttttgtcccgcagcggcatcatgcgggtattatcgaagctgaagagtgacggctatatccatttatcgcgcggcatcctgacggatattattgatctgccggaaaagatgaacaggctttattcaaaatccgggcccgcgcagccagcagaatga

SEQ ID NO: 189378 - DNA, 1032 bp, Klebsiella oxytoca
atgtccggtggtatttttgttggtatggacaaaaacatcatggatggacttaacgccgtgttagaaggtcagtcttctacctacggcaccctaatcagtgcgattatcgtcagttccttcaccctatttattacgtatcgcgggtatcagacgcttggcggcaaactccagacaccggttgaggatgttgtctgggatgtgggtcgtatgttgcttattactacctttattttaaaccgcgatggctggctgaatgccatcattgcagccattgaagggcttaaggatggcatcagtggcgatgataatgtctgggcgctgctcgacacggtgtgggaaaaggcacaagcgctggggcaaacgctgtttaatctcgatacctccacctacgtaaaagtgaatggcggttttgccgaggtgctggtctggggcggtgcaatctttctgttattggctgcaacctttgtcaacctgctcgccgaaatcaccattctgttaatgaccaccaccgccccactctttattttctgcctgctgtacggttttcttaaacccatgtttgataactggctgaaaacaatatttaccgcaatcttaacgatcatgttctctgccctgtctgtccggatcgccatcaactacctgagtaaaatactggatgccgccacagcaacgtctgctgaaagcaatatggtgaccctggcggcgcaatgtttgctggccgggattgccgcaggcgtcgtggtgtatttttcagcgaaaatagccactgcgctgagcggtgccgccgtacaggccgtgttacagggtgccgccatgagcggactgagcgggctggtcagcaaatctgccgacgtcgccagacccggcataaaggcagggggccgactgaccgccaaaggtggcatggcagcagccgcgacaaccggcaggttcattgccgcaggtgcgggcaaagccgtgaacgcctggcagaaacgtgccaccgccatcgaaagcatgaaacgccagaatcagcagcgtcaccgttaa

SEQ ID NO: 189379 - DNA, 216 bp, Klebsiella oxytoca; identical to SEQ ID NO: 126550

SEQ ID NO: 189380 - DNA, 1455 bp, Klebsiella oxytoca
atgttctcaaagaaaaatattagaattgcagcgatctggtcagggattgaagcgatatcatctgttttattaagtctaatttcaatcgtttatttggcaagaatattacatcctgctgactatggaaacatagcgatggcgcaagtaattgctggactaattagcttaatatttagcttcggattaactgagtctatcatacagaagaaggatttaacacaggatattaaagaaactgcgtttgtcgcctcgattctcttttgtgctctggcattaatcatatcagtaatagtacttgtttttttatggatttacattgatgagcaaatagtatcgtatatatttatattcgaaatttttggcgttgtttttacattactctctttacttcctacggctcttcttttgcgagatctaaagatgagtgcttttacaaaaagaactctcttatcacgagtgatcttctttttagtaactgtcccacttgctttatcaggtcacggggtttggagtgttgtttacgggaattttgctcagtcgcttacatctatggtgttactttttattgctacaagaaaagatcttccaaagcgattaacttttaatcccctcatcttcaaggagttattcagcttcggtgtttacgtaatggcagaaaacatcttatggagtgtgctgagtcgagtgtttagcttgcttatagcaacttttcatggtacttacgcattagggctttataatatggctactaggattacagatgctctactaaacgtattgaatactgtggtcagccgtatggctttgcctttattttcgcaagttcaagatgatttgtctaaattaaaaaatattttctctcgcacaacaaaaatatttaatactatatcaatgcctgcttttgtagggatggctattacctgtccagagtgggtgcctgtcattttaggggacggttgggttaatgcagtgccagttatacaagttatagcaattatgtacgctgtcatgtattcccgtatgtttgtaggtattgccatgaaggctgtcggggaaagtaaaaggtttatgcttctatctgcattatctgcaactctatctgtaataacagttttgctaactaaaaattattcattaactgaaaccatggtttcgtggtctactgttagagtagtaatcacgattcctgttgggatttttttgatgaataaaatacttggtattaatggttatcaacagttaaagcctgtttttatcccattgttatctacgctcttaatggctgggaccatatttatattaaaggtgttttttgtttccgagtttcaaaatgtaatcttgcgacttataatggtagggctgttaggtggtggagtttattttctttcttttatagttttaactttttctactaaaatcgcatctggagggtgtaaatggaaagccagcaaatga

SEQ ID NO: 189381 - DNA, 963 bp, Klebsiella oxytoca
atggaaagccagcaaatgataacattaaaaaataagcttagtgaaattagtgaatttattcttgataaaaatgatgtcatttttttagattaccctacatatcataacgttggtgaccttcttatttttgaaggaacgttgcagttttttaaagatcacaatattagtgtgaagttatttcgatcggcaaaggattacgattatgctgaggtcataaaattcttaacacctaaaactacaattgtatgccaaggtggtggtaattttggagatatttattcaacacatcaaaatttaagggagttaattgttaatcaattcccaaataatagagtgattgttctcccgcagacagcatattattcggatgtcaataaactaaatgaatctcgagatatatttaagaaacatcacgatctatatctatttgcacgtgatcaacaaactttaaatatatttaagcaatttactagcaatgctttcttatctccagacatggcgcatgctttatatcgtaatattccgaagtcaacccagaaaaataatgatacattattctttttgcgagttgattgcgaagtcaattccagtcaagcttctttaagcattcctgaaggagctattgtcaaggattggcaggattttgttaatcgaaaagatatatatatacgaaaattagttggctatttatttactatatctaatcgtttagatctaacgtttaccaaagattttgcttactatctatggagaaaacattgtgagcatttggtatccagaagttttatttatttctctcagtttgaaaatatcattacttctagaatgcatgggcatattttagcctgtctggttgatgtcccaaataaagtcattgataattcgtacggtaaaaattctggttattttaatcaatggacaaatgaagttatttgttcggcattattagaaggtaatgagtaa

SEQ ID NO: 189382 - DNA, 819 bp, Klebsiella oxytoca
atgatccctgtttttgttatatctatgcaatccgattacgacaggcgtaagattatatcggataaaatgaataagtataatatccattatgaatttatcgatgctgttgttggaaaagatttacctcagtctaagattgagaatattgatttatcatgcgctatagctagaaaaaataggcatgtatctctaggggaaatcggatgtactctcagccacattaaagtatatgagaaaataatagatgacaatattccatattgtttaattcttgaggatgatgcaatttttgatcataggctatatgattttcttaaatcatttacagattctgttcgtttaaaaaatgagaatgaccttcttattcttggcgggcaaaatggtatagataaaaacaaatttatttcaaggagtatttggtctaaacttcgaataggtgaggagactttctataagactattaggagtgaaatgtatatttttcgaacatgttgttatgtggtaactcttgatattgctcgaaatttatatgccttttcgcaaaaggagtttttcatcgctgatgaatggtcatactttaagagtaagggtttaataaattctatttatttgtccgattttgttgaacaccctcttgacctctctaatagccatattgagatggaacgtttaaattcaattaaaaactattctgatactaaatcagataacgtaagtgatagttttattaagtattttttaaaaaaatatttgtttgccaccacgttaaaaaaatggtatctgaaaagtagaactctttttcgctgcttcctgccgtag

SEQ ID NO: 189383 - DNA, 369 bp, Klebsiella oxytoca; identical to SEQ ID NO: 92424

SEQ ID NO: 189384 - DNA, 690 bp, Klebsiella oxytoca; identical to SEQ ID NO: 92428

SEQ ID NO: 189385 - DNA, 690 bp, Klebsiella oxytoca; identical to SEQ ID NO: 92429

SEQ ID NO: 189386 - DNA, 351 bp, Klebsiella oxytoca
atgtttactgcattcaatgagagaaatgatttcagttatgcttttgaaaaaatccgtaacgcgatttcttcacctggtgaaagtaatacttatgctgctacaaatctcggcctcgacattctggtccgcaagtatgaactgttccgcaaggaactggatgcggccggcgaactgggcgactgggaatatgatctcgatacctacagccactgtattacggtgctgaagcgctacttcaccggtaattcatccgggctgacagaacgtgatgcccggatttacagtcattacctgcagactgagcacaaagggtttgtgaagcttgctgaagagctggctgccggccgctga

SEQ ID NO: 189387 - DNA, 768 bp, Klebsiella oxytoca; identical to SEQ ID NO: 100959

SEQ ID NO: 189388 - DNA, 783 bp, Klebsiella oxytoca
atgataatgtcatcccttccggctgtttctcaccagggacattccttacagctgccagtggccatcgattatcccgcggccctcgccctgcgccagatggcccttgttcaggacgaactgccgaaatacctgctggcgccggaaatcagcgccctgctccactatgtgcccgatctgcatcgcaagatgctgctggcgacgctctggaacaccggcgcgcgcattaacgaagcgctggcgctgacgcggggggatttttcactggcaccgccgtatccgtttgtgcagctggccacgctcaaacagcgtgcggaaaaagcggcgagaacggccgggagagcgcccgccggcaatcaggcccatcgtctggttccgctatccgatcaccagtacgtcagccagctgcagatgatggtggccacgctgaaaattcctctcgagcgtcgcaacaagcggaccggccgaaccgagaaggcccgcatctgggagattaccgaccgtaccgtacgcacctggctgaatgaagccgttgatgcagctgctgctgatggcgtcacattctcgataccggtgacaccgcacacgttccggcacagttacgccatgcacatgctgtatgccggcattccgctgaaggtcctgcagagcctgatgggccacaagtcagtgagctcaacggaggtctacacgaaggtgtttgcgctcgatgtggcggcacgtcaccgggttcagttccagatgccgggggccgaggcggtggcgatgctgaaagaacgaatttaa

SEQ ID NO: 189389 - DNA, 903 bp, Klebsiella oxytoca
atgactacaaatcagttttatgaactctatcgccatctcggcacattacgaaccgatgccagcaatattcatctcgttatcgagaaactgactctgttgtgccgcgaaacaaaaacatcgtcatccccagaagaatgcctgcttgccgcagacaactgcctgcatgaaatcagcaattctgcttcactttttgcagtcgctctctcctgctggcttacggatgatgagtaccatggactcgcgaaggcccttgcagataaggcaagtgtgaaccacttacaggcggaaaacccactggcgtatgacctttcctctctggatgaatcacgcgccatcctggcggcatgcagactctgcgcactgcatgtttccccagccatctcgctcggctgggccttaagcctggcaaccgcacacccagcaagtgccccggcactaaatgcggcaagagcactcgtgctgcatcacatgcaggagtatccatggaccacgctgcgactactttccagcctgaaatctccgtttacctcgcttgaaatagctaaaatggcgctggctcaactggaacaacagcaaaatcatctgaatgtactaccagtgcttcgtgagtttgcaatgcctcccgagatgcggctgatgtatgctagtctcaagcgcagtgagaatcgtgatattcaacggcactcagaagaaaaatccatttttggccagcttttcacgaagcagtatttcaagtacgccagcaaaactgcgttagaattttctgtcggtgacgacgtcaaagaaaccacgttggaaatgacacccttccaagttgaagttgagttacccatcacctggcgcaccgatcctctttccggtgaactgaccagaaaaagattgtggaaaggaaagctgaaatga

SEQ ID NO: 189390 - DNA, 1680 bp, Klebsiella oxytoca
atgagtattcaattggttctatcccattatctggcggggctgcgtgagcgcaatgagctcgatgtactgctgccagagttgctcaaagctatggggcacaatgtgctcagccgtccacaggttggtccagggcaggctggtgttgacgtgctatcgaccaaaacgggggcagatggtattgatgaggtttatgtttacatcatcaaatttggcaacgtcggacgggctgatctttacggtgggcctcagtctattgatccctctatccgtgaggcctgcaatgacttcctcagaaatcgtttaccggaaccactcaaaccgctgcgcaagcggatcgttctggtatccaatggcgtcctgcttcaggaagctcaggccggttttgcagcgcagacggcagacatcgcaacacgcccgctttgcagtttagaattctggggctccgatcagctcacaccttggatagaacagtacctttttgatgaaacattactgctggcgcgaggaaaatctgacctgcgagcggccctggctggccttgaggagtcaggttcggctacaaggcggtttacccgctttgtcgatgcctgttttgaaatacaggccgacgagtcggaacaaagtgctgcaacgcaaaagaaaaagtttttaagacgatgtgccgcagcttcaatgggctgggcgatcctgctggtctggggaaaaagcgaaggcaatttaaagcctggggtagttaccggcgaatatctgatactgcgtatctgggcagaggcggtaaaactggaattgcatgccgaccacgcatttgccgaccggtttgaaaacttggttacgctgcatatacaggctctggtggactactttgaaaaggtaatgccaaccttggagtcaccacgagcagtcctacgctggcgccctgagcgagtcttctacctggagcttatgtttgaggaattggggcgcctgtccaccctcctgctattgctccagcaaaagccaggagaggaggcatttcgaacgactatccgcaacgccatcatttatctggtcaatcagcattcgggggtactgcttcccctttatgacgggcacaccatcgacctaaccctgctcttttgcgcactgatgggcgagtcagactgggacaatacgcggatgattgcaggagaagttgtggcccgacttcaccatgcgctgagaacagattgttatctgccggttgacaccgactctcaggaagatgctattgccctcgacagaaacaaggctgagagtcgtgatttcttccagacctcaacgttggtgccagcactcgctactgtgacgtcactgctcggtgatgaagaagccttccagtctctacgggataaggtcctgccactgatgaaaggggtaacactcgaacgctggttccctacagcactactcgaaaaactcagcggatcgacactgggaatccacagcgtcggtatttccaaggcattgtctggcctcagaccttcagcaaaggaggaagccgaggcgtcaattaatacctttgacgatgcagcagccccttcagatttcagatggtactgtaactggcaaatcctggttgcgttgtcggcacgcctgtaccgacacccactacctacgtggtttattagtgaatacagcctgacagaaccctctgatgattag

SEQ ID NO: 189391 - DNA, 876 bp, Klebsiella oxytoca; identical to SEQ ID NO: 100979

SEQ ID NO: 189392 - DNA, 393 bp, Klebsiella oxytoca
gtggctaaagttcaggcttatgtcagtgatgaggttgctgataaaattaatgcgattgttgagaaaagacgtgttgaaggggcaaaagataaggacatcagcttttcaagcatatcaacaatgttgctggaactaggcttgcgtgtttatgaagctcagatggaacgcaaagaatctggtttcaatcagatggccttcaacaaggccttactggaaagtgtgattaaaacgcaatttacagttaataaagttctcggcattgaatgcctgagtcctcatgtcagtggaaatccgagatgggagtggccgggacttattgaaaatatccgggatgatgttcaggaggttatgctccgatttttccctgacgaggagagcgaagacgaagagtag

SEQ ID NO: 189393 - DNA, 675 bp, Klebsiella oxytoca
atgtgtgcgaaggatcgtagtcaaaactcagtatgcagtcaaacggaattcatccaatacctcgatgatgtgttttctatttcttcaagtctctccctcatccgtgactcgcagggtgagctagttcatttaagtcctctttttgagacactcctgttgaaaggtagtgaactaaaagtatggttttcatttattccacttgatgttcggttagagctttttaatgctgagctcaactctctatcaggagaggggccatatttttcaaaaaatgtgaagtcgatgaatcaagtgttgaacatattcattgagtgcatatatgtaaaaggtcgtaaatttacgcgttgggttttttttccagagtctaatggtttttttcatttgcatcatgaatatgacaaagcttctaagataattgatgatattttttacttgagaaggaaagtggatctgcagttttggaaggtttttaatttatacgcctttggttttactaactcgaaaatttcaagctcaactaatttgactgaggatcaggttaaaaaaacaattaagaagattaaggctgaatgctttgtgagcagcagtgattgtctggctttattgactttgtatacactaaattataataggctagctattaatgtgattaacattttatctaataaatgttaa

SEQ ID NO: 189394 - DNA, 585 bp, Klebsiella oxytoca
atgaaggaattaatactgttaattcctctgggcagcgctttgctcttaactgggtgcgcgggcacagagtccgattttgaatgtaatgccacaacatccgatacctgcatgacgatggagcaggcaaatgagaaagcgaaggcccaggaggaaaactcgtcagcaaagccggctgcggccgggttgccacgactggctgacggaaattttagaacgacgtcgccaaactcatacccgctgccgccgcaacccgacctgacccggtccagagtggccgaggatacatcgcgagcacgtgcagtggcccttactaacccaactgcaaaaaatttagccgcatatttcgaaaccgagaaaaggatgcagtctttgccggtagtgaaaatgtctttaccggtagtggcgtcaacgtttacgtctccggcgacactgcctggcaattatccccggccgctaagaaagggtgagcaaataacgtcattatggatagcgccttacgttgattccgatgatgtctatcaccaacccacaacggttgtatttgttgttacgccatcggcatggggccagccccgcattaactaa

SEQ ID NO: 189395 - DNA, 270 bp, Klebsiella oxytoca
atgtgggatgataggattgtaaattttttttgtttgcttatggttgtattggtaagcgtaatgtttttatttaaattaacgcaacccagtaatgacgatttaattaaggacggtaaatactggtcgactgactgcaccttaaaggaagttgacattcccaccggctttttaaccagtaacattaatcgactggattgttccggggtcgttgttaatgtggtgaaggaaaaatacaaccaggcagtatctgcttatagcaaatctaaatag

SEQ ID NO: 189396 - DNA, 222 bp, Klebsiella oxytoca
atgcatacatttatttttttattgttaattatgcaacctgggggccacagcagttggaccattactccgatgcccaatactgatgtttgcatgaaaatgctgaaggcagtagaggcccgtggcgggcgtgggggaggggaaaataaaggcgaatgcattgaaatcaaaaccagtgagcctttgaatgatgcgatggagacactaaaaggaggcaggcaatga

SEQ ID NO: 189397 - DNA, 405 bp, Klebsiella oxytoca
atgagagcctactatctggagggtaataatattgcctggcttaatggtgtgtgcttattgcttatccttatcggggttgtcggatcactggccatatttgttatccctgaaaaaattaatttgcgagtcaacagaggtaatacatttatctttagtgtgcttataacgttggctgcgtttgccatgcttatcgtcgtcttaagtaggtcattcacgatggatgaacttgaggcaggaaggcactggaaaaacgactgcaagctactggaggtaaacatccagacagattcattccctacttctgtaaacaaactggactgtgtcggcatcatcattaatgtgccgaggcttcagtatgatgagtatatccggcagtgggagttgtataaggccaaagccgaatga

SEQ ID NO: 189398 - DNA, 348 bp, Klebsiella oxytoca
atgagtggacgtcagttaatagttatcctttctcttggtgttattgctcttgtaggtggcggaatattttaccctgtgtacgaaaattatcttgatagtcaacctgccacgccggagcaactacatacaattgttcgtgacacgccttgtgcgggtaaagtattacaactggaccttgaatctaacgatgatgattcatctgaaccgttaactctcggttacgcaaatgaactcgcgtcagggtgtaaagaaaaagaaagactaatggaaagcaaaaaaatccgtgagggtgaaatgactacatcccgcgaaaaacagctgaaagctctgaacggtatcactaaatga

SEQ ID NO: 189399 - DNA, 381 bp, Klebsiella oxytoca
atggtgtttatcaaaaataataggtttctgcttgttcctacagtgtactggctcatctatcttggcgtcagattagcttataatgggctggcgggagagtacgcgcctgatttcattaagagcattagtcatgatggtgtgtttattatctgtagcttaattgttttttatattgcttgtttacgaattaaagacagtggtagtgaaatctcagcagtactcttctggtctattatcggttttcatgtggccgcgttagttattacgtttcttatctgtttatggcaaggggcgattttgtggggtgttattttcatctggcaattgggagcctcaatgttattgctgttttttatccctgcttaccttttcctgcggtga

SEQ ID NO: 189400 - DNA, 2640 bp, Klebsiella oxytoca
atgagtaataacctgatggataccgttgctcaggccgtgaattcgcttgtgtctgcacttaaattgcccgacgaatccgctaaagccaatgacatgctgggcagcatgaatttcccgcagttcagccgggttttgccctataaggattatgactctgcgaccggactgtttattaatgccaaaaccgtcggttttatgtttgaggcccggcctttaccgggcgctaacgcgcatatcgtggcctcgctggaaaacctgctgcgaaccaagcttccccgcggcgtgcctgtgaccattaatcttatctcgagcaagctggtcggggacgatattgagtatgggttacgggagttcagctggagtggtaaacaggcagagaaattcaatgccattacccgggcttactatcttcaggcggcagaaaaacagttctcgctgccaccgggtatggatttaccgttgaccctgcgtaattaccgggtatttatctcctgctgcgtgccccgaaagaaacattcgaaagcgcagattgttgagctggagaaccagataaaaatcatccgggcttccctgcagggggcgcaaattccaacgcggatactggatgcccaggggcttgtcgatatcgtgcgcgagcaggtgaaccctgatccaggtgaaatgtaccgtaagccttacaagctggacccgtaccaggacctgaattatcagtgtgtggatgacagttttgatatgcaggtcaccgcaaaccacctgaaaattggcctgctggaccgcaacggtaaagagaaagtcacccgggtcaccaattatcatctggcccgtgatccggagatcgccttcctctggaccaacgcggacaactacgccaacctgctgaacccggagctctccatttcctgcccgtttgtcatcacgctgacgttaatggtggaggaccaggtgaagacccagaacgaggccaacctgaagtacctcgatctggagaaaaaaagcaaaacctcctatgcgaaatacttcccgtccgtggaaaaagaggttcaggaatggggggacatccgccagcggctggcaaccaatcagtcctcgctggtgagttacttttttaatgtcactgcttacaccgacgataacgccgaggcctctctggctaccgagcagcagatcctcaacagttatcgtaaaggcggctttgagctgctgcccgcacgttaccaccacctgcgaaactacctggccatgctgccgtttaaatccggtgaggggcttttcaaagagcttcaggccgcaggcgtcgtcaagcgggcagaaacctttaatgtggccaacctgctgccggttgttgcggacagtccgttagcgccagccggattactggcgcccacctatcgcaaccagctggcgttcatcgacctgttctatgagggaatgaacaacaccaacttcaatatggcagtttgcggtacctccggcgcgggtaaaaccggccttattcagccactgatccgcagcgtgctggactcaggcggttttgcctgggtattcgacatgggtgatggctataagtccttgtgcgagaacatgggcggggtttacctcgacggtgactctctgaaattcaacccgtttgccaacattctggatgacgtcaattttgacctgtcggcagagcgtatccgcgaccagatgtcggtgatggcgagcccgaacggcaacctggatgaggtgcatgaaggtctgctgctgcaggcggtgcaggcggcctggctgagtaagcgcaataaggcccgtatcgatgatgtggtcgattttctcaaaacggcgaaagagagtcaggagtatgccgagtcaccgaccatccgcagtcgcctggatgaaatgattatcctgcttgaccagtacacagtcggcgggatttacggtgattacttcaactccgatgaaccgtcattgcacgatgatgcacggatggtggtcctcgagctcggtggccttgaatcgcggccttctctgctggttgcggtgatgttctcgctgattatctatatcgaaaaccggatgtaccagtccccgcgcagcctgaaaaaactcaacgtgattgatgaaggctggcgattgctggacttcaaaaacgaaaaagtcggcacctttattgagaagggataccgcaccgcgcgccgccacctggggtcatatatcaccatcacccagaacatcgtcgacttcgactcacccaccgcatccagtgcggcccgcgcggcctggggtaactcctcgtacaaagtcatccttaaacagtctgccaaagagtttgccaaatataaccagctctacccggatcagtttgcgcagatgcagcgggacatgattaacagctttggctcagccaaagatcagtggttcagctctttcatgctgcaggtggaggcacatacgtcctggcatcgtctgttcgtcgatcccctcagccgcgcaatgtattcctcaagcggtaaagactttgagtacatcaaagggcgcaaaaaggaggggaccgacattcacgatgcggtgtatgacctggcctgcaggaatttcccggaggagatggcgatcctggaagcccgaatttctgatgacaacgtaaggaaagtagcctga

SEQ ID NO: 189401 - DNA, 393 bp, Klebsiella oxytoca
atggaaaacaacacagagcagcaagccggcacggcgttcttcacttttcgtcggagcctgatgcttattctgctggtcagcctggtcctgacaataagcgccggcatgacgcggcttatgctgacgtacaccacaccgcgggtggtggcttttgacatgaaaaaaacgctggacagttttatggacagcgtcagtcaaaagcagctgtcagaggcgcagtcgaaagcgctctcagaacgctttaatgcagcactggagcagagcctggccgactaccagaacaagaatcatgttcttatcctggtttcaccggctgtggttcagggcgcacccgatgtgaccctgaaaatccagaccgacattgccacccgaatgaagggagtgcgggaatga

SEQ ID NO: 189402 - DNA, 630 bp, Klebsiella oxytoca
atgaaacgcaccggtattgccttactggcgttctgcctgatgtcaccgggggtgccggcggctgacctcggaacctggggtgatctgtggccggttcaggagcaggacatgctgacgctcattactcagcgtcttgaggcgttacagaagtcggggaaatgggcgcaggaaatggcgtctttcaaaggccgtgtgattgagcacagccagcgaccagcgccggttgaggggatagggaaagcggataagtatgcgcagcgctggttcgatcccagtatccggctggctgaggacctgaaagatcacaacgggcgggtattcgcgcgcaaaggcgacgtcctgaatccgctgaaaacggtcccctttatgcaaacgctgtacttcatcgacggtgacgatccggaccaggtcgcctggatgaaacggcaggtccccgacaccctgataagcaaaattattctggtgaaaggcagcgtaccggatacgtcagtggcgctcgatgcccgaatttattttgaccagaacggcgtgctttcaaaacggttcggcctgaccagtgtgccggtgcgcattaccccggcgccctctggtgagcggctgaacatcgagacgttccccgctcatcaataa

SEQ ID NO: 189403 - DNA, 990 bp, Klebsiella oxytoca
gtgaaacctttacttcttttcttcaccgccgtgctgttgtgggggcaaagtctgaatgcctttgccgacccgtcctgcgaaggccgctttgttaatccgatttcagatgtgtgctggcagtgcattttcccgatgtctatcggcagtgcctctgtggcggccggtggcggcccggacacggtgaatccggccagccctattcaaacctgccccatgccgccgcccattttttaccgtatcgggatggcgatcggttactgggagccaatggccatgacggatgtcagccgttctccagggtgcatggtgaatatgggcgggtttagcctaaacctgggcaaaaccgggatgggaaccgcgaaaaaggacgataagcaggtcaacggggccttctatcacgtgcactggtacaaatatccgttgaccagctggctcagcatcattacgtcggcgggatgcctgcagggcggagatatggatattgcctacctctctgaaattgacccgacctgggtggacagcagcctgaccaccattctgaaccctgaagccgtattgtttgcgaacccgatagcccagggcgcctgtgccgctgacgccattgccagcgcattcaacaagccgctggacatcctcttctggtgtgccggctctcagggctcgatgtaccccttcagtggctgggtcagtaatgaatccagtccgctgcagtcatcgctgctgctgagtgaacgtatggcctacaagctccaccggcaggggcagatcctggagaccgtcggggccgatgtcgcggtctgttatgaatacccgtcaccgattattcccaaggagcgctggcggtaccagatggtgaatatgtaccccgacagcgcgcagtgccatcccctggggcgaacggtcacgcgctgggaggttgggaaaaacccgccgattacccgaaagaacttcggctatctgatgtggcgaaaacgtaactgtgtctactga

SEQ ID NO: 189404 - DNA, 630 bp, Klebsiella oxytoca
gtgaaattactgaacatactgacggtgatgctgttactgacccgtaccgtcgccgcggcagagggcgcagtctcgtcagacccgatggcggcagatcgtcagtggcttaagcagcaggaggatttcagcgagcagttgcgccggcaaccggataaggcgctgcagcaggagcttgaagcacaaattagccgtaaccctcttacccgttcggatcagcagttcatcgataatctggccagccagcagcgggagtcgacccgggataaaccggcggaaggtgctgtgtattgcatctccttctcaataccggacgaggggttaaaacggatgctgcatgaaacccaccgctacggtattcccgccacgctccgggggctcgtcaataacgacatgaaagccaccactgatgcggtgatgggattggttaaagcggggatcaccgaaggggtgcaaatcgacccgacgctctattcacggtacggcatccgcagtgttcccgcgttggttgtacgctgcaaagccggctttgatgttatacagggcaacatccgcctgaagcaggctctggagaaggtcgttgagaaaggggattgtgcagacacagcccgaaaattgctgggaggtgcctga

SEQ ID NO: 189405 - DNA, 1956 bp, Klebsiella oxytoca
atgagatcactccccctgatcctgatgctgcatatgtttgtgctcgggacatttatctggtttacggtaccagcctgcgctgacagcacgtccgattacaaagccggcgctgattatgcgaagcagatacagggaagcgggactgacgcgctgaagaacttcaacggtgctgacacgctgcctgggtataccagcaaaccggcgcagacgaagtattacggcggtgtctctgccagcggtgacagtaatctgaaaagcgactccgctgccgaatgggccaacagtgatgtggggaacagcatcacggagtcgtttactaaccgtcccccggacagtatttcggccgacgcgccgttcattcaggcggcgaaagagaccgagtccagagcggattcgattgtggggaataccggtcaggcctgtacggcacaggtagttaatcgcagcgagtttacgaaccagacgtgtgagcgggatttgcaggtggagaacttctgcacacgggaggcgacgctgaaagacaacgccacgacgcaaaaggtgaaccgcacgtatcagcaggccgtcccgctgtccttcacccgaaacagcaaccgatgggacgggaaactgacgatcccgtctacaggacgcctgttaagcgtttccattgatggagaacctcttcccattccctggattgacgagtgtgacagcgagggaacggtaagagatagctgcaagattgctgtcagcgaaaaaatcagcctctttgataaaacgttccctgtcgacgtgatgacctggcccaacacgatgacgacgtgctctggcggtcagaatacgcactgtacccaccattactacgatggtaccgggaaaattcatcagtctttcagcatggaccgcaatgtggctgccggacagaccgttgcggtcaccaaaacgtcgaaaacccaaccgtcagtgaatgttaagtccattcaggtgacggtcatactggttatggaagagacggaaaccgtgtttgcacccgaggtggtctgggttgaaagctgtccgttcagcaaggacgagggcacgaaaactggcgaagaatgtatcagcccgggcgggacaaaaactctcaacctcggcgggaaagagtacgcctttacggaggcctgctggaaatataaagacacctggctgactcagccggcggataacggctcctgtgaaaacctgatgagtaatgcggcctgcacgttgtcatcacgccagtgcgcgttcagcgcggaggacgggacctgtctgcacgagtatgccacgttctcctgcgaaacccggaccagcggaaagcagatggtttgtggtggcgatgtgttctgcctcgatggcgagtgcgataaagcggtcagcggtacgaacaacagctttggacaggcggtttctgagctcgcggcgctggcggcggcaggggaggatgttgctaagttgaacggcgtggatgtgaaggcgttcaccggtaaagcgaagtactgcaaaaaattcgcggccggattcagtaactgctgcaaagacagtgggtgggggcaggacgttggcctggcacgctgcagcagcgaagagaaggcactggccaaagcaaaaacgaacaagctgacggtcagcgtaggggagttttgctcgaagaaggtattggggatctgcctggagaagaagcgcagctactgtcagtttgactccaagctggctcagatcgttcaggaacagggccgcaacggacaactgcatattagtttcgggggcgccagcagcccgaactgccgggggatcacgatggctgaactccagggcattaactttaaccggctggattttgcgaacttcatggaggatttaatgaataaccaaaaaatcccggataatgcggaactgacagagaaaacaaaacagcgaattaaagaacttctcacacagtcatcatcaaaataa

SEQ ID NO: 189406 - DNA, 381 bp, Klebsiella oxytoca
atgaaaaaacatgacctttttaataagttgagtaaaggaaaagtgctttacccgtttattctggtctttatcgcattaagtgcgatgtcgtggctgagcaccggcgcgatgccaacgttaaaacccgtagtgctctttattattatcctggcgactccgctgctgatggccttgctggccatgacacgtggggcgctgatgttctttctgggtgcgctggtcacccaggttaccgtcgccatgctggtcacgctgtttaccgcacacagcttgtccgcgggtgccggatttggtgccgtttctattgtcatctacgtcctcatcacggggttcagtgatgaaaaggccgacgtcggtaaggaggataaaagtgatagttag

SEQ ID NO: 189407 - DNA, 237 bp, Klebsiella oxytoca
gtgatagttagctttgctaaacatcctggcgtggacttctgtataaggttgctgctgacagccgttattattttccccgtggtttacttttcctgggccgcggttaccgggaccacggccagtgattatatcgcgagtgtcatttttattcttgctacggggtttatctggttattgcttaatctgtttttttctgcctttgagaggcagttaaaaaaaagaaatgatgggaaatga

SEQ ID NO: 189408 - DNA, 327 bp, Klebsiella oxytoca
atggaagagaaaaaagcgtacggtctggttatgacgtttgtcgcggtgtttgtcatttttctggtcagcgtcatgtcttacagcttgtggcgggataaacagattaatgcgtttatggccaccaaccgggcctggggtattcagtgtgacaggagctcgcaggctgcgtgggttatcaggaacggcgagcgtaccgcattagaaatgaataatatgacactgtactgccacggtttccggtttgagggacgcactgaccctgaaacgaaaacagtcaacctcgataaatacagcgtttatcaacatatttcgcgccagccgaattaa

SEQ ID NO: 189409 - DNA, 546 bp, Klebsiella oxytoca
atgataactaataagcaaattttacaggaagtggagcaattaaaagaattgttcaatgatggtggtgcagaaatcccccctatgtggcaatgcttttggcccggactcgctgctatggcgtggatggtaacatggccgttgatactgtatggctataagttcttgtttttagatcttccagatgcagcaaatataggggtcgcagcatcagtaattattgcgatggttgctgggttgtttatcatgattggtattgctaatacccgagctctgtatctgtcaatacccaagagatttcgggatgactcagcactgtgtcgacttcttgtcaacaaagccagatgttatagctcaacctacctagtcggatatgctgtattgattgtattattcactttccctgtgcacggggctatttattctactgtcatatttatcctttcatcatttggctttatgatttatatgaatgttgacctcaatcgttatcagttaacggcgcttacatatttacttgagtcattcaaaagatcgggagctaaatga

SEQ ID NO: 189410 - DNA, 654 bp, Klebsiella oxytoca
atggcaatatctgaaactgtaagctctgttgatacacatgaattgatgccgactgatttttatccgctcccctcggaggggggcgcttatgactatgttgtgtatttcagcggtgcatttattattatctttgtttttataatattattttttccccgaaaaaaaacctctttacacacgaaaagtaagcgtgatgctttgcctgtcaatcccgataaaaagcctgaaggatggagccagccagaatatttccagctctccttatgtgtggaagggccggcagacgctgatgattccgtcttttcttctctcgcctctcgtgttgtccgcgaagctgaaaatctgtatatccccggcgtcaatcgccgcgacagctctgacggtgagtttgcctggtctgtgcagactaaatttccttctgacaagctgtgcggctcctggctttctccggggacaggctggtttgaacgtccggatatcattgaacgtcccgtgaaatggctctgcgtctgcctgcaatatacggctgaaacatcgccatccgcactccattcccttgttgatgaggccggacggcaggtagcgaaatcgtacctcaaaggcggacattgtcacggctctgagggctataccttctgcatacgtagcttctga

SEQ ID NO: 189411 - DNA, 4332 bp, Klebsiella oxytoca
atgctgagtttcagccaggttaaatcggcgggcagtgccggtaactactacacagagaaagacaattactacgtcatcggcagcatggaggagcgctggcagggaaaaggcgcggaagctctggggctggaggggaaggtagataagcaggtctttacagagctgctgcagggaaaactccctgacggcagcgacctgacccggatgcaggatggcgtcaataagcaccgacccggttacgacctgacgttctcggcaccgaagagtgtatcgatgctggccatgctgggtggagataagcgtcttatcgacgcccataaccgggcagtcaccgtggcactgaatcaggttgaatccctggcatcaacacgggtacagaaagacggcgtgtcggaaacagtcctgaccaacaatctgattatcgcccggtttaaccacgatacgtcgcgcgcgcaggagccacagatacacacgcacagcgtggttatcaatgcgacgcagaacggagataaatggcagacgctgggcagcgataccgtcggtaaaaccgggttttccgaaaacatactggccaaccgcatcgctttcggaaagatataccagagcactctccgggccgatgttgagtcgatgggttacaagacagtggatgcgggtaagcatggcatgtgggagatggagggcgtgccggttgagtctttttccacgcgcagtcaggagctcagggaggcagccggacctgatgcctccctgaagtcccgggatgtggccgcgctcgatacccgcaagtcgaaggaagctatcgacccggcagagaagatggtggagtggatgaacacgctgaaggagaccgggttcgacatccggggctatcgtgaagccgccgatactcgggcaaaggaactggccagcgcgcctgctgcgccggtgaaaacggacgtccccgatatcagcgatgtggtgacgaaggcgattgccggtctcagcgaccgcaaggtgcagttcacgtatgccgacctgctggcccgcacggtcagccagctggaagccaaacccggtgtgttcgagcaggcgaggaccggtatcgatgcggcgatcgaacgcgagcagttgatcccgctcgaccgcgagaaaggcctctttacctcaaacatccatgtcctggacgaattatccgttaaagcgctgagccaggagatccagcgccagaatcatgtttccgttacgccagataccgctgttgtgcgccagtcaccgttcagcgatgccgtcagtgtgctggcccaggaccggccaacaatggggattgtctccggccagggcggcgcggctggccagcgtgagcgggtggctgagttaaccctgatggcccgggagcaagggcgagatgtgcacatcattgcggctgacaaccgatcgcgggagtttctgtctgcggatgcgcggctggcaggggaaacggtgaccgggaaatctgccctgcaggacggaaccgccttcatcccgggcgggacacttatcgttgaccaggcggagaagatgagcctgaaggaaacgttgtccatgctggatggcgccatgcgtcataacgttcaggtcctgctctccgacagtgggaagcgcagcggtaccggcagcgcgctgacagtactgaaagagagcggggtaaatacttatcgctggcagggcggaaagcaggcgactgcggacatcatcagtgagccggaaaagggcgcgcgttacagccgcctggcgcaggagtttgccgccagcgtacgcgaagggcaggaaagcgtggcgcaaatcagcgggagccgtgaacagggcatactgaacgggctcatccgggaaacgctcaaaagtgagggcgtactgggtgagaaggatatgacggtcaccgcgctgacgccggtctggctggacagcaaaagtcgcggtgtccgggactactaccgggaagggatggtgatggagcgctgggacccggaaacccgacagcatgaccgctttgtgatcgatcgggtgaccgccagcagcaatatgctgaccctcagggacaaagagggggaacgtctggacatgaaggtttctgccgtcgacagccagtggacgttattccgggccgacaaactgacggtggctgaaggtgaacgtctggccgtgctggggaagatacccgacacgcgcctgaaaggcggcgagagcgtcacggtgctgaaggcggaggaagggcagctgacggtgcagcgtcccggacagaaaaccacccagtcgctttctgtaggcagcagcccgttcgacggtatcaaggtcgggcacggatgggtggaaagtcctggccgctcggtcagcgaaacggcgacggtctttgcctcggtgacgcaacgtgagctggataacgccacgctgaaccagctggcgcagagcgggagccacatccggctgtactcggcgcagggtactgcccgcacgacagagaagctggcccggcataccgccttcagtgtggtgtctgagcagctgaaggcccgttcaggcgagacagacctggatgcagccatcgcatcacagaaagccgggctgcacacccccgcagagcaggtcattcacctttccattcctttactggaaagtgaggagctgaccttcacgcgcccgcaactgttggccaccgcgctggaaaccggcggaggtaaggttccgatgacggagatagacgcgaccattcagtcgcagattcaggccggcagtctgctgaatgtgccggtggccccaggccacggcaatgacctgctgatttcccgccagacctgggatgccgagaaaagcattctgacaaaggtgctggaaggaaaagaggccgttgcacccctgatggacaatgtaccgggaagcctgatgacggacctgacgtcagggcagcgtgcttccacccggatgatactggagaccacggaccggttcacggtggttcagggctatgccggggtggggaaaaccacccagttccgggccgtgacgggggccatcagtctgctgccggaagcgacccggcctcgggtcatcggtctcggtccgacacaccgtgcggtcggggaaatgcagagcgccggcgtggatgcgcagactaccgcctcgttcctgcatgacacgcagctcctgcagcgtaatggccagacaccggatttcagcaacacgttgttcctgctcgacgagagctcaatggtggggctggccgataccgcgaaggcgctctccctgattgcggccgggggaggacgggcggtgctcagcggcgataccgaccagctgcagtccattgcaccgggccagccgttccggctgatgcagcagcgcagcgccgccgacgtcgccattatgaaagagattgtgcgccaggtacctgagttgcgaccggcggtctacagcctgattgaccgggacgtgaaccgcgcgctggcgacgattgagcaggttacaccggaacaggtgccgcgaaaagacggggcctgggtgcccgaaaactccgtggtggaattcacccccgcacaggaggaggcgatacagaaagcgctgaacaagggtgaaagtgtgccggcaggtcagcccaccacgctgtatgaggcactggtgaaggactatgccgaccgtaccccggaggcgcagtcacagacgctgattatcacccatctgaatgatgaccggcgggtgctgaacagtctgattcatgacgcgaggcgggacaatggtgaagtgggcagagaggaagtcactctgccggtactggtgacgagcaacatccgtgacggagagctgcgcagactgtcgacctggacggctcataagggagccgttgccctggtcgataatgtctaccaccgtatcgggagcgtggataaggagaaccagcttatcacgctgatggatggtgaagggaaagaacggcttatttcaccccgggaggcgttggctgaaggtgtcacgctctaccgtgagcaagagattacagtgtctcagggggacaaaatgcgcttcagcaagagtgacacggaacgcggctatgtggccaacagtgtgtgggaggtgaaatccgtttcaggtgacagtgtcacgctgtctgacggcaaaagcacccgcacgctgaacccgaaggctgatcaagcgcagcaacatatcgaccttgcctacgccatcaccgcgcatggtgcgcagggggccagtgaaccgtttgccatcgcactggagggcgtggccggtggccgggaacggatggccagctttgaatccgcctatgtggggtcggttccggctgagggcgaaatgacaccctaa

SEQ ID NO: 189412 - DNA, 246 bp, Klebsiella oxytoca
atgcgacacgaaaacgacatcatctcaagggaggagatgattgaactaaccggaaccactcttaaatccaggcaatgcgaagcactgcgccgggctggtatcttcttcatagaaagggctgatggacacccaaaaacaacatggggccacttcactaacccgataaaataccgcaaccagaacaccgaagagttgcaggaagaagaaccagatttcggagcggtattcaatggccggaaagcgtaa

SEQ ID NO: 189413 - DNA, 576 bp, Klebsiella oxytoca
atgacttccaccactgctattgccatcgctgccgactaccagagcttgctgcaactgctggaaagctctgatgaactgactctggaaatgatcgctgatacgttggaaggtctggaaggtgcgctggccgataaactggatgcggtcatggtgatcaagcgtaactatctgggtaacgccaacacctgcgatgatgaaatgaagcgcctggctgcgcgcaagaaatcctttgaaaataaagataaggccctgagtaagtatattctgttctgcctgatggcggccgggctagataagctgaaaacagccaaaaacacgtttactgcccgtaaaggtagcgtcagcgtcatcattgatgatgttgaaaaaatccctgacgaaattgatggtattcaattggtcgatgtaaaaacagttattatcccagataagaaggcaatcaaggatatcatcgaatcggcacaggcagcagcggctcagattaccgctgacggcggagagataccggaagagctgttaaaaccagtgccgggcgctcaccttgagattggcgaacgttcattacaggtgcgctga

SEQ ID NO: 189414 - DNA, 2211 bp, Klebsiella oxytoca
atgaccatctacaacggcttatttgagccaaagaaatcggcgattaaagactgcggcgccgtgcagctggcgatcgccatcgatgcgccaaacaaaaaagtggccgaaagcattatgaccggcaaactctgggagtcatacccggctaatggtgacaactatttcaaaccgaaactgtgggaacatattgaaggccagccgctgcctaccgttggccagttcgatgagtcattcgccctgcagcatacttttgatggtgaaaaatggatttctactgtgcaggatagcgcttccggaagtagtgctggtttacctgccgacgatgaagtgatcgaccttatgaccgtttccgctgaagaacgctttgctgccgtcctgctttttagcaccgctgcgattgatggccatctttattctcaggttgtggattatctggataacctgaaaaaccacgatggggaatttgaagagggagatcgctttaactttaatgtgctgtgcgccctgcaaaataatttcccggtgcaaagcatgcatgtggaaggtctgaataaccttgttcaagggattttctcccactttgaaaaccagacgccaggcaaagcggctatctctcagttcgttaaacgctggcttgagaatccgggcaagcacgacgaactggcccccggcgtatataaaaataccgctctcagcaccagcaccgatgacaataaaacgccagtggttatttctaagcgcggctataaacacacttatgcaacgctggatcaggagatcgcaaccgcccttctcccgctggcgcctgatgcgccggtactatccggaaatcttctggacgctaagaagatgatttccgatgaccgggaagattttaaatgctggtcagcatcgctgcacaccacgccgcagatactcaaatacgaccgcgccagcatcttcggcgtggtacagaacgtaccggcgaaagatacctaccatttccctgacagcctacgccgccatatcgattcatggctggcggccaacggccgctttgaggaaaccgagacaggatccgttaaacaaccagaggcgacgcaaaataccgcctcaaacgggggcgaaaaagaggaagtgccgccgtcggttgtaaccgatacccaggccaaacaggcgcgtgaggctctcaatgatatgggctatggggtatatgcatctggcgagggggctgagccggaagagaagttaagcgttaaggctgaaaaagtggcaggcgaagccgctcgtttggctcgtgatatcaacctcaaagatcgcatgccagatgccggagatttgattccagcaactcaaccaaatgaaaatatagcctcaaaacaaattgaatcatatctatctgaattgagtgacgaccaggccaaagcaaaccttagtgtctggaatcgagtccagcgcacagatccggccttcgtcgaaaagaacagtttcggcgcagggcttcactcaatccgggcgcagtacatgctgatgcgcgcaacggaagttttcggaatggaaggaaccggttggggcgttgatatcaaagaagagcgcatagatcgaggtgtgccgcttatggagccaatacaggaccaatcaggaaaaataattggccagaaaccggtaagggacggggatggctcattattctgtttatccgtacatacaattcggattgaactctggtacctgcgagacggaaagaaggggcgcattccggcctatggacatacggattacatcaccaagggtggtgatggtgcattaaaaatggagaaagaagccgccaaaaaatcactgactgacgctacaaccaaagcactatcccacctcggatttggtgcagacgtttacatgaacatgcataacgacaatgaatacacttcaaaattgaatgagatattcgaaatcaaaaaagccagcgaaaacattgaagatatagtgcgacttcgtcaggaattagacgacgaccttacctccgttgctgaaaccctatctactggcgtgtctgttaacgaagttgaaaaggtgtttggcactattgcccgaaaactcgaagtgcaccgcaaggatgcagaatcaaaaggtgacactcagcgttctcggtacctcagtggccggttgcgccgcctcactgatataaaaaatggacgtatcgccgaactgaataaatccgaggagaaagcataa

SEQ ID NO: 189415 - DNA, 618 bp, Klebsiella oxytoca; identical to SEQ ID NO: 97647

SEQ ID NO: 189416 - DNA, 303 bp, Klebsiella oxytoca
atgaccaaagacgataagcgctggctggaagacgttgcatcactgggttgcgtcgtatgcagaaatcttggctacggcgctacaccggcagaagttcaccatatccgcaaagggcagggcatagcccagcgcgccgaccacaaagaaactctcccgctttgccctccacaccacagaaccggcggccacggcgtagctatccacgcagggcaaaaaacatgggaagaaaactacggaacggagactgaattgctcgaacaggtcactaacgaggtaaaggaattacgcttatgcagaatttaa

SEQ ID NO: 189417 - DNA, 165 bp, Klebsiella oxytoca
atgcagaatttaattccgtctctaagagcagcagataacgctaaaaaatgcggttggccaacgcgtccggaaagcatgaaattctgttcaggctcctttttcattctggcgggcggcgattttgcccttctctatgctcgcgcacgcgcgcgtttagggggctga

SEQ ID NO: 189418 - DNA, 297 bp, Klebsiella oxytoca
atgccgctggtcgccaccttccgtacagactggttcagagtcattaccgacctgaccagaaaaaacctcaccactcagcaaatcgccgatgaacttggcgtttcaaaatccgccgtcctcggctggaaatctggatcagagcctcgccatggtcacggtgaagcgctgattgctctctggtgtctggctaccagctcagaccgtaaaaaactccctactgtgctttaccgccagtggtggacgttccgccgccctgtttttggtcgggaaactgaccagaagggcaacacacaatga

SEQ ID NO: 189419 - DNA, 441 bp, Klebsiella oxytoca
atggctcgaccgaaaaaaatcgttgagacgccggggcaggaaaaagcggctctggaagaaaaaacgctcgttacagaggggcagttaattactgctgaacagaacggcgcgcagcagcaggggaacggcagcgacgaacagaccgtgcagcaaaaagtttcaaccctgcttgatggtactcaactggcagaacgtaacgccattctcgccacgctcaacgcgcagggcgctgctatcgttgcccgcttcgaagagtacgacttcaccgacattatcggccacccgctgaccaactgcctcgacttcctcaatctggtgcgcaaagccactgaggtaagcactggcggtacggcggagcaggtgacaaacgaggaaggcaaaaagcaaccagtacgcagcgcgccggtattaaccgaacacggctggcacgttccaggctaa

SEQ ID NO: 189420 - DNA, 1626 bp, Klebsiella oxytoca
atggatcaactcgccagccggttaatcaggcgcgctgacacgctgaaagcaaatcgccaggtgcacgaaagcgtctggcgggagtgctacgactacacctatccgctgcgcggggccgggttttcgtctgaggtgctggacgcacagagcgctaaacataaggttgcaaagctgctggacggcaccgccaccgacagcgcccgtatgctggcgtccgcgcttatgtcagggatgacacctgcgaatgctcaatggctgaacctcgacagcgaattactgcctgatgacgctaaggcgtggttgtccacctgtgcaacgctggtatgggaaaatatccacgccgctaactttgacgcggaagggtacgaggccaatctcgatgtggtctgcgctggctggttcgcgctgtatgtcgatgaggacaaggaagagggcggatttacctttcagcagtggccgctggcgcaatgctttgtgacctccacccgccgggacggcattgtggacacgatttatcgctgctatcagctcaccgctgaacaggccgtgaaagaatttggcgcggacaaggtaagcgaaaaaatccgcgacgctgcaaaaaataaacccgacgataaatttgatttcctgcactgcattttcccgcgcgatacctacgctgtaaatgcgaagctggcgcgcaacatgcgttttgcatcgttcaacgtggaagtgagcggcaaacgtattatgcgcgaatctggctatcacgaattccctgtatgcgtcccgcgctggatgaaaattcccggcggctcctacggtataggcccggtttatgacgcgctgccggactgtaaagagctgaacgaaaccaaacgcatggagaaggctgcgcaggatctggctatctccgggatgtggattgctgaggatgacggtgtgcttaacccgcgcacggtcaaagtcggcccgcgccgcatcatcgtggcaaacagcaccgaaagcatgaaaccgttgctcaccggcgcagatttcaacgttgcgtttaccgctgaacagcgtctgcaggcttccattcgcaaaatcatgatggccgatcagctacagccgcaggatggcccggcaatgaccgctaccgaagtgcatgtgcgtgtcgcgctgatccgccagttgctcggcccggtctatggccgttttcaggctgaatacctgcaaccgctggtggagcgctgctttggtattgcgttccgcgctggcgttttccctcccgcccccgagagcctccagagtgccaacttcaacgtgcgttatatctcccctctggcccgcgcgcagaagctggaagatgtgaccgccatcgagcgctacggccagaacatcatgcagttggcgcaggcgtacccggatgtactggacaacatggacagcgacgaggcgagcaaggttgtcggcgaggccctgggcgttccggcaaaagttatgcgctccgctgatgcggtcgagcaacttcgacagcagcgccagcagatgcaacagcagcaggcacaacagcagatgctgatgcaggcggggacggaagccgcaggcgcagcagggcagacagcaggcgcaattatgggacaacgactggcgggcaaccaatga

SEQ ID NO: 189421 - DNA, 234 bp, Klebsiella oxytoca
atgatcaaaaaagacgtaacccctgaagactaccggcgcattttcgaagaaatgccaggcgggccgcaggtgatggaagaactaacgcgccgctttggccgtgaggcatatgtcaaaggtggtaccgagggcgaccgcgaaacctgttaccgggccggacagcgttccgttctcgatttcattctgatgcaaatcaacaaagcagacggagtaaacgacgatgtggaagtttaa

SEQ ID NO: 189422 - DNA, 849 bp, Klebsiella oxytoca
atgtggaagtttaaacatttattcatgaacaccgaaacaggcgcagaagcgccagcaggtaacgcgggaggggataatgctggtaatggcgatggtactcaaaatccgggcggcggtactactgctggtacttcgctactcagcaccggcgcgggcgaagaaggcgcggatgactggctacctgaaaaataccgcgttatgggcgatgacggaaaactcaacgttgaaggctcagcccgcaaactggcggatgcttacacgcaccttgaaaagcgcatgggcagcggggacacgccgccgaaaactgctgatgagtatgcgccaaaggtagaggtcgagggctttaagtgggacgaattcaaagccgacccgcgcatgcaatccttcatgaaatcggcgcatgccaaaggcatcaccaacgatcagatgggtttcattctgggcgaatatgcacagctggcccccgaactggttaacggtgctgcgacgctggattcggaagccgccgccacgcagctgcgcgagacgtggaaaactgacgccgagtttaataaaaacatcggtctggctttccgggcgtttaactctctggcggatgacggcgacaaagggcgtatggatgaaatcggcaataacccgatggtgatccgcatgctggcgaaaatcggcgctgaaatgcaggaagatgcgccggcgggcggcgatgtgaatctcgaagagcaacaatcaatccgcgacctgatgaagtctccggcctatatggatccgaaacacgccgaccatgagaacgtttctgcccgggttcgcgcgtactaccagaagcgttacggcgatcaaaccgtagcgtga

SEQ ID NO: 189423 - DNA, 468 bp, Klebsiella oxytoca
atgactaaacatattggcgtcaaattaattaatgcgttccctatgacccgccaggcgtataacgattttcgtggctggcaacttcctgctgacgagaacggcgcggatgaaggttatctggttgaatatctggacggcggaaaacctaacaccgatcgctttgatggctacgttagctggagtccgaaagaggtattcgaaaaggcttatcgttcggtttctggtttgagcttcggccttgccattgaagcactcaagcagggtaagaaagtttcccgcgctggctggaacggaaaaggcctctgggttcagatggtgccgcaaaaaggtgattccgtgtatctgtcacatctggagttggtgtatccggttccgggcgatggtagcctgccgtacccgaatggcgcattcgttccgtgggcgccgagtcagaccgatgttctggccgaagactggcaaatcgtttaa

SEQ ID NO: 189424 - DNA, 294 bp, Klebsiella oxytoca
atgagtgaagcaaaaccgcaggacggcagcactgtaaaaggctaccgcacattaaccgcgggcgagattgagcgcatgaaccgcctcaaaggcgtcagccgccacttatgtagtttgcttgataccgagcgaggtgaattgttggctgtccgtaatggcccggcaatgttaagtgctgagcaggctcgggagattgatgaagctttgcgctgtctggcaatcgctcgcaccaaaatgcaggaagcctgtatgtggggatgccgtgcggtggcccgccctgatggcgactgctaa

SEQ ID NO: 189425 - DNA, 906 bp, Klebsiella oxytoca
atgtcatttgatgcaagcaagaacatgattaccgctgcgtttgttacgcagtttcatgattctttcgaaattgctgcacagcaaagggattcgcgcctgcaagcggctgtccatgaccgtggcagcatcaccggtgcgtcgttcaccatcaacgatatgggtaccattgagatgacccagatcaccacgcgtttcggtgataccgtctgggatgttccggaggccggtacccgtaatgcgctgatggccgactacggcgttttcgtaccggtcgagaaacgcgacctgcgcaagctgattgccgacccgcaggggccgtatttgcagctcaccctgtccgccgccaaccgcaaaaaagacgatgttatttaccgcgcgctgctcgatgcggtactgcgtaagactgagaacaacggcgcgtatgcatccgttaccctcccggcctcgcagaaaatcgttgctggcggtactggcatgaccaaagccaaactgatcgcagcaaaagcgatgttccgccgtaacgaatgtgacgagcagaacggcgaagagctctacatgacgtacaacgccgacatgctgacgcagatcctcagcgataccacgctgaccagcgccgactttatggcggtgaaaatgcttcaggaaggtgcggtaaacggtaactggctgggctttaaatggctggcttacgagaaactggactctgtgaccgccgaaagcgtcaccaccaaaaccgcagcagcctggtgtaaatccgctgtgcatttcggtactggcgccgagtataacgtcgatatcggcccgcgccgcgataaaaataacaccatccagatttccgttgatgcgtcctatggtgctggccgcgccaacgagaaaaaagtcgttgccatcgattttgtagcataa

SEQ ID NO: 189426 - DNA, 564 bp, Klebsiella oxytoca
atggcttccagtatctctatctgttctaacgcactgctggcgctcggcgcccatcccattaacagcttcgacgaagcgaccgaacacgcccgcctgtgctccaatatttaccctaccgtacgcaatgacctgctgcgaaaacatccgtggaactgcgcggtaaaacgcgttgtgctctcaccgaccagcaccgcgcccgcatttggtttcggctaccagtttccgctaccgggcgatttaatccggatcctgtccgttggccgtgagtatgaggatatcgggtaccgcgtcgaaggaaaccgcctgctggctaatcagaacgtaatttatctgcgctacctgttccgcaacgaggatgaatcgacgtggaattcgtcgctggtcaatctggccgaagcgttcatggccgcaaagctggcgtacgccgtcaccggctccgcgagtctgcgcgacagtctgacgcaggaagctgcatatcttcttcgccaggctaaatctatcgacgggcaggaagaaccgccggaaacactggacggctatccaacttatgaatcgaggttctga

SEQ ID NO: 189427 - DNA, 1992 bp, Klebsiella oxytoca
atgcgcgcgaacctgataaaaaccaattttacagccggggaaatttccccgcgcctgatggggcgtgttgatatcgcccgctatgccaacggtgcaaaaattatcgaaaacgcggtgtgcgtggtgcagggcggtgtcgttcgccgaccgggtacgcgctttgccgccgctgctaaatatggtgaccggacagcacgactgatcccctacgtctttaaccgctcgcaggcgtacatgctcgaattcggcgacggatacctgcgcatttaccagaacggccggcagctggtaaacgaagacaataccccctatgaaatcgccagcccgtacaccgtcgatatgttgtctgaggtgaactacgtgcagggtgctgacacgatgtttttagtgcaccagagcgtcccgccgcaccgcttgcagcgtaaagggcaaactgattgggtactggaagccgcgccgtttatcgttgagccattcgacgaaatccgcgacacgccggagaaatggtgtaagccatcggttaaagaattcgttggctcagaaatcacgctgacgctcagtgatgccgaacccgcagatgatgacgattcccccgcgtttactggcaccggctgggtagcggaggacgttggttcgtacgttcgcattaacagtggtctggtgctgattaagagcatcaccagcgcgcaggtcgcagtcggtaccatccgcaccgatttaagcgcgacgcaggcggcatcccccggagcctggacacgtgaagatactgtctggacggaggaatttggctaccccggcgcggtgacgctgtaccagcagcgactggttctggctggttccccacagtacccgcaaacaatttggtggagcgaaaccggcgtttacctgtcgtttgagctgggaacggacgacgacgacgcgatcagctttacgctgtcttctgaccagttaaacccgattgtgcatctggcgcagatgaatacgcttatcgcgctgacgtacggcggcgagtttacaatcactgccggcagcgatgcggcgatcaccccgaccaatatttcggtaaaaaatcccagcccgtacggctgcaacagcattcgcccggttcgtgtcggtaccgaaattatgtttatccagcgcgccgggaaaaaactgtatgccgtggcgtatgaccccgacagctacgtttcgtattccgccaatgatttaacggtgctggccgaacacatcacggccggcggcgtcctcgatatggcgtatcagcaacagcctgatgcgtttgtgtggctgatccgcgccgatggcgtactggtcacaatggggatcgaccgggcgcaggatgtagtcgcatggtcacgccagatcaccgatggcgtttttgaatcggtggcgagtattccctcggaaagcgacgacgtgatttatgtgctggtgcgccgggaagttaacggccagaccgttcgttatgttgaagtattcgacagcaccctgaataccgattccacagtaaccggctccagttcagaaggtgccaccacgtggacagatctttctcacctcaatggaaaaacggttgatgtggtggccgatggttccgtgatgccacaggcaacggtaacaggcgggcaaatcactctcagccgtaaagcgaaaaaaatcgaagtcggcctgcattacgaaaccactatccagacgctgacgcctgaaatctcaacgacagaaggcacgacgcagaacgcccgcaagcgtaccagcgaagtcacgctgcgctttatggaaaccactggcgcggagtgcaacggtcaggtgatccccttccgtactttcggccccaaaatccttaatcagcccgcaccgcttttcactggtgatcattatttcgggaaacttggctgggagcgtggggaagacactctgattattcagcaacgccagccgctgccgtttcacctgctggcgattattttcacgttctccagcaacgggggttaa

SEQ ID NO: 189428 - DNA, 453 bp, Klebsiella oxytoca
atgatgatccgtaatgcaaccgccggtgacattccggcgcttattgaactgggaacccgtatgtacctggaatcccgctattccgaaaattcaccctttgacgcggacaaatgcgcggaactggctgagagcctgatttattccgctgctggctgcgtgctggtggctgaaaagaatggccaggtgattggctggctcggcggcggcatcgcggagcagtttttttcccgccagctgatggcgtttgaatatggcctgttcgtcgctccggagcatcgtggcggcagtgctggccctcggctggcccgcgcgtttatcgagtggtcgaaagaacacggcgccgcagtgatcaacatggggatcactactggcgttcatgccgaacgtactggccagctttattcccgcctcggtcttcaacgtaccgggctgctttattcgatggaggtttaa

SEQ ID NO: 189429 - DNA, 489 bp, Klebsiella oxytoca
atgtgtacaggtgttgaaatcgcgctggtggcttcttcggttctcgctgctggtggtgcagtggccagcggccagcagcaaaagaaaatggcgaactatcaggccgcgcaggctgaagccgacgccgaagcatcaaaagcagcggcgaaagttgaagcggaacgtattcgtaaagccggtcgccagcaggcttccgctgccaatgctgcgttggcagcttcaggcgttgagacgggagagggaacggcgttgcgcgtcacgtcaggtattaccggggatgcggagcaggacgcgtaccagacgatttttaacggaataaatacctctaaccgacttcagtcacaggcgcaggctgaccgaattagcgggagtaacgccgcgacggcaggatacatcaatgcgggaagctctcttctagctagtggtggcaaaggctatgacggctggaagaaagcaaaagagggtaaatatggactgtttgcggagtaa

SEQ ID NO: 189430 - DNA, 2715 bp, Klebsiella oxytoca
atgagaataccaaccggtaattttggcaatgtaatgccacaagctcagacttcgcgcgcaacagtttccaatgctggtgctatcggaaatgcggtatccggtcttggttctgctctcgggcaggcgagtgaagatttacagaaggtacaggataaagcagatttagctgctactcaggcaatcctcacggatctggaagccaaatccgttgaccgttgggaaaacccacaaacaggtgccatggtgacgcggcagggatttaattcctcaggcgttttgacagatatggataaggcggattcttccgactatgaagaagcccgtaagcgtgtacccgttagccagattaactactttgatgctcagtggaaagctgggcaaatccgcagaacaagcacctacagtacttttgaacgctcacagactgatgatgcccaacgtcagcagttaaacgctatggtcagcgcatcagtagagcaggaggcaagcgcctacgataatccaatgcaggcaagtttaaacaggggggcacgtaagcacacaattgaactatatggacaggctcgcgggtggagccaggaaagcatcgattctgcaatctcagaagcaaatcagagagcaatggaacagcgagcgcagaattacgcggtaacaaatccaacaggctggttgaatggtgattttccgctgatgaatagcagcaccggcgaactcgatatgcgcgccgttggcctggtggagtccggcggtaagcaccgcaatgctgacggtagtcttgttacatcgcccaagggcgcacagggtgaatttcagttgatgccggaaaccgggaaggaactggcggataaacgtggcgtggaatacaaccctgacgatccggtgcagcatgcgcagctggcgcgcgattatgccgggcagctcagtaaaaaataccagtcagaaccactggccggggccgcgtataactggggcatgggtaacgtcgataaactgatcgctaaagtcggcgacccgcgcaaaggcgaaatctcaatggcggatttcgttaagcagctgcccaccgaaacgcgcggttggttgtcccgctacaacaaaaataaaactggtcttgacccggtagcggtaaacaaaatcgacaatatcgccgaatcgcagattcgccagcagcgtacggcgctgcgccagcagattgacccgattctcaataatacgatggtgcaactgtataacggcgaggtgccggatgctatgccgaacgcctctaccattttgtttgcgtacggtgagcaggggcagacagcagtcaagcagctggatatcgcgatcgataacgccagaacctttcaggctatccagtacgtcacccctgcagagcagcaggccgaactggcgaaagtgaagccgcaggcaaacgacccagattacgcactgaaactcgatgcgtatggaaaacttagtgcgctggtgcagaagagcaacgctaatattcaggcgcagcgcgattccgcccggtttaacgacgcgctgatctccggtgagaaactcgacccgagcaacaaatccatgcagaaggcggcggacaatacgccatcggcgcttaacttccgcattaacgacgccacaactcacgacgctatcgtgcagcaggttaaccagactggcattatcccgtcgcaggttacatcgcaacttaatgcgatcgcccgttccagcagtcccgacgtggtaaagcagggctcgaccttatttaacgcgctgtacgatacagatcctgcctctgtgggcgatatgccaaaggatatgcaaagcttttacctgactgttaaacaacttaccgattcgggcatggcgtcagacgaagcggtgaagcaggcgcagaacgttacctataaccagactgatgcccttaaatcgcaattgtcttctacgcagagcacgaaggaatatagaaaagaacgtgatagcgcaatggattccgcagtcagcagcatgaaaccgtggtacagctttggcggccccgccgcggatgacccaaatcctaattctgtaaaattccgtaatgactaccagtcactttatgacatcaactatcgcaattcgggtggtaatgctgatattgccaaaaagatgactaatacccagatcgcccgcacctggagtcttagcgatgtaaatggcagcgcccagcttatgaaatatgcgcctgaagcgctctataactatgggccgtctggttggcaggctgcgcagtggaaagaagaaaaagagcgtctcacttatggcgaacgtgaagaaaaaattgaaaccagcccgacccaactaggaattacatcaggttcaacgcctgttattacatcaaatatcccggaatcgcgaattggtggcgaactggaaataaccccggatgtgatgaccccacgggatggaatgtactcaatagttattcgctctaaagatgagaatgggattccgaaagttcagctttataacgataaatttggccgtcccttgcgctggaaaccgtcgctggaagactgggaaccgtataaaaaaatgcagcaggagcgggaacggcaaggcgaagaggaaatatcacgcgggaaagatattcggggctttaaggaaaaacatcgtgcactcgatgaacaatatcagcgtttgcatgatgagcgtatgaaccgggttaaaaactacttctcatggagcaatgaataa

SEQ ID NO: 189431 - DNA, 2880 bp, Klebsiella oxytoca
atgcctatctatccgcaatctgatattccgcagagcgtaatggataatgctcttcaggcgccaacgggttttgatgtatcgctaccagaaggaactaacccggaaccgctgcagcagcaaccgtctgtatgggatgccgcttttcgtcagaataacctgctggctagaatgttccgcccggccaaacaattcgaaccggcggacgggtataacccttattctgataaaaacgaactaaaggggtacgaacaatggggatccgcctttgcggattcaaaatccccagaggaaaccgcctggattaaaaaccagatagacgatgaaaacgaagaccgccgggtgttgtctgaggcaggcactgaaggaactctggccagtatcgccgccggggttatcgaccctgtcacggtcgcatcaatgtttattcccggtgcgcagggaagcctagctgctcgtattggctctcagattgctattggcgccacgggtaccgcactgagtgaggtcgcgcttaataaccagcagtacaccaggacgctcggggaaagtgcagcgcatattacagccggtgcaatgttcagcggtctttttgcaagtgctggatcgttgatatcccccggagtcaggtccgctgccacacgtgaaatggccgatgcacttgaaaatataggtacggctaacgctattaaccgtggcatggatagcctaccggatggcggaagcgtgggcgctatgcggataagacaggcaactcttgacgatctcactattgacggaggaaaggcagcagatattgctttgaaagctggcgggtacatgacgcctatatcacgcgttatatcgtcgccgtcacgcaacgcgcggataacggcactggaactagcggaaaataactttgcgctgcgcggtaatcaacgcgggttcgagactcctgtagctgctgaaacccgtgtacgcggctggcgaagggaggaggcggcggtagtggtcactaataaacaggcatattccaaatataaagctgatggcggagatctcaattacaccagatttcgtgaggaagtcggcgatgccatgcgaaatggtgacattcacggtaatgccgccgttcaggatgctgcgcgtgcattgcgtcaggtggtcgatagggtaaaagtcgctcagcaggatcttggtttactaccacctgatgcagagctaaaagcgttgggtcagaccagttacttcccccgagtctatagagtggggaaaattgttgaggaacgcgataaattccgtgatcttttagttaactggtggtcgcgtggagcttcggctatgtcgcgtgaagatgcagagatcgctgcagacgcaacgataaataaaattgttggtgcaaaaataccccaggattttatgaatgtttttaccgtcaaggtaccaggcagttctcgtcagcgcactttaaatcttccggataatatgatgcgagactacctggagagtgacgcgaactatgtgttgcagcggcatatcagggaggcttcaccggatatcgaattaacccgcgtttttggaaaccgcaaccttgagtcccaacttaaggcgatacaggatgaatatgacgaactgatgcgagcccgcccacaggagcaggccaaattagctaaagcacgtgagaatgacattcgggatatcactgctatgcgtgatcgtttggtcggtacgtatggcatgcctgatgacccatcatccttctttgtacgagctggtcgcgccatgcgcaacgtaaactttgtaactaaactcggtggcatgacagtctccgctattcccgatgttgctcgcggtgtgatggtcaacgggttcagcaaaaccatgaagggttatggtgcgttaatttccaaatcaccggcattcgctgctaacaaaagcgaaatgaaaaagatggggattatggttgaaacggtgcttaactcgcgctcgaggttgatggctgatctggttgacagttctacgcgcacgaacgcggctgaagctgggctggatcgcgttactgatgtgttcggaaagcttacactgatggggcaatataacgacatcaacaaagcgattaatgggatggtgactgcagatagtattctgtctggtgcggctccggcttccaggattgcgaagcttggtatcagtccgtctacatccgcgcgcataaacgaacagtttcgtaagtatggagaggtgcttgatggttggcacatcggtaattttgacaaatgggatgatgattatgccgcaggcgtgtttcagtcggctgttatgaaggacacaaacaacatcattatcacgccgggggtaggggatacgccattgtgggccagttctccaattgggcgtacggtattccagtttcgctcttttacgactgcatcatataaccgtgcaacaattggtggtttatctgaaggtaccgcgcagttttactacggcacagcttttcagattgtactcggtgcgctcacgtacgctttaaaacagtctgctaacggtaaagaagtggattggtcgcctcagaaactggcgattgagggaatcgaccgttccggtatccttggccctctgatggaatacaacaacatggcggaaaaggcctctggtgggatgtttggcttaggtccactactcggcacaggtacacaatcccggtacgccagtcgcggctttatcggctctgcgctgggtccgaccttcggtctactggataccgttaccgacgtgaccgcaggtgtcctgaatggcgacgctggagaccgggtcctgcatagcgcgcgaacgctgttaccgggcaataacctgttctggatcgcgccgctgataaaccaggtcgatcccggcatgcgttga

SEQ ID NO: 189432 - DNA, 132 bp, Klebsiella oxytoca
atgtttacacctacccatccggaacattcttcaatgcagttactgttagttcgtgtaactagactatcaacgcatgccgggatcgacctggtttatcagcggcgcgatccagaacaggttattgcccggtaa

SEQ ID NO: 189433 - DNA, 342 bp, Klebsiella oxytoca
atgcattcagattacaaaactcgccttactgctcttagcgataagctcaccgacgtagttctggaagaagccgatccggataactggccgggggcagggaaggaaatcacaaagcacactaaacaggaacgcggcgaccgctactggcataagaagaacgcggccgcatcgctcacgctgctggtaaaagtccattcgctgattggcatgcatacgcgcgggggaacgcctaaacccggcgaggatccagacgatgaagcattccgcctggggcaacaggtatctgcggctgaacgggcagcacaggaagttatcgaacgcatacaacagcggaaaaaatga

SEQ ID NO: 189434 - DNA, 1611 bp, Klebsiella oxytoca
atgatttcattcgtcgcctttttcatcatatgggcggagcagatggggtgggaggttcccgactgccattatcgagcctgccactggctggaacaccgtggggatctcgcggtgcttcgctgtttccgtggcttcggtaaatccaccattctggcggtgtataacgcatggagatattaccagaaccgccagtaccgcattcttcaccagtctgaagccgatggcaccgcgtacaaaaccagccgcgatacgcagaacgttttacgcaatcacccactgaccaaaggcatgctaccggatggacagggaaccgttgagcagtggtgggttaacggttcgctggatatgcgtaacggcagcatgtacgcaaaggggatcctctctaacgttacctcggcccgtgccgatgaatgccagaacgatgacgttgaagtaccccgcaatatccagacgccagaggcgcgggaaaagctgcgttatcgtctcggtgagcagacgcatattcttgtccccggtgggcgaaagctgtttatcggcacgccgcatacccacgatagcctttacgatgaggttgaatctatgggcgccgactgtctgaccatcaaactattcggtaaagaatttcgtatcgaggaaaaacaggccaccgcgagccgttactcgttaccgttccggccggaatatgttttcgtcggtattcacattggtgcgcgactgctcgttgaaggcgttgattatcgactgactgatgatggtatcgagtttgccgaggctcccggtaccaccgttgactgttacgccgattgtgaatggccagaaaggttcaccccggaggaaatgacaaagcgccgtcgtgagactcgcacaatcaacgaatgggacagccagtaccagctgcatagtaaaccggttggcgaggttcgtctcgatcccgaccgtattcgcgagtacaacgtacagcctgaaatccgatacgcgaaccgctcctgctcgatgtggcttggccagacgcaaatcgttggtgctgtcgcgtggtgggatgtagccacaggcaaagttaaagctgacgcctcggcgttctccctgattttcaccgacgcgcgcggacatctgtactggcatgtttgccaggggcttacgggcgagctggcagagtttgacgacaacgacaaaatcaccggcggtcaggtgatgcagattaaagaactggtgctgaagtatcagatcccgctggtatgcgttgaagtgaacggcccgggcagcttcgccgggaaactgttgattcaggcgctgaagggtaccggctgcggcgtacgggaagagttcagcgtcaccaacaagcaaaaacgcatcctcgatgccttcgaggcaccgctgtcctcgcggttcctgtgggcgcataccgacgtgctcgacggcccgatgtacgaccagatgcgcgactttaacccggcgctgactaatcagcccgatgactttatcgactccggatcgggcgctatcagctcaacaccagtgcgcattggtaaattggtcgggattccgaccgaacaggcgcgggaacattggcaaccaaacgatggcgatcacatggtcgccgtagattactag

SEQ ID NO: 189435 - DNA, 2463 bp, Klebsiella oxytoca
atgtcggtaccgaaccagacaccctataacatctataccgccaacgggctgaccactgtctttgcctatgaattttacctgatcagcgccagcgatattcaggtgaccatcaacggcaacgaagtaacgtccggctataccgtctctggtgtgggtaatactggcagtggcgagattacttttctgaccgcgccggccaatggcgctacggtcatttttgagcgtgtaacgccgacgtacaggctcaccgattaccaggacaacggcgacctgctggctgacacggttaacaaagatttcgaccgtctctggatggcgatacagcgagcgttttttgatctcgggtttgctctaacccgcccgtttttgggcgggccgtttgatgcgaagggataccggatttctaatcttaatgatccagttaatgaccaggatgcggcgacaaagaaatatgttgttgaaaatgttaacgctaatttctcacgtacgctaagggttccggaaggaagtattaatattttacctgatgctgcatcaaggaaaggtaaagtccacacatatgattcagccacaggacaaccgcttctaatacctgcggggcaactatccgtgggtgacatactgaacctgtcaagttctgatggtcaaaaatatgtagggaggtgctcaaatatagcatctttaaggtttattgaacctcaagatgataggcagctaatagacgttgtttgccatacttcacttgatacatcaaatccttatcaaattaattccggtggtaaatttcaggctgattactccgattctactacgttagatgataactggctatgcatagtcactcacggtggaaaacgttggaaaagaataatcggggatactcttcttaatctggcatggtctggggttaaacctggtgacgacatcactactccgttgaaaaatgcaattgcatacatcaaaaaaatatttatcgctggttccggtcctgcatttactcctgtaatcgcaataaatgcaggaaactacattatatcgtctacaattgccaagccgccgtttattaaactggtctgtatgggaagtgttgacattgatgcatccagtattacgtctggagtgctttttgacgtatttaacgacccaactatcccaaaaccaagtttctctggtccgggcatgaactgcgacgatatttcttgcattggcgggacacttacggttacgggtagcggaaagactgaaggcggggtgactgccttttcctatggtaacaaatcagccggtcttgctccgtgtcgcggggttggtttccgaaacgtggtggcgaagttttttggtgccgggctttctataagaccaaatgatacttaccttctgacattttctgattccaggctggagcaaaactataccaacttcatcaccagttctgtaaccagtattaacagtggtgaggctattgtactgtcaaatatgatatttggtggttctggtaacgaccatatctatgttaactcgccgggaatggaattgatttttgataagtgcaaagcggattacgcctatggtcatgttattaacatcggaacgcaatgtaacttttcatcgttgaagtttaccaatttccgctgtgaagagtttcgcggatactttcttaccgggacaccatcagccctggggaatgtgaatatattttttgataatttaacaatccttggtagaccgtatggcgaaacaaccctggctaacagtccttcacgtaagttgttcaacatcggtagcgggataaacgcaacagtcaggggatttgaggcgtttgttgaaaaacgtccatattcttctgatatcaacatttcaacagaagcgggcggaagtctgagaatatctgaatacctaatccgtgaatatcggtatctgacgggtaagagttatattctgaatcgtggatctgatttttctgatgaaactgtgggtactgcgatcacctcagcatcgaatcaactggttagatttaatatcaacacagtaacagatgttagcgggctggttatctctctggaaggtgggaaggctttgcagttaactggaagcacagcatcatcacgactaatcctctttagtgagtacacccctgttcagccggggaatattgttgctgccagtggttctgtgcaggcgctcagctcaactggtgcaataaactacggcatgcaggtgtcctggtatgataaggacctggtatttatgtcaagctcaactgtcagtacgtacgactttatcgctgcgtataacgacacaacgctacctaattactctgaggggagaacgagaaagctatcatcatctgcgtttgctaaaaccgcaccgccgggtgctttctttgcccgtgctcgatgggagatatcagggtttgtgggtgcaataaatattattaacttaatagcatttaagtcattgtag

SEQ ID NO: 189436 - DNA, 225 bp, Klebsiella oxytoca
atgaagaatttaccggatgtggcggcgggaacgtcgtatatcacatccaccgttagcggtagctactggctgctgcaacttctcgataaggtaagccccagtcagtgggcagcaatcggcgtgctggccagtattgtttttggattgcttacctacctcactaatctgtatttcaaaatcaaagacgaccggcggaaggcgcaggactatgagcaacaaagttaa

SEQ ID NO: 189437 - DNA, 537 bp, Klebsiella oxytoca; identical to SEQ ID NO: 97658

SEQ ID NO: 189438 - DNA, 360 bp, Klebsiella oxytoca
atgaacggaaaaaccaaactggtaattgttggtggcgtgctggcggtatgcgccggcattttctgggctggttatctgaaggggtggtacgcgcattccgagcacgtaaacagccaggctaaagccagactgccaaaacaggaaaaagcggtagcagctggtgagcagaaggcggcgacggcgaacgacgaagccaaagttatttaccgtaccgtttatcgtgatgtggtgaaatatgtcaatgactcgaatcgtactgtgtgcaagtttgatagtgacgctgtgcagctgcgccaacgagcaatcaatgcggccaactccatccccggatttgatgaaccggccgtgcaatctaagtaa

SEQ ID NO: 189439 - DNA, 1197 bp, Klebsiella oxytoca
atgtttgattcatctcttatcagtgaagataaaaatgctttcttccattacattaatgccaaaggagaggtgtcacagcaaagtgtaactcgcgtagttgagcgagatgagtttttccaaggctactcaattaatcgaaaggcattcaggacttttagaaaagatcgagttctgaaaatgttcatgtcggaagatgaattgcttaatgctactttggacaaagaatccatcgtaccgaaaacgcagcctcgccctagtcgtaaattggaaagagggaataatctagaaatctgttttactggttttaagcaggctgacaaaacatatttaaccgaattagcgaagaataataacttatctgttaaaggcggtgtttctgcaaacctatatttcctatgtgtaggagataacatggggtggaggaagatcgaagaagcaagggctcgaaacgcctttatcataagcaaagaacagtttatcacctttatagagactggcgagattccgtacgaagcacctgagttagatgttattcatgaagagaaaatcacttccgaagtagattcactgaaaaaagatttggaagcgctatcccttacatttagaacgttaagggagcctcgtagaagcaccgctcttattgcaaactttattgatggctatgcagccggatggaaattcgcaatcaaagaagtattcaaaagcaagctagacattaaactaacaaaaataacatttgaaaaaaacacctacgatgtatggacgcaaggaacgtcttaccagttccagcgtggcgatactttttacagtgacaaattaggttacacagattggagtgagtttttaaaattacctcatgcgatggtattgcaaataaaatatgactgtttctccggttatgagaccatcgcatcatttgaaggaagctttactggtgatttcaaccctaatcgtctaattacccccagaaaactaactgatgcaccaatcctcatggaaagccaatcatatgatccgggcaccgttacggttgagtttttgactccagacgagaccaaaaaacgcctgataacaataagcacactctcaatgacccaggatgacttcatatcattgcttcagtctgggtgttattgggagaggaaatcagagcaagcgcctaaattagtggatttgttcaattatgaccgttcgtaa

SEQ ID NO: 189440 - DNA, 264 bp, Klebsiella oxytoca
atgaataaacgctactcaaaacacggcaagtacgcgggaagtattcatatcgtggcgggcgataacttacctaaagtcgtctggataaataagcacgctggaatttgctgcggcttcaccatccgcgtattaccgcgcagggtaggcaagaagcgttatcaaatcatgaaagatggtgattctttcggaattgactttgcgttatctgaagcacgcaaaacgatagatcgtattattaataataaccgctttattattcattaa

SEQ ID NO: 189441 - DNA, 240 bp, Klebsiella oxytoca
atgaaacgtctttatgctgaacagattaataagatgctggaagattattatttcaatctggaaaacaacccgcagggccgcgattcacattacggcgttcttgctagcggaatccagcacatctatgccgttgcattctgcctgaatgacgacgacacccttagcgagcttcgcccattcgtcaacgccatcatgaatggtgatataccgtcaccagtgtttgcggggattgctgcatga

SEQ ID NO: 189442 - DNA, 264 bp, Klebsiella oxytoca
atgagcatgttcaccggagagaaattctcatttacacaggaaatgctggttcgtgacgcgatggcgagcgcacaacagggatttaccgttcacctgaaaaatggtgcccgtgtagttgttactgccgagagcccgtcgattgatttaattatttatggacttgaaaagacaattcgtggaaatcacgagcgtgatcgcctgacatttatagactttgtttattactggcatgagcgagtatttaaatcaattaaacgcaaataa

SEQ ID NO: 189443 - DNA, 228 bp, Klebsiella oxytoca
atgtcgatcacgtcaataaaactggatggtgtaattagcgatccggagtttgtggaaataagcaccaacgcacggaaacacgaacgcgctcacgtccttggcatgctccgcgatttcgtcggccagctgaaaaaggaaagcgccaccccggaagagatttattcatcaatcgaacagtgggccaacgcccgcaagctaaccatcagtgagggaaaataccatgaataa

SEQ ID NO: 189444 - DNA, 546 bp, Klebsiella oxytoca
atgaataacatgatgcttgacgttagggcattgggcagcaacgacgactcaccgttgttcgctgttgagtgcgtcttctttgaaccgtcaaccgggcagcttgggcctcagttctaccgcgcgattgacctaaacacggtcaaaaatatcgatcctgcagtggtgatcgagctgctgaaaagggacgccgatcagcgtgtagagatcattagcgcgactcacactgaattagccgccgtggccgaatttctcggattcgtggaaaaaaacgcatcgaaacatgcggagctccagtgctggacaagatcggagggagcggtaaggcagctcatttccgccgtgaagaggcataacctggttgtgtcccgcatcgctctcagggtctgtagtttgcctacgctggttatgctggcgggcgccactggttacgttccgcacccgcgccgctcaacggccacttacatgctgactgacgccgtatatcaggccgagcaggtttgcgagatctggcagcgcctgacctccccgcactttgaatcactgtga

SEQ ID NO: 189445 - DNA, 228 bp, Klebsiella oxytoca
atgcatccgcgtctttccgttatatgcagcgcaccgctgccagtctgcaacagggcgcttgccgccctgaaatgcttcgcccgcggtcagcgcaatttctcccgcgtcatgccgcatgcctatctcgtgatccgtattggtcgccgctggcgcttgctcagtaagaacggcggccagcagtggcggctgatgacccacgaaacctacaaccaggaataccgcaaatga

SEQ ID NO: 189446 - DNA, 174 bp, Klebsiella oxytoca
atgaacacgcttgatgccgttgtgacgcgagttttggacgttcgtccatatcgccatttctggatcgtcgaggtggaggtgttgagctggggccgatacagcaacacgaccatcatccgcgatagcgaaaaagaagcccgccaggttcaacccggcgacacggtaacgatctga

SEQ ID NO: 189447 - DNA, 156 bp, Klebsiella oxytoca
atgaacgaagaaaccaactaccgccgcttctggcgaagcgcagttatctgtatcgccctgtgctcgctgttgttctggcttccaatgggctatctcgcctttcgcgttttctctgtggtgtgggaggcgctgtggttgcttattacaacgaaatag

SEQ ID NO: 189448 - DNA, 624 bp, Klebsiella oxytoca
atgtctggcgatattaaagcagtatttgatagcaatctgattgcaactcaggcaggtaccgttcaggtatttcattttgatatgacttcccgtgagtttatcggtaccgaagaagtttatattcatgtcggtgttggcctgcctgcattttcctgcctagaagaaccaccggtacaaagtgaatatcaggttgctgttcgttcggaagataattcgtcctggtctgttaccgatgattttcgcggtatcactgtctatgacattcggacgctggccagtcacgttattaccgagcctggacctatccccgacactgtaacgacctctgcaccagctaccgcatacgataaatgggacggttctgcatgggtaacggatgctgattcacagcatactgcggatgtcgctgctgctgacctgcgaaagaaacagatgattactcaggtctcagccgaaatttccattcttcaggatgccgttgatttaaatatggcgacggattttgagaagtcccgtcttgctgctttgcaggcttatcgggtgctgcttaaccgggtagatacatcgtttgctcctaatattgtttggccggttatgacaactctggagggtggtaatgtctaa

SEQ ID NO: 189449 - DNA, 426 bp, Klebsiella oxytoca
atgcctttaattacgattactgcaaagcgcgacgggttccgtcgctgtggtgtagcacaccgtgacgtgcctgtggtctggccggatggcagttttacggacgagcagatcgccatcctgcgtgctgagccgtcgctggttgtccacctcggcccggtcagtggcgatgtcgacaagttgaaggccgcactaggtcgtgttcaggagctggaatctcagctggaggacgtgaccactgaccgcgatcgtctgcaggctgcgctggcacttaagacagtaagcctgtcaccgggggagaaggataacgccgttgacgatactgcagcggctgagtcgtcagccaaagcgagcttgtcacccacggccaaggagaccgccgctgacgatactgcagctgttgactcctctgccaaagcgaaaaagtaa

SEQ ID NO: 189450 - DNA, 393 bp, Klebsiella oxytoca
atgaaaaaattactcgtactgcactttaaaggtagcgtcagcgttagcggtaccggcagtggctgcggcagtcgcgtagtagcgagcctggaacgggataacgttggtgccatcgttcagcgtggtttgcgcgccgaaggcggcgccatccagcgccagcggggtaccggtacggtcaaggatctgtacgccgacgttagtcgcgccgcccgcggcggagttctgcagggccagtaccgttgggttggcgctgtcaatcgccgtgccggtaaacgcgacggaggctttggtggcgacggtggtatcacaatcattcagctggatattgagccgacagccgtgctggtgttgcctgcggtcgccagctttgcagaacgaacctggcctaactga

SEQ ID NO: 189451 - DNA, 3240 bp, Klebsiella oxytoca
atggctgaaagagaacaagaaaaaggggtgtcgccatcaaaattcatgcgcgaactgcgtcctgaattttactcggacaccagcgaccgcacagcataccagctcgatgccccggcacttgagtactacctcgatagtattacatcgcgcaaccagacccatgacttcgagatattttgtcgcaagttgtgcgaacgcacgatctgcccaaacttaaagcctgctaccggtccggagggaggaggagacagcaaagccgattcagaaactattccgattgccgacgagattgctactctcacgtatgtgggtgacgcaaatgccgctcaggaacgttgggcattcgctttcagtgccaagagaaagtgggcggaaaaagttcgcaatgacgtcgcaggtattgtggcgacgcagcgcggctatcagaaagtctattgtgtaacagcgcagttcgctcgtgcgaaggatcgagcccgcgtcgaggatgaacttacgaaacagtacggtgtgaccatcactattcttgaccggagttggattgttgatgaggtcgtcagtaacgatcgtaaggacctcgcctttaattaccttggtgtcgggcaggaggttgcagactcaaggcgtttggggccctcggactactcccgctcgcagcaacttgaagacatcgagaaaacgctcggcaatccggaggcattttccgggatggaaatgcaacgagttacggaagctctggtggccgctaagttgtcgcgcaatctagagcgcccacgaatcgagacggatggtcggcttgctcgtgcaattcgactcgctgaacaagatggaactcatcgccagaagttggaagcgcactacgagtccatctggactgccttttggtggttcgatgacatcgcgtatttgaacggaaggtacgacgagttcgcgaatcttgtgatcgacacggatcacgctataaaccttgagtttctttgtaatttagtacaattactatttaactcggtcattcatcagcatttgacggtcgacgaggctaagcttgaagagcgcgtatctagattgaccgagaggttaaagctaattgctgagaataaagaacgtccaaacaatgcattggaggcccagtcgtcgttactcgtcgtagaagttaatcaggcgacactcaagaaagacactcaaaaactgagtgcgctatggccgcagttctcggatgtcgtcaagtgtgcgagaggtctcggtgagttttctgctgagcgtttgactaaaatgattgaggtgttcgggatcgtcgccggtaaggacagtggttatgtccaactggttgacgaggtggcggcgtttgtttctgagcgtaccggtgaggctcagggtgcgttagtgcttctcaagcgagcgcaacaactcgatttcgaagataacttcgaaatgattcgtttgctgggcaaagccgcacggcaactcactaaaaaagaatatgccgactctctgatcgaagcgctgcaactgctcacgtttgcttatcgtagtgccggattgctctgggctgcgcgtgctacatgcatttttgcaatggcttcaatgttcatcgaagccgaggaggacagtgaccttccggcttcgatcgtacccatggtcatgaccctcgcttggattgctgtcgaacttcggcatcttccagacgctctcgaagccgttcggttagttcgaggttgtacggcgacgcttccgctcgacgactcatcacaagaacgtgtcgcgaagcgacttacggaattcgatcttattctggcgagccaaattttaaatttcacagcggaagaacttcaacacattgtgcgattgcctgacgttcttggtggactcggtctgcaacagagtcgaaactcgctgatttacgcgctcggccatgaagccgaacttcgtcgggagggatcaataccgcaagaagagacgccagagagtgtggccgagctatttactttgcttgctagtcaaccggcatctagcaacctgcatggtcctgtcatctttaacgaggcagactcgcagtgtcttgtctcaagagtgctaggcattcgtgtggctgtttttcacccgagctccgatgccttagttcttgctgcagaagcagtaataggttccgtcgaagcattttttgcaaccgcaatcgaaagcggcgccgcagcgcatacagagaacttcactatctcacttcaagatagttctgaagtgctggcaccggactttacgatcaatactgatgaaatgacggcgatagttcgctggccgactggactgttacccgctacatttgcccgacaggccgaagtccagaagatgctgatcggattggcagctgagatttttgctgccacttgctacgtggaggatatgcggaaaacgctcgaacatctcttcggcaatgaggcggtgcttgaccgcatcagcatggtcgtagttgtcggcaatagtcggcaacgagtattcaaggaagggctatcgaagctcagcgattggacgcagatggcgatatcggagttcactcttgagccgtcgcgtcccgtaatcacccgccgtttattagacacgtttgaggatcaagaaagtcgctcgacggtaggaaaacgaagtgccccgttcccaacaagcgaccatcgcgatcttggtgttcgctctgttatagatgttcatctttggagtcaagccggttggaccggaactgcttttactcattgggggccctcgtatcctccagcggttgcgctcatgtttaagcacgaggatgccgccaggaagatctttgcacgttggcgtgaacgtctaggaacggtcgataagcaggacgaaatttacatggcgattctgcgtggagtctccgttgaccatccggcgcattaccgtgttcttatcacttccaggctttctaatgatgagggcgaaacgtcaggcaagaccttcatgatggcatcacgtatgcaaaccatgcatgcagaaaccgatgtcaacctgagccgctttcttgatatttatgggcagtcacgcgcgtatttgcttcttcccgcgatatttaatggaggggctgagccgaagtttattccagagcttgcaatcctaaagcgggagcttagtgtaaagaacgctatcgacgtgaccgagcatgacgttgaggtgatggcacttggggctgaagagtatcgccgtcggttcggaacatctgggcccagcaacagaagttag

SEQ ID NO: 189452 - DNA, 318 bp, Klebsiella oxytoca
atgcagaataacccgtttgagaaaatcggtcacgacattgccgtcgaaactcacccaaagcctgtatctcttccccttcccggttcgaacgcctatagcgaccttccgcaattcacgaaacatggcgttctgtcatttcgtcacactatccaccgccaagagctgcggcagatagtccccttagccgaagtagaagcgtggatcgaggaacgcaaacaatcctcgcgctccggcagcagatcaacagggccagacgtcacactacgcaggactcgccccgtcaatgggctcattgcagtatcagataacagcacctaa

SEQ ID NO: 189453 - DNA, 1293 bp, Klebsiella oxytoca
atgtcagagaataatccacacgatgccgcgcagactttgccccaggatcgggaaacgctgtaccacttggtctggagcgagcccgcggaacgtataactgtgttgtatgacatcagtactgagttactggcaaaacgatgcagcgaaatgcggatacccaggccgcttgccggttactggaaggcacttgcgcatgggactgcacccgcaattccagccctgcccgctctgagaaatggtaaggcggaaaaggtacgcgagaatgacaattcatcaatgcaatttcctgccattacggtatcaaaatcagcatattcagtcgccccaaagcaagcttctgttacgagtaatggctatggattgataaatgatctcaaaacgtatctgccagtctcttcggttacagaagatggctattataaacctgcgaaaaagaaattactggatctcaacgtttctgatacgggatttgagcatgcaattgagttcctgagccggttcattgaagctctggggaaaaagggttatcgggtaacgctggatgctccgggagaaaggctaaatcgtacggatattgatattaaggaagatctaaaagcgggaggatatcgctgggagaatttatggcggccttatacgccaagtattatttgtgtcggtgatatgtactttgcgtttaatcttgctgaaatgacggaatatgttccggcgaaaaaagtcaaaaaccgctatattcgtgacgaacagatgggacggtggattcgggggaaaaatagtgagtctttgatacacgtatcaaaacatactctacctaccgggcgatttctattgcagctttactcgccttattcttccgcagaatggttggtacagttccggcagacgaaacagtgcgggttaattagccagatccctaagatgatttcggcgatgcaggaggctgttccgctcatttcaaagcagctagaagaggccagaataaaagctgaggagcggtgtgtccagcgtgagcgggaattagccatatatcttgaaaaggagcggataggtcgggaacaggaagcttaccgtgccagccgtgccgagctcaaatctattatggttcagtgggctgaagataaacggctggaacagttttttcacgaagcagagtcagatacggcaacgcttgatgttgagcaaaaggtgcaggttatgaaacggctacaactggctcgccagttcctgtcagaggatacggcgatagaaaggttgctgaagtggaaaacgccgcaagagcgcttaataaaataa

SEQ ID NO: 189454 - DNA, 1041 bp, Klebsiella oxytoca
atggattataaattcaatgaagtaagggagtattccagagtaatcctgctcttaagaaaggttattctcattagtaagctgagcatcttagtttcgattctcactattggagttagctactatgttgtcatagcagacttttttcagccatatgatctcacaaactcaaccattatagaagcgatgatggacaaagattaccagtccatcaatactaacacttttgatatacttaataaatataattctggtgagtccaaaataaagcctagcgacttttatgcattcatccctgggcgttacaatgcgacttccgtgcatgtccatgggcatcttgtacctatgggggagagcatacatacaagtcataacaactttactatgtatcgctatgattttacataccgagttagtatatctcaatttggtgtgataattttctctctaattgaggtattcttgctttcttcttttctttatcttcactttagcaccaaatcaaaacatgaaaatgactttgaagataaaattgtaggcgcatactttgatatgctatctcttccgcttgaagaaagagaactaagtgatgtcgaaaagttaaagttaacactgagaaagtttaatgcatttcgattggcattaaacaacagatatgataatcgccccggttatgtaatcaacgatgagtacgatgttcaggatttgctgcgtgcaatactggcattaaacttcgaagatgtaattaaagagagtgccattccctattatttaggatcaaattcaagagtggattttttgatacgtgatcaaagtattgcgatagaagtcaaaaagacaaggaaggaattaagagacggtaagttagtggaccaaattatttctgatctccatcgttatcaagcatattctgcttgcaaagatattatattttttgtgtacgatcccgatcattttatacaaaatccggcgagtttgaaaaaggatatcaagtcgataaaaagtgaagccacattgcattttgttattgtccctgaggtttaa

SEQ ID NO: 189455 - DNA, 693 bp, Klebsiella oxytoca
atgaagaaatttcttaatgtgtttaatttttcagctgtgttagttctgggagtcgcattacttatttccagattcattgatggcgcagcatttgtggcatttgttgttgccggatgtctgggggcttctatatacgcactgttaccctcaatcactgaattctcgatagggggtaattcagtaaaatttaaggagaagttaaatgaagctgaacggattacggctgagctcaggaaacttaaagctgtagctatcagaaccacactaaaatccttgaaaataaaacaaaaatcaaatcttcttgtttttcaaaatataatcgaattcagggatgtttaccaacttatctctgatgcgaaagagtttgagaacgattatataacgatcgttacagaaactgcttttgcactaagagagaatgttttcgactttgtggatttggatatcaaagattcgggaccgcacgattttgactggcgtgatagccatgtcagagaatatattggttctaaaaaaaatcaaagtgcacttactttgcgggagaaaatgagtattcgttttgctgagcaatacatatatctaactaattttatagatggtctgtcgaaaggtggtttaccttcattaaaaattgtaagtcaggaagaaggctggcatgtgatcgtaaataaaaccacatggaaggagttgtaa

SEQ ID NO: 189456 - DNA, 819 bp, Klebsiella oxytoca
atgaaatgtgcgttaatttatgattttgatggaactctagcagaaggtgattgtgcccaacacggacttatgcccgctttaggaattgatgatgttgcttctttttggcagtccgttaaacaccgggccaagaatgatgatggcgatgaaatattgtcttatcttggacttcttgctgagaaagcaagtgagcttggttcccaagagttaactgaagccaacttgaaaaaacatggaaaatcaatcccgttattccccggtgttgaaggctggtttgagcgaataaatgattatgctcaacaacacggtttggaattatatcattacataatttccagtggtttagatgcgatgattagagggacatccataggctgtaaattccgtgatatctatgcatgtaaatatcattattctcctgatggtaaatccgttacatggccagcacaagcaatcaattacactacaaagactcaatttttatttagaataaataaaggcattcctaactcatgggataatgcagccatcaataaattcattgaacctgaagatcgcgagatccctttccaaaaaatgatatactttggagatggagacacagacattccagcaatgaaaatggttcgatatcaaggtggagtttctttggctgtatttgacaataaaaaatggaataataagactacgcaagaaaaagtcgagaagttaatagctgaagagagggctaattatgttgttcctgctttgtataacgaggggagtcaattggatgttacagtaaaaggactgttacaattatttaagagaaagggatag

SEQ ID NO: 189457 - DNA, 126 bp, Klebsiella oxytoca
atgaataaagacgaaattgaaaacatatctaatagacctgaggtgctttacagtattccgttctataaagatttacctcaccttcctttaaaagttgactggagggtatggctggtgattttttga

SEQ ID NO: 189458 - DNA, 960 bp, Klebsiella oxytoca
atggctggtgattttttgagttatgatatagcggatttattcggattacagccgattgagaaagaacacttagatacatatggtgagataattactatcaatccatcaaaggagtcccttgagctttataaaaaaagagatgattcctttcaaatggtatttttagtagttaatgcttatggctttaaagaaattgatggtgtaatgcattgcaaaccttacaacatatcacttttcccagcaagtaaaagaggtgagttgacttcacttaaatcggattcgattgagagaatggatcttgagatggatgctaacgtgccgaagttttactatggatttaacccattcaagggagcgtttggattatatgtttataatcatgtcgactactctggaattgaatcagatatgattggtttcgtaaatagcatgtatctcttgtcagataaatataattaccataatgtcatacctccaatcattaaatccattgacaataattcgcaaataaaagctgattacaaaagatatagaaaggacagatacttcaagaaatttaacaaaataaaaccaaggaagatatggggttgtgattcacctatcgaactttttttacttcaggcaatggataccctaggtttaacacctgaaattcagacgataattactaaagatggactcacgatccctagcttgcataaattgtgggaaaactctcgctcacgtaaacgtttgaatgctataacagatgcagatttttattttcctgaacaaaaattggcggttttttgtgattctaaagaacatcattcgtccaaggaatctactgataaagacagtaacattgataagtccttagcagaaattggtattttcagcataaggatctttggtaaggatattgtggcagatcccatagcatgtgcgacaagagtcagggaccgtttgaacgagttataa

SEQ ID NO: 189459 - DNA, 1167 bp, Klebsiella oxytoca
atggaaataaggaatataaatacaaagcttaaaagaatgatttttagtaaatatagcggaaaatgtgcaatatgtggcatatcaaacgaagacacgcgactggaaattagccacatttatcctaaatcttttggtggggaaagcacagaagaaaatttaattctagtttgtccaaactgccattttagattggatcaggccatcctcaacgaaagagagttcataactgcgcttgttgaccttttaaaaaactccccaaaatataagaatattgaaacaaacaaacagctaggtaatcagattaagatcgaggttgatatttacgcagaattgacggaatctcgtgaggataaaaaggaaataattgtagagtgcaaatcattaagagccatttcagaattttatatagataaggttattgatgaacttgaaacaataagcagcacacaccctagcgcgaaaataatatttgcaaccccttcgagaatacccggaaaaataaaagaaagacttgtaaaacataatatttctgcttgggatattgattatatacttaatgaatttagtggtgaaatagaaaaatcaaataacccatatcgaaacttactgattggcagtattggccaaagaaaatctgattttaagattcgaaatctaagtgacaggcttaaaaaatgctcacctggaaagaaagagtggtctatatatcaaaaactgataggtgaaattcttgctgagatcttttgtcctccactgcaaccccccatgcctgaaaacagcgattacttaaagacaaatagaagggattttatattatcaaactatgccaaagatggattttgggaatttcttcgcagtaattacaaagctgattatattgtagttgatgcaaaaaattactctaataaaatcaaaaaggatgaggtgcttcaaatagcaaattatttgaaacctcatgatgcaggaatgtttggaatgatatttactcgcaaaggtggagataaccgcggatgcgaaaccacattaagagaacaatggattttacatgggaagttaattttagtttttgatgatgaagatgttgaaaatatgctagttgcttcttccactggaaccactactgacattattggccaaaaaatagaaaagttcaggctttcaatgtga

SEQ ID NO: 189460 - DNA, 168 bp, Klebsiella oxytoca
atgtctattcccaaccatctcgaaaccacggaagtcgttttgctggaagtcgaaatattgttcaccattattgctaccggcgcctggggggatttgttagctatcttatccgccgtgataggcaagagggtgacgatcattcccataagggaatcatgcactgtttga

SEQ ID NO: 189461 - DNA, 321 bp, Klebsiella oxytoca
atgaaaactcaacctgcaacaactccgcaggcggcgaagccatgtctgtcgcccctggctgtctggcaaatgttactgacaagcctgctagaccagcactatggtctcacgctaaacgacacgccgttcagtgatgaaactgttattcagaaacacattgaggcaggtattaccttggccgatgccgtaaactttctggttgaacgctatgaactagttcgtattgaccaaaaaggcttctctgtgcaagatcaagaaccttggttaacctctatggatgttcaccgagcacgatttaaactcaacgtggaacgtttataa

SEQ ID NO: 189462 - DNA, 327 bp, Klebsiella oxytoca
atgtcattaataccagcccatgaatggggactacaaagagaaattgttccacggtttggtgccagattagttcaggaaggcaaccggctgcattatctggctgacagggctaatttgatgggcattttcagcgatacggaatgcttcaaattggatgacgcatttccacactttatcagtcagatggaatcgatgctgactactggtgaactgatcccctgtcaccatcactgtgtcactctctaccacaacgattttacctgcgaagccgacacccttggcagttgcggctacgtgtacatcgcggtttatcccactcaacgctaa

SEQ ID NO: 189463 - DNA, 471 bp, Klebsiella oxytoca
atgtctgcgcccaatttattcccggaatttcctgtaaacgagcaacgtgttatacaacgcgcgctgcgattgctggagaagtatcagcgtcaacccagtgaatcatttactagcaccagcgttactaaagcctggcttcaactcaggatggcacaccttgagcgtgaagctttcatcgtgatgtatctcgacaatcagcactctttgctggaacgcgaaacactgtttaccggcacactgagccataccgaagtacatccccgcgaagtagtgaaatcggcactgaagcataatgctgctgcggtaattctggcgcacaaccatccatctggtacgacagaaatcagccagcaagataaacatattactcagcgtatcgtgaaagcgttggcgctggtggaagtgcgcgtactggatcatcttgtagtcgggaatgagacaatttcatttgctgagctgggattactttaa

SEQ ID NO: 189464 - DNA, 822 bp, Klebsiella oxytoca
atgacccgattagccagccgctttggtgcggtcaatttagtgcgccgtgatcgcccgttaacccacgatgaactggcacatcacgttccgagtgtcttcagtgaagaaaagcatgaatcccgcagtgagcgttacacatacatccctactattaccctcctcgataaccttcaacgcgagggttttcaaccgttctttgcctgccagacccgagtgcgagatctgagtaagcgagagcacaccaaacatatgctgcgcctgcgtcgcgaagggcaaattaccggcaaacaggtgccagaaattattctgcttaatagccacgacggttcaagctcataccagatgctaccaggtttatttagatcggtttgccaaaatggactgatttgcggtgaaagttttggggaagtgcgtgtgccgcataaaggcaacgtagtggagaaagtcattgaaggggcttacgaaatactggggatttttgaccgagtagaagagaagcgcgatgccatgcagtcgcttatgttaccgccacctgctcagcacgccattgcgaaagcggcattaacctatcgttttggtgaagagcatcaaccagtgacggaatcacagatactttccccgcgccgatggcaggatgaaagtaacgatctttggactacctaccaacgcattcaggaaaacctgattaaaggtgggctatcgggacgaaccatcaaaggtaaacgcgctcatacacgcgcagtgaaaggtatcgacggtgatgtgaggctcaatcgagcactgtgggttatggctgagaatatgctgcaatttgcttcatga

SEQ ID NO: 189465 - DNA, 1011 bp, Klebsiella oxytoca
atgaaaatgatcatacctcttaaaactacgatactgacagtgatgttaggtgcctcaacttttaatgcttccgcagcatggcaagtaagtgggactttttgtcagtcttacactgatgatggacgagtacttgttcgcgtaagacccgcaacaataggtttgattgagcagcaaccgcaatgcaacggacgaggctctaccgaattggctggcagtaactttagtgtcaatggttcgtcttatccctccagcgtgatgtgtaacgcccaatcgaactatcaggcagtgcaaaccaccacggcgacaaaagatatccaaaacataatcagcatgctgcaagataaccaatcggtcagcatcaataccttcggttcacgctctgaagttaataccgctgattttgcacaagcttgttcatccatcattaaccagaaagtggccgacttcgatccccagaaaacctatcaacaggacatggcaaagatgggctataaacaggatgaaaacggccaatggcataaacaatcaaaacaggcatattcacgcgaagcagatcctgaaatagccgccaactatgatcccaaagcgggggttgctgaaaattcaggaaaaggagggttctatggagacggagccaataaaaatctttatggtccgggtagccaggcacaaaaggatgctgaagctgcaaacgcagcacgccgccttgcagcacaaaatcgtatgtcaaaaagcgctactggaattacagaatcagagatgcaggcagcattagcggcagcgaaaaaggcttatgctgctaattacgatcaagaaaccctcgcatcagctgactttggatcatacaaacaagcaccttctgtaccagatccggcagataaaacacaaaaactgcgtgtcgtggagtatgaggtctttaatccaggctacaaaacttatgacaaagtgcgtgtcaccctaaacgcatcaggtgcagtgactggcacacaggttcagtacgaaggtcagtaa

SEQ ID NO: 189466 - DNA, 690 bp, Klebsiella oxytoca
atgtccgtcaacgagcaagactcacgttacgaccgactggcgatcagattatcggtcattattagccgcctgcttgcgggagaaacactctcactcaaatctctggtggatgaatttggtgtctctgaacgcactctacaacgtgacttcaatcagaggctaatccatctggatattctggatgaaaatggacgataccgtttgaatgattgccaaccacccgatcattcatcgggcgcattctcgtttatacgtactacagggattgctcggataatcccggtgcaagacaggcaactaatgaacctgctaatgaacgagtccgggacttcaccctgcctgatctggcatgcccccctgaaatcccatgtcgcattacccgagttcttctcccgtcttgtgcaggctatcagccagaaacgacaaatcactgtgttggttgaagggcagcgtcatgaagcattggagccttatcgtcttattcactatgtggaggaatggtatctggtggtgtgtcagtcgggaaaaatccgtgtgtttgctctgaccagtattggtgctgtcacgcttgatgaggtgcgctttaagcgtcgcgaagatatttcatacctgactgctggtgaaggttttattgcggcactaccgcattttcctcttatcagtgatgttattgacacatttcgctattag

SEQ ID NO: 189467 - DNA, 894 bp, Klebsiella oxytoca
atgcccaaaaatactgattcacaggatgcggtaaacgcattccaagcctgccttagcttcctacccccttcttcaaccgaacgcatcctgaagcagttaaagcaatctatcgactacgagcctgtgattggaattatgggtaaaacaggtgcaggtaaaagcagcctttgcaacgcactattccaggaccaaatttgtctgactagcgagcttatggggtgtacccgagaaccacaacgcttggtaatcactgtgggcgaacgcagcataaccctggtcgatcttcccggcgtgggtgaaactcctgagctcgatgctgagtatatgacgctctatcatcgtttgtttgttgaactggacttggttatttgggtattacgggctgatgatcgcgcccgggcaatagatattacaacacaccgattgctactttctaatggtgcagatccatcacgtttcttatttgtgataactcaggctgaatgtattcctccgttgccaactaactctgaatgccaggatctgccttctccaacacagtgcctttcgttggccaccatcagcgcccaaattgcgggtcagtttccatcttcttatccggtaatagcagtttctgctcatactggctacaacttgacgatccttgtagagatcatggtgcatgcattaccgatacaggctagcagcgccttttatcggcaattgaaaccagagcacctgactaaagagagcaacgatgctgtacgccagcggtttggtgagatggcaggaaatgcatttgatacggtgataaacccggactctttcccgtcaggctggaccagctttttgaggaaactgcgccaaaaattagtgcaacttgccaccgtgttatgggacagagtttttggctaa

SEQ ID NO: 189468 - DNA, 1284 bp, Klebsiella oxytoca
atggccatctgtgtccgtaaaaactgcactacgtctgtttgggggaataataaagagagatctaaacgtctctgtaaacgacattatgccgcatatgtccaaaaccggatagctaaagaagctaaagcattatcagtttgttattattgtggcttgtccctcgcaaagatgagaaacaaaaaatactgttgcaaagcccaccgccagctgggttccagaaaaattttagggaagatcataacggatattattggattttcttactgggggcatattcaacatcatattaagcgaagcccaatagaactggcttcaattaatggagtgcatgacattaccggtttataccaactgtaccaatgtaaaacgaagcatcaaaggagctatgttttagcactcgaacaatggggagtatcgaaggagaaattaaaaattaaacctataccacttctaaggttagaaatttgccatttctatccggtgaatagtggtggtgaaaatacacctgataatgtgatcattgccccattgcgtatcaatcgcatgttaaaagatacaattccgtaccaaggtaggctttttcccggattgaaagcgttaagaaaaaaaatgccactgaatggaagcctttatgatggtctagttgcacgatttggaaaaaaggttgtagacgaagagctttcatcaattggcaaactaaagcacttccatggtaattacgccaaacagccggagtttgggggaatgcatcatgaatttcccctactaatgctgttaatttcggaattattacgcttagggcaccatgacattgttaaatttcttcaagctattcggcgggactatgagagtcttcttcctgtatatgttgaattagtggctgttattatgttttatgcgatcttaaccggtgatcgtgaccgcttcctaatgcgtttcatgagaattcatcattggttcgacgacacagctttatccacaaggcatccatttcgggcatggggcagagacaactacgaaagatgcatgtacctactcctaaggcgatatctacggctgttttttggctcagctattgagagtccccgagaaattgtcgatctctacaatagttttttctcacttcaggttgttgacgtcggggagttgggcgaaatcgtaagcttttcctatttcaaaggaagacagagcaaagtgaataccttttttatcattccagagtatgtgtttgacacactgcctagatcaggggacgttttcgggattggttcaacacttagctga

SEQ ID NO: 189469 - DNA, 552 bp, Klebsiella oxytoca
atgatttacgtcattacggacaaccagtttctgtacgtaggaattgagttacttctttgcaagcatgagatagctgcttcgcgactatcggtgaaccacctctccaaccatgtgatatgcaaggataatatttacttcattgaacgtcctctccatgaggaaaacgtccaatttctgagtaaactctaccgttcaggtgcgcgtttctgctttttactgcaacatgcgatagagagtgtcagaaatgatgacacacagtttatcgacatcacgacacggttaaatatttttacctataccgtgttgaaaactatatctggcagtgcaaatctgcctgcagcaaatactgtacggctgactgacagggaatttacggtagcgcgtctggttctttgtggtcgttcagatgaagacatagccactgtattgtcaatcacaaagcggtcttctcaggaccatataaatcgcgtgctgaagaaattgggtggaaaatccgtagcagacatctacctacaccggaatgtgatttacggaagttgctccgctaggtaa

SEQ ID NO: 189470 - DNA, 642 bp, Klebsiella oxytoca
atgacagtcagcttacgaaaagggcaaggcgtcagcctgcgtaaaaatgaattcgacctttcttcggtcactatcggccttggctgggatattaatgaagaaaaaaaaggtcttctcggtgggcttttcggtaagaaagaggaagagtatgaccttgatgtcatcgccttcctttgcaacgacgccggaaaggtaactgacctcggaaatgttgaaaacggcaaacccacgctggttaatggcgatattgtgttctttaacagtcttcgccataagtctgggcaaatctggttgaccggcgataaccggacaggtgccggagacggagacgatgagcaaataattgcaaaactaaatagtctcgatccgaagtatgaaaaaattgtcttcattgttcaaatctacaacggcgaaaaattacagcagcacttcggtaaagtacagaatgcatttatccgggccgtggatggaagaaatgtcgaaatggcccggttcgacctttcaggaggcgcatcttttaacggtcagcgatcgatggtttttgctgaactcgttcgggaaccaaccggttggaaactgaatgcgatcggtgagccgtcaaccacagattccttcgtcagccatctgaggaattatatctaa

SEQ ID NO: 189471 - DNA, 639 bp, Klebsiella oxytoca
atgcgcagactacctgtttatctccttatcgacacttcgggctcgatgcggggcgaatcaatacattcagtgaatgtcggtgttcaggcgatgctgagtgccctgcgacaggacccctacgctctggaaagtgtccatatctctatcatcacctttgacaatgaagcccgggaatatgtccctctgacagctctggctgattttcagtttgtggatattcaggtacccagtgcgggagggacatttacgggagctgcactggagtgcctgatgagttgtgtggaccgggacatacgtcgatctgatggagaacaaaaaggtgactggcgcccgctggtcttcctgatgactgatggcacgccttctgacgcgtgggcttatggtgaagccgttaaagaggttcataaccgttcatttggctccatcatagcctgtgctgttggtcctaaagccgggcatgagcatcttaagcaactgactgccaaagttgtagcgctggagactcttgattcgacagccttttctggctttttcaaatgggtcagcgcaagtgtggcatcaggaagttcgagtgcgggggtaaacgcttcctcagacacgcttccccctcctccacctgagatacagctggtcctttaa

SEQ ID NO: 189472 - DNA, 1041 bp, Klebsiella oxytoca
atgagacggcttcccgtattctttgttctggactgttcagagtccatgattggtgaaaatctgaaaaggatgaatgatggcttacagatgatcgttaacgatctgcgtaaggacccccatgcactcgaaacggcctggatttcggttattgcatttgctggtgtcgccagaactattgttcccctccatgatattgtgtctttttatccccctcgccttcctgtcggaggcgggacaagccttggggctgcgctacgggaacttacggtacaaatagattcccaggtgcgtaaaaccagccttgaagaaaaaggggactggaaacccgtggtttacctgctcaccgatggacgtcctaccgatgatatttcaggtgaagtaaaacgctggaatgattattacgccaaaaaagtgaacctgatagcggtaggtatggggaattcggtagaccttggtgtgcttcgccaactgactgaaaacgttttattgtttacggaaagccaggacggagatttcacgcgtttcattcagtggatcaccgcttccgtcactgcccacagcagaagcgtaggagaagatactcaaccgccactgaaacagaccgactatatcgtcaaactcgccaaagatgaaatcaccagagcttacgatgataactgcgtggttctgaccgggcgttgcagcaaaacacgtcgcccctatctcatgaagtatgaacggccaccggctaaggtgtcaggacttgcatttgacctgaacctaaataccttcaatattgcaggctgctatccgatcgatgaagactacttctcatggacagatacggccgcatcaggcgttcaggttaataccagtgaactccacggtgtacctggatgcccgcattgtgggaacagtagcgctttcgcgatgtgcagctgtgggaagcttctttgcatcgatgggcccgatgatgttatctgtccatggtgcgagaaaggactgtcctttcaggacgacggtggtcattccgatttcaacgttagtagaggacgtggctga

SEQ ID NO: 189473 - DNA, 1764 bp, Klebsiella oxytoca
atgagtgaattgagttcactggagcataaaattgtctctcttattctggaagagtctgcggggaaattcgacgctgaggtcgcactacaactcagcaacgatccggccatttgcgggcttataaatgatttaagagagtgtgtgataaacctagggccagggttaacattgtctgatgccactgttcataatgaggctgacgccgtgtatgtcagtcagcaggaaagcagctcaattccgttcaatgatgaagaatcgacacctcccattcagaacgatgcaaaccaaaacaacgaccatgatgcgcaaatggatgttgtacaaatcaacccagaaacatccgggcaggagatgaatgagcctcctgaacatgagctcgttgacacgactaatcagcaatcttcagtacaggctgaatcagcaattactgatgttcatccggctttatcagctgcggcagaagcagagacgtcgagtattacaaatagtgacgatacatcggaaacagctgaacctcctcagtctgagaagaccttactcagaccgggggaaataccccacaaaaagacggcagagcattctcctgccctccagaaagcgcctgacgtgtcgattcttcttgcaaatgccagggtcggcgaatcgtttgacgcactggtagatattattactgacagcggtgttacggccgaagttacagatattcatttttctcaggatatcggtctgttcttttgtaaaaaagagaagcgcctgaaaggaacgccagcattcagcgggaatgttgatatgacagtgaaatggtcatgtccctcacatcccgataatgaaaaaaagttactttttattgttaatcctgaccccaaaagcctctggaaagtgattgccccccctactgacgctccttttttcaaagaaagtgtcgatcatcggaatatcagctctgcaactgtaaatatcgtcggcgctagtcgacgtggacgttcccacgaacatgccggtactttccgcgacgatgatttttatatcaatgtcagtgatgaatccggatggaacgtgttgctggtggcagacggagcgggtagtgccaggttttctcgtgaaggctcacgcattgtggctgacaccgttggtaactaccttttcagtcaacttaaagcagaaaagggtcatgaactcaaagacagagtgctgcgctggaacagcgaagaccagcgggctgtgtgggatttcatgaatcaccatttcaggcaggctgcgttactggctgtgcataacatcagcagtgcagcaattctggctcaggacaaagcaaagtcattctcaacaactctactggcgacagtcacttttcgtgaaggatctgaactgtttgctgcttccttctggcttggcgatggtgctattgctgcatatggtccggtcggaaaggtcagagtcctgggagcccccgatagtggagaatatgccggacagacacgattccttgacgctgaggccgtcagtgatacaggtttcagtaaacgcatcagtataggtaagtggagtgatgtctcccaccttattctgatgactgatggtgtatccgatccatggtttgagacagataacggactacagaatccgacgaaatgggacacgttaatgacagagctgaatccccttctctctgttcctgatctggcctcatcgcagctggtggagtggttaaactttttctccccgggcaatcatgatgatcggacaatcgttgttctctggtga

SEQ ID NO: 189474 - DNA, 1500 bp, Klebsiella oxytoca
atggcaaatattgttacatgtaaaactacggatggtaaaaccattcagtacgtcgatgaagtcatcggctcgggttcaatgaaagatgtgtatttctctccggataaatcatacgtcgtagccttctaccataaaccccagaatgaccaggcccgcgaacgtatcaatatgataacgggcaggtaccggcaaaatattttcgaacaatcaggaggagagtactggaaaggtcttttttgctggcctacagatgttgtcgagcacggcgacaaggtggggattgtggtgccctcctatcggcagcacttttttttccggtatggatccaaaaataacgattttctcgggatcaaaggacgggaaaaagaaggaaaatggtttgccagcgccaacaatcaaaataaattcctcgatcctcgtgaacggggcaatactctcaactacctcaaagtttgcttactgttaacccgggcagtcaggcgaatgcatgctgcaggactgtgccacagtgatctgagctataaaaatgtcctgatagaccctgaactgggccacgcgtgcatcatcgatgttgacgggttggttgtacctggcaaatatccccccgacgtggttggcacaccagatttcattgcccctgaagtggtcaaaacaagccacctccccaaagatgaccctaagcgtgtactgccaagcatatccaccgatcggcatgcgctttcagtactgatttatatgtatctgctttttcgtcatccgttacgtggaggaaaaatccatgatatggacgatgaggtacgcgatgaagctcttgctatgggggaaaaggctctttttatcgaacatccgacagaccacagcaacgcggttaaaatcagccaggtctcctcattttcgcttccctgggcagatcctcagaaaataccatacaccgtcctgggaccatatttaacaccccttttcgaccgggcatttattgacgggctgcatgatccgtcaaaacggccgacagcggatgaatgggaaacggccttggtaaaaacggtcgatttagtacagccttgccagaatgatgcctgtgagcaggagtggtacgttttttccggcaaaacgaaaccggcgtgtccatactgtgggacgccctacaaaggtaagcttccgatcctgaatctgtattcatccagaaaagcagggtcgtttaggcctgatgaccaccggctaatggtctggagcgggcagtccgtatatgcctggcacgttaaccggctggttgcacccaatgaaagaacaacagctgaccagaaaaaacgagtggggtatttcgtttttcataatgaccagtggtggcttgtcaacgaggggatacacggattgatgtctctacccgaccgtaaagtggtagccattggtgataagctccgtctgaatgacaacgctcagtttattctctctcccgaggaaggagggcgacttgtggtggttcagcttgtggttaactaa

SEQ ID NO: 189475 - DNA, 1734 bp, Klebsiella oxytoca
atgtaccaaaccgccggttctattaaaacgctgttagataaggttaagaaccacgattatatccttcctgctatacaaagggaatttgtatggcggccagaccaaatctgtcagctatttgactcattacttcagggctacccctttggcacttttttgttctggaagataaaaaatgagaacctcagtcagtatcagttctttgattttatgtgcaattaccatcaaagagatcgcatacattgtgagaaactcatcatcaccaatgaccaagaccgtatagctgttcttgatggtcagcagcggatgaccgcccttaatattggtttacgcggttcgtatacctggaagactcaaggtaaatggtggaaaagccctgatgcttttgttaagaggcgtctttatctcaatctgcttaaatcaccgcaacttgaagacgatactcactatgagttcgattttctgagtgaagaagagtctaagtattccgatgaataccatcaatggtttctcgtaccacgggtcctcgaaatagatccttacgatattcacggggaaatctcaaaaatggatttaccaaaggggcgtgatgtcgaagccggaaagatggtttcgcatcttcataatataatacataataaacagctagttacctattatcttgaagaaggacaggaactgtctaaagttttgaatatttttatccgtatgaatagtggaggtacaccgctttcctattcagatctccttctgtctattgcagtggctcagtggcaaaaactggatgctagggaagaaattcacaatttagtcgatgaaatgaaccgagtcggtgacggttttaactttagtaaagaccttgttctaaaagctggattaatgttaagtgagctcaaggttgcatttaaagttgaaaattttaacaaaagcaatatggctttacttgaacagaactggaccgagatcagcagtagtcttcggttaggtgtaaatttgttgagtagttttggtttttgtagctcaacacttaaagcagatagtgttttattaccagttgcatattaccttcattgtcgcaatcttgatgcgaattacctttcgcacagtaagtatgcctctgaccgattacttatcagaacctggttaattaaaaccctgttaaagtcgggcatatggggaagtggtctagactcattactgaccagttttagaagtatcattaaaaattgcaacgaagaacggttccctgcgccagaaataacggtgtttatggcagaaaatggaaaaagcctgcggtttgaagaagaggaaatgcaatcccttctggatatggattatggtaaccctagaatattcccgcttctttctttgttgttcccagggcacgacttttcccatcattttcatgttgaccacatttttccaaagtctcgatttactaaaagtcagttgaaaaaagccgggattgatgatgataaaaaacttgaagaatggattgatatggcaaatcgtgtaccaaatcttcaattgctggagggagggcagaacaatgataaacggcagaaaatgccacatgactggtatagagtcatgtggcctgaaccgctggcatatgtcaatcatcttcaaacactggcgatagattcgttacctgaaaatatcaatgagtttgatgatttttatctgcggcgtcgtgagactctcatgagccggttacatcttcttttgagctag

SEQ ID NO: 189476 - DNA, 849 bp, Klebsiella oxytoca
atgaacgttgacttcgagccagatgattatgataaccttaagaaagcggttgcgatactggagtcacccccgatcatcgcgagattgtcgaacatgttaggttcgccattagaggctgctgttaaaaaactcccaccgtccgtttcaggcaagctgaactccgccgttgaagcagcattgcataaagccgctgatatagctttgcgtagtcttgataatgatccaaacaagtctgcatccacaaaacttcataaactgtatgctgcttcttctggagctgttggtggggcttttggttttacatcattactcgtcgagctccctgtgtctgtgaccattatgatgcgttctgtcgctgatgttgcacgaagcgagggttttgatttgactgatttgaccacaaaaagaaactgcattgaagtgtttgcccttggaggcgtgacgaataaagatgatgcggctgaaactggatattatctgtcgcgtagttttttaactgaatcaatgcgtcaattatcaaaagagttaacagaaatcgctgcaaaacaaggtactaagggtgttggttttgtagctccaaatcaggcggctaaatggttaagtgatattattgaaaaagtcgccagtaggtttggtattgtcatcacaaataagtttgctgttcaggccgttcctattataggtgctgttacaggcgcgacaataaatacactttttacaaatttttatcaggatatggctcgtgggcatttcatcataaaaaggctagagaataaatatggtgctgacaaggtaaaaacagagtacgtgagtatttgctcgaatcaagcaaaccaaataaaaagctga

SEQ ID NO: 189477 - DNA, 381 bp, Klebsiella oxytoca
atgggaagattatttaatgtaatattcatatcgcttatatacacggggatagtaattattcttgatgcagttgccatctactatttcaaactgaatgcccctgtcaccatcgtagtgactacgtttctggtattattcggtttatcgtttgcatacgtagataccacaaagcgatcagaacggcactttgccgagcggcgtaaagcacaggcgcagggcgcgacattttcgatgatgtgggatgcccttgattcggatgctaaacagcttttttaccaaaaaattgatgtggaaagtgcatccagcgagtttaagtccagataccagcaattgcagaacgaaatcagttactgggacaaggagatagagcgtctacgttaa

SEQ ID NO: 189478 - DNA, 477 bp, Klebsiella oxytoca
atgagagcgcctgaatccctgacggctgaacataacatcgctgagttctgctgccaggagcctgccctcaatgagtggttaaagaagaaggctctcagaaaccacagtaccggcatttcccgtgtctatgtcgtctgcgcagaaaactcgaaccgggtcatcggttattattgtttatcttcgggtagcgtccaccgtaacacagtgcctggggcctatagacgcaacgcgcctgaagtcattccggtcattgtcctgggacggcttgccatcgaccaggcctggtccgggaatgggcttggtgccgcacttcttaaggatgctatataccgtacgcaaaacattgcctttcaggtcggggtgagagcactggccgtgcatgcgctgaatgaagaagttaaatgtttttacacccgttttggctttgagccttccatagtcaacacgctgacattgttattcccgataaaagtctga

SEQ ID NO: 189479 - DNA, 279 bp, Klebsiella oxytoca
atgaaaccagacgttcgtgaagctccgatcaatatccgggccaaaacatcacagcgtgacctgatcgacatggccgcaagcctggtctcaaaatcacggactgattttatgcttgaggttgcctgcagggaagcacaggacattctacttgatcaacgactgttcctcctcaatgacaatcagtttgaggcgtttattgaagagcttgacgccccaataacgccggagcgccaggcgcgaatcgataacctgatgaaccgcaaatcaccatgggaatga

SEQ ID NO: 189480 - DNA, 495 bp, Klebsiella oxytoca
atgatacatccgtttgatattcttaccttagacaatggcgctaagctaatttttaccccttgccctggaactaaaggggtttccattgttgattccttaaaatcactaaaagaagcaggtgctcagaccgttatcactatgatgacgatggctgaaatgactgaaaagcaagccgatacgctcccgtccctttgtgctgaacttcgtatggactggtatcacctgcccgttgaagatagctgtgcgcctgaagcgccatttgcacaggcctttgctcaacagaaggatattttattggggttagtcgagtcaggtgcgacgatggttatccattgtcacggtggttctggccggacaggtatgatggccgctattctgatgctcgaactgggttatgctccggctcaggtgaaatcgcagatccagctaatcaggccaaaatcgctgacctcccctgttcaggtcaattatcttatcaagcaatacgcttactga

SEQ ID NO: 189481 - DNA, 1290 bp, Klebsiella oxytoca
atgttactggcaggagcaattttcatcctgaccatcgtgttggttatctggcagccgaaggggttagggattggctggagcgccatatttggcgcaatactggcactcatatctggggtagtacacattaccgacattctggtggtatggaatatcgtctggaacgccacagcaacctttattgccgtgattatcatcagtttgctgctggatgagtctggcttttttgaatgggcagcattgcatgtttcccgctggggaaatggccggggtcgcctgctgtttacttatatcgttctgctcggtgctgcggtagcagcgctatttgccaatgatggtgcagctctcatcctgacgccgatcgtgattgccatgttgctggctctgggattcagtaaaagcaccacgctggcatttgtaatggctgcagggtttattgccgataccgccagcctgccgctgattgtgtcgaacctggtcaatattgtttctgctgacttcttccatctgggcttcacggaatatgcttccgtgatggtgcctgtggatattgccgccattattgccacgctggtgatgctgcatctgtttttccgcaaagatatccccccgacctatgatctgaaccgactgaaagaacctgctcttgctatcaaagatccggcgacgttcagaacgggctggattgtattaatccttctgctggcaggtttttttgtgcttgagccgctgggtattcctgtcagcgctattgcagctgtgggtgctgctatcctctttgtcgtggctaaaagaggtcatgccattaacaccggtaaagtcctgcgtggtgcaccgtggcagattgtgattttctcactgggaatgtatctggttgtgtatgggttgcgtaatgccgggctgacagaatacctctctgacgtgttgaatttacttgcagacaaagggcttttggcggccacatttggcacgggattcctgacagcattcctgtcatccatcatgaacaacatgcctactgtattgattggcgcattgtcgatcgatggcagcaccgcatcgggtgtcatcaaagaagcaatgatttatgccaatgtcatcggttgcgatctgggacctaaaattacgcctattggtagcctggcaacgctactctggctgcatgtactttcacagaagaagatgacaatcacctggggatactattttcgcaccgggattatcatgactctgcctgtgctgtttgtaacgctggccgcgctggcgctacgtctctctttcactttgtaa

SEQ ID NO: 189482 - DNA, 1203 bp, Klebsiella oxytoca
atgtttcatctcgataccttatcgacgctcgttgccgcaacactcgtgttgctactgggtagaaaactcgttcaaaccgtccctttcctgaagaaatacaccattcctgaacccgttgcgggcggcctgctggtcgcgctggcgctgctggtattaaagaaaagcatggatatcgaaatcgatttcgatatgagcctcaaagatccgctgatgctggctttctttgccactatcggcctgaacgccaacctcgccagcctgcgctccggcggcaaagtgctggggacgttcctgattgtggtggtggggctgctgctgctgcaaaacgcgctcggaatcggcatggcgaagctgcttggcctcgacccgctgatggggctgctggccggttcgattaccctttccggcggccacggtaccggcgcggcgtggagtaaattgtttgttgaacgctatggctttgccaacgctaccgaagtggccatggcttgcgcaaccttcggcctcgtcctgggcggcctgatcggcggaccggtggcgcgctatctggttaagcactcttcctccccggacggtacgccggacgatcagctcgcgccgaccgcgtttgaaaagccggatatggggcgcatgatcacgtcgctggtgctgattgagagcatcgcgctgatcgccatctgtttaacggtagggaagatcgttgcgcaactgctggcgggaaccgtatttgaactgccccccttcgtttgcgtgctgtttatcggcgtgatcctgagcaatagcctgtcggcgctgggcctgtaccgcgtgttcgaccgcgcggtgtcggtgctgggtaacgtcagcctgtcgctattcctggcgatggccctgatgagcctgaagctgtgggagctggcgtcgctggcgctgccgatgattattattctggcggttcaggcagtggctatggcgctgtatgcggtgtttgtgacctaccggatgatgggaaaaaactacgatgccgcggtgctggcagccggccactgcggtttcggcctcggcgcgacgccgacggcgattgccaacatgcaggcgattaccgaccgtttcggtccgtcgcacatggcgtttctggtggtgccgatggtgggcgcgttctttatcgatatcgttaacgcgctggtgattaagctctatctgctgctgccggtatttggctga

SEQ ID NO: 189483 - DNA, 1392 bp, Klebsiella oxytoca
atgtccgttaacaccgcagaatcagaaaatgcgcaaccggttgcgcataagcaaaccagcgaattaatctaccgccttgaagaccgcccgccgctaccgcaaaccctgttcgccgccttccagcacctgctggcgatgtttgtcgcggtcatcactccggcgctgttaatttgccaggctctgggccttccggctcaggatacgcaacacatcatcagcatgtccctgttcgcctccggcgtggcctccatcattcaaattaaagcctggggcccggtggggtctggtctgctctcgattcagggcaccagttttaacttcgtcgcgccgctgattatgggcgggaccgccttgaaaaccggcggcgccgatgttccgaccatgatggccgcgctgttcggcaccctgatgctggccagctgcacagagatggttctctcccgcgttctgcatctcgcccgccgcattattaccccgctggtctccggcgtggtggtgatgattatcggcctgtcgctgattcaggttggcctgacctccatcggcggcggctatgccgccatggccgaccacaccttcggcgcgccaaaaaacctgctgctggcagggatcgtgctggcgctgattattatccttaaccgccagcgcaacccgtacctgcgcatcgcttcgctggttatcgcgatggcggccggctacctggcggcatggctactcgatatgctgccggccaataccgcgccgacggaaagcagcctgattatggtacccacgccgctgtactacgggttaggcatcgactggaatctgctgctgccgctgatgctggtgtttatgattacctcgctggaaaccatcggcgatattaccgccacctctgacgtctccgagcagccggtttccggcccgctatatatgaagcgtctgaagggcggcgtgctggccaacggtctgaactcgtttgtttcggcggtattcaacacctttccgaactcctgctttggccagaacaacggcgtgatacagctgaccggcgtcgccagccgctatgtcggtttcgtggtcgcgctgatgctgatcgtgctcggcctgttcccggcggtaagcggcttcgtgcagcatattcctgagccggtgctcggcggcgcgacgctggtgatgttcggcactattgccgcctccggcgtgcgtatcgtctcccgcgagccgctgaaccgccgcgcgatcctgattatcgccctgtcgctggccgtcggcctcggggtttcccagcagccgctgatcctgcagttcgcccctgactggctgaagaatctgctctcctccggtatcgctgctggcggcatcacggcgattattctgaatctgattttcccgccagagaaaaactga

SEQ ID NO: 189484 - DNA, 1716 bp, Klebsiella oxytoca
atgaaatttctcagaaagctgattctctggctgctgattgccctgctggtggtgattattgccgcttacttcctgctgcaaacccagtggggcgggcgccaggccagcgcctggctaagcgacggtaccggctggaaggtctctttcaacaagatggaccataatttctcctcgccactgcacctgcagctgcaaaacgtcaccctcggacgcgacggcaaacccgccacgctggtggcgcaaacggtggatatcgggtttagcagccgccagtttagcgacccgctgcatgctgacgaaatcgtcctcagcgacggcacgctgaacttctccccttcttccgcggcgctgccattcgccgccgaccgtctccagttgcgcaatatggcgttcaacagcccggagagcgactgggatctgagcgcgcagcgcgtcaccggcggcgtcagcccgtgggcgccggaagcgggcaacgtgctcggcaagaaaacgcagattcagatgagcgccgggtcgatgacgctcaacggtattgaagccagcaacgtgctgattcaggggaatattgataacggcgaagtgtccctctcgaccattggcgcggacgtcgcccgcggtacgctcaccggcacggcgaaacgcagcgccgacggcggctggcaggtcgataatttgcggctcaacgagattcgcctgcaaagcgataaatcactcgccgactttttcgcgccgctgaccaccctgccgtcactacagattggccgccttgatgtgaccgacgccagcctgcaggggcctgactgggcgatcgccggcctcgatcttaacctgcgcaacctcaccctgagccgcggcgactggcaaagccaggagggtacgctgtcgatgaacgctaacgaatttatttacggctcgctgcacttcctcgacccgatccttaacgccggattctcgccgcagggcatcgcgctgcgccagttcacctcacgctgggagggcggcatggtgcgcacgtccggcaactggctgcgcgccggccatgcgctggtgctggatgacgcggcgttcgccgggctggaatatacgctgccaaccaactggaagcagctgtggatggcgccgctgcccgactggctgcaaagcctgacgctgagaaagttcagcgccagccgcaacctgattatcgatattgaaccggcgttcccgtggcaaatcaccgcgctcgacggctacggcggcgagctgcagctggtgaaaaaccgcagctggggcgtgtggagcggtagcgcgacgctgaacgccgccaccgcgacctttaatcgtattgatgtccgccgcccgtcgctgaagctgagcgccaatgcctccacggtgaacgttaacgagctcagcgcctttaccgagcgagggatcctgcaagccaccgcggcggtgtcgcagctcccgcagcgcctggtcaacctgagcctgaacggtcgcggcgtgccgctgaatattttgcaggcctggggatggcccgcgctgccggtttccggcgacggtaaccttcagctgacggcgaccggcagcgtgctggcggatgcgccgctgaagccgaccgtcaacggccagctgagcgcgataaatatggagaaacagcaggtggcgcaggtgatgcgcaacggggaggtcaccagcacccagcccccttcagcgccggcgacaacgactccctga

SEQ ID NO: 189485 - DNA, 1560 bp, Klebsiella oxytoca
atgtctgtaatacgtcaacgtattctggagaatatgcaaaaattctccagagcaatgatcggtgcagtattgttcttgccggtcatcggcttaattttggcactcagttcagtcttaaccaacccaacattaatttcggagaccagctttttacaccagctcggccagctgctcggcgatactttctggcctttattcggcaatctgggattacttttttgcgtcggcatcagctatggcctggcaaaagataaaaaaaccgaagtggcgctggtgtcggtgatgtgttttatcatgtttcttggcgccaaccactcgtggctggagcatacccacggactcgcggaaaaaattaacggcgaatattacggtaccgggcagactcagctgctggggtttgtggtagtcgatatgggggtcttcctcgggattattctcggctgcaccatcgcctgggtgcataacaaagtgtcgacgattgaactgcccggcgcgctctccatgtacggcggagccaagctgacgctggtggcgatgaccccggtcgtcattttctacgccatcgcctttacctggatctggccgtttatgacccacggcatcgcggcgctgaccggctttatgaaaaacgccggcgtggcgggagtcttcgtctacggcttctttgaaaaattcctcatccccaccggcctgcaccacttcgtctggtcgccgttccagctcacgcaaatcggcggtacgctgaacgtcgacggccaggtcgtctccggcacccaggcgattttcctcgcctatatgcgccacccggatttaaccccggtgatgaacgaggcgctgcgtttctcgcagcaggggatgaccactatcttcggcctggccggcgcctcgctggcgttctaccacacggcgaaaccggagaaaaaaatgatggccaaagcgattctgctaccggccattatcacctctatgctcaccggcatcaccgagccgattgagtttaccttcctgttcgtttcgccgctgctgtgggtgatccacgccacgttaaccgcggcctcgcaggcgatttgcgacatctttaccgtgcgtccctggggcgcttccgggctgattgagttcctgatttacaacctgccgctgccggtctccctgacccgctggcccggctacgtgcttatcgggattggtcagttcgccgtttactacgttatcttccgcacgctggtcgttaagttgaatcttaaaacgccgggtcgtgaagacgatgaaaacgtgaagttatatagcaaagctgattaccgaaaaaaaatgggcgaaccgcagtcggtcaccaacgaaattattaatggtctgggtggtaaagagaacattatttccgtcgacaactgttttacccgcctgcgcgtcgctattcataatatggatctggttgacgatacgatattaaaaagcaccggcgcaaacggcgtagtacgaaatcgaaatgaagttcaggttatttacggcgtcaaagtgggacaggttcgttcccgggttgatagctggctagcagaaaattaa

SEQ ID NO: 189486 - DNA, 1380 bp, Klebsiella oxytoca
atgaaattaaccgtattaggcgggggcggcgttcgctctgcgtttctggcgaaatctctggcatataacgcgcatcgcattggtttaacggaagtggtctttctcgacagctccgcggagaatctgacaatattcggcgagatcgcccgctatgtgtttaatgccattcgcccggatattcatttcagcgtaaccagcgacccggtgccggcgctaaaaaatagccactatgtgataaccaccctgcgggtgggcggcgatgagagccggatccgcgacgagcgtatcgccctggcgcacaacacgctgggccaggagaccaccggcgcgggcggtttcgccatggcgatgcgttccattccggcgattcttcactactgccgcctgattgaagagcacgccgccgaagatgccattctgtttaacttcaccaacccgtcagggctggtcaccgaggcgattatcaaatccggctttaagcgtcgggtgtacggcatctgcgatgccccgtcggagctgattcgcgagctgcccgagatcctcggctgcgacgagcgcgatctcggcgtcgagtgctacgggctgaaccacttctcctggtttacccatttcaccgtgcgcggcgaggatgtcaccgagcgcctgatcgccagcccggacctgtatcgcaagacggcgatgcagtacttttcgccggagctggttcagctatgcgataagcagctgcttaatgaatatctttactactactactatcgcgaagtggctttgaaagcgattcagaatgcgccggaaacccgcggcgagcagattgcgcgcatcaatcacgatatgcgcgaagcgctgctgaccgttgatgtcaaagccaacccggaagcggcgtttaccatctggatgaagcactatctgcgccgggaaaatagctatatgcagaacgagtcgcagcaggaaaaattccatacccgcgagccgttgaccttaaagcagtttatcgaggagccggataccggcggctacgccggcgtggcgctggatattctggaggcggtgaacagcaccaccaccaagcgcatcgtggtatcgatgcccaacaacggcacgctggacttcctgcgcccggatgatgtgattgagatcagctgcgacctgagcaaagagggcctgaagccggtgacgccgaagcatgtgccgacggcgcagaagaatatgatcgccagcgtgaaagagtatgagcggctggcggtggcggccattctgcagcgcgataaatcgctggcggtacgggcgctgatggcgcatccgctggtcggctcttattcgctggcaaaaacgctggttgaagcctatctcgacgataagcagttcgccgactggcaataa

SEQ ID NO: 189487 - DNA, 732 bp, Klebsiella oxytoca
atggatttagaaaacatctttcgtgacgttaagctaagcaaaacggaaatgaccgtgctgcgttttattcagaacgatcctgagcaatgcgttcgcgaagggatccgcgccgtggcggagcactgttatagcaatccctcttcgctggtacgcctggcgaagaagctgaaattcagcggctggctggagctggtctattttattaaattcaatatcactatgcccaaactcgatgtgaccaacgacatcgattatatgagcattcagccggtggagcggataacgccattgctggaaagcctgcaacatcaccgcattttgattcacggcagcgggttttcgcagctgatcgcccagtatatttataataaatttttggtgaccggggtgaatgccagcctcgcgctgtggccggattacgaaatcctcgagcagaagaacgccgccaaatttgattcgatctggattatttccaaatccggacgcagcagttcggcgctgaactgggtgaaggcgctggaagggaaagagattaacctggtctgctttaccggcgattatcaaagcccgctggcgcaggcggcggatacggcgtttatcatccatgatccgcagaagttcgatgatgatatttactggagtaaccccttttttggctactgcatactcggctttgagcggctgctgaagatgtggtttatgcagacggggatccccggaggcggcgcctga

SEQ ID NO: 189488 - DNA, 675 bp, Klebsiella oxytoca
atgaaacgttcacagattaactacgcgattgataaagcgcatgctatcgccgagtcctttcgcatttgcttacccgagtttgcctgctttaccgccgatatctgggcgaaaaagcggtttgaagagtggcgagaagttcgggatctacagcttggctgggatattaccgattttggcagcggccgttttcaggaaaccggactgacgctgttgaccctgcgtaacggcgcgccgggcgattcgcgctatcccaagccctacgccgagaagatgttgcagattcagcaggatcagcaaaccccctggcattttcattatcacaaaatggaagatattctgaaccgcggcggcggccggctctgtctgcagctggcatgggcgacagaagatgaacggctggatatgcagcgcagcgtgagcgtcgcggttgatggccgccagcgcacgctgaaaccgggatacaccctggttcttaaccccgggcagggcgtttgcctgccgcccacgctgtaccaccgtttttgggctgaaaacgcgctggtgatgggctgggaaatttcgatggtgaacgatgataagcgcgacaaccgttttctggaagatagcggccgcttcccgatgattcaggaagatgaaccgaaaaaatggttattgtgcagtgaatacgggcgctga

SEQ ID NO: 189489 - DNA, 933 bp, Klebsiella oxytoca
atgaagtatttggggctggatattggcgggagcaaaatcgccgccgtagtgatggatgaacaaggccatgaatggaggcgttttcacgttgaaacgcgaaaacagacccggcagcagtttatcgcgacgctggtggcgttaatcaccgcgattggggatgagctggctcagcctttggctatcggtatcgctctgccggggagtatctccccgcagaccggcaagatccgcaatgccaatattcaggtcatcaacggctgccgcttacaggatgagcttgagcagcgcctgggccagccggttgtgctggcgaacgatggcaactgtttcgccttatcagaagcctgcgatggcgcaggagccgattattcgctggtgtttggcatgacgctggggaccggatgcgggggcggtattgcgcttaatcgccagattttccccggcgcgtcagggattgcggcggagtgcgggcatatcacgctgccgggatatcaggaggtcaacgatgggccgcccgagcgctgctactgcggaaaatataactgcgtcgagtcctttatttccggcaccgggctgagcgcgcgctatcgtttgatgacccggcaggcgctcagcagtcaggctattatcgcccgggcgctggagggcgagcatgccgcctgcgagcaggtgctgcgctttcgccagcagctggcgcggacgctggcgacggtggtgaatcttatcgatcccggcgtgattgttctcggcggcggtctgtctaacgtggcgctgctggtgaacgacctggaggcggatgtcgccccgctggtgtttaccgaccatttcaccacccccatcgtgcctgcccgacatggtgacagtagcggcatgcgcggcgccgcctggctggccgtccgaagcggagtcgaaaatgaaacgttcacagattaa

SEQ ID NO: 189490 - DNA, 861 bp, Klebsiella oxytoca
atgttagtttcaatgcacgaattacttaaacccacccgtgaacatggttttgctatcggcgcatttaacgtggcggatagctgttttattcgcgccgtggtggaagaggcggaagcgacaaatacgccggcgattatttccattcaccccagcgagcacgattttgttggcgacgcgttttttagctacgtgcgggatatcacccagcgcagccgcgtgcctttcaccctgcatctggatcatggcgcctcggtggaacatgtcctgcgcgccattcagtgtggcttcacctcggtcatgatcgatggttcgctgctgccttatgaagaaaacgtggccctgacccgcgaagtggtgcagctggcgcacgcggtgggcgtgtcggtcgaaggtgagctggggaccatcggccagaccggaacctctgtggaaggcggcgtgtcagaagtcacctataccgacccggcgcaggcggaagattttgtcgcccgtaccggcgtggatacgctggcggtagcgattggcaccgcgcacggtatctatccgaaggggatgcagccggagctgcagatgcacattctgcgcgatatcgccgggcgtctgtcgattccgctggtgctgcacggcggctcggctaatccggatgcggaaattgcggaatccgttacgcttggcgtcggcaaaatcaatatttccagcgatatgaaatatgcctatttccagaaagtgcgcgaaattctgacaaaagagacatggtgggatccgaatgtcatttatccggaaccgattaacgccgcgcggaaggtgattcgccacaaaatgaagctctttggctctaccggcaaggccagcctgtactaa

SEQ ID NO: 189491 - DNA, 852 bp, Klebsiella oxytoca
atgtttgccgatatgaaaagtatggtgatcaaagcctggtgtgaacggtatgccctgctggcgattaactgcatgaacctggaaagcgcacgcgcggcggtgcgcgtggcggaaaaacatcgcgcgccgattattctcaacctgtatcaggggcatctgtcgcactttccggcgacgacggcggcggcggtagtcagggtactggcggaggaggcgagcgtacccgtgacgttaagtctcgatcacggcaaagagccgataaaaatacgtcaggctttccgcgccggatttagcgggttaatgatcgatgcttcggcgttcgcgctggcggagaacatccgccagacccgagaggtcgctgaactggccgccagcgttgggctgtgcgtggagggcgaactggggcacctggcggatgcgccgcgctacgaccaggccagcaatgccgatttaatgacccagccgcaggacgtccctccctttatcgaacagaccgggattgacctgctggcggtctccgtaggaaccgcccacggtatgtacgcccccggcgtaaaaccgatgctcgatttcgaccgcctggcgcagatacagcgcgcgtcatccgtgccgctggcgctgcacggcgggagcggtacgccgttcgagcagctgcaacgttgcccggaattcggggtcgcaaaaatcaacgttggggcggcggtatttgaagcggggaaagcggcgctgctgcacaccctgtgccacgacagcaccattgagctggccgatgcgctatcggtgatggagcaggccagcgctgacgccatcgttccctatttacacgcatccggctcaatcaacaaagcctga

SEQ ID NO: 189492 - DNA, 1092 bp, Klebsiella oxytoca
atgagtgagaataaaattcccgtctcacaggaaattaagaagcatttattaaccggtatttcatggatgataccgctgatcgtcgccgccgggatctgtatcgcgctgggacaagtccttggcgggacgaacgttggcgagaaaaccggcaccattccgtggatgttaaaccaaatcggcggctggggaatggggctgattgtgcccttgatctgcgccgctatcgcttactccattgccgatcgtcctggattcgctccgggtttgatcgtgggttttgtctgcgggcaaattcataccggttttattggcggcatgctgggcggattcctcgtgggctacacggtactggcgctaaaacactatattcggctgccgaagtcgatgcaggggctgatgccgattatggtgctgccggtattaagcaccatcattagcggtttgctgatgatgaccctgatcggcaagcccattgcctggctgcaggacgcgctgattcacatgctggagtcgatgcagggcggctcgcgtttcctgctgggcgccatccttggcgccatggcgaccttcgacttcggcggtccggtgaataaaaccatgtcgctgtttgccgatggtctgctggtcagcggcgtttacggcccggaagcggtgaagtttgtgggttcgataatcccgccgttcggcatcaccctctcgtttctgctgacccgccataaatacacccgtgccgaacgcgaagccctgaaggccgcgttcccgatggggatctgcatgatcaccgaaggggtgatccccatcgccgcccgcgatctgctgcgcgtcgtgggatcctgcgtggtggcgtcagcggtggccggtggcctgatcatgacctggggcgtggagagtccggtgccgcacggtgggatgtttgtggtgccgctctttacgcatcccctgctgttctgcctctctctggcgattggcaccgtgatttgcggtgtgatgctctcgctgtggaaaaagccggtaaccgagcgcgatgaagagtttgatgagctgaacgaccaaaaggtcaaagacgacgaaatcacctttaccctcgaataa

SEQ ID NO: 189493 - DNA, 315 bp, Klebsiella oxytoca
atgaatattgtctgtgttgctgcctgtaccgcaggtattgctcatacttatattgcacgtgagaagctgattaaaggtgcgaaagcgctgggccacaatgtcaaagtcgaaacccagggaaccattggtactgaaaatgaactggcggcggaagatattgacgctgcggatgtcgttattcttgccattgatgtgaaaattaaaggcgaagagcgttttaaaaataaacggattgtcagagtaaaaacggaagtcgtgattaagtcgccgattcagtttatcgaaaaggtcgaaaaatccttagcgaatgcctga

SEQ ID NO: 189494 - DNA, 471 bp, Klebsiella oxytoca
atggacataaccaggattttaaacaccaaacgcgttttgttagatatgcacgctacgaataaagcggaagccatcgaggagttaaccgacttattacaaaaagacggggcgataagctgtcgagaaacctttattcaggatgtctggcagcgtgagtcggaaggctcaacggggtttgaaaatcatattgcgatcccgcatggaaagtcgtccgccgttgttaataccacccttgccattggccgcacccggcaggatatcgcctgggaaacgctggacggcagccaggtacgctgcattattttatttgccgttcgtctggaagatcaaaataccacccatattcgcctgttgtcccaggtcgccggagcgctggcggatgatgacattattgaacaactgctcaaagaaaccagtccgcagaggattattgatctgtttaaccaatatgccgagtcggacatttactaa

SEQ ID NO: 189495 - DNA, 1572 bp, Klebsiella oxytoca
atgcaaatgattacctcacgacagaacagattattgaaatttctcctgccccgcagagaatacgttacgctgatgaaaattgctgaatatttaaatgtttcagaaaaaacggttcagcgtgatttacgctttttagaacagtggttatctgagtggaaaatgactatcgacaaacgctcaggcgccggcgtgatgctgatcgctgataatgtcacggatctgctgcaattagaccaattactcggtaacgagggggaggacagcgatgtcatgatgaataactcccggcgtgtgaaaattgcttcgcagctcttaagtgagactccgcgggagacatcaattaataagctctctgagcgttattttatcagtagtgcatctatcgttaatgatctgaaaattattgagtcatggattgctccgctcggcttaacgctgattcgtagccagagcgggacgcatattgaaggcagcgaaaacagcgtccgccaggcgatggcgtcgttaattaatggggtgattaatcataatgagcccggctgtattatccattcccggctggactcaggaagctataaagcgctggtgcattattttggtgaggatgacgttttatttgtacagtcattattacaggaaatggagcgcaagctgtgctggtcattaggcgaaccgtattatgtgaatatttttacccatatcctcattatgatgtatcgcattacccgtgggaatgccttaccgcggcgtgaacaggggcagcagatttttgatgagacgatatttagcgttgcccagaatatgctgcgaaaaattgaacaccgtattgaccattcgctgccggaagatgaagtctggtttatttatcagtacatcatctcctctggcgttgtggtggaagagcgagatgatgtcagcatggtgcgctatatgcattctagcgatgaggcccgacaaattaccgatcgtctgattagcgctttttccaccatgattgatctcgatttaaccgccgatcgcgcgttatacgatggcctgctcattcatatcaagccgctcattaaccgccttaactttcggatttatattcgtaaccctctgcttgaggatatcaagggcgagctgacggacgtgtggccgctcacccagcgggcggtcaatcaggtttttagccgctggggcgagcgtgcggtttccgacgacgagattggctatctcaccgttcatttccaggcggcgatggaaagacaggtcgccagtaagcgagttctgctggtttgttctaccggaatcggcacatctcacctgttgaaaagtagagtgttaagggcgtttcctgactggaccatcgtcggcgtggtttcggcaagcagcctgcatacccttcagccgcaggacaagattgaactggttatttcgacgatcaatctgccggaaatagctctgccggtagtctatgttagcgcattttttaatgatgccgatatccggcgggttacggaaaaaatcgttaccgacaaattacatcgtgcggcaatatctgctgtagataatgaagttttatatccatga

SEQ ID NO: 189496 - DNA, 2319 bp, Klebsiella oxytoca
atgaaaatcagtgatggaaactggcttattcaaccagggctcaatctgatccaacctgtacaggtgtacgaggttgagcaacagggcaacgacatggtggtctacgtcgcgtcgcgcgaagtgcgcgagcgtgccgcccagctcgatgttccgctatttaccgtgcgcttcttctctccgcaggaaggcgtgattggcgtacgtatggagcacttccagggcgcgctgaacaacggcccacactatccgctgaacgtgctgaaagacgtcaaggtggagattaacaacggcgctgagtatgccgagctgaagagcggcaatttgaccgcgcgcgtcacgaaaggcgatttctggtcgctggatttcctgcgcgacggcgtgcggattaccggtagccagctgaaaaatgacggctacgtgcaggataccaaaacgcatcgtaactatatgtttgagcgcctggatctcggcgtcggcgacaccgtttacggcctcggcgagcgctttaccgcgctggtgcgcaacggccagacggtcgacacctggaacgaagacggcggcaccagcaccgaacagtcgtacaaaaatatcccgttctatctgaccaaccgcggctacggcgtgctggtgaatcatcctgagcgcgtctctttcgaaatcggctccgaaaaagtctctaaggtgcagttcagcgtcgaaggtgaatacctggagtacttcgttatcgacggcccgaccccgaaagaggtgctgaaccgctatacccggtttaccgggcgtccggcgctgccgccggcctggtctttcggcctgtggctgaccacctcgttcactaccaactacgatgaagcgacggttaacagctttatcgacggcatggcggagcgcaacctgccgctgcacgtgttccactttgactgcttctggatgaaggccttccagtggtgcgattttgaatgggatccggtgaccttccctgacccggaaggcatgattaagcgtctgaaagagaaagggctgaaggtctgcgtgtggattaacccctatatcggccagcgttcgccggtgtttaaagagctgcaggagaaaggctatctgctgaaacgcccggacggttcgctgtggcagtgggataaatggcagccgggcctggcgatttatgacttcactaatccgcaagcctgccagtggtatgccgacaaactgaaaggcctggtggcgatgggcgttgactgcttcaagaccgacttcggcgagcgtatcccgaccgacgtgcagtggtttgatggttccgatccgcagaaaatgcacaaccactacgccttcatctataacgagctggtgtggaacgtactgaaagagaccgtcggcgagaaagaagcggtgctgttcgcgcgctccgcctcggtgggcgcgcagcagttcccggtgcactggggcggcgactgctacgccaactatgaatcgatggcggaaagcctgcgcggcggcctgtcgatcggcatgtccggctttgggttctggagccacgatatcggcggcttcgaaaacaccgcgcccgctcacgtctacaagcgctggtgcgccttcggcctgctgtcgagccacagccgtctgcacggcagcaaatcctatcgcgtgccgtgggcctacgatgacgagtcctgcgacgtggtgcgccacttcacgcagctgaaatgccgcatgatgccgtatctgtaccgtcaggcggcgctggccaatgagttcggtacgccgatgctgcgttcgatgatgctggagttcccgcacgacccggcctgcgactatctggatcggcagtacatgctgggggattccgtgctggtggcgccggtgtttagcgaagcgggagacgtccagttctggctgccggaaggccgctggacccatctgtggcacaacgatgaagcgcagggtagccgctggcataagcagaatcacgatgtgctgagcctgccggtgtacgtgcgtgacaacactctgctggcgctgggaaacaatgaccagaagccggactacgcgtggaacgaaggtaccgccttccagctgtttagcctcgacgatggtcgcgaagccgtctgtcaggtgccgaccgcggacgggtcggtggtctttaccctgacggcgaaacgccagggcaacgtcatcaccgtcagcggtgacggtgaggccagcggctggacgctgtgcctgcgcaacatccagcaggtggcgggcgtgcagggcgggactcaggcgggtagcgagctgggcgtggtggtgaccgcgcagggcaatgcgttgacgattacgctgtaa

SEQ ID NO: 189497 - DNA, 1395 bp, Klebsiella oxytoca
atgaaagatcatattttgtccgtcaaagagaagattggctacggcatgggcgatgccgcaagccacatcatttttgataacgtcatgttgtatatgatgtttttttataccgatatctttggtattcctgccggctatgtcggcaccatgttcctgctggcccgcgcgctggatgcgatatccgacccctgcatggggctgctggccgaccgtacccgcagccgctggggaaaattccgcccgtggatcctgttcggtgcgattccgttcggcctcgtctgcgtgctggcctacagctcgccggacctgagtcataacggcaagctgatttacgccgcggtcacctacacgctgctgaccctgctctacaccgtggttaacatcccgtactgcgcgctgggcggggtcatcaccgacaacccaacgcagcgcatctccctgcagtcctggcgctttgtgctggcgacggcgggcggcatgctctccaccgtgctgatgatgccgctggtgaactttatcggcggcgaagataaagcctttggctttcagggcggcatcgcggtgctgtcggcgatcgctttcctgatgctggcgttttgtttcttcaccaccaaagagcgcgtcgaagcgccgccgagctctacctcaatgcgggaagacctgcgcgatatctggcgcaacgatcagtggcgtgtcgttggtctgctgaccatcctcaacatcctcgcggtctgcgttcgcggcggcgcgatgatgtactacaccacctggattatggggtccgcgggtctgttcaccgccttcctcaccacctactgcgtcggcaacctgattggctcggcgctggcgaagccgctcaccgactggaaatgcaaagtcagcgtcttctggtggactaacgccctgctggcggcgctgagcgtggcgatgttcttcgtgccgatggacgccgaaatcaccatgttcgcctttatcttcgtgattggcgtgctgcaccagctggtgacgccgattcagtgggtgatgatgtccgacaccgtcgactacggcgaatggtgtaacggcaaacgcctgaccggcatcagctttgcgggcaccctgttcgtgctcaagctgggcctggcgctgggcggcgcgctgattggctggatgctggcgggcggcggttacgatgccgcggccaaaacccagaacagcgccactatcaccatcatcatctcattgttcaccctcgctccggcggtctgttatctgctgagcgcggttatcgcgaaacgctactacaccctgaaaaccccgttcctgaaaaagatgatggcggagctggctcagggggcgcgccgcaacgaacacgacttcacttcagcgccgaacggcaaagaattgcaaaactaa

SEQ ID NO: 189498 - DNA, 1206 bp, Klebsiella oxytoca; identical to SEQ ID NO: 189357

SEQ ID NO: 189499 - DNA, 747 bp, Klebsiella oxytoca
gtgactcactcttttcagaacaaaatcgcggttgtgaccggcgcatcatctggcattgggcttgggatcgcacaggaattagcagcactcggtgcaactgtgatcattaccgggcgggacaagaataaacttgaatctgcactcagtactcttggaccggatgcgagtcagtttcaggtgaatgtatccagcctctccgaactggataatttttataagcaaatattgtcccggtttggtcgcattgacattctgatagcaaatgccggcatgggcgaatttgaacccctcgggcagattaccccggagaagttcgatcgtcagttcacaacgaacgtaaggggtgtcacgtttaccgttcagaaagcattaccacttatgaaaccaggaagcagcattattatcacgggctcaacggcatccattaatcccggtcagggcctcagtgtttatggaggcaccaaggctgctttacgtgcaatggtacgcagctggattgtggacataaaaggtgctggcgttcgcattaatatcctcagccccggaccggtggatactcaatccttacacgatttccttcctgatcccgttgacgccatcctgcagtctttgcgtgaccgcagcccgattggccgcatcggccagacagaagaaatagcaaaagctgttatcttcctcgccagtgatgatgccagttatatcaacggcgcggaaatttttgccgatggcggcgcatctcagatctga

SEQ ID NO: 189500 - DNA, 492 bp, Klebsiella oxytoca
atgattaattccgttcgtgcagaaaatgaacagcattatttcgatgagttagaaattcagcggttactcgctacctatgcccacaacctggatgacgggaaatttgctgagaatgccgaattgtttaaacatgctgaatttattgttcttagtgatatggctcatggtagtgaagaggttgagcagtttcttaaccgtggcgttcagcgtcataaggacggaactccccggacgtggcataacgtttctaatgtgctgatagatgtttcaccttccggtaattcagctacctgcgtcagctatttcacagtgcatcaggaactggaggggtttcctttgcagcccgtatgcacaggacggtattacgacagttttgaaaaacacgacggccagtggcggtttacatcgcgcaacgtggttccccgtttgatgggtgcacttcagtttcatgtgggcacgcctatcgacagttcgcagactgagagagcgtag

SEQ ID NO: 189501 - DNA, 984 bp, Klebsiella oxytoca
atgaaaacattactgatttatggcgccaccggttacacgggacgcatgaccgccgcgcaggctaaaagtgccggcctgaatattattattgccggcagaaacaggcagcgactggccgcacttgccggtgaacttgacgtcagtatgcgggtattcggcctggaggacgctgctgaaaccgcgctgcagctggcaggcgtcgacattgtgctgaactgcgccgggccgtttactgctacggcagaaccgctgatgaaagcctgtatagaccagagtattcattaccttgatatcacagcggaaattaacatttacaggctggctgagtcactgggagaaagagcggcgcgggccgggagtatgctactgccgggcgtgggctgggacgtggtacctaccgactgcctggccgttcgccttgcacgacatgtaccggaaccacgacggttgcgtatagcattacaggtggccggaacgatgtcccgggggtctgccgtcagcgcaggcgaaataatcgcagccggcctgctggaacgtgttaacggtattctgatgacgaaagaggatgcgcagcccggctggtttgattttggtgaaggccctgtggcctgtgcgccgctttcctttggcgatctggtgacggcatggcattcaaccggtattccgaatattgagatgtttgtgcatgtaacaggggatgcctttccgcagggtgatttgtccctgcttcctgaaggacccgggcaggatgaacgcgatgcaaatcgcgcacgcgctgttgctgaggtcaccggggctgacgggagggtccaccgggctgtgatcgggacggttaacggatattcctatacgccgcttgcggccacagaggctgcgaggcgtgtcctgaacggtgacagttttcccggttttcagacaccggcgatcgtttttggtagtgagtttgcgctgagtattccgggtacgtggctccaactgtcctga

SEQ ID NO: 189502 - DNA, 405 bp, Klebsiella oxytoca
atgctcgatcatctgtttttaacggtcagcgatacagaccgttctgtccgtttctatacggaagtgcttgcccctctcggcatcacggttcgtcatgattatgacggaaaagaggggccgcccggccacccggatttgaaagggttcggtgctcagggccggatctttttctggctacgcgaaggaactgttgcgccagctgctgtacatgtcgggtttgtcgcgcgaaatcagacaatggtgaatgaagcctatgcttcagccatgcgtgccggcgcgtctgacaatggcgcacccggtgcccggcttcactacgatccccgctactacgccgccggcgttttcgaccccgatggctacagcctggaatttgtttataaagaatggcagcaccctcaaccatga

SEQ ID NO: 189503 - DNA, 744 bp, Klebsiella oxytoca
atgaaaattgtactggttaccggcggcagtggcgggatcggcgccagcgtggcgcaacagtgcgcggctaaagggatgggggtgattgtgacttataacagccatcctgaatctgccctgagggttgtgaaggagattgaggcttcaggcggccgtgccgttgcgctgcatctggatgtggctcgcaccgaaactttcggcactttccgcgacgccttactggacatagtgagtgtcacctgggaacgtgagcatattgacgtgctggccaacaacgccgggtttgggctcttcaacccgattgaaacggtgacggagagtgagttcgacagtctttttgccgtacacctgaagggcccttttttcctgacccaaaagctgctgcctctgatttgcgatggagggcacatcatcaacgttaccagcgccaccacgcgcgtggctacggcaggtgttgcgccctacgctgcctttaaaggcggccttgaagtactgacccgctatatggccaaagagttcgggccgcggcgcatccgggcaaacgcagtctctccgggtgcaatccgtacgccgcttggcggaggactgaatgatgaatttgagactctgctcgcctcacagaccgcgctggaacgcgtgggagagccggatgatgtcggccgggttatcgcaggcctggtctctgatgacagcgtctggattaacgcacaatccatcgaggttgccggcggctaccaaatctga

SEQ ID NO: 189504 - DNA, 915 bp, Klebsiella oxytoca
ttgatactggaacccctgcttgacgagctgcgtcttctggccgctcatgctcgaaactggcgaaccgaaaccggtatcccccgtgtggccatggtgcagggtaacgttcccgcacatgcactggctgcggtctatgagccgatggttaatctcatattgcgaggcagtaaatccatgacggtgggagaccgggtattcaactacaatcctgcttcttactttgttatgtcagtagatttgccagccgtaggcgaagtccatcccgaggcaaccggtgagccgtatctcgcggtcagcctgaccctgacgccggaacggattgcgacactgctggctgatttacctcccgtgaaggctgattcacagtcgggtgctttttccgttgctgccgtcacgcccgaactgctggatgcctgggtaagaatgcttcgcctgatgaaaagtcctgaagatatccctgctctcgcaccggtgtatgaacgtgaaatcctttatcatgttctgaaaggcccacatggctggatgctgagggatattgcttcaccgggaaccatgctggcgcggataggtaatgcgattcgctggataagacataattttgctgatgaatttgtggttgaatcactggccaggcaggaggccatgagcgtatcggcctttcatcgtcattttaagtctgtgacaaacatgagtccggtccagtatcagaagcgcgtccgtcttcttcatgccagaaccaaattactggcgcgtcagcagagcgtcacgtctgttgccatggaggtgggttatcgcagcgtgccccagtttaatcgtgagtacgcccgtttctttggccgctctcctttaaaagacgctgcaagtctccggaacgacgctgatgatgcagaaagctctctgaatcaccacgtttaa

SEQ ID NO: 189505 - DNA, 393 bp, Klebsiella oxytoca
atgtctgttatcgaccatgttgaaattgctgtaaaaaatgctcaggtatcgctcaaattctttgaagcagctctcgctccgctggggttcagcctgattatttctgtgcctccggagcgtactttatcgggaggtgcccggtacgggctgggcccggagggatatccgaggctctggcttcatgataaagacataactggcgcttcaacacatctggcttttgctgccagtgagcgggacatagtcgacgaattctggcgtgccgctctacaggcaggcggtatagacaatggcgcgccgggaattcgcgatcattatcattcacactattatgcggctttcatccttgatcctgacggtaataacatcgaagtcgtctgtcaggaaggatga

SEQ ID NO: 189506 - DNA, 600 bp, Klebsiella oxytoca
atgagcgataccgaaaaaacaataaaagcacccaggcggatatttgacagagagtctggcgtgcagacggctaaagcgctgtttcatcagcatggttatgatgctgtaggtatcacggaactgacaaagacgctgaacataaatcctcccagcctttacgccgcttacggtagtaaagcagggctgtttgaacgctgcctggatctctatgttgcagaaggaaacctgccggctgacaaaattctgactccgggcaggccgctggatgaggcggttgcagatctttttatgactgctgcacgtttatacgcccgatccccggtccagcgaggctgtcttgtggctgaaggtatgcgtgccgacgatccgcaggcccgggagctggcaagtcgctatggtgaggcaggaattcagtttatcagaaattatatccggcagtatgaacctgcacgggaccgcgagctttctgattatgtcgtgacaacgctgcggggcttttctgcagccgcagtaacgggactgtcaaaagccaggttaactgccgtggctcagctggccggtcaggcattcagcgctctcctggagccaaaaaatgtttaa

SEQ ID NO: 189507 - DNA, 747 bp, Klebsiella oxytoca
atgaatcagacatttaagggaaagttcgccgttatcactggtggcggaagcggtattggtctggctatagcgaaagatctgagcgacgaaggcgcagatgtcattatcactggccggaatgcacaaacccttcaggaggcggtaaaggcgctggggaaaaatgtaaaaggtattgtggctgacgtcagcagcaaggttagtattgatgcgctttatgaacaggttaaaacggaattcggccacattgatattcttgtcgctaatgccggcggtggggtccatgctccgcttggtgaaatcactgaaaaacagatccacgatcagtttgccacaaatgttaaaggtgttgtgttgactgttcagcaggctatgcccctgcttggaaagggttcgagcgtgattatcattggttcgacggcgtcagcagacccgggacccaccatgagtatttatggtgcgaccaaagccgcagtcagaaacatggtgagaagctggattacagagctgcacgggacgggtatacgcataaacattgtcagcccgggtcctgtgaatacagcgtctctcagagccgcatttggcgataatgccgaagaggggatcgccttcctcaccgctaaaagtccgttgggacgtatcggagagccggaagaaatagcctctgtagtttcattcctggccagtgatgcctcaagttatgtgaatggtatagagctgttcgcagacgggggtgcctctcagacctga

SEQ ID NO: 189508 - DNA, 2973 bp, Klebsiella oxytoca; identical to SEQ ID NO: 56202

SEQ ID NO: 189509 - DNA, 1071 bp, Klebsiella oxytoca
atgacacataatacaactcaatcacatgatattttatggattaatacacttaaagcggcgtgtatttttcttgttgtactttaccatgtaactctcccgggatttactaatacaatacccttcctcaccagtggcaaggatatcgcgaatttatggacattgcttaataaatatcttgagccttatcgaatgcctgctttcttttttatttctggattcctgtcttataaaagtgtaaaatttcgttcatggactgaattatctactggccgattaggaaatcttttgtatctttatattctatggaatattattcaatgggcattagtttatttaataacaaccgagatttctggtgaacgtatatcaacaaacactaatgcaatctattcttcctctttcatgaatctagtcaccttgtcatttttaggtatgagcagttcatggtatctttacgcattattcttatatttactcctagagaaaatcttcagaaatcatactcatcttttgttttgtatagctatagttattcattacattgcaacactaaaaatcataccgtattgggggccacaaagtttattaaaatatttcatcttctttcatgtagggttgaatcactcatccttaataatatccctcagtaatataagaatcaataactttaaatcatggatattacttgtgtcaggagcaatgatccaccgaatgttaggaattaataataattgctttgaatcgttattagggattataatctctatatatatttttcgcataataaacagtaatttcaaattacaaagaatcaatgagtttgggaggctgacattaccaatatatgtaatccacagaatattaatagagttattaggaatgctcactattcaatatgtattctctaaccaattattcaactctccatatttttctataatttggtcatcaggataccctattgttatgactctactatgcagtgtaatatctttggcactttggaaggtaataaataatggaaaaggtcagtggttattcgggattaaaaaattaaataatcagaactga

SEQ ID NO: 189510 - DNA, 867 bp, Klebsiella oxytoca
atgaaagctgctataaagcaaattattaaatctttaatgccatggtattttagggatatgattttatatcgtagacgttttggtcacttcccgaatttatcaaatccacagacattcaatgagaaaatatttaagagaaaacgcacgcaatgttttgataatgagctttactccactctcgctgacaaatataaagtcagaaatttcgtttcggttatcattggttctgaatatcttgtgccagtcattgatgttttttctgatgttaatgcattcaagaaaaatatttttaattataagaatgtagtgataaaacctaaccatggttctggtatggtgatatttgtaggagactatttaaaatatggagatgcaattaaagttatacgtgatgtaaaaagatggatgcggacagatttttcaaaaatagcctgtgaatatcactacaggaatatccgacgtaaactgattgttgagcaaatgcttggcgacataaattcccctccaacggattataagtttcatatttttaagaaacgtgaagggattttctttgttttacaagttgttgaacgaaatcatgaacgtccgccaatattcaccacgtatgtaaacaatttagaacaaccgtgcaaaggatattattcattaactaaagaacatatcaacatagctcgaagagctcttgagcaaagtattaagctaatatacgttcttgaatatgcacgaattgattggttagtgtacgataatcagttatattttagtgaaataaccctcactccagcttctggatatgttactggtttggggaaagagttggatttattaatggggcaacaatgggatctacccattaaaatataa

SEQ ID NO: 189511 - DNA, 639 bp, Klebsiella oxytoca
atgaacagagatacaataacaaacacaatatggatgtgttcagaaaaaatgatttcaataatcggtttttttttagtgactgcatatgtctctagatatatcggaccagctgtagtgggacaattagcatacattatctccatataccaaattgtacaggctattgctaagtggggaggcgaaagtataattttccgacgtaccagtaggaaacctagttcaggatgttgctgcttgcaaacatcaggaagtatacgtttagtgttttttttattgctcaccacaccggtgcagatttatttcttttacacacatgactctacgttttttattttttcaagtgcaattgcatttggtgctctatttagtgttcttgatgtttattcaatctattacaatgccaggctaatgtcaaaatataacactattgttaacacttatggtttagtgacaaacctattattacgtacattaatcgttataatggttttaaatcctatttggctaataatacctattttgattaacacaggactcccttatctttttaggagaagaaattacaagaaaaatcacgcagtagaaattaaaaaaaaacaaagtaccgaaaatacttcttccatagtggtaagcatatag

SEQ ID NO: 189512 - DNA, 693 bp, Klebsiella oxytoca
atgaaagagaaaaagaaaaagaaaatgaagggaagcaaaaacatttactatcattatattcaggaggtaattaatttatcaacgcaaccaatatgtataagggaaaatagcggagaatttctgatttgtaataagtcattttcagaattctttttaagagagttaaagttaactgaatggctatcatcagttgattttgagatatctcacaaactctgtgagcttgaaattgaagcttattcattagatatcggagtggtcatcgaagagaatattgttgtgaacggtaaaatgtgggactttattgttacaaaactaataatcgaaaataacaccattaccgtatggaaattttcaagaatatatagaaaaataggcatggcaaacagatttagttccaatatattgaatgcaataactagttttaaagaaattgtcgcagaacttaatgaaagtcaaagaaacactttggctctgtattacctgggcgcgagtcataattttatttctaaaatacttaatatttctgtaggaacatcaaaaaatagaatcttacatatacaaaataatatcccaatagataacaaagatgaaatattcataatcatacatgtaagtggaatgtctttagtttttattaagcatgtaatacgacttttaagtaccaatgttaatagattgttaaaaaaatag

SEQ ID NO: 189513 - DNA, 354 bp, Klebsiella oxytoca; identical to SEQ ID NO: 59978

SEQ ID NO: 189514 - DNA, 363 bp, Klebsiella oxytoca; identical to SEQ ID NO: 59977

SEQ ID NO: 189515 - DNA, 2484 bp, Klebsiella oxytoca
atgaccgccgcatcaactgcgcctcacatcgcgcagccgggtcgcgctgacgccatccggtatgattacgagtggcagaagccgagacctgccatttatgttgataagactcctgctgttgatctggtagaacttggtcaagagaaggagtttttggcgtgggtaaaagtcacccttgcgccgctacctcgctttattcgcctgcgcctggcttcccgcatcgacagcattcacaccatgaagggcagacacatcgcccgcctggcgctgcgcgatatcatccgcagggatctgccgcctatcaatatggttaatgagcaatatgctattgcgatgaccgatgaggctaaatctcaggccgatacggcatttaaggggttaaacccgctttatcacacgttcaacaccctgcatgggctggttgagcgctttaatcacctgccggatttcacgccggaagatgtcgagctgctggcgcaggatatcgccatctatatgcggtctgtgctgagtgaagttcatgaaacgatagagacgcagagtgatcgcaaatatgccgggtacctttacaccgaagcggccatcctcgcgcggcttttcttcctgacgccaccgagctggggaaagtattgtcgcggcgcgttgtttattgatgaagctactaccggcatcagcaagatgctggatgatcgctactggcaccgcaacctgaaaaagtacgccacgcgctggcgcgagcatctgcacattgcttttggcgatgtgaaacggggtgctgcaccgtattgcagtaagcaccacgttgacgagtgggacgccagacgcaagcgcagccgcgcgatcatggcccgccttgagctggaagatcaggacaccaaagaacgcatttcgcttattgagcagatcgataagagcatatctaacccggcattgcgccgcgttgaacttatgacccgcatcggcggctttgagaaggtagccaccgaaagcggctacgcgggccagttttttaccctgacagcaccatccaaataccacgcatataccgtattcggtcatcgtaatgccaaatggaacggcgccagcccgaaagcgacgcagcgctaccttaaccgggtatggcagaaaatccgcgcagagctggcccgccgcgaaatcccggtttttggtttgcgtgtagccgagtctcaccacgacggtacgccgcactggcatggcctgctgttctctttgccggaacattccgccgagctgatggaagtgatggaagactacgccacccgcgaggatgcggaagagttgcagggtaagcatggtaaccagccgcgctttgacatgaagcctatcgatcatgagatcggcagcgccaccggctacgtggtgaagtacatcagcaagaatattgatggttacgcgctcgacggtgaaaccgacgacgaaagcggccggccactcaaagaaacatctaaacacgctaccgcctgggcttcatgctggggtatccgtcagtttcagtttttgggtggcgcgccggtgtctgtctggcgcgagttgcgccggttccgcaatcaggaacaggccgacaagataaacccgctgtttgccgagctacaccgcgcggccgatgctggcgactggcagcaatacactcaattacagggcggcgcactggttgcccgccgcgatctaccgctgcgcatctggtaccagcagaaagacgagccgaatgattacggtgaatatcgtgacctcatcaaaggtctgatgatgccagccgttcagatcccacccattgaaacccgcctgcattcctactcaatcgtaaggaagaaaccggaggttttagacgactccggccaggtagttgactttgattttgaccttccgggcgcgtctgcgccctctaggactcgtgtcaataactgtaccgaggttaaaaaacgaacaaatcagccccccggatcaccgccattaatgacagtgccagctgagcgggaagagcctgaacagttcgagatcggtcagttaacacgcgaacagcgaaaacaggcgtttgaaagcatccataaccacaaaccgcagcggcataaatcccccgccgatgagtttgaggcgctggcgtacagcattaccgtcggcgactgtaccgaatttgacacccgcagggcagaaagttatctcaaggccgcccaggagattaggcggagagaacaggttttatcaccggaaatcgccggactggcgggcttagttcagtcatgggcgaaagtgaagaaggtgctgatcagtaaaccgcaggctatacagctggcgcgcggtaatgaagtgacggtgctggatacggtatatcgagcgcatccggttacgggtgagttgatcattgcaggcgttgataaaccgtggcgcaaaactcttgcagatcataaggctggcgagctagcggctcgctggaagaaggcagctaaacggaaaaatgagaggtaa

SEQ ID NO: 189516 - DNA, 201 bp, Klebsiella oxytoca
atgaaagtcaaagcgttgcagggcgacacggtagacctgttatgtcagcggcactacggcaccacccagggcgtgactgagatcgtccttgccgccaataaagcgctggccggtcagatctttctcgacgccggccaggtggtggagctgccggaaatcagcactgccgcgacaaaggagaccgtacaactatggagctga

SEQ ID NO: 189517 - DNA, 282 bp, Klebsiella oxytoca
atggagctgataaaccgcgcctggaactggacggtatacctctggtcgctgttcctcggtggcgtcggcatgatgacgcaaaaagactggttgaccgtcatcgccgcgctgacgggcgtggtggtggctgcgctcggcgagctgcatcgccgccgcatggcgcgcatccaggaaaccaacaacacgctgctgaatgaactgatcgacgctatccgtgacgacaccgagaaccggcaggacgttaaagagctaatccgcaccatccgggaggcgccgcgatga

SEQ ID NO: 189518 - DNA, 552 bp, Klebsiella oxytoca
atgaaaaagggaattattgcctgttccatcgccgcgatcatctcgctggccgccacattgtggccgcagacgctgcgaaccagcccggaagcacaactgaagatggcgaagtacgaggactgccgaaaaaccccgtactactgcccggcgggcgtgctgacggtgggccttggttccacctcaaaggtagaaaatcgccagtatgccgagggtgagatcgccgagcgctgggttaacgacctcctgcgtgctgagaaatgcgttaaccgtgaatttaacggtgctgctgcaccgcagaaagtctttgaaggcatgaccgacggcacgtttaacgtcggctgcaccgggctgggctggtacaccaatggaaagggccagaaagtcagaacaaccctctggcgagacgcacaggcgggcaactggaagggagtctgtgagcggctgacggactttgtgaactccggcggcaagcgcctgcaagggctggtcaaccgccgggaagagtttaaggcctggtgcctgtctgatccggagctgaagggggtgaaatga

SEQ ID NO: 189519 - DNA, 396 bp, Klebsiella oxytoca
atgaaagcgatagccattcttgccatcgtgatgtttgttctgctgattgccgctgccagtggacttgcctggcaaagccataagcgcgaacaggccgaaaaatctctggccggtacccgggaagaactgaagcaaaccggcgacgtgctgaccgaggtcagggcgttacgccacgacgtcagcctggtagaagcggggatgaagaagataaaccagcagcgcaccgcaacgggagagcaccgacgtgaaaacatcaaaaccacactggccgatgacccatgcgctgttggtcctgtgcgcactactgtcgctgacggcctgtaccagagagccgaagaagtcagcaccgcagattattcaggagcccttacccgaaagtctgacggcaaaaactga

SEQ ID NO: 189520 - DNA, 459 bp, Klebsiella oxytoca
gtgaaaaaagctgaactgctgcgcgctgcgctgattgccggtaacacctggtgcaaagccaacccggaacaaatcacagtctgggtggagaaaggtcacatccagattgaggcgaccggcgaagcgtcgttcatgtaccactacaccattcaggtgctggcgatggattttcccggccagattgatgatctcatgctgccgctgctggcgtgggtatggcagcagcagcccgatctgctgctgaatcccgacaataaccgcaaggtggagtttgacgccgatatcgtcaacgacgatgtcgccgacattctgtttaaggtgccggcttgggagcgtgtcatggtgaccgacgacaacggcaaaccgaaggcggagcatctcgccgagtcgcgcccacgcttcaatggcggggagtgggagatggtctttgatcctgagtccggaggcgcactggcatga

SEQ ID NO: 189521 - DNA, 639 bp, Klebsiella oxytoca
atgagcaacgatccgtcttttcatcagcttgatgaggtgtttgcggccattctggaaggggcgtccgtgcaaggccgcctgcgcatggccaggggcatggcgacgatgttgcgccagagccagagccgacgcatcggtaagcaggaagacccagacggcacgaaatatgaaggccgtcgccgcaaggtgctacgtgcgcgcgcaggcatcaaattaatgtggcaggggcaggaaagaagcctgcgcaactggcgtacaacccgcagcaggcgggggcgcatggtgagcggttttgacgtggagcgcggggcgcagcggtcattctatcgcgaggatattgagcgttatctcgatatcaacctaagcgaaacgcgccgcaataccactacggccgagccgatgttccgtcgcctgagaactgcgcgcttcctgaagtcacgcgccacgtctgatggtgttgaggtgggctattccggcgttgctgcgcgtatcgccagagcccaccaggaagggctacgcgatcggattaatgccagcggtgcaacggcggactacccgcgacgcgagctactgggcctgagtaaagctgaccgcacggccattttccgccacgtgatcaactcgctggagggacgctga

SEQ ID NO: 189522 - DNA, 366 bp, Klebsiella oxytoca
atgacagagcgctatcgcggcatgaatgccgcaggcaccggcaccctgaccgatgaggatcatgtgtggcagtcggttaacgacattctgctgacgccggttggcagtcgcctgatgcgccgtaactacggttcgctgtgccctgaccttatcgacagcccgcaaaacgatgttacccgcctgcaactgatgagcgcggcggtgattgcgctggcggcatgggagccgcgaattgtgctcgataccatcaatgtgacgtactccgccagcggatctgtgaccgccgaaatgtccggcatgctgactgagaccatggaaaaaagcacccgcgcggtgacgttaaggagcgccaatgccaacgattga

SEQ ID NO: 189523 - DNA, 900 bp, Klebsiella oxytoca
atgccaacgattgacctgtcacagctgcccgtaccaaccattatcgaagcgctggactttgagaccattcttaccgacgtgaaagcggtgatggtagctgcttttccggaggatcaacagtctgctgttgcggcagcgctgacgctggaatccgagccgttgaccataatcgcccaggcgatggcgtatcgcgaactgttgttgcgccagcgaatcaacgagggggctgcggcctgcatgctgagtcatgcgaccagtgacgatctggataatattgccgcgaatctggatacggagcgcctggttatcaccgaagccacagacaccacagacgcggtgatggaaaacgatgaagccctgcgcctgcgtgcgcaggctgcatttgagggaatgagcgttgccgggccgtcggcagcgtatgagtattttgcgcgcagtgccggcggccaggttgctgatgcgcgggcaaccagcccgtcaccggctgaagtggtggtggccgtcctgtcaactgaaggtgacggtactgcgtcggcggcactgctggccgccgttgctgccgccgtcaacgatgaggaagtgcgccctctgggggacagagtgacagtcaaaagcgctgagatcgttgagtacgcgattgacgcaacgctgtacctctaccccgggccggagtcggagccgattattaacgcagcaatggcgtcacttaaagcgttccttgcggataacgataagaaaattggccgcgatattgtgcgatccgccatttcggctgccctgcatgttcagggcgtgcagcgtgtggtgatcaatgcgccggccgccgacctccggattgataacactcaggcggcacgcaataccggttacaccgtggacaacggcggaacggatgaataa

SEQ ID NO: 189524 - DNA, 603 bp, Klebsiella oxytoca
atgaataactcacttctcccgccctcttcaacggcatggatgcgcagtgccgagagcgcatcagccaggctgtcggccattacggtggcacttcgcacactgtggacgccgacggcatgccctgttgatttgttgccgtatcttgcgtgggcactgtcagtagaccggtgggataaaagctggccagccgctaaaaaggtggcagcgattcagcagtcttactggctgcaccgccgaaaaggtacccgcgccgccgtgcgacgggtgattgaagatatggggttttcagccacgtttgcggaatggttcgacgtcggcgccgagccggggacattccggcttgaagtggatgtaaatgatgtcgggattacccctaaaacgctggatgaattaaaccgattgttcagtgatgcgaagccggtaagccgacacctgtcgcaattgaccattgcaaccagttcccgcggtatcgggtgggtgggggcagcaatatttgatggcgaaataaccactgtatatccacatgggtatatcgcggatgacagcatttattacgacgccgctgcgttttatagcggtaattaccatttcaaagagatatga

SEQ ID NO: 189525 - DNA, 1272 bp, Klebsiella oxytoca
atggcaacgtggaatgacgaaaaggcacgaggtgcattgcttgagatgttcaatgctgcggtgagaagtgccgatcctcatgtgaatttatctgctgcattgccagaaccacccaaggggcgatgcattgtggtgggggccggtaaggcttccggcgcaatggcagcagcactggaatcggcatggtcagatgtgccgatttctggtgtggttgtcacccgttatgggcatgccgtagcaacgcaacacattcgtattatagaagccgcacatcctgtttctgattcgatgagtgaagtggcttcgatgcttatcctagacgctgtaaaaaatctgacgtcagatgatttggtgatcgccctaatttcaggtggtggctctgctttgatggcgttgccgcgtaatggtattacgctgtccgaaaaacaggctgtcaacaaagcgttattacgaagcggtgccaccattcaggaaatgaacaccgtacggaagcatttgtctgatattaaagggggaaggctggcatatgccgcgcttcccgcgaaggttgtaaccttagttatcagtgatgttccaggcgaccagcctgagtatattgcctctggaccaacggtacccgatcagagcacctatgagcaggctttagatattctaagacgctattccatggaattgccggagtctgtggcgcatgtgctgagagaagaacgctatgccgtgagtgaaagggacattgagactgatgtgcggatgattgcgacaccggccaaagcgctacattccgcagctgaagttgcgcgtcggatggggattacacctatcattctcggcgatgcacttgaaggtgaaagtgcgcaactgggcattgtgatggctggaatagcgcgttctgttaaatatcacggacaacctgtaacggcacctgcggtattgctgtccggtggtgaaacgacggtcacaattgggtcaggcgttgcgaagcagggtggccgaaatactgagttcctgctgagccttgcgaatgcattggcaggtgaagaacatatttgggctctcgccggagatagtgatggaatcgacggaacagaggatgcggccggtgcgtttgtcagcccgagcacgcttgcccgtgcaattgaaagaggtctaagcgggaaaaatatgctggctgaacacgacagctacactttcttcgcaggaatcaatgaccttattaaaacggggccaacattgacgaatgttaatgatatacgtgcaattttaattggttaa

SEQ ID NO: 189526 - DNA, 1068 bp, Klebsiella oxytoca
atgcgtaactacaaaattgcggctattcctgctgatggtattggtactgaagtgattgccgcaggcgtaagtgttttagaaaccctgcaaaaaaaattgggcgatgtcactttccagattgagcattttgactggggttctgattattataaaaaaaatggtgtgatgatgccggagaacggcctggaaacactgaaaaattttgatgcgatttattttggtgccgtaggtgcgccggacgttccggaccatatcactttatggggtttgcgccttccaatctgccagggctttgatcagtatgcaaacgtccgtccgactagaattcttccgggtattgagtctcctctgcgtaatgctggcccgggtgatctcgactgggtgattgttcgtgaaaactcagaaggtgagtattctggtattggtggccgtgcacatcgcggattaccggaagaagtgggcaccgaagtctcaatcttcacccgcgttggggttacccgcatcatgcgctacgccttcaaacttgcgcagtcacgtccgcgtaaactactcaccgttgtgacgaaatccaatgctcagcgtcacggtatggtgatgtgggatgaaatcgcggctgaagtggcgaaagagttcccagatgtggtgtgggacaaaatgttggttgatgccatgacgcatcgcatgacattgcatccaaaaacccttgataccattgttgctacaaatctgcatgctgacattttgtccgatctcgccggcgcgttagcgggcagcctgggtgttgcgcctacagccaatatcgatcctgaacgccgcttcccgtcaatgttcgagccaattcacggttctgcatttgatatcaccggtaaaggtattgccaacccggtcgcaactttctggactgctgcacaaatgctggatcatctgggtgaacacgaagcttcacaacgtctgatgcaggcagtagaggaagtttgtgctgccggtattaaaacgccggacgtgggtgggaaagcgacaacacaagatgttaccgacgcggttatctctgccattatgaaagcttga

SEQ ID NO: 189527 - DNA, 915 bp, Klebsiella oxytoca
atggaacttacacagcttcgatgcttcattaccgtcgcagatgaactgcatttcgggcatgcctcgcagaagctggagatgcatccgtctgcactcgggcgttatatcaaattgctcgaagccagcctcggcacaaggttgttgtctcgttccacccgcaacgtggccctgaccgctcacggagcactatttcttgaagaagcacgagaaattgtctcgagagccgatcaactccagctacgttttcagaaacttgcccggcagaattccggacgtttgcgtattggtgccatcgacagtgctgcaatcagtttaatccctctgctcctgcatatattccgtgaaaaatggccagacgttgaagttcaaatcatggaagacaaaacatcaaaactgttgcccaagctgaaatcaggacgtctggatttaatatttattcgtccaccggaaaaaatggatagcgaactggaaaataaattcctgttttatgaagatgtcgttctggcaatatatgaacaacatcctcttgcgcagaagaatgaaatacatgctgacgatcttattaacattccaatgattgttcctgaaagaaaaatccgcccccacagctatgatttaactatggatttatttaatgatgttgattttaagccacagttaataaaaatttctgatgaaaagcagaccattattaatatggttgccgccgaattgggtgctgctattatgccgcgctgggtcagtcgtatgtcggtcccgagtgtgaagttcattccactggcgaaagaatacgtcagcataagaaaaaaattaccgatttctgctgtctgggttaaggattcccgtgatgaaactcgcgataacatgatggtcatcgtcatgcaggaacttgaacgtatctcgcggcaatattaa

SEQ ID NO: 189528 - DNA, 1296 bp, Klebsiella oxytoca
atgacaaattcattagaactatctgccctcaaaaaaataacatggcgaataatgccatatgtaatgctggtttatttcattggtttttttgacaggattaatattggttttgctgcgatgacgatgaaccaggaacttggtttttcagatgccgtttttggccttggcgcaggactgtttttccttgggtatttcttaactgatgtcccatctaatatcattctgcaaaaagttggaccacgcatctggttagcaagaatcctgttgagctggtcagtcattacgtattttatgatgaatgtcgaaacggctacggaattttatgtcctccggttcttgttgggggttgctgaagcgggatccttctcagggattatcctttatctcagcacctggttccctattaaacgtcgcgcacaaatgattgccgtatttatggccgcagcgccaatatctgcagtgttgggttcacctttagcgggaactattttaactctggatggcgcatttggttataaaggctggcagttaatgttcctgttctgcacagtagcagctggtgtagtgggcatattcacattgttctatgtgaatgaccgtccagaaaaaaataaatggctgacagaaccagaaacgaaatggctggtagatacgctggctgcagaaaaacaaaaccaaaatacaactattaaaacgagcatctggaaagggttgacagatattcgtgtgctgacgctggccgttgtttattttggaacatccgccgggttgtattctcttaatatctggtcaccacaatttataaaaacctttgacctaagcatgatgcaagttggatttgttaacgccattccacctgcgtttgcggccgtcgctatgattctgtgggccagacattctgataaaaccaaagaaagaacctggcatgttgttggcgcctgttccctggcgtgtattgggtttgtattagctggagttgctcactcattccctctcgctattttagcgttggtcatggcaaatatgggcatctcttcatgtaaaccgcctctgtggagtattccatcgctgttcctcactggtccagccgcagctgcagggcttggggcaataaatgcaatcggtaatttgggtgggtttgttggcccagccatgatcggttggctgaaagaaacaacgggcgactttagttacgcgctgtattttattgctggaatgctggttatttccgcactactaacactgtccattgaattcaggcgccgtaaattagaaaaacaaattgcctgttcataa

SEQ ID NO: 189529 - DNA, 900 bp, Klebsiella oxytoca
gtgagtaatcagaaatctatatccctgttacaggatgttatggcccggttcaccggttatatcggaaaacgcttaccggctgatgttattaaaaaactggaagagctgcgcgctaatgaagacgcgacactggctaaagtggtgtatgactccatggccgaaaaccagaaaagagcggatgagctggatcgtccctgctgtcaggatacgggcgtcattcagtatttcattaccacgggcgcgaatttcccttatctcgggcaactggaagaggtgttaagaaacgccacactggaagcgaccaaaaagtcaccattgcgccataacgcggtggaaacctttatcgaaaaaaataccggcaccaacactggctcgcggatcccgtggctcgactgggaaattattcccgatgacgaccactgcaccatcgaggtgtatatggccggtgggggttgttcactacccggtgcagccaaggtactgatgccaggccagggatacgaaggcgtaaaccagtttgtgtttgacgtgatcacctcttatggggtcaatgcgtgcccgccgctgctggttggtgtgggcgtgtcaacatccgtggaaacggctgcgcgtctgtccaaaaaagccattttacgcccggtggattcacagcacccgaatccggatgcggcaaaaatggaaaagttactggaagatgggttgaacagggttggactgggtccgcagggtctgggcgggaatgcgtcagtgatgggggtcaatattgagtcctcggctcgccatccttccaccatcggtgtcgccgtgtcgacgggctgctgggcacaccgtcgtggcgcaatccgttttgctgctgatctctcctatgaaattctgtcccacgagggtgttgtactatga

SEQ ID NO: 189530 - DNA, 609 bp, Klebsiella oxytoca
atgaaaaaaatcctgaccacgccaatcaaagatgaagatttactgtcactcagaaccggtgatgtggtgtacctgaccgggacattagtgacctgtcgcgacgttgctcaccgtcgtctgattgaactgggacgtgaactccctgttgacctgaaagggctggcgattttccatgccggacctatcgtggtggaaaagggtgaaaatgaatttgaaatgatctcgattggcccgaccaccagtatgcgcatggagaagtttgaaaaagagttcatcgagcaaactggcgtgaaactgattgttggaaaaggcggtatgggaccgaataccgaggaaggatgtcgccgctttaaagccgtgcatgccatcttccctggcggctgtggggttctggcggcaacctgtgtcgaaaaaatagaagatgcccaatggcgtgatctggggatgccagaaaccttatgggtcacccgggtaaaagagttcgggccgctgattatttccattgataccgaggggaataatttgattgaagagaataagaaagtctacaacgcccgaaaagtttctattatcgaagaaataaatcagcagattaaattcatcaaatga

SEQ ID NO: 189531 - DNA, 861 bp, Klebsiella oxytoca
atgaagttattaagtttcatcaatccgcgttccggtaaaaaaacctggggacatgttgaaggcgaccaggtttatgattttagcaaacgcctgtctgcctatttccctgatttgaaatcagcaattgccggtaatgcactgaatgaactgacacatatgaaaaaaggggaaccggatttccatctgagtgaaattcgttttcttccggtgattgaaaacccgagcaagatattctgtgtcggcatgaattacatggaaaagcgcgttgagtttgagcagaccattgatgcaccaacgttgtttattcgtttccctgattcactctgtgcccatggtgaagcgctctataaacccgaaagcagtaatgaatttgattatgaaggtgagctggccgtggtgattggcaagcgtaccgacaacgtcacacgggaagaggctttgcagcacgttgccggttacagctgttttatggatggctcggttcgcgacatgcaatattcctggttcacgtccggtaaaaactggcgcaacacgggtgcgtttggtccgtggatggtgacgagtgatgaaattaccgatccgcaggatttggaaattggtacctggctgaacggaaatcgtgtgcagaatgattctactcacagcatggtaaatactgttgctaaattaattgaatatatttcccgctttagtccgctggaagccggtgatgtcattatcacgggttcacctggtggggttgggaaaaaacgcaccccgccattatttatgaaagaaggcgatttgattgaagtggaaattggaagaataggccgtctggtaaaccgggtttctgctcactcagtgatcggttattattaa

SEQ ID NO: 189532 - DNA, 1695 bp, Klebsiella oxytoca
atgctagaagaaaacaatcagcaacgtcctctctatattccccacgccggacctgttttgctggaaattccgttgctcaacaaaggcagtgccttcaccagtgaggagcgcagcagcttcaaccttaaaggtcttctgccccagaatatcgaatccattgaagagcaggtcgagcgcgcctaccgtcagttcagggtctttggtaacgacctgaacaaacatatctacctgcgcaacatccaggatactaacgagactctgttttaccgattaataaacagccacctgactgagatgatgccgattatttatactccgacggtgggtaaggcctgtgaggagttctccaatatttaccgccgagcccgcggtctgtttatctcctatccggacaaggatcggattgatgacatgctgcaaaatgccaccaagcagaacgtcaaggttatcgtgctcaccgatggcgagcggatcttgggtctgggtgaccaggggatcggtggtatgggtattcccattggcaaactgtcactctacaccgcctgtggcggtatctcgccagcctactgtctgccggtggtgctggacgtgggcaccaacaaccagcagttgctcgatgatcccttctacatggggtggcgccatccgcgcatcagtggcgaacagtatgatgagtttgtcgatgccttcatccaggtcgccaaacgccgctggcctaatatcctgttgcagttcgaagactttgcccagggtaatgcgatgccgctgctcaatcgctacaaagacgagctgtgctgtttcaacgatgatattcagggcactgccgcggtagcgttaggtagcctgcttgccgcctgcaaagcctccggaacccggatttccgaaaagcgcgtcgccttccttggcgcgggcagtgcgggttgtggcatcgccgaacagatagtggcacagatgaaagcggaagggttgacggatgcacaggcgcgtagccgggtcttcatggtcgacagatgcggcctcatcaccgacaagcacccgaaccagctcgacttccagcgcaaactctctcagccgctggagcggatcagagaatggccggtggagggcaacatctctctgctggaggtgatggagcatggtcgcccggatatcctgatcggcgtctctggccagccgggattatttagcgaagaggtggtgaagactatgcacaagcactgtgcccggcctatcatcttcccgctctctaaccccacctcgcgggtggaagcgactcctgcggatctcattcgctggactgatggccaggtgttggtggcgaccggcagcccgtttgcaccggtggaatacaagggcaagcgctatgtcatcgcccagtgcaacaactcttacattttcccggggatagggctgggcgtcatcgcctctggtgccagacgggtaaccgatgccatgctgatgtcagccagtcgagccctggcggagtgctcaccgctggttaacggggaagacggcgcgctgttgccggatctggcagggatccatcaggtttctcgccatatcgccagaatggtggccaagtgcgccatgtcgcagggtctggcagcaaagctctcagatgaagtgctcaacaaatccattgaggcgaacttctggcaaccggaataccgacactatcgtcgcacttcgttctaa

SEQ ID NO: 189533 - DNA, 579 bp, Klebsiella oxytoca; identical to SEQ ID NO: 84561

SEQ ID NO: 189534 - DNA, 1974 bp, Klebsiella oxytoca
atgccacggagacaaatactcagcagtgaagaaaaagagcgcttgctggttgtgccggatgatgacgttcttctggcgcgcatgtgttttttgagtgaacatgacctcgctcttattaataaacaccgcagacctgcaaatcgcctgggctttgctgttttactctgttatttgcgagggtcggggtttcctcccgacaaaaatatttcccctcacgacggggttgtttcccggcttgcggctcatttgaaacttcagcctgatttgtgggccgagtatgcatcaagagaggtcacccgctgggagcatctggctgaactataccgctatctggaattatcccctttcaaccgggcgctgcaaaaaacctgcattcgccacctttatccccacgctatgcggacagacaaaggttttttgcttgcggaagaaatgctctcctggcttcacaataagaatgtcattttcccctcagttgatgtcattgagcggaccctggctgaagcagcaacgcttgcagacagggcggttttttctgcgcttaccgcgcagcttgaaccagggcacaaagcggcactggaccgtctgctgagatctgagggtgagcaaccctcacggctggcctggctgctccagcctccgggaaaaattaatggcaaaaatgtcctgcaacatatcgaccggttaaatgcgattgaggcgctggcactgcctgacggtattgcgctttccgttcaccagaaccggctcctgaaactggcacgcgaaggcaggaaaatgagtagccgggacctggcaaaattcacggatgttcgccgttatgcctcgctggtttgtgttatatcggaagccagggccaccctgactgacgaagttattgatctgcacgagcgtattctgggcagtctgttcagcagggcaaaacgcacgcaagccgaacggcttcagcaaacgggaaagctgattcagagtaagctgaagcaatacgttaccatcgggcaggcattgcttaacgccagagagtctggtgaagatccctgggccgcaatagaagacgtccttccctggcaggaatttatcaacagcgtggaagagacgcgcttcctgtcacgtaaggacaactttgacccgttgcatctgatcacagaaaaatacagtacgctgcgtaaatacgccccccggatgctgtctgcgttgcagttcagggctgcacccgccgcattgcagctcagtgacgcgctggacaccgtcagagagatgtatcgaaaacaactccgaaaagtaccgccttccgcgccaaccgggttcatcccgcaaagctggagaaaggctgtgatcactcccaccggcattgatcgaaaatattacgaattttgcgtgctgaatgagctgaagggagccttacgttctggtgacatctgggtaaagggatcacgccgctaccggaatttcgatgattatctgatcccgtctgacgattttgaaaaatcactccgtgataatcagctatcccttgccattccgaccgattgccatgagtacatcaagaaccgtatgacacttctggcatcgcgcctggaggaagtgaatgcgatggcgctggtcggtgatttacctgatgttgatatatcggataaaggcgtgaaaataaccccgctggataatagtgtcccttcagcagcatccccttttgccgatttggtttatggcatgctgcctcaccctaaaattactgaaattctggatgaagtggacggctggaccggttttacccgccatttcacgcatcttaaaaataaacacgtcagaccaaaagacagaaagttattactgaccaccatcctggccgatggcatcaatctggggctgacgaaaatggccgaatcctgtccgggagtgacaaaatcgtcactggagggcattcaggcctggtacatcagggatgaaacatattcagccgcgctggctgagtga

SEQ ID NO: 189535 - DNA, 1020 bp, Klebsiella oxytoca
gtgactgaacagcacaatccgcaacactggagtcagctggatacggaagaacagatccgtttctggcagggcgttgaagatggccacgttgaatcttttctggtttccccggaaaagaagcgtacccgtcgtcgtcgtggtgagcactccaccaaacccaaatgcgaaaacccgtcctggttccggccatctcactataaggcgctcggtggccagcttggccacgcctataaccgtctggtgaagaaagatccgctcacggggcaacacagcctgcgcatgcatatgtccctgcacccattctatgtccgggaacgtcagcgcgccgggcgaaaatatgctttccgtcctgaaaaacagcgtctcctcgatgcgctgtggccggtgctggtcagcttctgtgatgccggtaaacacacggtagggatgtgcgtgtccaggctggccagagagctcagtccgaaagacggcaaaggtaaagtcattccggaaactgaagtgaccattcgccgggtttcggcgctgatagccgagcaggtccgctttggtgtcctgggggtgtcagaagaaaccgcctgggatcgggagtcccgtaaacgtctgccaaagtacgtgtggatcaccgccgccggcttcaggatgctgggcgttgatttgatgaagctgcaggagcagcagcagaagaaactgcgcgaaagcgaggaacgtcaggcactcattaaagagggcatgttaggcgagcatgaggatatttctgtccataaggcgcgtaagcgctggtatgagcagcgtagtcgtgaggccctgcagtatcgtcgtgcacaaggcgcggcacgcaaacgcgccaaccgcctggccagaatgccccgggaccgccaggtctatgagatgacctgctggctgaagaagacgctgccggcagacgagctctatggctattctgagaacaagcttgagcagctggcggtacagcatctctatcagctggaactctcgctgagccatccagcgccgcattag

SEQ ID NO: 189536 - DNA, 267 bp, Klebsiella oxytoca; identical to SEQ ID NO: 112525

SEQ ID NO: 189537 - DNA, 567 bp, Klebsiella oxytoca
atgaaaaggaaaatagcagtaataaacagaacccgtgtccgcacaggatttgtggccggagtcctcagcctgagcctgttagcgctggcgccggcagtcgacgccgcgaccatcgagacaggtttttctccggaaggcacagccctgcagttggtcctgaagaccctcgattccgcgcagcaggaaatccggctgatggggtattccttcacctccccggaggtggttcgctcactcatcgcggcgaaacaacgtggggtggatgtccgcgtggtgctggaccagaaggcgaatagcggaaaagccagcgtagccgccctgaacctgctggccagcgcgggcattccggttcgtacggtcagcgcctacaagattttgcacgacaaagtgatcgtcgcggacaggcgcaatacagaggccggctcgttcaatttcagccgtgccgctgaccgttcgaattcagagaatgtgctggttgtatgggatgactcggctgttgcccggcgctacctgcagcactggtcgtctcgctggtcacagggaacggactggaaacagacatactga

SEQ ID NO: 189538 - DNA, 627 bp, Klebsiella oxytoca
atggcaaagatattaatgatgacaggcagtgccgttgttgtgctgagtctgctggggttcctggtgctgtttctgaaggaacgtgcaacagggaagacatccccggtcctacaagcgctgaaagcggcgggtattcgtaccggagaggctgaacagagactgtgtcgccagcgggtctggatgggtaatgacacgctgatgacgccccgggaacaacattttttccgggcattgctgaaacataccgaccggaaacactggctgctgtgcccgcaggtgcgagtggcggatatcgccagcctggcaccccatatcaggccccgctcccggacctggtggcagctgttccggatggtgtcacagtggcactgcgatgtggtggtggtggatatcaggacctttgccattgtggccgccatcgagctggatgatgcgtcgcatctgaaaaaacaccgggttcgccgggatatcctgctggaagaagtactcaggcaggcgggcattccgctgctgagagaccgggatgctgaaaagctggtcagacagatcagggaatttttaatacgtcgggaaactgaaactatcaccacaccattgacggtggtcaggggagaatacaaaggatga

SEQ ID NO: 189539 - DNA, 645 bp, Klebsiella oxytoca
atgttcagctatttcatgctgcgcactgagcagcagttattttgttatttatacgggggcgcgctggcactgtctctgcaactcttattttctccctcttttccgggaaatggatttatcctggtatcactgcccgttgcactattctgggccgggctggccctgtatacgcggcacatcgaccagatgaggaagcctgatgtctcgccgctcgtcagtatccgtgacggcatccaggtggtggccatgcttccgcggcatgagaaagcgcggcttgaatggaagattctgcaggatgatgaggtgtaccgccgtcagatgcacgctcttttaaacctgatgcaacgggttatcagtcggggatttctgtatgcgccggcagtgatactggcgggcgctggcgtgcttgtctggggggttccgcaggccggtgtccggctggtgaccgcccttcggaatatgtcccccggagagcttatgcatcagaccggcttcatcattcgctatgtgctgatgatttctgccatatcggtcctgatagcagacattgtggccggtcagggtctgccaaatgccttccggcgcgcgttgctggatcggttgccggcagaggcctggcgtatccccagagggacagaacgatga

SEQ ID NO: 189540 - DNA, 597 bp, Klebsiella oxytoca
atgtctgagaatatcattgcgctggttgattatgaaaatatcggaacgcttgaaaatgtaatgttgtcgcgttatgaacgtcttattttgtttaccgggtctcagcaggagtttattcgttttccgtccgtaacacatgccggtaatatatcggtcagtgtgtttcaggcgccctgcgtgtcgaaaaataatgtcgatttccacctggtacttgagctgggacgactcagcgtcaccgctccggaagatacgatgtttcatgttatatcgaatgataaagggtatgacagcgtgattgcattgctctgcaggacagggcgacgatgttgtcgtataccctcaccacgttcagcagagaaggcgaaaacggtgtctgcgctcatcagcaacgatgaggtgctacgcctgaccgataaaatacagtcattgagtaaaaagtctgcggtaaaccgacctgtaagcacctcgtcactgatgaattatattaaatgtcattccggtaacatcagaaatacagcgattttaaatcaggtcagggacgaattaatcaggcgaggcgtgattgccgtttatgaaaaaacggtggtctggcgctaa

SEQ ID NO: 189541 - DNA, 792 bp, Klebsiella oxytoca
atgaaattcaaattcggattgtattttctgctcccgtttatttcggctgtcgcttttaataccagttttgctcagaataatgaaccagataaaacgttttccgccgcccaggaaaaaagaatcggggaaatcgcagcggattatctgcgtgctcatcctgaaatactgattcagatgagtgagaaacttcagcaggagcaggaggcgaaacagacccgcggtcttaaatccactgcactggaacagcaggctaacattctgggtaataaaaatatcccctcctggggtcccggggacggaaaggtgatggtggttgaattctttgactaccagtgcatctggtgcagcaagttcgcacccgaactggagaaggtcatcgggggcaacacggacgtgcgttacttctttatggagtggccggtgtttggtagccggtggcctgcatcattgctggcggcgaaaaccggcctgcaggtctggaaagaaaagggctcggaggcttacaggagctatcacaatgcggtttatggtacaggactgaatgaagggaaactgacgcaggagattatcgaaaaggtttctggtcatattaaatttaagcagaatacgattgatgagataaataccacactgaaaaatattaatgatatcgccacggcgacgggattaaccggaacgccaggtattattgtgatgccggtgaagggcgcgacggaagaaaacgtcacggtcttttccggaatgactgaagcacagaatgttcaggcggctataaataaatcccgacaataa

SEQ ID NO: 189542 - DNA, 591 bp, Klebsiella oxytoca; identical to SEQ ID NO: 112526

SEQ ID NO: 189543 - DNA, 597 bp, Klebsiella oxytoca
atgaataaagtgatatatttttaccttattttgcttttgacgtacacagtcccccatgttgttaacgcgaaggtaacaacattagctcaagagccttcgcaggctaccactttgccctcagcatcaggctcattaacagaagaaaatgcaatccagagttcacaatctcaaaatctcctagtcttaaattctttggttaatgatcaaaaacaacaaatttcacaaatgcaggagaaaattgataaacttgaggatagtagcggccttaatttcgccgtatggtcaggtattcttttaacttctgttgcggttattttgactgctctgggaattgtaatggcagtattttcatttttcggttataaaaaaatgatcaatggtgcgaaagaagcagcaacaagaatttctacagagaaagcttcagaagtgactgaagaattagtgccaaatattactgaaactgttttgctcaaattgttggaagaaggaaatttcgacgatttgatctttgaaggtatagaaaaagtggcatatcgaggtattgagttctcaggtggtgatatgctcgaaggtagctcagaggagggagtacgatga

SEQ ID NO: 189544 - DNA, 510 bp, Klebsiella oxytoca
atgaaatttacaacttcaaatgagtggctttctcttccggatcaacaagttgcattgattcaaaatcaccagaaagaattgccgattgcgattggagcaatagctaaagatttcggaatcaacgttaaagtgtccacattggcagctggtatttctggcgaaataaaagatgagaacggagctattgttataagagtaaataggcatgatacgaaggaacggcaacgctttactctagcacatgaaattgctcactttttactccatcgagatcggattggagatggtattactgatgatatcttatatcgatcgaaattatctgatttcatggaagttcaggctaatcgcctagcagccgatattctcatgccaggacatcttctcgaaagaaaaattcttgaattaacacaaacggctgaattgagggatgagcaaaaaattgagagattggctgaagttgctggagtatctactacagcgataaaaattcgtcttggtaaaatttaa

SEQ ID NO: 189545 - DNA, 150 bp, Klebsiella oxytoca
atggtgattctaaattccggttctgtcgggacggcatcggtaccctttggcggtatcaaagcttccggtcacgggcgtgaaggcagttattatggtattgaagaatatatacacgtgaaatatgtgttgatggctggccagaaccgctaa

SEQ ID NO: 189546 - DNA, 1428 bp, Klebsiella oxytoca
atgactcttcttgggcgaagtttctttgtcagcactgctcttgctttgtctgatttcattggttttgtcgtttctatttatttagcgatcggttttgtatcactcacatcaattaattatgagggaattatttcatctaatgaacttgatggttggattgcattacattggtcccttgctttttgctgtgttggttggtattcgataagactacgccattatttctatcggaaaacattttggtttgaactaaaagagattcttcgtacccttgtgatattcgcaataatagaaattgctgttgttgcatttacgacatggtcattctcacgttttctttgggttatgacatggggttttgtacttgtactagtacctgcaatgcgaatgcttgtaaagcgtatccttgattcttttgggctatggcaaagagatacttggattataggtagtggtgtgaatgctcatgaagcatataaggcgatcagcagtgagcgcaaccttggattaaaaattattggtttcatctatagtgatggagggatatctgcgggagataatatagatggtattcctgtatcattgaatgaattgaaatggttagataatatcggaactaagacacaatttatcgtcgcggttgaatctcaccaaggagatatgaggaatgcttggctacgtaactttatgataaaaggctttcgttacgtttcggtaattcctactctacgtggtatgccgcttgatagtactgatatgtcttttatattcagccatgaagtaatgatctttcgtgtacaacaaaacttagctaaatggtcttcaaggcttattaaacgtgtgtttgatatagtaggggcattagcgataattgctatgctttctcctatactattttatatcagccgtaaggttaaaaaagatggcggaccagctatttatggtcacgaaagaataggaaagggtgggaagccatttaaatgtctgaaattcagatctatggtaataaattcaaaagaggttttggagcatctcttggataatgaccctgaggctaaaaaggaatgggaagctacttttaaattaaaaaatgatcctcgaattacaagaattggcaagtttttacgtagaacgagtcttgatgagttgccccagttattcaatgtccttaagggggagatgagcttagttggtcctcgtcctataattactgcagaactagaaagatataatgatgaggttgattactatcttttaagtaagccgggtatgactggcttatggcaggttagtggtagaagcgatgtagattatgagactcgtgtatatctggatgcttggtacgtaaaaaactggtcgatgtggaacgatgtagccattttattcaaaactatagctgttgttttaagaaaagatggagcttattaa

SEQ ID NO: 189547 - DNA, 327 bp, Klebsiella oxytoca
atgccaggtgctaacgtacgtaaaatctgcacaccaaagctgattgggacgttctgccacaaactggcggtttaccagatccgctgctgccgctgttttacgaccgatcgtggtcttgatgactttgccacggagtacgccccgaagacctattattttcatcaggcgttcaacagtacaccgggcgacgctaaagccctcgcggagcaactgacgccagacttttcgtgccccatagacactgtaattttctccgtaaacgcgttttatctcctggatgatttgagcatcgcacttttctcgttggctacatttctcaggatgtag

SEQ ID NO: 189548 - DNA, 198 bp, Klebsiella oxytoca
atgcaagagaaatattggcctaaaaatttacatctatggggaactcagatgattgaattaacggctaaaaaagaaaagttcgggattaacacgcctcaaaaggcaactgctgttagaataaatcttcatttatatacgcaattacattatcatagcgtgctcgaagatattgacaccgatgaagattgggtggattga

SEQ ID NO: 189549 - DNA, 435 bp, Klebsiella oxytoca; identical to SEQ ID NO: 180801

SEQ ID NO: 189550 - DNA, 894 bp, Klebsiella oxytoca
atgaataagaagctaataactatcgtggtggcagtgtgttttctgactggttgcgatcagggtagtgccgcagccaatacccaggccgcgaaaatccttgcagataagtccatcgcgaacatggtgcccgttcagggtggagagtttctcatgggggactttggtcctttagtgaaagagaagctgccgttcagtattcagcaggatgataagaaactgcataaggtcgttttgagtgactttgcgatatcaaagttcaaggtaacgaatgcggattacacggcttatctgaagtctactggggaaaaaaaaccaccagtcaacatcctggttaaagattatccatcattggcaaaagataattactctgttggcgtaacctggcaacaggctaaggattactgcgagtggttgggtaaggtgtcaggtaaaaagatcgacctgccgaccgaagcacagtgggaatatgccgcgaggtccagaggacaatatctcccctttgcaaccaacaatggtaagtttgaggaaggtaagaatatacccagtgaaaatcaactggatgaatacacagatggttacggatttcccatctaccccataggcaaataccccccaaacccgttggggctctacgacatgggcttaagtggttctgaatgggtgaatgactggtacgcatctgactattattctcactcccaagtgaatgaccctcagggtccagagaaaggcacccggaaagtattgcgcggatatgttggtggtgacaggcaatatgccctgacgatgttcagacaatcatctcaaccagtgcctaaattcggggggcgcgacaactatgaaaagtatggggtgagtcctttatacgtattccgttgtgtgatgaataagtag

SEQ ID NO: 189551 - DNA, 261 bp, Klebsiella oxytoca
atgtctaaaggattcgttttactcggtgataaaactacacatggtgggcaggtgctttctgcgtcatcgaccatgattgttaatggtaaaaaggttgcactgatcggagacaaagttagctgtccgaaagaaggacatggtgttaatgccattattgaaggttcgcctgaatggtcttcagacggtaaagcgattgctgtggatggttgccgcagtgaatgtggttgtcagctgatatccgtttactcattccagcagtga

SEQ ID NO: 189552 - DNA, 1425 bp, Klebsiella oxytoca
gtggaaacattcaaatttactaaatccaaacttgaaagcctgcctcctgctgatagtggtcaggttgagtatggtgataccgttgttaatggcctgcgggttcgcgtgggagttagcggtgttaagagcttctgtatctcccgtaaacgtaatggaaaattcatccgggccacacttggacgctttcccgatctcacgattgataatgccagggcaaaggctctcgaactgctgggggacgttgcaaccactggtaaaaatcccaacgtggaaagacgcatcaacgaaaaggcgtcagttacccttgccgacgcactggatacctacatcgagagccgcgacgcaagattaagcgcggacacagcaaaacaatatcgctccatcctgcaaaattactcaggcgactggatgaaacagccaatcgcctctatcagccgtgaacgtgtggaaactaggcataaagctgttaccgatggttccgtatggtttggcgcagataagtctacacttcgcgctggagttggaaccggcagtaaagcacaggccgatctctgggcgcgggttttacgtgctatatgccgtttcgcacacgatcattatcgggacaatgacggcaaaaccttactccctgaccctccaacaatggttcttagtacaaagcgtaagtggcatggaactgtcagaaagacagagcgcatacgcaccaatgagcttggcagatggtttaatgctttatctaccgtgcatgatattgccgaacaagggcgagatgatattgctgccgctgtatgtgatgccgtggaaatggctattttcaccggactgcgtaaatctgagattttagagcttagctgggatagggttaatctgggtggccgctatttctggattgataccacaaagaacggcgatccgcttgagctgccagttactgaaacccttctgaagttatttcgccgccgggccaaaatgaaatctgccgatggtttattggtttttcctggaaacaagggagttattaaagagtacaggcacattattgaacgcataagcgctgccactgtaccagaggaaaaccctgatttactcaagccgataccttttaaatggcatgatgcccgccgcactttcggcactgttgctgagctggtgggcgtcggaaactacattctaaaacgattactaaaccatcggacgatgagaagcgccgatgtgactcagggctatttgcattttagtgctgatgaactgatggagccagctacaagaatagaacgggcaatactcgaacattccggaaaaattgagagtaaaaaatcaattgatttaaggttattttcagtattggaaagtttaaatgatgaagaaaaaagaaagttaatctttcagttatcagaacatgaaaattcgaaggaggttttatga

SEQ ID NO: 189553 - DNA, 630 bp, Klebsiella oxytoca
atgaaaaaaagaacattagaacagctggaagatgatttaaatttttatgagtcattcattaaagaatacatgtcagtaatagaaggacatggaaatccagagtttacaatgtcattcggtagacgtggtgagagaaagctaatttcctatgaagaaatgcagtcttattctcttgatgaaagatatgagttatccaaaaaaatacatactgatactttttggtgtgatgaggatgatactacaaaagctataagggttttgtatgttcttggttttagagatttggcatttgcggttcataaagtaagtgctgaacatgcaattaataaagattttagtgataaaattaacgaaatcaagcgacaggttagcttgaaaaaagtaaacagcaaaggtgggaaaaatagaaccagtcgccataaagttaccgctttacaaattgcctcatctacatggaaagaagttcccggagccagcatggaaagcctttcaagaaaaatttatgatcatttgaacaaaaaacacagggatactcctgagccagggacgatcaagacctggctcagaacgtcaggattgaatcctgaacaattaccgaaaattaaagactacgaactagttataaagtag

SEQ ID NO: 189554 - DNA, 591 bp, Klebsiella oxytoca
atgaaaaaattatatgcccttgcggggcagggattcgaacactctgaaaacagcctgattgatatttcagtatcaacgatgagcagcctgcaaatggttgaatacatcaatgctgaccgtaaaacgaaggccgaagcggaggggctgaccttcccctgtaaagaataccgggtactgcaacacaaggattttctcaagaaaacaccgaaggttttaggtgaggagcactcagcgaaatttttcgctcagtacaaagacagcacagggagatatctgccgtgctatcagttccctaagcgtgaagcctgcctgatggctatgagctacagctatgaacttcaggcggcggtatatgactacatggaagaactggatcgccagaaaggtggttatctggcccataccatcaatgaacttcagcatattgttgcttccgctcgtcagttctctgatgaggattctagtgatgcgggtcgtcgtctgagaaaacgccaggatgatttggtgctgctggagaaagcggaatatctggttaaaaacctgagccagttaccgctgaacttcgggggaggtacttctggtgataaataa

SEQ ID NO: 189555 - DNA, 603 bp, Klebsiella oxytoca
gtgataaataaaacaaaggcagctttgcagagctgccaatgccactaccaaatgtttaagcaagaacagaataccaggatcagcgctggtggtcaaagcctgagcagaatgcatatatgcattctgggcatcgtatcggtgagtttttccaaagcactaaaaagtgctccgggcttttcctcaaatcgaggaaaagtacctcaaacgaataaacgcccattttggcgaaaaccttacctccgccaatggcggacattgggtcgcacagctaaaaactacccaaatatgaggtggtatcagtcttttggctcgataccgcgctgttgtagtttttcccggcaggcttctttaacccatgaactaaattggcctgttccggcagcagcgttgatttgttctaataaatcatcttcaaatcgaatgtgtttcattgtgctgcctgagcgatcaaagtttttttttgttttggatggttgcattggtagttaccgttggtgtaaggttaaactaaatggtaactaccatttcaatgtaaagcaactaaaaacagcgaagcccgccggtgctaccaacaccaacgggcctctgaccacaaaccgttaa

SEQ ID NO: 189556 - DNA, 189 bp, Klebsiella oxytoca
atgcctaattcaaaatggtcagaaattgatattgaaaatgagctgcgccgccttgagtcgatgctttcaacgtcgctttttatgaatcttgaagacgacaatgaacacagtatagcaatggaattaatcagtatgtcgttgtttcgaattcgtgagctgaaagagattagcgaggtgagccatgggtga

SEQ ID NO: 189557 - DNA, 192 bp, Klebsiella oxytoca
gtgataaatcctgaaaccaatgaccgctgggcggagaaaagcggcgaaatgattacggtggataatgtcgcttttaatctggtgacgttcattcgtgatggttacgaatttccttgcatatttccgctggaaagatttgttaaagaattcacttttgtaagtcgggggcagggatatgaaaaacgcgcctaa

SEQ ID NO: 189558 - DNA, 1821 bp, Klebsiella oxytoca
atgaaaaacgcgcctaatctgaaacatcttccaaaggaaaaatacactgaagccgttatttttgcgggaactgatgcatacgctcatgcaaaagggtgggaggaggggctgggtaaaaaaattgccgaagacacaactcctcctatttatcttgggccaaagcagttggcggaactggataacctgcaaattatagacaagggacgccgcacagcccgtgtttacctggctggaaatattgagccgatgctgattaacgtaattggtgaaaagctggcacaggcgggtgtacaggatgccaagttgtacaaggggattccagatagagagccggaggactggcacgattatctgaatcggctccgggaggaatccagcgaagcagaaaacaatattcaccaattgcctgtaacgaagagagcgcagcttcagacagttattgaggttagtcctgccctaaaccagatgggggcaagccagcgcggtgaggtactgcttgctcattacgatggtgagttagctgttcacgcagactctgacacggttcaccactacaacggagtgatctggaatccactcccggataaagaactgcaacgggaaatggctcaaatttacattgatgctgaggtggcttattcgcagaacgctatcaaatcggcggtggaaaccatgaagcttagcctcccggtcatgggggttacagctcgaaatcttatcggcttcagcaacggggtatttgatacccgaacggggcaattcagggatcacgataagaccgactggctgctaatcgctagcgaactcccgttcagcccaccagcggagggggagacactggagactcatgcgccgaacttctggaaatggcttcgccgttctgtggccagtaatgaccgaaagactgatcgtgttctggctgcgctgttcatggtgctggcgaaccggtacgactggcaattgtttcttgaggtcacggggccgggtggtagcggtaaaagtgtcatggcggaaatctgcacaatgctggcgggtaaggccaataccgtatcagccagtatgaaagcgctggaggatgcgagggacagggcgctggtggttggttactcgctgatcatcatgccagacatgacccgatacgctggcgatggtgccgggattaaggccataactggcggtgataaggtgtcgatagaccctaaacacaaggctccatactcgacacgtattcaggcggtagtgttggccgtcaataacaacgctatgacctttagtgatcgaagcggggggatatcgcgccgccgggtgattttcaatttcaccgaggtagtaccggaaaatgagcgggatacgatgctggccgagaagatagagggggagcttgccgtaatcattcgtcacctgctaactcgctttgccagccaggacgaagccaaacggctactgcatgagcagcagaaatccgaagaggcactggctatcaaacgtgagggggattcgctggtggacttttgcggctacctgctggcgtcggtggcatgtgatgggatgtttatcggtaatgccgagatagtccccttcagcccgcgcaaatatctgtatcacgcctacatggcatacatgcgggccaatggactgaataagccagtgtcgctaatgaggttcggaacggatatgcctggtgcaatggctgagtatggcaagaggtatgaaaaacggaaaaccaagcacggtatcaggtcaaacgttaccctgcatgacgattcagaagactggatgccatcatgtaacagcaactcagaaaacggtgaggtagagtaa

SEQ ID NO: 189559 - DNA, 183 bp, Klebsiella oxytoca
atgagtgtgaacaaaatcgaactggaaaacctgaaacgcgacctgaaggcaattattgacgccggggtaagcccttctcacgcacttgaagcattaaggcttattgagcaacgtaggatcacttccagcctggaatatctgggttcaatcatggaacacgcaccgtggaatattaaaagctaa

SEQ ID NO: 189560 - DNA, 183 bp, Klebsiella oxytoca
atgcttccgcaaccgctgacaggcggcaccgatggggtgggggaggttttcaggacaaaacccagactgccaggcaccacccgccccctcaaatttttacgcgcggtgaattttttcacagcagtaagccagaaggaaacaagaagttatggcaagaccacccaaaccgcccgcttaccttga

SEQ ID NO: 189561 - DNA, 192 bp, Klebsiella oxytoca
atgttaaaaaaagaaactttggagtctgccattatcagtgcagcaaaattgcaggggcatgagcttaacggccaggacaagctggtaatccgtaccagcgttgcggcttgtcttgccgcgaaaaaacggcaccgccagcggatgaatacaggcgcatttgagtggaaaaagccacaaagcccgcgccgctag

SEQ ID NO: 189562 - DNA, 162 bp, Klebsiella oxytoca
atggcatttattcttttacttttgtggatcggagcatcgatagttattggtaaattggctcaggccagtggccgttcgttcttcatatggtttgttatcagtatgcttatagaccccatatttggtgcgattctttttgctgtagtcgtgaggtcaaaatga

SEQ ID NO: 189563 - DNA, 1212 bp, Klebsiella oxytoca
atgccactaaatgcacgacagatagacactgcaaaaccaaaggagaaggaatacaaacttactgatggtggtgggttgtatttgctggtaaaacctaacggcgcaaagtattggcgtttgaagtaccgattttttgggaaagagaaaaagctttctatcggtgtttacccagatatctctttggctgatgctcgcctgaagcgagaagaagcacggaaggttattgctttgggtggtgacccgggagaagaaaagaaagcagaaaaattggctaaaaaagccagtgttgaaaataccttcaaagcgattgcgctggaatggcatgaatacaagcgtcctaactggtcgaaaggctacgctgaagatctgatggaagcgtttgagaacgatatttttcctgatatcggtaaacgacccattgctgagattacgccgctagaagtgctcaattcgctccgtaaattagaaaagcgaggcgtcctcgataagttgcgtaaaattcgtcaggcctgcaatcaggtttttcgctatgccattgtcactggcagggctgaaacaaacccagcctctgaactagccagcgcactgactgcgcctaagtctaccaattatccccacctgctagctggtgaattacctgatttcttacaagctcttgctgcgtattcaggtagcccgataactcggcttgccacacgcattttgatgctgactggcgttcgcactatcgagcttcgtcaggcagagtggaaggagtttgatttcggtaagcgagtgtgggaggtgccagtagaaaggatgaagatgcgccgcccgcatttggtccccttatctgatcaagttgtggcgtcacttcgtgaaattcaggcagttactggtcgttacaatctggttttccctggtcgtaacgacatcacaaaaccaatgagtgaagcgagcatcaatcaagtactaaaaagagttggttatcacggaagggctaccgggcatggtttcaggcatacgatgagtacgatcttgcacgaaaagggctataacacggcgtggatcgagttacagcttgcacatgttgataagaacactatccgtggtacttacaaccatgctcaatatctggagcagcgtagggagatgttgcagtggtatgcaaattatattgactctttagcaaacaggactgtgatgcaaggagtgtttgataaaacagcgtga

SEQ ID NO: 189564 - DNA, 1215 bp, Klebsiella oxytoca
atgaagctcaatgccagacaggtcgagactgccaagcctaaagataaaccctataagttagcagatggtgggggcatgtatctggaggtgttccctaacggcaccaaaagctggcgcatgaaataccgtatcgcaggtaaagaaaaacgtgtggtgtttggtgtttacccgaccattaccttagcggatgccagaagcaaaagagatgatgctaaaaagctgctggttaatggcgttgatccgagtgcgtttaagaaagaaagcaaactagcccaaatcgaagaagtaaaaaacacctttcagcaaattgcgctcgaatggcacaacatgaaagtgaagaaatggtctgcgggatatgcctctgacattcttgaagccttcaacaaagatgtcttcccgttcatcggtcaacgtcctgttgcagacatcaagccgttggaattgcttaacgtgctcaaaaagatggaagagcgaggtgcgactgagaaagctaagaaagtacgtcagcggtgtggtgaagtgtttcgctacgccatagttacaggcagagccgagtataaccccgcaccagatctcaccagtgctatgcaggggcatgagtctaaacattatccattcctgaccattgaggagcttccagccttttttaaagcccttgctggctactctggtagtgagttggtagtgttagccgcccgactaatgatcatcactggtgttcgaacgggtgaattacgtggtgcgttatggtctgaaatttatactgataaagggttatgggaaatttctgccgaacgcatgaaaatgcggcgtcctcatattgttccgttatccgtgcaggcattggaaattattgaaaaaatcagggcaatgactggtaattttcatctaatgttccccggtcgtaatgatccaagtaaaacaatgagcgaagccagtatcaatcaggtgtttaagcgaattggctataccggccgcgttacggggcatggattccgtcataccatgagcaccgttcttcatgaacaaggctacaacaccgcatggattgaaacccagcttgcgcatcttgataagaatgctatccgtggtacctataaccatgcgcaatatcttgatggcagacgtgagatgctgcaatggtatgctgactatatggatagccttgagaatggtggcaatgtgatgcatgggacgtttaatcgacgtgcatag

SEQ ID NO: 189565 - DNA, 867 bp, Klebsiella oxytoca; identical to SEQ ID NO: 134349

SEQ ID NO: 189566 - DNA, 207 bp, Klebsiella oxytoca; identical to SEQ ID NO: 134348

SEQ ID NO: 189567 - DNA, 471 bp, Klebsiella oxytoca
atggtgtcaaaaagacctcctcaaggtaccgccgctgaactatgccctggtcggtcgctggatattatggctatccagaggaaagctttaccatcgcaccatcgtctcaacgccggaaatcgctggggagaggcttaccggctgggtatttcactacctgaccgggatcgtttttgcttttgtccccctggtactgtacggcgccgtctggctggacgctccctcgcttacgggaggcctgctggccggcgggttaacgttatttgcgccgttcatcattcttcagcccgcattgggcttcggtattgcggcgtcgcaaacacctcgcccgtggctggctcgcttgctaagcgtgctcacgcatctggcctggggattcggactctatattgcggcactggctatcagagcgttggcttagccggacaacggtggttgctgggtacgcatcgccgcatagagggagcatag

SEQ ID NO: 189568 - DNA, 495 bp, Klebsiella oxytoca
atggcaaattcgtttcagaatgagataccgaaagcacgcgttaacatcaaactggacctgcatacaggtaatgggcagaagaaagtggaactgccgctgaaattactggttacgggggatttcagtaatggcctggaacagcgtccgttgtctgagcgggaaaaggtatatattaacaagaataacttcaacagtgtgttagggaaatttaatccgtcggtcaatatcgctgtccggaacaccctggccggggatagtagcgaagaaaatatccggcttacttttaaagatataaaagattttgaaccggagcaggtagccagacagatcccacaaatgaaggcacttctcgccatgcgcagcctgttgcgcgatctcaaatctaacctcctggataattccacgttccgcaaagagctgcagacgattctacgtgacccggcgttgagtaatgaactgcgtgacgaaatcgccgcgcttgcgccaaaagactga

SEQ ID NO: 189569 - DNA, 1923 bp, Klebsiella oxytoca
atgagtgcggcgcatcaccggctgctctggctgtggggcgggttgctcgcggcattactgtgcctgctgtttttgccactgaccggtggtgagcgcggttttgccattctgctggtcgccgccgctgtgactgccggtctggttgttgccggtcgccgtccgggcgaatcagcggagggagagtacgggctgaacgacctgccggacacgccgtaccgcctgccggtggtgctggtctgcggcgataccggagactggccgggagaaagtacggttcaccgcacggcgcaggggtgctggctgaaggtttccacggtacaactgcaacagacggtacgccatctgctctggcggcgtccggagctggtgtcacagctggcggtgatggtttgcgtctgtccgcagcagcatgacgacggggccttactcactgcccggttgcacgaactgcgctggcaactgacgcgggtacggcgtgatgcccggcgtcaggtgcctctgctgctgtccggcacccttgccggacgggcggtgaccgcaccggtgtggcagtctgcgctgccgggtgaggccattcaggtctggcaggacggcgaggctccgcaaagcgccggtgtctggctcctgcaggacgcccccccggcccgtctgcgcacgcagatcctgttcagcgcccatgcccgtttcgtcagcgaagagatcctgccggtactgaccggcgataacccggatatgcccgccgttcctccggcgatggtgctgtatcaccagacccggagcctgaaaacaccgggtgaacggtccctctggcagcagtttctgacccgtcacacagccctgaaccatatcgcaggctggcgtcctgaccacgacttccccccggacggcacagggttgccggattttatcctgcccttcctgccgcagggcgaaggcagaacgccgcaaagccgtatgctgcgccgggcgttctgcctgttcaccctggcggcgcttatcgccctgtgcagcagcgcatggaacaaccgccagttgctgcaccggctctcctttgatgttgcgcactattacctgattgcgataacggaccgcgccccgaaggcagatgcggtggctgtgctgcgtcaggatgcggcgctgctcaatgactggtcgcgtaacggcgagccgctgcgctacgggctggggttgtaccggggtgaacggctgcgcccggcggtgctggccgccattcagacgtacgtaccgccaccccctccgccgccaccggtgattaagcaggtgatacaggggccgcagacggtgcgcctcgacagcatgtcgctgttcgataccggcagatacgaccttaaacccggctccacaaaggtgctggtgaatgcactggtcggcattaaggcaaaacccggctggctgattgtcattgccgggcataccgacaacaccggcgatgaacaatccaaccagacgctttcgcttaagcgcgccgaatcggtgcgcgactggatgcgcgacaccggcgacgtgccggagagctgttttgcggtacagggttatggcgaaagccgtcctgccgccacaaatgacacggcacaggggcgtgcgcttaaccgccgtgtcgaaatcagtctggtgcctcaggccgatgcctgtcggataccggcaagccggtatatcggcggtggtatgttccagcgagaaggtcagcaggctccccgccagccccgccagcgcctggtacagacgttccggatggacctgcgggtggcgctgaaaatgccccagcaccggctctgcgctgttcagcgcattcagcaaccagaacagcgacacgtcggccaccgcaaaatccgccatccgctcgttgctctcccggcgcatcgccatcagccgttgcagacggagacgcaactggctcagtaa

SEQ ID NO: 189570 - DNA, 669 bp, Klebsiella oxytoca
atgaaaacggatatcaatactgacgccctgctggcggatctgtggctgacggtaacagcgctgcgacagggggcaaggcttgccgacggtgaaggggaggcgctctggcagcactgcgtggacaccacggacctggtgatgacgcgcctggaaaaggcggacgtcagcgaagccagccgtcagcatattctgtatgcggtctgcgccctgctggatgaaaccgccaaagggcgcgacggcgaggacgacgcctgtatcgtctggtatgaccgtccgctggaggtgaaatacttcggcaccatgaccgccggggacatgctgtatgagcggatgcgccaggtgctgcgtgagcctgcgccggatccgctggtactgacctgctttcaccgggtgctgatgctgggctttaagggcagtgtcgcctccctgaatgacccgttgcgcgaacggctgtttcaggaactggccgggcgtgtcccggcatttgacgtggaacaaagccatccgctgctggcagacgttccggcgggcagcgggttgcgtgaatggctgcggcactggccggtatgcatcggcctgtccgccatcgtgatggcagtgctgtggctggggctgaaccactggcttgacgttctggtgaccacgctgctgccaggagccggaaaatga

SEQ ID NO: 189571 - DNA, 429 bp, Klebsiella oxytoca
gtggaagtgctgctggaagccagcctgccgtcaagggtggtggcgatagatcttgagcgcgacgaccggcgtaagcgctggcacgcccgtctgcatgacccgagactgcgtgaggaggccgatttttatctgtcggtacgctccgcgttgccttcggcacaactgctggagcagttcccggcgcagtgccggaccggttgtccggatgaggttgaccgtattgttaacggctcagagcgcggcgtgccgctgaaggccatgacccacgttccggcggccatcccgctgcgcctggaaaaccagtatttcaccctcgatatgacccacccggctgcgcaggcgatgctggcggaaggacactgcgtgttctacgtgccgggcgggctgggcgaaccggagcttgaactgtatgcggtgctgcgctcatga

SEQ ID NO: 189572 - DNA, 1614 bp, Klebsiella oxytoca
atggcggtgagcggggcgttttacgcccgcatccgtcacgaacgttacctgaaccgccagacgcagcttaacggcgaaaccagttgcgcaacgctggctcccggccaggagctgaaggtgaccggcggcgaggaggttaccgacaccttccgtcagggtgtggtgattacaaaaatccacagccgcgcccgccgtgaccgcagctttgaggtgaccttccacgccatcccgttctcggaggattactgcttccgcccggagccgggcgacaaaccgaagatggccggaacgctgcctgcccgcgtgaccagcacaaaaaccaacgatatttacggccatatcgaccgcgacgggcgctataaggtcaacctgctgttcaaccgcgaccactggcagccgggcgaggagagcctgtgggtgcgccagtcccgcccctatgccggagacacttacggcctgcacctgccgctgctggcgggaaccggggtggcgatagcctttgaacagggcgacccggacaggccgtatatcgccggtgtgctgcatgactcggcgcacggggaccacgttactatctacaactacaagcggaacgtgctgagaaccccggcgaacaataaaattcgcctcgacgacacgcgcgggaaggagcatatcaaggtcagtacggagtacggcggcaagagccagctgaacctcgggcatctggtggaccagcagaagaagcagcgcggcgagggatttgagctgcgtaccgacagttacggggctatccgcgccgggaagggaatattcatcaccgctgatgcgcaggtgaaggcgcagggacagcaactggcgatggagcctgcgttgtcgcggctgtcggcggcgctggtggaaatgcagtcactggcagccagcgcacaacaggcacaggcgctggccgcagatgtgggacgtcagcagacgctactgcaacagaaaatagagcagcttcagaaggaagtactgctgggaacggccccgcagggtgtggcactggcaagcggcgacgatatactgctgtcggcacaggagaatctgacgctggtcgccggtaagcaactggatgtgggggcgcagaaagacttcacgctggcggcgggtaaacagctcagtctgtacagtcgtgaaggtgccaaattgttcagttcgcacaacgatattgatattcaggcgcagggcggaaattttaccacctggtcaacgcaggacacgcatatatcgagtggtaagaaactggtggtcacggcacaggatgagctgacgctgatatgtgggggcggatatatcaaaattaaaggcgggaatgttgagattgggggtcccggaaagctactgataaaaaacacaggtattaagaaaacaggtgcgggcagtatgcagggggtgatgaagtcgtttgagccggaaagttttgatgagaagtttgtgattactcatccggcatccggaaaggcactggcaaatcagaaatatgaaatccattttccagacggaagagtaatgtctggtgtgacggatgcaacggggcattcttcgcttgtaacctcgcaggcaattgacggactgaagattattctgaagaaataa

SEQ ID NO: 189573 - DNA, 795 bp, Klebsiella oxytoca
atgacaaataaattaaccacgttgcttttctgcctgccgctgttgagtggcgctctgctttcactgagcgggtgtgtttcggagggggccgcattcggtctgggtgcaggaagtttgcatgaaacggtgatgacagaaaaggataaaagtgcgccgccaccggtttatggtccgccgcaggtgatctaccggatagataataatcgttactttacgttagagaattatacccgctgtgagaatggacagacattctataataataaagaaaaaggggtccatgttaaagttctggaagggtcagggtatctgtttaaaggtcgtttattctggttgtctactcgtgatgattatctggcatttccagcaacaatcaatacaaatcatgctgcctgtatggggtcagataaaggttgtatgaatgcagttatcgttacaactgatggtggaaatatattggatggtattgcatatggcagctatacccaagatcctacgggtgatacaaaaaaatatgacatgttagtcatgaatgatgggttttatttgattcattatcgcggagctaacagaatatatcctgtcgtatatagatggaattttgataaaaagagtttttctggtgttgtcgaatcagaacatgagtatgatttattccggcccggagaagtggttcccccatctggtttttataaaattgatctttcaaaattccattcaaaaaatggcatgctggaaatgcagtgtgatcatacactggaaccgatgcaacccacagggagcagaatacaatga

SEQ ID NO: 189574 - DNA, 543 bp, Klebsiella oxytoca
atgggctggtcattaccggatgttcccgcaaggccggatgcgcagccctggtcgccttgggtatgtctgtcgattattttcattggcgtatttgctgcgctggttcgggttgtcttatcctcaccagccggtggtttgccagcgctcgaaagcggttactggttgcctctgaccgggtataccgcgtcggggattatgattgcgataaccttttattcgttatcctgggaaattcggacatttttggttcgcaactggaataactggcggcgaaatatgcatctggcctggcagtatcaggcgcatcagcatctttgtgtagtccagcatgtcatgctgactgccgatccgcagttacttttccgtctgtcgggtggaatgattgagcaacaggatgaagcctctcccctgacgttagtctcagatgaacctgtgatacccggaatttctcgctttgagcagctttgtctgcaattaattcgacaattcagagcgccgcttattcagcggtatccttccggtcggttgccgcccatgaactga

SEQ ID NO: 189575 - DNA, 225 bp, Klebsiella oxytoca
atggggaagctctccacggtgctgctgaaatacgagccgcgcctgcaacgtctgacggtggtattactggaacaaacgcagccgggcgaattgcgctacgccattgacgcggagctgaaaggcgtcgggctggtgcgctacggcaccgagtttatgtcggagggtaaaatcttaatccggcacatgaaacagcagcattacctggacgcccgcgcggcaatctag

SEQ ID NO: 189576 - DNA, 1365 bp, Klebsiella oxytoca
atgacaacattctctgaacgttaccttaaaacaggtggcgatccgcgcacgttagcggactacgccgcgttacgtgatgaaatgaacaagctgatccacccggcgcgcccggacgtcaactggccgcacgtggaaaaactctgcctgtcgttgtttgagcacaacggcgtggagctacagaccgccgcctggtatacgtttgcccgcacgcagatcgccggagtgtacgggctgaacgaagggctggcgttgctggaagcactgatagcctgccagtggaacacgttgtggccgcaaccggtcgccgtgcggatggaaatcctcagcaccctcagtaaacgcctgcaacaggccatgcgtacacaactctttgcctgtgccgatctccgcgcattataccgggcagaacaatatctgaagacgctgggtgaggtgctgcaacggctggaattaaaacaggtcagccagtttgagccgttgcagacgctgatacataacgctgccgtgcgactggagagcgccgacagcgtcgcgccgtttaacagcgacagcgataccctgactgggaagatgtcgcaagtaggggaggcggaaccggtacggatgccgtctgtggagccgtcgggtaaacctgccgggaacgtgcggtggatctatgtggcacaaccagagccgcagcagaacgtggaagtggtaagggcactcccgccagccagacgctggaaaccgtttatagtggggatgttcaccatgttgctggtcggcgggagcactgtatgggactggctggcactgaatcagcccgatccggcggaagttcagttgatggcttcactgatgcccttgccggtgacggtgactcacatgcagctacagtctctgcgaggcagagccatgtcacctgacgcggggatcagcgagacacagcagcaactcgccagacttgcccgccttccaccggactggaatattgattatggcaatcaggttgttcagcaggcgctcacgctatggccggaacaggccggaccgctggcgacgcagtggcagcagcgagtctccgccgccgcgctacctgctgataatctcaatggctggcatcaggggatggcacagctacaacaccttgcgaaccagctgaatgcgctggacgaaaagcgcggtaagtatatgacagtgagtgaactcaagtcggtggtcttttccatgacgcaggcgttcagcagcgcggtcccggtggaggagcagctacgcctgatggcgcaacctgatcaaacatcgccggatctgcaacgtctgaccgaaatgcatctggaacaactcacggcccgctatgcgttgcttaagcagaaaacacccgagtga

SEQ ID NO: 189577 - DNA, 507 bp, Klebsiella oxytoca
gtgagtaagggaaatattgtgtcagtcagagaacgtttttttaagaaggtgcagcagaagaacaatcgcgcactgggcagtaataaatcggctgaggcagaagtacaggcattctgccagcgaatggatgagctggcacagcagattaatatgtggtttgaggattcggggatcgaggtcatcatagcgaaaaaatatctccatgacctgagtaccgtaggacttagccttaacagtggcgtatgtcgctatgaaattactactatcagattacagaacgggaaccgcagcgtcagtattattccggagcagctttgccgggcgggggacagaggttgtgtcaccatgaacgttgacgcgcctgacactgctcctggaaggcagacattttatttgtgcatggcaccgaatagtggctggttgatccgcaatgaaaatcaaggggcgctgggcaacgttctgttgaccgaagatgtatttttccgggccattgagaacctggcctga

SEQ ID NO: 189578 - DNA, 297 bp, Klebsiella oxytoca
gtgaagataattatctcagtgtgcgtagcctttctgagctatctgcttaaatatctgcctaaattccagctttttactatctttagtcggctatccattgctgacaagactcggctattttccctgctacataagagcagcggcggatttctggatgagtgttcgattcagagccagatgcaggcatacggaatcaattacagtccgcagtttatgaagaatctgttttactatacgcataaaaataatatccgtaccgacaacaaagatctctccgtatttttatcgttgctctaa

SEQ ID NO: 189579 - DNA, 336 bp, Klebsiella oxytoca
atgtcgttcgtccagacgccgctgcagctggggatcctgcgcttcctgttaggcgccgccgacggcgcgctgctgccggcagtgcaaacgctgctggtgtacaactccaccagccaaatctcgggcagaatattcagctataaccagtcgttccgcgatatcggcaacgtcacgggcccgctcatcggcgcatcggtttccgccaactacggcttccgggcggtctttttagtcaccgccggtgtggtgctgttcaatgcggtctactcgaccctgaccctcggccgctcccgggcaacggacaatccgggttccggcacgcattcggtaaattaa

SEQ ID NO: 189580 - DNA, 1656 bp, Klebsiella oxytoca
atgggtaacaaagtggacaacaaagttccaaaattcactaccaaacgcggcaacacttactacatcaactttcgtctccctgacgggacattctttcgccgtagcctaggtacggactccttaaaagctgttcaggtgacgatgagtcgcctaagcccatacattccccttgttcaaaatggctcgctgtctgtcgcgcaattcaaaatgcacatagatggtttccgtgaggccactcagcgtgatttcgatacctatctgttggattggttgagaatgggagtggaagaagctcaacgtatgcctgacctagggcgtttccagcgtaaaatagattctgaaaatgctatctcacctgctattactgttacagaggcaaaaggcctcgcggatctacatttgaatcgggtttatagcggggaagattctaccgctcgaatgatgtttgcagcccttcaccaaaagaaggtggctttcagtcaaaaggatttagctcaggcctatgaggtggcagggcagatagacctgcatcaagctatgttgcaccaggcttatgacgcgttctattctggcgatattgtccgttatcgcgctcttgttgaatccatgcaatctcaactagctgatactgaaaaactgaagaagccagtaattaaacaggctgtagcaactgttgaagctcctgaagctgacaatacgccgttactctcggaagcgtggaaactgtttgtagcggagaagggaaaaacctgggccattaccatagctcgcgagaataatcgcttctatgaggtgctgatgcacgttttaggggatgtcccggtggggagtattaacaaacagcatatacgccaaacattggcagtgattgagaacctaccacgccgcaacctcaaaccatattccgagatgagccttgctgagtgcattgattttgatgttcctgaagacgatttgatcagcagcgccaacgtcaaaaaacacctcaaaatttattcatcattctttaaagttttccttaaagatgaaaaggatatcttagaaaaatcacctactgaggggatcaaatatgaggtgcaggaaaacaagggcggtcattactcgcggcctgagatgcaacggctcatagaacggttatctacgttcaccgattggcggcgcgattacttccttactttgatttatacaggtgctcgccggggtgaaatggcggctatccgtaaggagcatatacgcaaagatgaggaaacgggacgctattacatcttcattgagggcggtaaaactgagcatgcacagcggcaaattcctattagtaagaagatagaagcgcttctgttggcacgtatcaggccactcaaatcggatgatcttgtgtttgcagacttgccaacgtatgagcatattgcccttctgtggcgtagtttaatggatgagtgtaacatccctaaatacaacgaatttggacagaagcgcgttatccatgcctgccgccatacgttcatttcagaagctattaccaaaactggcaatgcaacattagtacagtttgtggtaggccatagccgtacccagtcattggggattactgcgcgctatacgcataggccccctttgaacgaactgcttaaggttgtggatagtgtaagttggtag

SEQ ID NO: 189581 - DNA, 594 bp, Klebsiella oxytoca
atgtctgatggatatactggattaattggaacaattgtaggggcattgattacgggaggctttgcatggttcagcgattggcgaaagaatcgcgctaagaaccaaaaagatttggaggtgttagcactgaaactatcatataagcttgaattatatgttgcacaatgtctggaatgctcagaagacgacgggcttgagtattatgttgaagatgacgggaggggatctggtacttatttcagaggctacaccacgggatttccagaatttactttaggaaaatttgaggatatagaatggaaactattacccgttagcttaatgcatgagatctttacacttcctacaaaagtgaacaatgcgaagcaacgtttcaataaagaatggaaagactttgataaccatttaaacgattcatatccaacaacaatacgagcgaaggaattgacagatctgggtgtttatttttataacgtatcgagtaagttacgaacattagtagggcttcctttgcctgatgatttaagcatcataaataagcttaaaaagaataaaattgaaaacgacaaagaatattataaattgttcgtttga

SEQ ID NO: 189582 - DNA, 1089 bp, Klebsiella oxytoca
atggatgatattaaggattcattaattcaaactattcgtgaacggtttggtaatcctatgtgggggtatatagccctttcttggcttggttttaactggaaaaacattgcgatactatttgttagtaaatcaacgattgaagaaagaattaaagttgtcactagccaagactatctatacttacattatctaataataccagttgttgttggttgcgtgctagcagctagttcaccatatatcaaatgggccttttccaaggcgcatgagtacggtgaatcaatgcttaatgaagttgataagcgtcggattaatgctgcatatcaaaaggatatagatacagcgaacaaaaaagttgagcgtgactttgcagccagaattgctgaagcagataagcaaaaagaattagttgaaatcgaagaaactaaaaagcaactcccatacaaaactgaaaatttattaaaagaacatggtgtgctgactgagcaatgctccagtcttgaacataacatttcgatttataatcaacaaaaagatgaactggaaaatgaaattaatacattgaagttaaaggtaaaaaacattgctgaaacatttaatagatacaactcccctagtaatcatgaaagtattcagcgattcttagaagaaatatctaaaatctttaatgatgttgtctcaacatctacacaagatccttctgaaaaagaagcagctagtgtgttaggaaatataaataaagcatatcgaactgcacttttgccacaaaccaatagttctaaaaaagaatataaattagccttagagagtattcagcaagcattatcaaaaaaccctaaccttgcagatttgatacttagcacaaatgatgctttcaataatccaaactataagaaggttcatgacctagtacagagcattaactctattcaggatcaatatccacaactcatgtcattatcatctcagacaaaggagatgctaacctcagcaaccagtgatgatttaaaaaagatctcacaatatgcggagttattgacccctcaatatactgatgtatccgaattacttaaaaacaataactcataa

SEQ ID NO: 189583 - DNA, 1509 bp, Klebsiella oxytoca
atgaatatagtttatctctcagccactgcaataactgtcgcagttttgtctgttgtcatcgtttttgtccttttgacaaaattacgcgcagtgaaagcctctgatgccagtaaaacagcacaacttgagcgttataccgtcatttctgatgcagaaacggaagcaactcgaatagcgcaagaggcggaacaacaagctcgagaaatcatcgacagtgcaaaaagtaccgccacctctatcgagaaggaagcaaccgcattgctaagtaatgcacagtcaacgaccctatcattacaggatcaaattacgtcattacgtgcttcttatgccgagaaaaaaagcatctatgacgaacttgaaaaagcgatagctctatatcgcgaggatgtagattttgctgagatgggtatgttcgaaccacatttcgatttcgatacctctgaagagtttaaggaggcgatcaaagataacagaaatgagcaaaaagccttgttacgcctcaagaaccaagccggagctatctggtgtggaactgactggacggtccataattcccgcgccgaagggaaaaaaatgactacccgagctatcaacctaacagcgagagcattcaatggtgagtgtgatgccgcaattgccaactgtacatttaagaactggtctgtcatgcatgacaggatccaggctgctttcaataaaatcaacgctctcaacgaagtaaatgatgtgcatatcagtagagaatatctcagattgaaactgaaagagctcgaccttgtacattcctacaaaatgaaaaagcagtcggagaaagaagaacagcgagaaatccgtgctcaaatggcagaagaacgcaaagcgcagcaggagattgagcgggcgattagagaagctgaagcggaagaggttcgcgcacaaaaagcactggataaggcccgtaaggaaatggaatcaaaattggcgcaactgactacagaacaggctgaaaagtatcagtcgaaaattgacgagttgcgtgatgccttaaccgaagcagaacttaagggtcaaaaagctttgagcatggcacagcaaaccaaacgtgggcatgtctatatcatctccaatgtagggtctttcggcgaagatgttttcaaaattggtatgacgcgccgtctcgaccctcaggatcgagtggatgaactgggaagtgcctcagtaccttttctcttcgatgtccatgcaatgatccatagcgaagatgctccagctctggaaaatgctctccatcaacactttgatgctaaacggacaaatctcgttaacagacgtaaagagttttttaacgtcagcctgaaagagattaagagcgctgtttatgaactagctggtaatgacgtcgattttatcgaaacggttgtagcacaacattattacgagacattggcattacgtaacaaacaaagtggagctgcaggggtacaagcgcggaatactaccgtcctgccacgttttgctgaatcaatttga

SEQ ID NO: 189584 - DNA, 759 bp, Klebsiella oxytoca
atggctggcccttttaagttcgacttttttacaaaaaactccattccggactggtgttgtcctgcatgcggaaggccaactcttgaacttattcctgatagtttccatgcaaaacgtacctcttatgcccagcatcagtatgaggccgacgagggattctgtcctgaagacgatgaggatgtattcagttgtctcttgaggtgtagtcaaagaaactgccttcagccggtatcagtttctggagacggatatcacgatcgagagtatgagaactcttataatggtgagtttaactatattgcaatttaccgcccgaggtacttttatccaccactgtctcttttcacaccttgtgagagttaccctgaacagattaaatcccagctaaaagaaatctcatcacacttgccgggccatcgtcaggccgcgattaacgcgctacgaactacgctagaaagcgttctcgaccattttggaatacctcgagaacagcaaagtcgctatctaagtctggataagcgcatctcactaattcctgagccttataggtatattgaagccggattcagagcgatgaaatggctcggcaatacaggcagccataacctcaaagagatatcagatgaagatattgaaggagcatgcgtgatgctcgatgattttcttcttcaaatttttcgtcaaccaactgatcatagtgaaacaattgcccggctaaccaaaaaccatgctccaaaaatgagagatacagagcagtaa

SEQ ID NO: 189585 - DNA, 582 bp, Klebsiella oxytoca
atgcagtattttcacattgacagctgctacaaaccagcgggcaagcaactccttgagattgggcaaactctcaatagcagcagccgcccctttaatccctactatgagcaaatgtgtgacattcatcatgttattcccgtctcagggcagaaacgcaggctcaaggaacttcttagtagccacgacattgagcaattttctagcagggctctggccaataattttcacaacgttattgatacctacatccgcttgctcagagagatggagttcgagaatatacggcgggagcagtacgctaatcgtccatcccgaactcgatgcatatggctaacggacaatctcgatcaagcagtttactggcgtaaacgtttgggcaaggacgatagaacgcgcattgtacgggtggaaatcgacggtactcttcaccaagctgatggccgtcacctgtgtgctgactcaagctccctcccggagctgcgagcggcagcacagagctactgggaaggaaagcttagcaccaatccagaaattgagattttacttgaaggggcaatgacagttgttgcagtcgaggtgtga

SEQ ID NO: 189586 - DNA, 807 bp, Klebsiella oxytoca
atgactgagactaaataccttaaattttttttaaatgaaattggatatagcgtacataatcttaatactatagctgttgctctctcaaatctgcctgccaattcagttccaaatcctgagttaaatatcaaatgggaacctaaaaatttagaaaaatcctgcattgctgcgcgtagatttgcagttcgttcttctttggtgtttgcagttgaagctctatttgaatatatgagcaacattagtgatgatgagctttggaagaaactcaattttgatttggatttcaaaaaaaaactttctacccatgactcaaaagcgagaagattttctgagttttgcaaatctatacctggaatagaaaaggaatggtatttgctagttgagcttatgtgtcattggcgcaatcaaatagtccatgccagcacttcaaatgctggattatcctcttctgacaagagattcttggagactaagatttcttttttatatgataatttttatcattttgatgtaatgaaaacattagaggactatgatgcggacaaagttacactaaaagaagcaacgacactgattacctttttaataaagtgttgcagaaaaatagatgagcattatatttcctctatttctggtttaagcaaccaagtatatagtgaagtattagacaacgatgaccaatttaacctattgaaaaaacaggtaggcagtgccaaacgcaatcgccaaatcatgaaatatatcggagttaagttaccttatctctcggcagagaaaataacaaagctcgcgaatgaatataaataa

SEQ ID NO: 189587 - DNA, 162 bp, Klebsiella oxytoca
atgtctattctggttaaaaataacattcattgggttggccaacgcgactgggaagtgcgtgatttccacgggactgaatataaaacgctgcgcggcagcagctacaacagctatctcatccgggaagaaaaaaaatgtgctgatcgataccgtcgatcataa

SEQ ID NO: 189588 - DNA, 471 bp, Klebsiella oxytoca; identical to SEQ ID NO: 129500

SEQ ID NO: 189589 - DNA, 1155 bp, Klebsiella oxytoca
atgtctgcaaagatatgcttctttcccgttgggaatggggatatgaccctcatccaaacggaagatgataaaaatattttaatagattgtcgcatcagggatggtgaagaacatcctgatgttcgcacccaactcagagaaaagcttcctcgaaataacgaaggtcgtttgtttgtccatctttttatttggactcaccctgattcagatcattgtgatggggtggctgaccactttcatttaggaaaaccagaagattggagtgagaagaacgataaaatttttataaatgagatttggtcaagtccaattgtattcaggcgacaccatgcacaaaatcatccgttatgcgatgatgcaatagctttgaataaagaagttaagagaagagttaatctttataaagaaaaaaattatttggatggagttggaaaccaagttctggtcttaggaaaagacgaagatgggaaaacagacgacataccaggtatcctattagaattagaccaaacaacccgctggattaatcaaagttattcttcatattttgaagctcatttattgggtccttcacccaagaaagatcttgatgagttggaagataaattaggtaaaaatcattccagcgtaataataaattttgaaattaaaggtgacaataaaactgcacactttttaagtggtggtgatgcagaagtcgtttgttgggaaggtgttagagatcgtttaaccaataaatattctatgtcatggttagattatgacattttacaagcaccacatcactgttcttggcatagtctatctcatgatagtttaagcaaaaaaggagatgatgctaaaacttccgagaaagctatggaagtttttaatagagcaaaagaaaaagcatttataatttcaagctctaaaacaattgaaaatgacgaaaaagatcctccagcataccgagccaaagaagaatatgaaaaaatagtagatgatgtgcaaggtcagtttttatgtgtgtcagaccataaaaagaatggagagaatattccgttagagattgaaatttccgataacggtattaagaaaattgctgcatctgcattaggtatggccgaatcatcaagtgccgctgtaaatagacaaggtggtggtggttatgcctga

SEQ ID NO: 189590 - DNA, 1875 bp, Klebsiella oxytoca
atgcctgattgtcttaataaaaagatagatcagttgagcactatccttgcaccttatggtgcaaggaagctttctacgaatgaattatcaaaattcaacggtaaatatgtttgtgcttgggaattagtaactgatttagaacttagtaatgaacctattgtattgcaactaagatacaaaactcttagtcaatttgacatcccagatgtgtttatttcctcaccaaaaattgatgtttgccaactcccacacttggaaaaaaatggcaagttatgtgtttggcctgacatttatatcatcgatcataatgatatgacctatgcagtcgatttactaaacgatgctatactaatgctaagaaaaggaataaatggtgatttaaatgaggattttattgatgagttccagaactattggatttatcaatgtaataaaatagatcgacttataagccagtgtgatctaacaaataaaaacacaaggttggttttcggttatcggacccggaaatttggagtaatatattctgacacacaaaaagaattaattaactggttggaaaaccaaaaaatattgccattagaatcggatggaagtaattcaaaagataaacgaataaggcaacagcaactctctaaagtagtttcaattccattgatattcttcaatgaagcctggtatccgagtcaatatcccaaaactgcaagggatttttttgaactcataaatcagcaacaggaagatccagaaagcactattgaattgatcttaagatcttgtgctaatatgttcaatgtcaagcccataattctagtttcattcccaacgccttctgggatgaatattataggaatacagattcctaagggagttagtgatcttgccactgaccgctttgataccagaggtattagtcggggtcgattcagaaatacagctttattagatggttatagaaattacattgatggaaagattttaaaaaatagaataggccaaactaaaacagaaaatcttatagtagaccgttctgacgattcttggttaacgggtcgtgagcataacaaaacttacaagaaaatctctgaacataaagtagctatcgtcggatgtggttcagtaggatcttcggtatcaagactgttacttcaatcaggcattagaaaaatgatgctttgggatgatgatttaatgaagagtgaaaactcctctcgtcatctattaggatttgattctgtttataaaaataaagcattagctcttgcctcaaggctacgggaagagtttccaaatgtctatatagaagcttttaatgaagattggacagaagattccaagtataacaaaaaaattgcagaagccgatattatagtaagctgcactgcacattggaatactgaacagcagttaattaaaagacagtcggaagacattctcggtgctattgtctttgcatttgttgaagctcatgcaatggcggggcatgtaatagtcaaccaagtggattctaatgcttttaatagctggcatattacagaaggcaaaaatataggtgcattaaaatatcctgctacttactggaaagaaaatactcgtaaaagaatagcagcatgtgccggagagttccaaccatacggagctatccctttgactaatttacatgctctaacggcaagaactgtaatagatctaatcatggatcgtttttcaaataaatcttttgcatatagttacataggaagagaagcagagcttttagaacttggtggtaactggaatgataaatggattgcacaattcggaaacccaggaaagggtgattgtattatacctttgatttttgaaaattctaattgggaaaaaagtgatgcataa

SEQ ID NO: 189591 - DNA, 249 bp, Klebsiella oxytoca; identical to SEQ ID NO: 113600

SEQ ID NO: 189592 - DNA, 288 bp, Klebsiella oxytoca
atgccagccacccttgagaccataaagtcggaagagaagcagacctatcactaccctctgaagacgaactaccgtgagcacatccatagtcctgagggagtgaacggtccggttgaacactccatgctgatggatatgctgaaaaagatggatgccgacgggcatgatgtgtccggcgccgccgcagaggtaacggccatgctcagctacattgttggtatcggcgccgtactgcgcgacatagagacgcatgctcagtatgtgatggctaagaccaagggttactga

SEQ ID NO: 189593 - DNA, 363 bp, Klebsiella oxytoca; identical to SEQ ID NO: 103279

SEQ ID NO: 189594 - DNA, 513 bp, Klebsiella oxytoca
atgtatttgagtgagtattgcggaagaattctacccacaggcgaattcaaaagtgatgattttttaatttcacttaaagaagcctttaaatgtcattggcgtaatggtcatcaccccagcttaggaaaagacactctttttgaaaggcctgatgaagttcttaattaccaccttagaaaagttcatgtaaatattaaccaatacgcaaattacaattactcatgtacaaaaaagtgctgggatgaatggtcatatggtttaatagatgaacatgggcgcttcagacctacaccagtaagtaactcttacttgatttatgcagtgaatgaacaccgagatgctgccttattagcttactgggatccaccagctcatactaaggctaatcagcctgtatggatggattcagtaataaacttcactaaagttttccatgataaaactaatacatcacccttccctagagagagtgacccatggagctactcatttaaaattaagaagcccgcatag

SEQ ID NO: 189595 - DNA, 1728 bp, Klebsiella oxytoca
atggcgttctataccggtgccccgctaagcaacaaccccttgccagtcgagggcgagcagccgctattacgctcgcttggcgcgtctgtttctgaaggattcaacgaaggcccattcgtatcatggggtgaggaatcacgccttgcccggctaaatattgatcccagtgcagagcgatatagccaggaggatgccaggcgcttattcggcgaacataaaattgaatctatcaatgttcctacggcgggtttaacaaagccttatgttgacgctgttattcaggaccatcaggctcacctcaacaggcaacagatcttacaaggcgccccatctggtaccgtctctactccactgaagtatatggctaatcttatgggcagcatagcggatccgggtaacgccttaatagggcttatccctttcgctggtgaggccagagccgcaacacttcttggccgtgctggccaacgttttctacagggaagtgtatatggtgcagcacagacagcagcaacaatgccgctggttgcagagggacaagcagcccaaggtaatgattttacaatgggagactacgcctccaactttctatttggaacaattggtggtggtattcttcacgctggtggtgggattgtggctgatgcgctgcgagcccgtgatatgtccacttctcgggtaaatgagataccaggcgcagcaaccgaaaagtcgccatctccggaaattggtctccccatcgaatcaccggcggcggaaccattaattatgcgaccgggcatatttcctgattcgccaacatatctctccagagcgccggcagatgacctggctagaagcatcgatcattaccgcgagaactatacgcagcaaacggcctataacgatgttgtcccttcttatgccgataatcttcaggagttggcatcacggcagataacaggcgttggtgaacttcagcgccaggtggaaagtctgaccagaaatattggctctcttgatgcatcgctgcccgagcttactaaacagtatcaggggcagaggatgaagttcagggaagcacgtgcggcggcacaggctcaactgaatgatcggcgccagcggttacagacggagatcgaacaactgaattctcgtattggagagcaccaggacggtgccagagcggcgcaggaactggcatctatctctcgcggggaacttcccgaaccgcttgcaaagcaagtctcccggcgagccgatgagatccgcttgtcactccgacaatccccggttgcgcaaggtatcaaaagtgcagctcagaagttaggtgaggctgactggatggtgcgtaatcaggctatgcgatcagccgtagcccagatgcgccggggggaggatgtaaacatcgagccgttcctcaatctggtagacccggagaaaaaaataacggctattgatgatctgtctttacctcgacgcatcccagcagcgcaagacgatgtggcggccagtgcttcagctgatatccagataaagtcagcgggtgagtcagggactactgatgacgcattgagacaagcagaagaaaacctgaattatacgcgccagattaacgacgctatttcttctgatgatccggagttcgccgctttaatgaaacaggttgaacatgaggcagcagatacctccatggaaaaagcaatcaaagctgcggctatgtgccgtatagggaaactgaatggctga

SEQ ID NO: 189596 - DNA, 2697 bp, Klebsiella oxytoca
atgccaaccgttccgcagtatcaacgccagagccagacgcaggccgcgccggtaatgaccaataatctccgcgtgccggagaatccactggtgcagggaatccagcaggctgctgatatgtcgatcaatatgatggctgatgcaaagcgcaaggctgatttagccaatacccagaatgggttacttcaggtcagccaatttaatgatgatcaaattaacaatccgcagactggacttataacaaagcagggcaaggatgcgcttggacaatctgatttagttgtttctaatgcgactcagaaagtgcaggacattgcctctaccctgccagagggggaagtgcgcgataatttcatgcgccaggctcaggtacagttactttcgttgaaaagccaggcaaccagatacgaggttgggcagcatcggcaatatgaagccggtcagcaagatggttacttacgcctccagcagcagcaggccctgaacccgcaggaatttaatcaatctgcgatgaatgcctaccactccataattgcttatgggcaagcgcatgggcaaagcccagaagagatcgaatcaaactgggttcaatggcgcgagcacgctgcgaaccgggctagtgaagcctggtatacgccaatgtaccagcagctacttgggccaaacgggaaagttgaggtcactgatacgcccagtgaatcgcagctattttccgcaatgatctggcaggagagcggtggtaatcagtatggtaaagacggatcgccgttggtgtcgccgaaaggcgcggtgggcgtagcgcaggttatggaagacactgggccagaagctgcacgtctggctggtgtggcgtgggatcgtgacaagtggcttaacgacccgcgctataacgcgaaacttggccaggcgtacttcggtgcgcagatgacgaaatatggtaacaatcctgtacttgcggttgctgcctataatgccgggcccggggcggtcgatggctggataaaaaaaattggcgatccgcgtacaggcgccgtaagcaatgaacagttcgccgcggcaattccatacgaggaaacccgcaactatgtggcgaaagtaaccggaggtgcgctggcgatccctggcccggccacaatggaaaatctcatcaaccagccattctggaatgcgatgagcccacagaacaaatccgccatgatgagtaaagttgcaggcatgtatgatatgcaggcggctgccgggcgtgtagcgctgcagagtcagatgcttgatgacatggtaacgcttgaagctggaggttctgttaatccagtcacgccgcagaaatgggctgcggtaatgcctttgcaggcgtcgcccgctgagcgtatgcgactggagaaaatctatcagcagtatcaacaggccatgagcctgcagcccgtctaccagaccattgtgaaaggtaattatcagcaaggtcttgcggccgttcagtctatacaaccccagcagggtgagacgaactccaaatataagagtgagctttatgcttctgctgtatcaaaactccagcaagttcatgatgcacgcgaggctgatcccggagcctggttgcaacaacattccccggtagttcaatcagccttccaagagtaccagaataatcaggttaccggtgaatatctggcttcacgcattcaggcagaaaaagaccggcttgggatccgaagcaaaagtgtattacctgcgagcatagttgacgggatatcggcaaaagttgatagcggcgatatgaacttttctgacctgaaagggattatctctggctttggccgttacggtgacactgttgtcgcgcagttgcagccaaaaacaaaagcagcagtaagggttgctacagcgataaacgaccctaacgctgctgacacgatgtttaccatccgcaatgtgaagactgaagagctgaagaagaacgctggagaacaagccaaaggtgtagacgcggcctggaactctctaatttccgcagcatcgccgacatttagcctacagcgacaaggtggagcggaaacgcttgctgatatcaatgagcaaggtaagcgcctagcttattactacatggcatcgggggaagatgctcaggcagcaacagaaaaagcctataaaaaaatgatcggcgatcattatacggtcactgagacatggcgaatgcctaacagcctgggactgaaagagaataatgttaccgacggtctgagtaatatcgtcaatagcctcaaggtagatgatattggcagtcggagtatgttttataacccatcaatgacgccagagcagaatgccgctaataaccttgcgcagatacagaatagcgctgaatgggtgacggacgaaaatgaacaaggtgtttatctgacagttaacggcacccctattctggatcagcacggctctcctatccgtgtgagctttgccgatgccagcaagtctggaattgcaaaaccgagtacaaccggcgccgttcttaactggatgggcgaaaaacgcaaggttactccaccctctgagttctatacaccaaatgttaatgccactatgtccgatgccttcagggtgatccagggtcaggatgggatgaacctgcagccccaaaaagaaccggacaccgcgaggaatgtattgcgcgatgctcttaatacacgaggaggccaataa

SEQ ID NO: 189597 - DNA, 297 bp, Klebsiella oxytoca
atgaaaacgaataacactgacgaagagttgcttcaggaaatccagagaatcatcgacaaagcatcgttaacagaacagatcgcgttaaccgaattgctgcaacgttatgagttggctgtatctgtggccaggtacgcattacctggttttccattaggggttttagactttctctcggccgcaataaaaccagccacctttctttcctctcctcaatcgtctgatctgcattgtaacgcccaagataaagccgatgagaaatcagcactagcacccagtggggataaataccactaa

SEQ ID NO: 189598 - DNA, 339 bp, Klebsiella oxytoca
atgcgactgactacagaacagaaagcggagattgttcgccttaaacgcagtggcgtcggataccgcacgatcgcgagtaaaatgggattcaggcccagcacggtgagtagcttctgccagcgcagtggattgttcgctgataatccagctcacagggctctgttcactatccctgagccgttcttttcgagcgtacctgcgttgataaagccactgccactccagaaagtcattaccggccataagcaaactgatgcctacctgtgggtgctggaagtgattcagctgaatgagcctgcgcatctggccgctgcgtggcagtttgaacgctacatgtaa

SEQ ID NO: 189599 - DNA, 222 bp, Klebsiella oxytoca
atgcgtaataactgcctccctacagcgatcgctgagaagccttatctgctcgatgaactcacctacgaaacagaatgtgtgttggcaatcctaagaacaattaatgatgtcagcgatccacacaccaaaagccacctcgtagactccgccgaacttattggtactcagttgttgaaaaagctagagcataacgcacgtctggaagatggtgattgcgaatga

SEQ ID NO: 189600 - DNA, 777 bp, Klebsiella oxytoca
atgattaccgccgcccagagtaaaagcccctctatggctggcctgttagcaaatgttagtactttgcgggtgctgtgccgccgcgggaacctgtcaaaacctgtcactttgcgggccactgatagtggcgaacaaaacgcctgtcggagtttcgcgacaggtatgtttgaatttaaagacacgttagaggcgagttttgtgagcagcacgcgcgatggacgtcacacctggagcaaagagttttgcgagtccataaaaaagggcttgatgtcccacgtcatcccggtctatggttatagcgcaccagcaaaatctggtgccgggattggcgtcccggagagtttacaggcgacctatgacgcgccatgcgtctttttttgtgtcgttaattcagtacacctttttttctgcgttgcgggtataatcctcgccgctcacaaaataatggtgggctggatgggggcggagagatccgcgccggtttcctgtaacgccggttacgccaaccctgttcagtccaccaccagcgaaattggcgtttccggtggtgggtttcagacccagttacaggaggctgccactatggctactacccctacccaaaatccacaatttatctggatcatcgctgctatacgccgcgatatcgaatccgtcactgtaaaaatcttccacgttaccgcggtctctgaacgcgaagcccgtcgcactttagtgcgtgatcatgtttgttttttcgctggccgcatccgtctgatggaggtggatcatgcgtaa

SEQ ID NO: 189601 - DNA, 180 bp, Klebsiella oxytoca
atgactaaccccaccagcacaccgctgccaaatcacgcatatcgcgacgctcagggccagacggtgagcgtcgtctctgtagcgcacaaccgcgtgacgttctatcgcgatggttacctgttcccgtgcgtgcagcccattgatcgcttcatgaaggagtacgcggaggtgaaacaatga

SEQ ID NO: 189602 - DNA, 597 bp, Klebsiella oxytoca
atgaaaatcgaaaaaaatagatttaattctgaggcctctcctcaactcggcaccaaccctaaacatatttaccaagctaatgaacatgatatttctgttatcaaatttgagagcgtaaccgtccgagtggttaacgtattcggtgaaccatggtttgtggcggcagacgtgtgcaaagcacttgagattggcaatgcttcaaaagcggtgatggcgttggacaaggatgagaataccctaacttcatttcagggtattcatgctggccctggtaatcctgtgatgaatattattgcggaatccggtttctacaaactgatcgcccgcagccgcaaagccaccacgcagggcacgttcgctcacagtttcactaattgggtattccgtcaggtgatcccatctatccgtaaaacaggctcctacggcgttccgttcgcgttcctgaatgaccatacccgtcgcaaagtacagtacacgaagaaggccagtaagcgcggtaaagatcttcaatcgtgcaaaggtgagaaagcacgcttggccgctgaagagattgaactatggcgtaagtatcaacctgacctgctggaggttcattaa

SEQ ID NO: 189603 - DNA, 150 bp, Klebsiella oxytoca
atggtgaaaaaaaaccactctagagaaaaggcggctagaccatgtatttatgtgattaattctacatctgaaatttttattcaaccaagttgtaaaattgaaattgagcgtgtaattaaccaactcccggacgcattcgccgccgaataa

SEQ ID NO: 189604 - DNA, 807 bp, Klebsiella oxytoca
atgagccgcaagccaattccatttaaaacaatgacgttagagcaagctgctaagtttttagaatgtgatgttgatgatcttttccaatggtgggaagagagagcgattaaattatgcatcgattgtaaagacctgagagccgaaattatttttactaatgacgaaaaggatttcgatcctcttaagctagacgaagtacctttctggcaagatgaatactcatcatttatgccaatccgagtcacttttgatgagttggatggtgtatttaaaactgagggaatagtcaaagggctttttataccaagccagcaaattattaacaacatcaaaaatgatgtcattataacagacgattttcttgctgacccctttaagtcaacaggggacttccctgttaccattaaaattatcaaatatggagattcacatgctggtgattacaactgtaaatatgtgccaaagataagacaaagcctgttaaggattcactcagaagacatcgaggtaattagggatattctttatccctccccaattcccatcccagttcccacctccctgcaaacacctatgccagaaagtctaagtgactcgcgcaaagtaggcatgaaaactgtcaatgctatggctctctttatcaagcaattaattgccattaactatggagacgatgtggctaactcgccacgaaaacatattgataaccccagaggggtaataaaaaattcttttgagaataaaggcctgactccaccatctggcaatgttgttgagaaatggttaaagaattcggatttagattaa

SEQ ID NO: 189605 - DNA, 171 bp, Klebsiella oxytoca
atggcgatcgcaaagacccgctccggctatcaacgtatcctcgatgtgcgattcaacgctatcggtttcatcaaatacggcggcaataccgccctgagcgtagaaagtagaaccttcactgatagggcctttgctgagaaccgtgaccgcgcagcgttccgccaggcgtaa

SEQ ID NO: 189606 - DNA, 468 bp, Klebsiella oxytoca
ttgcggatggtacagcgcggttgggtggaactgattaaattcgaggttggcgacccggcagccggcacgccaggccatcgcgataccatccccggaagagacgtcaggattcgtcgtatattgataaactttagccgcgccgccggtagccagcaccacggcctttgcgctacaggtttcaaccgcttctttattacgattccagatccacgcgcccaccacccggcgcgtgccgggcaggccaattttatcggagataataaggtcaacggcgttactgcgttccagtatgcggatatttgggtgggccagcgcctggctcaccagggtagtctcaacggctttaccggtcgcatcggcggcgtggagaattcttcggtggctgtgacctccctcgcgggtcagatggtagctctcttcgccgttcgcctgaacctgagtatcaaacagcacgccctgatcgattag

SEQ ID NO: 189607 - DNA, 201 bp, Klebsiella oxytoca
atgaaccatacagaaagaaaaatacttataaaaaaagaagtaaaggacataatccgcattaaatcagatgccgcatttcaagaaatgattaatgctggcgagttccctcgaggcttccgtattggcctgcgacgcgttggctggtttgaagatgaagtgaataaatggttggacgacagaattacagaggcccgtggttaa

SEQ ID NO: 189608 - DNA, 234 bp, Klebsiella oxytoca
atgcatagatccccgtgcgcaaaagcaatgcttcatctgatgtatgcaatggcagatattaatgccgtcgcaaaaacggcgcataagttacttagtgatgccgagtattccggctgtgtaattcctcattctctggccgcgataaacatgattgccgaaacggctgctgaagaagctatcgcaatactggaagccgatatcaaaaatgccccgggggataatgagcatgaataa

SEQ ID NO: 189609 - DNA, 642 bp, Klebsiella oxytoca
atgaacgatgtattagcaatttacggaatatcttcgctggaaaacataatttatgcagaagctacgccagaaggtatcaacatgccggtgcttaacagtgaggatatgcatcaatccttcctgatggtggactatcctacggctattcgtttgcttgatgaggggcgttatgacgacgaattcgcgacaggactgcaatttgtcgctggggtgctggacggtgatcttaagcgctactacatcctgtcgaatgctcagaaagcgattatctatcgctggctggtggtattcctgttcatctctgagcaacaggataataacgggctagcgggtattaccggtgatggcggaagcttaggccgggcggtggtttattccggtgtgcatggtgatctctacgtcaccccattaacagagcgtatttttctggccaataacatcgaaggtgtagcgattcagaatcatggggttgaaacgggtcttgatatagctgcccgcatgtatgaagggatgatggaggtatcacctgaaggatgtatgcaactgtcatcagttgggcgtgaagaactggcaagactttacgacagctttatgaaaacgctgaagactgacggtctgccggccacaccagtgacgcattaa

SEQ ID NO: 189610 - DNA, 498 bp, Klebsiella oxytoca
atgtgtactggtatagaaattgcggcgatcggtgcatctgtcctctccgccggcggagcggtgtacagcgggcagcagcaaaaaaaaatggcgaactatcaggccgcccaggcggaggccgacgccgatgcatcgcagaaggcggcccgtgtggaggccgaccgtatccgtaaagccggacgtgaacaggctgctgctgcgaatgcctctctggccgcatccggcgtcgagaccggagaaggcacagcgctgcggatcacttccggcattaccgaagactcggagcaggacgcctaccagaccatcctaaacggtgcgaactccgccagccggttacaggcgcaggctcaggcggaccgcatcaccggaagtaatgccgctacggcgggaaacatcagcgcaggtagctctcttttggctgccggcgggactgcatatgatggctggaaaaaggctaaagagggcggttatggattgtacgcggggaccaaaaaatga

SEQ ID NO: 189611 - DNA, 276 bp, Klebsiella oxytoca
gtggataaacgcgatccatgtatgacgctaattaccgatgaggaaatgctcgatatcactggggcgcaattcccttccaagcagtgccagatactgaaagaacatggtatagcttttgtgcgaaggttggacggtcggccacgaacgacatggtttaatttcaaccacccactgcatagccgtcatcgccccagcgaagaagagataatggaagatgagaaaccggactttgatgcaatttttagagggaaagaaaaacccaatctgaagcgctaa

SEQ ID NO: 189612 - DNA, 300 bp, Klebsiella oxytoca
atgtcaatagagatttctgaaaagctgaagatgattagggacgctgaaggtcttagtcagtcgaaatttgcccgtttaacgggaatttcgcttgggatgattaagcagtacgagacgggtatcagaggtgctggcgtggaaacgctgctcaaaattaccaactgcgtagatctaaaaaaatacacgctatggctaatgagcgatgaaacaaatgaggcatccggccagattgctccagctctctcccctgatgggcgaggcagcacatcgagccgccgaagcgcgaaaaaggttggctaa

SEQ ID NO: 189613 - DNA, 480 bp, Klebsiella oxytoca
atgaagcaagccccgcaaatgcggggtttttacttgagaagacataaagagaaaatgataatcgacggtgataccaatgctgaggggagtacaattatgaaaagggcattacttttaatcgcgatcatcgccttagcgggatgcaagcctagtgccgacaaggctgttgagttagccaaaaaagagattgcagccgatacaagggatcctgatagcgctaagtttagatatgtgagatttgttaagagagatgagtctcaagatggaactattagtgggtatgtctgcggacagataaatgggaaaaatgctttcggggcctatgccgggtttaccccattcatgcttgagataaagatgaaatcaaaaggcactttaagcaacgcggttacctactcagtatatggaaagcaaattttctcagagtttggaaggtcaacgccgtattcatattccagcatctgcggcacaaatgagtaa

SEQ ID NO: 189614 - DNA, 552 bp, Klebsiella oxytoca
gtgcgctttaagctcatcggcgctgccggtcgccagaacttcccccgcgttcatggcaaccagccagtcaaagcgctccgcctcctccatgtaagcggtggcgaccaggacgctcatctccggctgacgctggcggatgctgtcgatcagatcccaaaactgcgcccgcgagaggggatcgacgccggtggtgggttcatcaaggatcagcagctgcgggtcgtgaataagcgcgcagcacaggccgagcttctgcttcatccccccggagagttttcctgccgggcggtcgcgaaacggcgccaggccggtactctggagcagctcattgatgcggatgtcgcgttcggctttatcatggccgaacagacgggcgaagaaatcgacgttttcatagaccgacagggtatggtagagattcttccccagcccctggggcatccaggcgattttcgggcagacgtcctggcgatgacgtacattgctcatatcgccgccgagcaccataatgttgccgtgctcaatcacgcgcgcgccggaaatcagcgatag

SEQ ID NO: 189615 - DNA, 213 bp, Klebsiella oxytoca
atgaggctgcttattaaaaaaagtggtaaactcatcagtaaatatgaaatcatgaagcatttacatgatgatgtatttaatcaaaataataatactgtcgaagtgctcattggacggttgcgaaaaaaaatcgccccctataaatgtgccagaattgaaaataaaagaggtgatggatattatctggatgcgaaaaatattattgatcattaa

SEQ ID NO: 189616 - DNA, 1659 bp, Klebsiella oxytoca
atgcatcttgagcgcgtagaaatagtcggttttcgcggcattaaccgattatcgttgatgcttgaacaaaataacgtgctgattggcgaaaatgcctggggtaaatccagcctgctggatgccctgacgctgctcctgtcgccggagttcgatctctatcattttgttcgggaagatttttggtttccgcccggcgatattcaggggcgcgagcatcatctgcatatcatcctgaccttccgtgaaaatgaacccggtcgccatcgggttcgacgctatcgtcctctcagcagctgctgggttccctgcgacgatggctatcagcgcgttttctatcgcctggagggggagcttgccgatgacgacagcgtgatgaccctgcgcagctttattgatggtgaagggaaagcgctggagcttgacgatattgatgaacttgcccgtcacctggtacggctgatgccggttctgcggttacgcgacgcccgctttatgcgacggatccacaacggcaccgttccgcactcgccgcagatcgaaattaccgctcgccagcttgatttcctctctcgcgaactggtacatcatccgcaaaatttaaccgatgggcagatccgccaggggctgtcggctatggtgcaattgctggagcactattttgccgagcagagcagcgcgcagtcgcgccatcgtctgatgcgccgtcattcacatgatgaacagcgcagctggcgctacctggatattatcaacaggatgatcgacaagcccggcgggcgcagccatcgggtgattttattggggttgttttcgactctgctgcaggcgaaaggcacggtaagactcgatcgcgatgcgcggccgctcttattgattgaggacccggaaaccaggctgcatcctattatgctgtcagtggcctggcatttgctcaatttactgccgctgcagcgggtgacgacaacgaactccggcgaactgctgtcattaacgcccgtcgagcacgtctgtcggctggtgcgtgaatcttcacgagtgtcggcctggcggctggggcccggcgggatgaatgcggaagacagccggcgcatcgcgtttcatattcgctttaaccgcgcttcatcgctgtttgcccgctgctggctgctggtggagggggagacggaaacctgggttatcaacgagctggcccgccagtgcggccatcattttgatgcggaaggggtgaaggtcattgagtttgcccagtcgggtttgaaaccgctgataaaattcgcccggcgaatgggtattgagtggcatgtgctggtggatggcgatgaagccgggaaaaaatacgctgccaccgtgcgcgggctgttgaatgacgacaaaatgctcgaacgcgaccatcttaccgcgctaccggcgatggatatggagcattttatgtaccgtcagggcttcgacgatgtttatcaccgggtcgcgcagctgccgatgaatatacctatgaatatgcggcgggtgatcaccaaagcgattcaccgttcgtcaaaaccggacctggcgattgaagtggctatggaggccggacggcgcggggtggacgccattcctgcgctgttgaaaaaaatgttctctcgcgtgctatggctggcgcgcggacgcgcggattag

SEQ ID NO: 189617 - DNA, 1116 bp, Klebsiella oxytoca
atgaaattaaatggaaagcgcaggaaagtttggtggctgctggcgattgtcgtgctggccctcgccatctggggatggcgaattctgaatgcgccgctgccgcagtatcagacgctggtggtgcgtaaaggcgaccttcagcagagcgtgctggcgaccggtaagctcgatgcgttaaaaaaagttgacgtcggggcgcaggtgagcgggcagctaaaaacgctgcgcgtcgagattggcgacaaagtcaaaaaagaccagctgctgggggttatcgacccggagcaggcggaaaaccagataaaggaagtcgaagcgacgttaatggagctacgggcacagctgaaccaggcgcgcgcggaacgtaagctgtctgcggcgacgctggctcgtcagcagcagctggcgcagcggcaactggtctctcgtcaggacctcgataccgccgcgaccgacttagcggtcaaagaggcgcaaatcggcacgattgaagcccagattaaacgcaatcaggcgaccctggatacggccaaaaccaacctcgactacaccaaaattctggcgccgatgtccggagaagtgacgcaaatcactaccctacaggggcagacggtgattgccgcccagcaggcgccgaatattttgaccctggccgatctcagcaccatgctggtgaaggcgcaggtctcggaagcggacgtcattcatcttaagccggggcaaaaggcctggtttaccgtactgggcgatccgttgacgcgctatgaagggacgctgaaggatattctcccgacgcccgaaaaggtcaacgacgctattttctactacgcccgttttgaagtgccgaacccgcagggcatcctgcgcctggagatgaccgcccaggtgcatattcagctctcagaagtgaaaaatgttatcaccatcccgctgagtgcgctgggtgaggccatcggcgataaccgctatcacgtgcgtctgctgcgtaccggtgaagttaaagagcgtgaaattgttatcggcgcgcgtaacgataccgatgtggcggtggtgaaagggctggacgagggggatgaagtcattatcggcgaaggtgcggccggagcggcgaaatga

SEQ ID NO: 189618 - DNA, 1947 bp, Klebsiella oxytoca
atgacggcgttactggaactgcgtgatattcgccgcagctacccctccggcgatggcaacgttgaggtgctgaaaggcattacgttgaacattgccgccggtgagatggtggcaatcgtcggcgcgtcgggctccgggaaatccacgctgatgaatattctcggctgtctggataaacccaccagcggcacctatcgggttgccggaaccgacgtagcacgtctcaacggcgacgagctggcgcgcctgcggcgggaacatttcggttttatttttcagcgctatcacctgttatcgcatctcaccgcggcgcagaacgtcgaagttcctgcggtttatgccggcgccgagcgcaaagcgcgcctggcccgggcccatgagctgctggttcggctggggctgggcgacagagctgaatatcagccttcgcagctctccggcggccagcagcagcgggtgagtatcgcccgcgccctgatgaacggcggggaagtgattctggcggatgagccaaccggtgcgctggacagccgctccggcgaagaggtcatggggatccttcaccagctaaaagcgcaggggcatacggtgattatcgtcacccatgacccgcaggtggcggctcaggcggagcgggtgattgagatccacgacggtgaaatcgtgcgtaatccgcccgcgctgagtccggcgcaaggcggcgtactgcgccagcgcacggcggccgaaccgtcggcgtggcgtcagttcagcagcggctttcgcgaagcgctgatcatggcctggcgcgcgatggaggcgaataaaatgcgtacgctgctgacgatgctcgggattattatcggcatcgcatctgtggtgtcgattgtggtggtgggcgatgccgcgaagcagatggtgctggccgatatccgcgccatcggcaccaataccattgatgtatatcccggcaaggatttcggcgatgacgatccccgctatcagcaatcgctcaagtacgacgatctgttagctattcagaaacagccgtgggtgagctcggcgacccctgcggtatcaaaaagcctgcgtctgcgggcggataacatcgacgttgccgccagcgctgagggcgtgggggcgcagtactttaacgtctacggcatgacatttagcgaaggcaatacctttaacgagcttcagctaaatagccgcgcgcaggtggtggtgctcgacagcaacgcgcgccgacagctatttccgcacaaagcgcgggtcgtcggcgaggtgattctggtcggcaatatgcccgcgacggtgatcggcgtggcggatgaaaaacagtcaatgttcggcagcagcaaaattctgcgcgtctggttaccctataccacgatggctggccgggtgatggggcagtcgtggctgaattccatcaccgtgcgcgtcaatgaaggctacgacagcgcggttgccgagcagcagctgttgcgtctcctggaactgcgtcacggtaagaaggatgttttcacctggaatatggacagcatcttgaaaacggcggaacggaccacacatacattacagctgtttctgacgctggtggcggtgattgcgctggtggtcggcgggattggcgtgatgaatattatgctggtctccgtcaccgaacgcacgcgggagatcggtatccgtatggcggtcggggcgcgggccagcgatgtcttacagcagtttttgatcgaggcggtgctggtttgcctggtcggcggggcgctgggcgtcacgctttcgctgctgattgcctttgtattacagctgtttttacccggctgggagattggtttttcaccgttggcgctattgaccgcgtttttatgctccacgctgaccggggtgctgtttggctggctaccggcgcgcaatgcggctcgtctggaccccgtcgacgccctggcgcgcgagtag

SEQ ID NO: 189619 - DNA, 231 bp, Klebsiella oxytoca
atggaaatgggtactgttaagtggttcaacaatgccaaagggttcggttttatctgccctgagggcggcggcgaagacattttcgcccattactcgaccatccagatggatggttacagaacgctaaaagccggacaagcggttcggtttgatgttcaccaggggccaaaaggtaaccacgccagcgtgattgtccctgttgaagctgaagaaacagaaacagccgcataa

SEQ ID NO: 189620 - DNA, 318 bp, Klebsiella oxytoca
atgagtaagagagactggttggacttcgatcagctaattgaggacgaagttaaagatgcgcttaaaccgccatctatgtataaagtgatattagtcaatgatgactacactccaatggagtttgttattgacgtgttacaaaaattcttttcttatgatgttgaacgtgcaacgcaactgatgctgacggttcactatcaaggtaaagcgatttgcggggtgtttaccgcagaagtcgcagaaaccaaagtatcgatggtgaaccagtatgcgagggagaacgaacatccgttgttgtgtacgctagaaaaagcctga

SEQ ID NO: 189621 - DNA, 2283 bp, Klebsiella oxytoca
atgctcaatcaagaactggaactcagtttaaacatggctttcgccagagcgcgcgagcaccgtcatgagttcatgaccgtcgagcacttgttgctggcgctgcttagcaacccttcggcccgcgaagcgcttgaagcgtgttcagtggacctggtcgcgctgcgtcaggagcttgaagccttcatcgaacagaccacacccgtactgcctgcaacggaagaagagcgcgacactcagccgacgctgagcttccagcgcgtgctgcaacgtgctgttttccacgtccagtcttccggccgcagcgaagtgaccggcgccaacgttctggtcgcgatttttagcgaacaggaatctcaggcggcatacctgctgcgtaaacatgaagtcagccgacttgatgtggtgaattttatctctcacggtacgcgtaaagacgagccgagccagtcttccgataacagcggaagtcagcctggcagcagcgaagagcaagcaggcggggaggatcgtatggaaaacttcaccaccaacctcaaccagcttgcccgcgtaggcggtatcgatccgctgatcggccgcgagaaagagctggaacgtgctattcaggttctgtgccgccgccgcaagaacaacccgctgctggtgggggaatccggcgttggtaaaaccgctattgctgaaggtcttgcctggcgtatcgttcagggcgacgtgccggaagtgatggccgattgcactatctattcactggatattggctcgctgctggcaggtaccaaataccgcggcgactttgaaaaacgctttaaggcgctgcttaagcagctggagcaggacaccaacagcattctgttcatcgatgagatccacaccattatcggtgcgggggcggcttccggcgggcaggtcgatgccgctaacctgattaaaccgctgctttccagcggtaagattcgggtcattggctcgacgacctatcaggagttcagcaacatctttgaaaaagatcgtgccctggcgcggcgtttccagaaaattgatatcaccgaaccttccgtggaagagacggtgcagattattaacggcctgaagccgaagtatgaagcgcaccacgacgtccgttacaccgcgaaagcggtacgtgcggcggtagagctggcggtgaagtacattaacgatcgtcatctgccggataaggcgattgacgtgattgatgaagccggggcgcgtgcgcgcttgatgccggtgagcaaacgtaagaaaacggttaacgtggcggatattgagtccgtggtggcgcggattgcgcgtatacctgagaagagcgtttcccgcagcgatcgcgatacgctgaaaaacctcggcgatcgcctgaaaatgctggtcttcggccaggataaggcgattgaggccttaaccgaagcgatcaagatggcgcgcgccgggcttggccatgagcacaaacccgtcggctctttcctgttcgccgggcctaccggggtcggtaaaaccgaggttaccgtacagctggcgaagtcgctgggcattgagctgctgcgttttgatatgtccgaatatatggaacgtcataccgtcagccgcttaatcggtgcgcctccgggctacgtcggtttcgatcagggcgggctgctgaccgatgcggttattaagcatccgcacgcggtgctgctgctggatgaaattgaaaaagcgcatccggacgtctttaacctgctgctgcaggtgatggataacgggacgctgaccgataacaacggccgcaaagcggatttccgcaacgtggtgctggtgatgaccaccaacgccggggtgcgtgaaaccgagcgtaaatccattggccttattcatcaggacaacagtccggatgcgatggatgagatcaaaaagatctttacgccggaattccgtaaccgtctcgacaacattatctggttcgatcatctgtctacgacggttatccatcaggtggtggataaatttatcgtcgagctgcaggttcagttggatcagaaaggcgtctctttggaagtcagccaggaagcccgcgattggctggccgagaaaggctacgaccgggccatgggcgcgcgtccaatggcgcgggtgattcaggacaacctgaaaaaaccgctggccaacgagctgctgtttggctcactggttgacggtggacaggtgaccgttgaactggataaagagaaaaatgcgctgacctacgacttccagagtgcgcagaagcacaaaccggaagcggcgcattaa

SEQ ID NO: 189622 - DNA, 219 bp, Klebsiella oxytoca; identical to SEQ ID NO: 173880

SEQ ID NO: 189623 - DNA, 705 bp, Klebsiella oxytoca
atgcggctggttcagctctctcatcactccattgccttcccctccccggaaggcgctttacgcgaacctaatggcctgttagcgctgggcggcgatcttagcccggcgcgtttactgatggcctatcagcgcggtatttttccgtggttttcgcccggcgaccctattttgtggtggtcccccgatccgcgagcggtgctgtggccagagaaatttcatctcagccgcagcatgaagcgtttccatcagcgctcgccttatcgcgtcacgctgaatcacgcctttggtcaggttatcgagggctgcgccgaccatcgcgatgagggaacatggataacgccggggatcgttcaggcgtaccaccagctgcatgagctgggacatgctcattctgttgaagtatggcagggaaaggaattagtcggcgggatgtacggcgtcgcgcagggcgcgctgttttgcggagagtcgatgttcagccgtgccgaaaacgcctctaaaaccgcgctgctggtctttagccagagattttcgcaggatggcggaaaattaatcgattgtcaggtgctgaataagcatacggcgtcgctgggcgcagtggaaattccccgccgcgattacctcgactatctttccgtgctgcggacgtatcgtctgccggagcgattctgggtaccaagggtgctatttgcaggagaagcataa

SEQ ID NO: 189624 - DNA, 1722 bp, Klebsiella oxytoca
atgcgcgcattatggccttacctggcgctgtacaaacgacacaaatggctgttgctgctcggtatcgtgctggcgatcgtgacgctgctggccagcattggcttattaacgctatccggctggttcctgtcggcatcagccgtcgttggcgtggcgggcatctacagctttaactatatgctgccagccgcgggcgtgcgcggcgcggcgattattcgcaccgcgggccgctactttgagcgtctggtcagccatgacgccaccttccgcgttctgcagcacctgcgggtctttaccttcagtaagctgctgccgctctcccccgccgggctggcgcgttttcgtcagggcgaactgcttaaccgggtggttgcagatgtcgataccctggatcatctctatttgcgcgtcatatcaccgctggtaggtgcgctggtggtgatcctggtcgtcaccgtagggttgagcgtgctggacgtcactctggccctgaccctcggtggtattatgctgctcaccctgctggtgatgccgccgctgttctatcgcgcaggtaaacccgcaggtgaaagcataacccggcttcgcgggcaatatcgccagcatctgacctcatggctccagggacaggcggaactcatgctgttcaacgccagcgaccgctaccggcagcaaatggaaaaaacggaagcgcgctggctggatgcgcagcgtcgccaggctgagctcaccgcgctctcccaggcgctgatgctgctgattggcggtattgcggttattgctatgctgtggctcgcctccgcgggcgttggcggcgatactcagccaggggcgctgattgcgctgtttgtcttctgcgcgctggcggcgtttgaagcattggcgccggtaaccggcgcatttcagcatttgggacaggtgatcgcctccgcaaagcgcatcacgcaaattaccgagcaagagccggaagtggccttccctcagggcgaaggccagacgctggatcgcgtctcgttacgcttacatcaggtcaccttcagctatccgcagcagccctcccccgcgctggagaaagtgtcattgcagatcgaggccggagagcatatcgccatcctcggacgaacaggctgcggtaaatcgaccctgctgcagctgctgacccgtgcctgggatccggctgaaggggaaatcttactcaacaatcagccgctggggcagtttaatgaggcgacgctgcgccgggcgatgagcgtcgtgccgcagcgcgtgcatctgttcagcgctacgctgcgcgacaacctgctgctggcttctcccggtgccagcgatgcccggcttgcccaaacgcttgaacgcgtcggcttagcgaaattactggaagatagcggtctgaacagctggctgggtgaaggcggtcgtcagctttccggtggcgagctgcgcaggctggctatcgcccgcgccctgcttcacgatgcgccggtcatgctgcttgatgaacctactgaaggcctcgatgcgacgaccgaaagtcaaatccttgatttactggcggaagtgatgcgagaaaaaaccgtgttaatggtaacccatcgtctgcgcggactggcgcgttttaatcagataatagtcatggacaacgggaagattattgagcaaggtagtcacgcagaactgctggctgaacaggggcgttactaccagtttaagcagcgcctgtag

SEQ ID NO: 189625 - DNA, 1767 bp, Klebsiella oxytoca
atgaataaaacccgtcaacaagagttaacccgttggttaaaagatcaaagcattatctcccgtcgctggttgatgatttcccgcgtattgggcgtcgttagcggcctgttgatcgtcgcccaggcctggttcctggcgaggatcctccatcgcatgattatggaaaatattcccgcaacggcgctgctgctgccctttacgttactggtgctggtctttgtgctgcgcgcctgggtggtctggctgcgtgaaagagtggggtttcaggcaggtcaacatatccgactggagatccgccgtcaggttctggatcgcttacagcaagcggggccggcgtggatacagggcaaacctgcgggtagctgggccacgctgatccttgagcagatcgacgatatgcatgattactatgctcgctatttgccgcagatgacgctggcggcctctatccctttgctgattgtcatcactattttcccggtcaactgggctgcagcgcttattctgctgggcaccgccccgcttattccgctgtttatggcgctggtggggatgggcgcggccgatgccaaccgacgcaactttctcgctctggcgcgtttaagcggccattttctcgatcgcctgcgcggtatggaaacgctgcgtatttttcatcgcggcgaagcggagacggataacatacgcgaggcctcgcaggatttccgccagcgaacaatggaagtactgcgcctggcgtttctctcctccggagtcctggagtttttcacctcgctgtcgattgcgctggtcgccgtttactttggtttttcctatctgggagagctcaactttggccattacggtgccggggtgacgttgatgtccggtttcctcgccctgattctggctcctgagtttttccagccactgcgcgatttaggcaccttttatcatgcgaaagcgcaggcgattggcgccgccgatagcctgaagacctttatggaaacgccgctggcgcaggcagagcgtggggaaaaggcattaaaagatgatgaaacggtaagccttgaagctcgcgacctgctgattaagtctcccgaagggaaagtgctggccgggccgctgaatttttccctgcgcgccggtgaacgcgtggtgctggttgggcaaagcggctcgggcaaaagctcgctactgaatacgttaacgggttttcttccctatgacggctcgctcaaggtcaatggcgtcgagttaaagagtctggatgccgaccgctggcgtcgtctcctgagctgggtcgggcaaaatccgcagctgcccgcgccgacgctgcgcgaaaacgtcctgctctcccgccctgaagccaccgaagcgcagctgcagcttgcgctggataaagcctgggttagcgagttcgtctctcttctgccgcagggtattaatacgcctgttggcgatcaggccggccggctgtcggtcgggcaggctcagcgcgtcgccgtcgcacgagcgctgctggtgccctgtcgtctgctgctgcttgatgagcctgccgccagccttgacgcacatagcgaacagcgcgtgatgcaggcgctgaccaatgcatcaacgcagcaaaccacgttaatggttacccatcagctggaaggactggcgaactgggatgcgatctgggttatgcaggatggtcgaattgttgagcaaggcagctattcgcagctggcggccgctggcggccccttcgcgaccctactcgcccatcgtcaggaggagatttaa

SEQ ID NO: 189626 - DNA, 969 bp, Klebsiella oxytoca
atgggcacggccaaacacagtaaactgcttattcttggttctggacctgcgggatacaccgctgcggtctacgcagcgcgcgcaaatctgcagccggtactgattaccggaatggaaaaaggcggtcagttgaccaccaccacggaagtggaaaactggccaggcgatcctaacgatctgaccggaccgctgctgatggagcgcatgcatgaacatgccaccaaatttgaaaccgaaattattttcgatcatatcaacagcgtcgacctgcaaaaccgtccgttccgtctggtcggcgacagcggcgaatacacctgcgatgccctgattattgccaccggcgcttcagcacgctatctgggtcttccctcggaagaagcgtttaagggccgcggcgtgtctgcctgcgcgacctgcgacggtttcttctatcgtaaccagaaggttgccgtcatcggcggcggcaatacggccgtcgaagaggcgctgtacctgtctaacatcgcttccgaagtgcatttgatccaccgtcgtgacggcttccgcgcggaaaaaatccttatcaaacgcctgatggacaaagtggagagcggcaatatcgtgctgcacacccaccgtacgctggaagaagtgaccggcgaccagatgggcgtaagcggcttgcgtctgcgcgatacccagaatgcggataacgttgaatccctcgaggttgcggggctgttcgtggctatcggccacagcccgaacacggcaattttcgccggtcagctggagctggaaaacggctacattaaagtccagtccggcatccacggcaacgctacccagaccagcatcccgggcgtcttcgccgccggcgacgtgatggatcatatctaccgtcaggcgattacttctgcgggtaccggctgcatggcagcgctggacgcggagcgctatctggatggtttagccgacgcttgcaaataa

SEQ ID NO: 189627 - DNA, 495 bp, Klebsiella oxytoca
atggtagatagcaagaagcgccctggcaaagatctcgaccgcattgatcgtaatatattgaatgaattgcaaaaagacgggcgtatttccaacgtcgagctttctaaacgggtgggactttctccgacgccttgccttgagcgcgtgcgtcgactggaaagacagggttttattcagggctatacagcgctgctcaacccgcactatctggatgcatcacttctggtatttgttgagattactctgaatcgtggcgcgccggatgtgtttgagcaatttaactccgctgtgcaaaaacttgaagaaattcaagagtgtcatctggtttccggggattttgactacctgttgaaaacccgcgtaccggatatgtcagcgtatcgtaaattactgggcgagaccttgctgcgcctgccgggcgtaaatgacacccgtacctatgtggtaatggaagaagtcaagcagagtaatcgtctggtaatcaagacgcgctaa

SEQ ID NO: 189628 - DNA, 4044 bp, Klebsiella oxytoca
ttgagccaggaatacactgaagacaaagaagtcaaattcacaaagctgagtagcggacgccggctccttgaggcgttactcattctttgctccctttttgccatctggttgatggcggccttactcagctttaatccctcggatcctagctggtcgcaaacggcgtggcatgagcctattcacaacataggcgggacgccgggagcctggcttgccgatacgctattttttatttttggcgtaatggcctataccattccggtcatcattatcggcggctgctggtttgcctggcgtcatcaagaaaacgacgagtacatcgactatttcgccgtctcgctgcgtttaattggcgcgctggcgctgatcctcacttcctgcggtctggcggcaatcaacgctgatgatatctggtatttcgcctccggcggcgtgatcggcagcctgttgagcactaccctgcaaccgctgctgcacagcagcggcggcacaatcgcgctgctctgcatctgggcggcaggactgacgctatttaccggctggtcctgggttagcatcgctgaaaaactcggcggtgcgattctttctattctcacgtttgccagcaaccgtacccgtcgtgacgatacctgggttgatgaaggggaatatgaagatgatgaagaagaatatgaagatgatgaacccgcgaagccgcagggttctcgacgcgcgcgaattttacgcagcgccttagctcgccgccagcgtctggctgagaagttctctaatccgatggggcgtaagaccgatgcggcgctgttctcgggtaaacggatggatgacgccgaagacgaggttcagtacagcgccggcggtgcgcctgttgccgctgacgatgttcttttttctggctccagcgcagcgcgtccggcaaatgctgatgatgttctgttctccggcgtcagtgctgcacgtcccggcgattttgatccttacgatcctctgttgaacggtcatagcattgccgatccggtggctttggccgcgcaggataccgctgcgccgcaggcatggtctgaaccgctgccagggtatgaggctcagccggtctatcatccggaacaggcacaggtacagcagccagcatatcagtctgaaccggcttatcagccgcagcacgggtatcagccggaacaggctccggtacagcagccagcatatcagccggaaccggcatatcagccgcagcacgggtatcagccggaacaggccccggtacagcagccagcgtatcagccagcaccggcttaccagccgcagcacggatatcagccggaacaggccccggtacagcagccagcatatcagccggaaccggcttaccagccgcagcatgcgtaccagccggaacaggccccggtacagcatccagcgtatcagccggaaccggcttaccagccgcagcacgcgtaccagccggaaccggccccggtacagcagcctgagccttacgccgcctccgttgtgcctgagtctccgcaagaggaggtgaagcctcagcgtccgccgatgtactatttcgaagaagtggaagagaaacgcgcgcgtgaacgcgagcagcttgccgcatggtatcagccgattccggagccggtcagtccggttgcgacaaaaccgatctcgcctccgcctgctccggcggctgatgttgccgcggtgagcgcgctggcggctggcgtccatcaggccactggggcggcctctggtagcgccgcggcggcctccgtcgcatctgccgcatccagcgccgcgccgctatttagcccggcgtcgggcggcccgcgtgcgcaggtaaaagagggcataggcccgaaattgccgcgtccaaaccgcgttcgtgtacccacgcgccgtgagctggcttcctatggcattaagctgccttcgcagcggttggctgaagaacgtgcgcgtcaggcagagcatcagcactatgatgacgatgcgctgacggacgaggaagtagcagagcttgagcagggtgagctggcgcgtcagttcgcggctgcgcaaaatcagcgctatggagatagctacgctgcggaagaggatgatggagacgaagattctgccgctgaagccgaacttgcccgtcagtttgccgcttcccagcagcagcgctacgccagcgagcagccgccgggatcgcatccgttctctgcggcggattatgaattctcaccaatgaaaacgttagttgatgatacgccgagcgagcctgtcttcacgccgttgccggaagtacagcagcctgccccgcagtatcagcagacggcccagcattcgcagcccgtacagcagccgatgccgcaccagcagatgcctcagccgccgcaacatgcgcagcagcaggcttatcaacccgcgcagcagccggttcaccatcagccgataccgcagcaggctcctggcagctatccgcaacagcaggctccgcagcagccgatcccgcagccgcaggaaagtctcattcacccgctgttgatgcgcaatggcgacagtcgcccgttacagaagccgacaacgctgctgccctcgcttgacctgctcacgccgccaccggctgaagttgagccgatcgatacctttgcgcttgagcaaatggcgcgtctggttgaagctcgtctggccgatttccgcattaaagccgatgtggtgaactactcacctggcccggtcattacccgctttgagcttaatctggcgccgggcgtgaaagcggcgcgcatttccaacctgtcgcgcgatctggcccgttctctgtccactgcggcggttcgcgtggtggaagtgatcccgggtaaaccctacgttggcctggagctgcctaacaaaaagcgccagaccgtttacctgcgcgaagtgctggataatgcgaaattccgcgataatccttcaccgctcacggtggtcctcggaaaagacattgcgggcgaacctgtcaccgccgatctggcgaagatgccgcacctgctggtggcgggtaccaccggttccggtaaatccgttggggtcaacgccatgatcctcagcatgctctataaagcgcagccggaagacgtgaaattcatcatgattgacccgaaaatgctcgagctgtcggtctatgagggaataccgcatctgttaacggaagtcgtgacggatatgaaagacgcggccaacgctttgcgctggagcgttaacgagatggagcgccggtataaactgatgtctgctctgggcgtacgtaatctcgcgggttataacgagaagattgctgaagccgcacgtatgggacggcccattccggatccttactggaagcctggcgacagcatggatgcgacgcacccggtactgaaaaaagagccttatatcgtggtgctggtcgacgagtttgccgacctgatgatgaccgtcggcaagaaagtggaagagctgattgcgcgcctggcgcagaaagcgcgagccgcggggatccacctggtgctggcgacccagcgaccgtcggttgacgttatcaccggcctgattaaagccaacatcccgacgcgtatcgcctttaccgtatcgagtaaaattgactcgcgcactatccttgaccagggcggtgcggaatctctgctgggaatgggcgatatgctctactccgcgccgaactcgacgatccctgtgcgcgtccacggcgcttttgtacgcgatgaggaagttcacgccgtcgttcaggactggaaggcgcgcgggcgtccgcagtatgtcgatggcatcacctccgatagcgaaagcgaaggcggcggcggtggctacgagggtggtgaagagctcgatccgctgttcgatcaggccgtcaactttgtgacggaaaaacgcaaagcctccatatccggggtacagcgtcagttccgcattggctataaccgcgccgcgcgtatcattgagcaaatggaagctcaggggatcgtgagcgagcaggggcataacggtaaccgtgaagtgctggctccgccgccttttgagtaa

SEQ ID NO: 189629 - DNA, 612 bp, Klebsiella oxytoca
atgaaaaaactcgcaatcacctgtgcattactgtccagttttgccgtcagtcaggtatgggcggatgccgccagcgatttaaaaagccgccttgataaagtgagcagcttccactccagctttacgcagaaggtcacagacggcagcggtaatgccgtgcaggacgggcagggggacctgtgggtcaagcggcctaatctgttcaactggcatatgacccagccggatgaaagcgtgctggtttccgacggcaaaacgctgtggttttacaacccgtttgttgagcaggctaccgctacctggctgaaagatgcgaccagcaacacgccgtttatgctgattgcccgcaatcaggccagcgactggcagaactacaacattaagcagaacggtgacgattttgttctgacgccgaaaaacggcagcggtaatctgaagcagttcaccatcaacgtgggtcgcgacggtacgattcatcagttcagcgccgtggaacaggacgatcaacgcagcagctatcagctgaaatcgcaacaaaatggtgccgtggatgcatctaagttcacctttacgccgccgcaaggggttacggtggacgatcaacgtaaatag

SEQ ID NO: 189630 - DNA, 1344 bp, Klebsiella oxytoca
gtgagcaacctgtcgctcgatttttccgacaacgcgtttcaacctctggccgcccgtatgcggccagaaaatttagcgcagtacattggccagcagcacctgctggcgccgggtaaacccttaccgagggcgattgaggccgggcatctacactcgatgatcctctgggggccgcccgggacaggaaaaacaaccctggccgaagtgatagcgcgctacgccagtgccgacgttgaacgcatctcagcggtgacctccggggtgaaagagatccgcgaggccattgaacgcgcgcgccaaaaccgcaacgcgggtcgccgcacgatcctgtttgtcgacgaagtgcaccgtttcaataaaagccagcaggacgcctttctgccgcatattgaagacgggaccatcacctttatcggcgcgacgacggaaaatccctcctttgaactcaattccgcgctgttatcccgcgcgcgcgtttatctgctgaagtcgctgaccagcgacgacatcgagcaggtgctcaaccaggcgatgagcgacaaaacgcgcggctacggcgggcaaaatatcgtcctgccggacgagacgcgcaaggccatcgccgaccttgtcaacggcgatgcgcgccgggcgctgaatacgctggaaatgatggccgatatggccgaagccgacgcctccggcaatcgcgtgctgaaagttgaactactgactgaaattgccggtgagcgcagcgcgcgtttcgacaacaaaggcgatcgcttttacgatttaatctccgcgctacacaaatcggttcgcggcagcgccccggacgccgccctctactggtacgcgcggattattaccgccggcggcgatccgctctacgttgcccgccgctgcctggcgattgcctcggaagatgtcggcaacgccgatccgcgcgcgatgcaggttgcgatctccgcatgggactgctttacccgtgtcggaccggcggaaggcgaacgggcaattgctcaggccattgtctatcttgcctgtgcgcccaaaagcaacgcggtttacaccgcgtttaaagcggcgatggccgacgcccgcgaacgtcccgattacgacgtcccggttcatttgcgcaatgccccaacgaagctgatgaaagagatgggctacgggcaagagtatcgctatgctcacgatgaaccgaatgcttatgccgccggggagcagtacttcccgcaggaaatggcgcaaacgcgctattataagccgacaaaccgggggctggagggcaaaataggcgaaaagctcgcctggttaaccgaacaggatcaaaatagcccgataaaacgctaccgataa

SEQ ID NO: 189631 - DNA, 1293 bp, Klebsiella oxytoca
atgctcgatcccaatctgctgcgtaccgagccagacgcagtcgcagaaaaactggcacgccggggctttaagctggatgtagataaacttcgcgctctggaagagcgtcgtaaagttctgcaggttcaaactgaaaacctgcaggcggagcgcaactcccgatcgaaatccattggccaggcgaaagcgcgcggggaagatattgagccattacgcctggaagtgaacaaactcggcgagcagcttgatgccgctaagaccgagctggacgcgctgctggcggagatccgcgatatcgcgctggctatccctaatatcccgcacgacgacgttccggccggtcgcgacgaaaacgacaacgttgaagtcagccgctggggaacaccgcgcgagttcgattttgacgttcgcgatcacgtcacgctgggcgaaatgcatggagggctggattttgccgccgccgtgaagctgacaggttctcgctttgtggtcatgaagggccagctggcacgcctgcaccgcgcgctggcgcagtttatgctggatctgcataccgaacagcacggctacagcgaaaactacgttccgtatctggttaaccaggacacgctgtacggtaccggtcagctgccgaaattcgccggcgacctgttccatacccgtccgctggaagaagaagccgacagcagcaactacgcgctgatcccgacggcggaagttccgctgaccaacctggttcgcgatgaaatcattgatgaagacgatctgccgatcaaaatgaccgcgcatacgccgtgcttccgctctgaagccggatcttacggccgcgatacccgcggtctgatacgtatgcaccagttcgacaaagtcgagatggtgcagattgtacgtccggaagattccatggcggcgctggaagagatgaccggccacgccgagaaagtgctgcagctgctgggtctgccgtatcgtaaagtggctctgtgcacgggcgatatgggcttcagcgcatgcaaaacctacgatctggaagtgtgggtgccggcgcagaatacctatcgtgagatctcttcctgctccaacgtctgggatttccaggcgcgtcgcatgcaggcacgctgccgcagcaaatctgacaagaaaactcgcctcgtacacacgctgaacggttctggcctggcggttggacgtacgctggtcgcggtgatggaaaactatcagcaggcggatggtcgcatcgagatcccggaagttctgcgcccgtatatgcgcggccttgaatttatcggctga

SEQ ID NO: 189632 - DNA, 2439 bp, Klebsiella oxytoca
atgaaaaccaaaacctccgatgctttactggctgctgaggtgagccggcgtggtttaatgaaaaccacggcgattggcgggctggcgatggccagcagcgcttttaccttacccttcacgcgcattgcccaagccgcagacaacctcaaccccgccagcgaaacggtcacctggagcgcctgtacggtgaactgcggcagccgctgcccgctgcagatgcatgtggtgggtggtgagataaaatatgttgaaacggacaataccggcaatgatagctacgacggtctgcatcaggttcgcgcctgtctgcgcggccgctcgatgcgtcgacgcgtctacaacccggaccgcctgaaatatccgatgaagcgcgtgggcaaacgcggcgagggcaaattcgagcaaatcagctgggaagaagcgttcgatactatcgccagtaatatgcagcgcctgataaaagagtacggtaatgagtccatctatctgaactacggaacgggaaccctcggcggaaccttgactcgctcatggccaccggggaaaaccctgattgcccgcctgatgaactgctgcggcggctatctcaaccattatggcgactactccaccgcgcaaattgccgcgggactgaactacacctacggcggctgggccgatggcaatagcccgtcggatatcgaaaacagcaagctggtggtgctgtttggcaacaaccccggggaaacccgcatgagcggcggcggggtgacctacttcctggaacaggcgcgggagaaatccaacgccaggctgattattatcgatccacgctataccgacaccggcgccggacgcgaagacgagtggatccctatccgcccgggaaccgatgccgcgctggtctccgcgctggcgtgggtgatgattaacgagaacctcgttgaccagcctttcctcgacaagtactgcgtaggctatgacgagaaaacgctgccggaaggggcgccggccaatggccactataaggcctatattctcggtcagggcaaagacggtatcgcgaagacccctgagtgggcgtcgacgattaccggcattccccaggcgcgtatcgtgcagctggcgcgcgaaatcgccagcgctaaacctgcctatatttctcagggctggggcccacagcgccatgccaacggtgagctggtttcccgcgcgatttccatgctggcaatcttaaccggcaacgtcgggattaacggcggcaataccggcgcgcgtgaaggttcttactctctgccttttgaacgtatgccgacgctggataatccggtggaaaccagtatttccatgtttatgtggaccgatgcgattgagcgcgggacggaaatgaccgcgctgcgtgacggcgtgcgcggcaaagataagctcgacgtgcctattaaaatggtctggaactatgccggtaactgcctggtcaaccagcattcagagattaaccgtacccatgacatccttcaggatgacaagaagtgcgagatgattgtggtcattgattgccatatgacctcctcggcgaaatatgccgatattctgctgccggactgtacggcctcggagcagatggattttgccctcgatgcctcctgcggcaacatgtcctacgtgatttttgccgatcaggccatcaagccgcgttttgaatgcaaaaccatctatgagatgaccacggagctggcgaagcgcatgggcgttgagcaacgtttcaccgaaggccgcactcaggaagagtggctgcgtcacctctatgagcaatcccgtaaagcgatcccggcgctgctgccgtttgatgaattccgcaagcagggaatcttcaaacagcgcgatccggaaggccaccacgttgcctataaagctttccgcgaagatcccgccgccaatccgcttacgacgccgtcagggaaaattgaaatctactctgcgcagctggcggaaattgccgcgacctgggagctgaaagaagaggatgttatcgacccgctgccgatatacagccctgggtttgaaaactatgacgatccgctggcgaaaaagtatccgctgcagctgaccggttttcactataaagcccgcacgcactccacctacggcaacgttgacgtactgaaagcggcttgccgtcaggagatgtggatcaacccgcttgatgcacagaagcgcggtatcgccaatggcgatcggatccgcatttttaacgatcgcggtgaagtgcatatcgaggccaaagtgaccccgcgcatgataccgggcgtggtcgcgctgggtgagggggcctggtataacccggacgcaggccgcgtggatcaggctggctgcattaacgtgctgaccacccaacgcccatcgccgctggcgaaaggcaatccatcgcatagcaacctcgtccaggttgaaaagctgtaa

SEQ ID NO: 189633 - DNA, 618 bp, Klebsiella oxytoca
atgacaactcaatatggattttttattgattccgcccgttgcaccggttgcaaaacctgcgaactggcttgtaaagactataaaaacctcacgccggaagtgagcttccgtcgtatctacgaatacgccggcggcgactggcaggaggataacggcgtctggcagcaaaacgtctttgcctattacctctctattgcctgcaaccattgtgaggatccggcctgcaccaaagtttgcccgagcggggcgatgcataaacgtgaagatggctttgtcgttgtcgatgaagatgtctgtattggctgtcgctattgccatatggcctgcccgtacggcgcgccgcagtacaatgcgacaaaaggtcatatgaccaaatgcgatggctgccacgagcgcgtcgccgacggcaaaaagccgatttgcgtggaatcttgcccgctgcgcgcgttagatttcggcccgattgaagagctgcgccaaaaacacggacagctggccgccgttgcgccgctgccttcggcccacttcactaaaccgagtatcgtgattaaacctaacgccaacagccgaccgtgtggagataccaccggctacctggccaacccgaaggaggtgtga

SEQ ID NO: 189634 - DNA, 864 bp, Klebsiella oxytoca
atggggagtggatggcatgaatggccgctgattattttcacggtctttggtcagtgcgtggtgggcggctttattgtgctggctctggcgctaatgaaaggcgacttatcgcgtgaacagcagcagcgcgtcgtgtggagcatgtttggcctgtgggtgctgatgggcgtgggctttattgcctcaaccctgcatcttgggtcgcccatgcgcgcgtttaactcgctcaatcgcgtaggcgcctcgtcgctcagtaacgaaatcgccagcggggcgcttttcttcgccgtcggcggtattggctggctgctggcggtggtcaataagctaccggcggggctgcgtcatctctggctggtcattaccatggtgctagggattatcttcgtctggatgatggtccgcgtctataacactattgatacggtacccacctggtatacggtctggacgccgcttagcttcttcctgacgatgtttatcggcggtccattgctgggatatctgctgctgcgcgttgccgatgtcaacggctgggcgatgcgcctgctgccggcggtgaccctgctggcgctggtgattagcgccatcgtggtgctgatgcagggcagcgagctggcgacaatccatagctctattcagcaggcctcggcgttggtaccggcctacggctcgctgatggcgtggcgcctggttgcgctggcgttggcgctggtctgctggattgcccctcagctcaaaggctatcagcccgcattgccgatgctggggctggcttttgtgctggtgctgatcggcgagacgatcggccgcggcgtcttctacggcctgcacatgaccgttggaatggcaatcgccagctaa

SEQ ID NO: 189635 - DNA, 1149 bp, Klebsiella oxytoca
atgaccatctacacccggccagtgcaaatgttgctctgtggcctgcttctgttgaccctggcgatagcggttttaaatacgctcgtcccgctttggctcgcccatgaaaatatgccgacctggcaggtcgggatggtgggctcgtcctattttaccggtaatctggtgggaacattgcttgccggatgggtaattaaacgtctgggctttaaccgcagctattacctggcatcggttatctttgccgtgggctgcgtgggtcttggtattacgctgggcttctggagctggttcagctggcgctttatcgccggcgtcggctgcgcgatgatttgggtggtggtggagagcgcgctggtctgtagcggcacttcgcggagccggggtcgcctactggcggcgtatatgatgatttattacgttggcacggtgctgggccagttaatggtcagcaaactgccgacggatctgatgagcgttctgccgtgggtgacggcgctttcgctggcggccattctgccgctgctgtttgctcgcgtggcgactcaggccgatgagccgcacgaaccggcgcgtatctggccaatgttaaggctgcgtcaggcccgccatggcgtcaacggctgcattatttccggcattgtgctcggttcgctgtatggcctgatgccgctgtggcttaaccaccagggcgttagcgattccggcatcggcttctggatggcggtgatggtgagcgcaggcatcgttgggcagtggccgattggtcggctcgccgatcgctacggtcgcctgctggttctgcgcgtacaggtgtttgtggtaattctcggctgtctggcgatgttaagccaggccgcaatggcgcccgcgctgttcgtgctgggcgcttccggcttcacgctctatccggtggctatggcctgggcctgcgaaaaagttgagcgtcatcagctggtggcgatgaaccaggcgctgttaatgagctataccgtgggcagcctgcttgggccgacgctgaccgccatgctgatgcagaacttctctgacaatctgttgtttatcatgattgccagcgtgtcattcatctacctgctgacgctgctgcgcaaagcggggcaccatcctacgccggtggcgcacgcctga

SEQ ID NO: 189636 - DNA, 438 bp, Klebsiella oxytoca
atggaagagaggctattttccgcctgtcagttcaccagtgactgcctgagctggcgcagcgccgttcatctcgcctgccgcccgcttgaggagcagggaaaaatcaccgtgggctatgccagggctattatcagcgccacggagcaggatggcccctggtatatattgagcccggcgtttgcgctaccgcacgcgcgtccggaagccggcgtgctgagcagaaacagcgcgctttcgctgctttgctgtagcgaggccgttgattttccggagcatcccggcattcggctgatagtcgtactggcggcggccgatagtgaacagcatatccagaccatccagcggttagtctgctggctggatgaaggggagagacttcagcgatacagcacggtgcaaaaccgggcacagtttattgcgcttcttgcgtcgcattaa

SEQ ID NO: 189637 - DNA, 912 bp, Klebsiella oxytoca
atgaaagcaccccgtgatgagatcggacatgccctgattgcgctaaaagaaaaaggctatcccgttgttgttatcgacagcgatttagccagctctacccgtaccgaccagtttcaggccgtctatcctgaggcctttttcgaaatgggcattgcggaaggttccgccatgagcttcgcggtcggccaggcgctggaaggctttatgcccttctatgttaactttgcgatgttcgtcaccggcaccgcctggacccagctgcggcaggcctgctacgccaaagccaacatcaaactcgtcggtagccaccccggtatggatgatggcccggacggcgcttcgcaccatgcgctggaggatttagcgctgacccgcgtccttccggggttaaccgtcctgaccccggcagatgcggaagaaatcgccgaggccttcgagcaggcggcaaaaataaagggacccgtttatattcgcgtggcgcgcgagccgatgccggttcgcgacaaaagcgtcgttccgcgggtcagcgatatcgctgccatcgccgacagcggcacggattttgcgattctgtttgaaggaacggtactggagcaggctaccgacggctatgaaaagctgctcgccagcggcaaaaagggcaagcttattcacgttgcaaccgtcaaacccttcaaccagcaggcgttttatcggctggtcgaaggttgcccgcttatcgctacgcttgaaaatcacaccgtcaacggcggcctcggcggcctgatcgcggaaaccctggcgcaaaaggctcatccggcgcgccttacgcgtctgggaacgcaggacacatttaccgaatcgggaaatagcaggcagctaaaagccaaatatggcatctcgggagacgcgctgtttaacgcgctacgctaa

SEQ ID NO: 189638 - DNA, 798 bp, Klebsiella oxytoca
atgaatattgatgaactgaaatcccacgcgcttgccgcccgccgcgagatcgtcaccatgatttacgagtccggaattggccacccgggcggggcgctgtcgataatcgacgtgcttacctggctctattaccaggaagtcgatctggccgcccccccccgctcacgcgtggtgatgagtaaaggccacgccgtcgccgcgcagtacgccatgctgtatcaacaaggcaagatcgagcgcagcgagttcaatacgttccgacagatcaactcgcgcctgcaggggcacccgagcattaagtcgctgccggaagtcgatgcgacaaccggactgcttggccaggggctgtcgattgcttttggtatggcggccgccaaaaagcggcgcaacgatccgcaccgggtatttgccatcgttggcgatggcgaaatgcatgaaggccaaatctgggaaaccttacagcaggccgggcatatgaaaatggataatctggtcgccatcatcgattacaacggcttctcttcccacgatccggtcaatgacgtcgttaatctcgagccgctggcggacaaaatccgcagctttggctggcatgtactggaactgcacaacggcaatgatatgcatcaggttgccgataccctgatgctatcccgtcacctgaaaggtaaacctgtcgccattgtggcgcgcaccaccaaaggttccggcgtcagctatatggaaaacaacggcgactggcactcaaaaaccccgagcaaagaacaatttcagcaggcgatggaggagttacagtga

SEQ ID NO: 189639 - DNA, 1266 bp, Klebsiella oxytoca
atggatttcctcagatttattgtattcgacattctgggcgtaaccccacttttagttggctttattgcattaatcggcctgttaatccaacgcaagccgattgaaaaaatcctttccggcaccttcaaaaccatcgtcggatttctggtttttgccggcggcgcaggtctggcagtcacttccctgggtaactttcagaccttattcagcgatggatttggtctgaagggcgtaatgccgctggcagaagcgctaaccggactggcgcaaactaaattcgccatgtgcgtgtcgctgatcatggtgattggttttggctggaacctgttttttgcccgcgtgacgccgtttaaatacatctttcttaccgggcaacataatctttatctctccgcgctgcttaccgtaacgctgaaggcgctgggctacagcgacatgacgaccatcattgccggctccgtgctgctgggtctcgccgcctgcctctatccggccattgcgcagccgtggatgcgaaaaattaccggtaatgatgagatcgcgatggggcattacgtcaccctggcctacgccgcctccggctggattggcgcaaaggtcggcgatccgaaacaatccaccgaaaagctgaatcttcccggctggctggggatctttaaagattacatcgtctcggtgtcgatctcggtgagcatcttctactacatcgccgcgctcgctgccggaaaagccgcggtcaccgcagcggcaggcgggatgcactggctggtttacccgctctttcagtcgctgacctttaccgcttcgctgtacatcatcattaccggcgtacgcctgctgctgtcagaaattgttccggccttcctcggcatctcggagaagtttattcctaacgccaaacccgcgctcgactgcccggtggtcttcccctacgccccgaccgccacggtgctgggttttatctcttcgtttgtcggcggactggtggtgatgggttttctggcgatccttggccaaaccgtgattatcccggtagccattccctacttctttattggcgcgaccgcagcggtatttggtaatgcctccggcggctggaaaggcgcgattgccggaagcttcatcaccgggatcctgatcggcatcggcccggcgctgatttacccgattatggaatccgtcggtctttcaggcaccagcttcccggaaaccgacttcgtcgctctgggtctggtcgtgtactacatcggtaaaatgctgccctaa

SEQ ID NO: 189640 - DNA, 276 bp, Klebsiella oxytoca
atgaaaggtctcatagtctgtcgtaccggtatgggcagctccttaatgctcaaaatcaaagcccaaaaaatcatcgacaaacacggctgggatatcgagctggaacatgacgtcctctcaggcttacgcacctggcgagacattgattttgtcatcactatgcgcgatctcaccgatgaagtcgaagccgccggattcagagctgtcggcattaccgacctgatgaacagtgaagagatggagtctgcgctcactgacatcgttcaaagcaactaa

SEQ ID NO: 189641 - DNA, 858 bp, Klebsiella oxytoca
atgagccagatagacaataacttgttgataagcataagaaacggagcttccgggctaagcccgatactggagaaagttggccgttttattacggaaaatcctgactttgtgatgcgtcacacgatttcagaactggccgactccattgataccagtgaggggagtatcacccgtttttgtcgggcctttggttttaaaggtttctcggatttcagaaccgcgctggcgatggagcagggcgccgcacgctcggaagaccacggtaccaatgagagcgaagagattgcgccggtgctggcgagcattcgcgacagtaatgccattgtcgatagccaggagctgaaagccgcggccgactggcttaacaccctgaacagcattgctatctatgccgtgggcacggcggtgccggtggcgttattcctgcagatgaatttaatcaatatgggtaaggcggccagctttatcgatcgctcctatccggcggcgatgccgctgctggctgacagtcaaaaaaccggcatcatcgtcgttcacagcgaacaggcatcggcggatatgatgcaggccctgtcgctggcaaagcagcagggcgttaaaattttatcgctgacccgcgggacgtttgcgccgctggcccgtttatctgactggaatcttcaggcggcggtggctttacagggggaaggggagtcggggtttgcggaaatcgccggcgcaatgatggtggccgaccggatcctcagcgcgctggaagagcaggatgaacgctatgcggaataccgaaaagcgcatcagaagcgcattttctcgattgagagcgtggcgaacaagctgtcggaatattttatgtcctga

SEQ ID NO: 189642 - DNA, 831 bp, Klebsiella oxytoca
atggataacagccaaaacagactcgacatagcctttgagctgtgcatctacataggccccggatgggccaaattcggagatatcaccgcaatgtcaacaattggtcgcattcactcctttgaatcctgtggcaccgtcgatggcccggggatccgctttatcaccttcttccagggctgcctgatgcgctgcctctattgccacaaccgcgacacctgggatacccacggtggcaaagagattaccgttgaagagctgatgaaagaggtggtgacctatcgccactttatgaacgcttccggcggcggcgtgacggcatccggcggcgaggctatcctgcaggccgaatttgttcgcgactggttccgcgcctgtaagaaagaaggtattcatacctgtctcgataccaacggctttgtgcgccgctacgacccggttattgatgaactgctggaagtcaccgatctggtgatgctcgacctcaagcaaatgaatgatgaaattcaccagaatctggtaggtgtctctaaccatcggacgctggagtttgcccgttacctgtcaaacaaaaacatcaacgtctggatccgctacgttgtggttccgggctggtccgacgatgatgattcagcgcatcgcctgggtgagtttactcgtgacatgggcaacgtcgagaaaatcgaactgctgccgtaccacgagctgggcaagcacaaatgggtagccatgggcgaagagtacaagctggatggcgtccatccgccaaagaaagagaccatggaacgcgtgaagggcattctggaacagtacggtcataaagtgatgtattaa

SEQ ID NO: 189643 - DNA, 2283 bp, Klebsiella oxytoca
atgtccgagcttaatgaaaagttagccacagcctgggaaggttttgcgaaaggtgactggcagaacgaagtcaacgtccgcgacttcatccagaaaaactataccccgtacgaaggtgacgagtccttcctggctggcgcaactgacgcgaccaccaagctgtgggacaccgtaatggaaggcgttaaacaggaaaaccgcactcacgcgcctgttgattttgatacttctcttgcgtccaccatcacttctcatgacgctggctacatcgagaaaggtctcgagaaaatcgttggcctgcagactgaagctccgctgaaacgcgcgattatcccgttcggcggcatcaaaatggtagaaggttcctgcaaagcgtacgatcgcgagctggacccgatgctgaagaaaatcttcactgaataccgcaaaactcacaaccagggcgtgtttgacgtttacaccaaagacatcctgaactgccgtaaatctggcgttctgaccggtctgccggatgcctatggccgtggtcgtatcatcggtgactaccgtcgcgttgcgctgtacggtatcgacttcctgatgaaagacaaatacgctcagttcgtctctctgcaagagaaactggaaaacggcgaagatctggaagcaacgatccgtctgcgtgaagaaatctctgaacagcaccgcgcgctgggtcagatcaaagaaatggcggctaaatacggctgcgatatctctggtcctgctaccaccgctcaggaagctatccagtggacttacttcggctacctggctgccgttaaatctcagaacggcgcggcaatgtccttcggtcgtacctccagcttcctggatatcttcatcgaacgtgacctgaaagccggtaaaatcaccgagcaagacgcacaggaaatgattgaccacctggtcatgaaactgcgtatggttcgtttcctgcgtacccctgaatatgatgaactgttctctggcgacccgatttgggcaaccgaatctatcggcggtatgggcgttgacggccgtactctggtcaccaaaaacagcttccgtttcctgaacaccctgtacaccatggggccgtctccggagccgaacatcaccattctgtggtctgaaaaactgccgctgagcttcaaaaaatacgccgcgaaagtgtccatcgatacctcttctctgcagtacgagaacgatgacctgatgcgtcctgacttcaacaacgatgactacgctatcgcttgctgcgtaagcccgatggttgttggtaagcagatgcagttcttcggggcgcgtgctaacctggcgaaaaccatgctgtacgctatcaacggcggcgttgatgaaaaactgaaaatgcaggttggtcctaaatctgaaccgatcaaaggcgacgttctgaacttcgacgaagtgatggaccgcatggatcacttcatggactggctggctaaacagtacgtcactgcgctgaacatcatccactacatgcacgacaagtacagctacgaagcttccctgatggcgctgcacgaccgtgatgttatccgcaccatggcatgtggtatcgcaggtctgtccgttgcggctgactccctgtctgcaatcaaatatgcgaaagttaaaccgattcgtgatgaaaacggtctggctgtcgacttcgaaatcgaaggcgaatacccgcagtttggtaacaacgactctcgcgtcgatgatatggccgttgacctggttgaacgtttcatgaagaaaattcagaaactgcacacctaccgcaacgctatcccgactcagtccgttctgaccatcacctctaacgttgtgtatggtaagaaaaccggtaacacccctgacggtcgtcgcgctggcgctccgttcggaccaggtgctaacccgatgcacggccgtgaccagaaaggtgctgttgcctctctgacctccgttgcgaaactgccgtttgcttacgcgaaagatggtatttcttacaccttctctatcgtgccgaacgcgctgggtaaagacgacgaagtacgtaaaactaacctcgccggcctgatggatggttacttccaccacgaagcgtccatcgaaggcggtcagcatctgaacgtcaacgttatgaaccgcgaaatgctgctcgacgcgatggaaaacccggaaaaatatccgcagctgaccatccgcgtatccggctacgcagtacgttttaactccctgacgaaagaacagcagcaggacgttattactcgtaccttcactcagaccatgtaa

SEQ ID NO: 189644 - DNA, 816 bp, Klebsiella oxytoca
atggcgaaagtcgccgaagaagcgggtgtctataaagcgacaaaacatccgataaagacgttttatctggcgatcaccgcaggtgtcttcatctctatcgcttttgttttctatattaccgcgacaaccggcacggccgggatgccattcggggttgccaaactgattggaggcatctgcttctcactaggtttgattctctgcgttatttgcggtgccgacctgtttacctcaaccgttcttatcgttgtcgcgaaagccagcggaagaatcacgtggggtcaactggcgaaaaactggctcaacgtctatgttggtaacctgattggttgcttactctttgtattgctgatgtggctttcaggcgaatatatgactgccaacggtcaatggggacttaacgttctgcaaaccgccgaccacaaaatgcaccatacttttgttgaagccgtgtgcctgggtatcctggcaaacctgatggtctgccttgcggtatggatgagctactccggccgcagcctgatggataaagccatgattatggttttaccggtggcaatgtttgttgccagcgggtttgagcatagtatcgcgaacatgtttatgatcccgctgggtatcgttatccgcgactttgcaagcccggaattctggaccgctgtcggttcaactccggaaagtttctctcacctgaccgtcatgaacttcatcactgataacctgattccggtaactatcgggaacatcatcggcggtggtctgctggttgggttgacatactgggtcatttacctgcgtggcgacgaccatcactaa

SEQ ID NO: 189645 - DNA, 1761 bp, Klebsiella oxytoca
atgactcaaacatttattcccggcaaagatgccgccctggaagattccatcgctcgcttccagcagaagttgcacgacctcggattcgatattgaagaggcctcatggctcaacccggttccgcacgtctggtcagtgcatatccgcgataaagagtgcgccctgtgcttcaccaacggcaaaggcgccaccaaaaaagccgcgctggcctccgcgctcggagagtactttgagcgcctctcgaccaactatttctttgccgacttctggctgggcgagactatcgccaacggtcccttcgttcactatcccaatgaaaaatggttcccgttaaccgacgatgacgaagtaccggaaggcctgctggatacccgcctgcgcgcgttctacgatcctgacgatcagttaaccgccagcatgctggtcgatctgcagtcagggaatgacgatcgcggcgtctgcggtctgccgttcacccgccagtctgatggtgaaacggtctatattccgatgaatattgtcggcaacctgtacgtttctaacggaatgtccgcgggcaacacccgcaacgaagcccgcgttcagggcctctcagaagtgttcgaacgacatattaaaaaccgcattatcgccgaaagcatcagcctgccggagatcccggcggaggtgatggcgcgctatccgggcgtagtcgaatcgatcaataagctggaggccgaaggtttcccgattttcgcttatgacggttcgctcggcggcaaatatccggttatctgcgtcgtgctgtttaacccggctaacggcacctgtttcgcctctttcggcgcgcatcccgatttcggcgtggcgctggaacgtaccgttaccgaactgctccagggccgcagcctgaaagatctcgacgtcttcacgccgcccaccttcgatgatgaagaagtcgccgaacatgcgaaccttgaaacgcactttatcgattccagcggcctgatctcctgggatatgtttaagcaggatgccgactacccgttcgtggactggagcttctccggaaccacggaggaagagttcgccaccctgatggctatctttaaacaagaagataaagaagtttacatcgccgattacgaacacctgagcgtctacgcctgccgcatcattgtcccgggcatgtctgatatttatccggcggaagacctctggctggcgaataacagcatgggcgcgcctctgcgggaaacgattctttccctgccggaaagcgagtgggaaaaagaagattatctggcgcttatcgaacaaatggacgatgaaggccttgatgacttcacccgcgtgcgcgaactgctgggtctggcgaccggcaaagacaacggctggtatacgctgcgcgttggcgagctgaaagccatgctcgcgctggcgggcggcgatctcgagcaggcgctcatctggaccgagtggaccatggagttcaacgcctccatctttagcgccgagcgcgccaattactaccgctgcctgcaaaccctgctgctgctgagccaggaagaggagcgccagccgctgcagtatctgaacgcttttgtacgcatgtacggcgccgatgccgtagaagccgccagcgccgcgctgagcggagaagcgccgttctacggcctgcaggcagtagacagcgacctgctcgcgttcccggctcatcagtcgctgctgaaagcctacgaaaagctgcagcacgcaaaagcagcattctgggataaataa

SEQ ID NO: 189646 - DNA, 693 bp, Klebsiella oxytoca
atgaagacatttgactggcatcgtatggcactggataaagtgcccgtggaatttctggccgaggtggcattacggagcctctacaccttcgtactggtatttatttttctcaagataaccgggcggcggggcgttcgtcagatgtcactgttcgaagtgctcatcattttgaccctcggttcggccgcgggcgacgtcgcattctatgatgacgttccgatgctgccggtactggcggtttttatcactctggccctgctgtaccgattgattatgtggctgatggggcatagcgaaaaactggaagatctgctggagggtaagccgattattgttgtggaaaacggcgagttggcctgggagaaactgcaggcggaaaacatgaccgaatttgaattttttatggagctgcgaatcagcggggttgagcaactggggcaggtgcggctggctattctggaaaccaacgggcagatcagcctctatttctatgaggatgacgatgttaaagccggactctccattcttccttcccgctttaccgatcgttttaccacgataccccggaacgacgagtatgcctgcgttcgctgtagcgcaatccttacgctacgagccggggataaacaattatgccctcgctgcgcaaatgcagaatggtcgaaggtcagccgggcaaaaagagtcacctga

SEQ ID NO: 189647 - DNA, 1089 bp, Klebsiella oxytoca
atggctcaggtctataacttcagttcaggcccggcaatgctgccggcggaagtactcaaactggcacaaaaggaactgtgcgactggaacggtttggggacgtcggtgatggaaatcagccaccgtggtaaagagttcattaaggtggctgaagaagcggaacaggattttcgctccctgctcaatattccttccaactataaagttttattctgccacggcggcggtcgcggacagtttgccggtatcccgctgaacctgcttggcgataaaaccgttgccgactacgtcgatgccggctactgggcggccagcgcggtaaaagaagcgcataaatactgcacgcccaacgtgatcgacgccaaaatcaccgttgacggcctgcgcgcggttaagccgatgagcgaatggcagctgacccctggcgcggcctaccttcactactgcccgaacgaaaccattgacggtattgccattgaagaagcgccaaactttggcgacgatgtggtcgtcacggcggatttgtcatcgacgattttatcccgtgaaattgacgtcagccgctatggcgtgatctacgcgggcgcgcagaaaaacatcggtcccgcaggtctgacgctgattattgtgcgcgaagatctcctgggtaaagccagcgtagcctgcccgtcgattcttgattactccatcctgtccgctaatgactccatgtttaacacgccgccgacgtttgcctggtacctgtcaggtctggtgtttaaatggctgaaagagcagggcggcgttgccgctatggataaaatcaaccagcagaaagccgacctgctgtatagcaccatcgataacagcggtttctatcgcaacgatgtcgctgcggcgaaccgctcgcgcatgaacgtgccgttccagctggcggacagcgcgcttgataaactgttcctcgaagagtcctttgccgcaggtctgcatgcgctgaagggccaccgcgtggtgggcggcatgcgtgcttccatttataacgccatgccgctggcgggcgtgaaggcgctgaccgactttatgcaggacttcgaacgccgtcacggttaa

SEQ ID NO: 189648 - DNA, 1284 bp, Klebsiella oxytoca
atggaatccctgacgttacaacccatcgcacgcgtagatggcacgattaacctgcccgggtccaagagtgtctctaaccgggccttgctgctggcggctttggcccgcggcacgacggtgctgaccaacctgctggatagcgacgatgtacgccacatgctgaatgccctgagcgcgctgggagttcattacaccctgtcttccgatcgtacccgctgtgaagtcaccggcaacggcggccctctgcaggcggctgaagcattagaattgttcctcggtaatgccggaacggcgatgcgtccgctggcggcggcgttatgtttaggccgtaacgatattgtgctgaccggcgagccgcgaatgaaagagcggccgattggccacctggttgacgcgctgcgtcagggcggggcgcagattgattacctggagcaggaaaactacccgccgctgcgcctgcgcggcggtttcagcggcggccaggttgaagtggacggcagcgtttccagccagtttctgaccgcgctcctgatgaccgccccgctggcgcctcaggataccgtcatcgcgattaaaggcgatctggtttccaaaccttatattgatattacgctgcacctgatgaaaacctttggcgttgaggttgaaaatcagtcttaccagcgttttatcgtacgcggcaatcaacactaccgctcgccgggtgactacctggttgaaggcgatgcctcctcggcatcctacttcctcgccgccggcgcgattaagggcgggacggtgaaagtcaccggtattggccgcaacagcgtccagggcgatatccgttttgccgatgtgctggaaaaaatgggcgcaaccgttacctggggcgatgacttcattgcctgcacccatggtgaactgaacgccatcgatatggatatgaatcatattccggatgcggcgatgactatcgccacggcggccctgttcgcgaagggcaccacgacgctgcgcaacatctataactggcgtgtcaaagagaccgatcgtctgtttgcgatggccacggagctgcgtaaagtgggggcagaggtggaagagggggaggattacatccgcattactccgcccgcgaagctccagtttgctgagatcggcacctataacgaccaccgtatggcaatgtgcttctcgctggtggcgctttccgatacgccggtcaccatccttgatccgaagtgtacggcgaaaacgttcccggactacttcgagcagctggcgcgaatcagtacgctggcctga

SEQ ID NO: 189649 - DNA, 684 bp, Klebsiella oxytoca
atgacggcaacagttccggtaatcaccattgatgggcctggcggtgcgggcaaaggcaccttatgcaaggcaatggcagaaacgctgggctggcatctgctcgactctggggcgatttatcgcgtgcttgctctcgctgcgctacatcatcatgtggatgttgaatccgaagaggcgctggtgccgctggctgcgcacctggatgttcgttttgtctccactaacggtagcctggaagtggtactggaaggggaggacgttagcgctgagattcgcactcaggatgttgccaacacggcctctaaagtggcggcttttccccgcgtgcgtgaagcgttgctgcgccgccagcgggcctttcgcgaattgccaggcctgatcgccgacggacgcgatatgggcaccgtcgtattccctgatgcgcaggtgaaaattttccttgacgcctccgcggaggaacgtgctcatcgccgcatgcttcagttgcaggagaagggctttagtgttaactttgatcgccttttatccgagataaaagagcgcgacgctcgcgatcgcaatcgtacagtcgcgccgctgatcccggctgccgatgctttggttcttgattcaacagaactaaacattgagcaagtgattgaaaaagcgctacactatgcgcgcgaaaaactggcttccgcttaa

SEQ ID NO: 189650 - DNA, 1674 bp, Klebsiella oxytoca
atgactgaatcttttgctcaactatttgaagaatccttaaaaacaatcgaaacccgtccgggttccatcgttcgtggtgttgttgttgctatcgacaaagacgtagtactggttgacgccggtctgaaatctgagtctgccattccggcagagcagttcaaaaacgcccagggcgagctggaaatccaggttggtgacgaagttgacgttgctctggatgcagtagaagacggcttcggtgaaaccctgctgtcccgtgagaaagctaaacgtcacgaagcttggatcacgctggaaaaagcttacgaagacgctgaaactgtagtcggtattatcaacggcaaagttaaaggtggcttcactgttgagctgaatggtattcgtgcgttcctgccgggctccctggtagacgttcgtccggtgcgcgatacgctgcacctggaaggcaaagagcttgaattcaaagtcatcaagctggaccagaaacgtaacaacgttgttgtttctcgtcgtgccgttatcgaatccgaaaacagcgcagagcgcgatcagctgctggaaaacctgcaggaaggcatggaagttaaaggtatcgttaagaacctcactgattacggtgcattcgttgatctgggcggcgttgacggcctgctgcacattaccgatatggcatggaaacgcgttaagcatccgagcgaaatcgtaaacgttggcgacgaaatcactgttaaagtgctgaagttcgaccgcgaacgtactcgtgtatctcttggcctgaaacagctgggcgaagatccgtgggtagctatcgctaagcgttatccggaaggtaccaaactgaccggtcgcgtgaccaacctgaccgactacggctgcttcgttgaaatcgaagaaggcgttgaaggcctggttcacgtttccgaaatggactggaccaacaaaaacatccacccgtccaaagttgttaacgttggcgatgtagtggaagttatggttctggatatcgacgaagaacgtcgccgtatctccctgggcctgaagcagtgcaaaaacaacccatggcagcagttcgcggaaacccacaacaagggcgaccgtgttgaaggtaaaatcaagtctatcactgacttcggtatcttcatcggcctggacggcggcatcgatggcctggttcacctgtctgacatctcctggaacgttgcaggcgaagaagcagttcgtgaatacaaaaaaggcgacgaaatcgcagcagttgttctgcaggttgacgcagagcgcgagcgtatctctctgggcgttaaacagctcgcagaagatccgttcaacaactgggttgcactgaacaagaaaggcgcaatcgtaaacggtaaagtcactgcagttgacgctaaaggcgcaaccgtagagctggctgacggcgttgaaggttacctgcgcgcttctgaagcttcccgtgaccgcgttgaagatgcaactctggttctgagcgttggcgacgacgttgaagctaaattcaccggcgttgatcgtaaaaaccgcgcaatcagcctgtctgttcgtgcgaaagacgaagctgacgagaaagatgcaatcgcaactgttaacaaacaggaagatgcaaacttctccaacaacgcaatggctgaagctttcaaagcagctaaaggcgagtaa

SEQ ID NO: 189651 - DNA, 288 bp, Klebsiella oxytoca
atgaccaagtcagaattgatagaaagacttgccagccagcaatctcacattcctgcgaaagcagtggaagatgctgttaaagaaatgctggagcatatggcctcaacgcttgctcaaggcgagcgcattgaaatccgcggtttcggcagcttctctctgcattatcgagcaccccgcaccgggcgtaacccaaagactggcgataaagttgaactggaaggtaaatacgttccccactttaagccgggcaaagaattacgcgaccgcgccaatatttacgaagagtaa

SEQ ID NO: 189652 - DNA, 2256 bp, Klebsiella oxytoca
atgcgtttaccacaacttgccggctgtgtgattatcggtattctgccgctgctctggttgccagtgctgcccgggcggtgggttatctgggggctcatgaccctggcgctactcattgcgcaatgtcgacgcagacctgcgcaatacgcggcattgataacgctgttttttgtctggggagccctaagcgcaggcgaggtgctgtggccgacggagaggttaacggacaggaatcgccaggttgaagttgagctaaccgcaacggacgggcagacaacgcatcaggggaagattatccgtctggatgggcgacggctgtttcctgcgccagggattagcctctacggcagctacctgccagaaacgccctgcgcaggccaggtttgggcgatgacgctgcgcgcgcgtccggtacacggacagctcaacgatggcgggtttgatagtcagcgccatgcattgtcgcagcatcgtccgttaaccggacgctttatcaccgctgacgttcgggtgcggacctgtagtttgcgggcgcgttatcttgcttcgctgaatcaaacgctgaacgcgttgccgtggcaatcggtgatgctagggttaggcatgggggagcgtctggcaataccgcgcgagataaagaccctgatgcaggaaaccgggacatcgcacctgatggcgatttctggcttacatatcgcgctaggggcttcattgggctggttgctgctcagaggtgtgcagttttttctcccgtgccgctggcttggctggcgggcgccgctgctcgttggtctcgcaagcgcgattttttacgccgggctgaccggcatgcagccacccgcattgcgcacctgcgtcgcgctgtccgctggctgcgcgctgcggctatccggaaaacgctggtcgccatggcagctatgggtctgctgcattggcgcaatactgtttgccgatccgctggcggtgttgtccgaaagcctctggctctccgcatttgccgttgcggcgcttatcttctggtatcagctggcgccgatgccgggcggcaaaaggagcgggctactgcgtcaaagcctcgcgttatgccatctgcagatcggtttaatgtttttacttgctcctctacagatcgcactttttcacggcatcagcctgacatccgtgctggccaacttgattgccgtgccgctggtgacctttgtcgttgtcccgctaattctgaccgcgatgtttttacacctctgcgcgccgtttatcattgagatgtcggtctggcaatcggcggaccgtgttctggctgcgctattctggttcttacgacagctgccgcccggctggctggcgctggatgcgcgctggcttgggataagcttgctgccgtggctggcgttaatcgtctggcgttttcatgcgtggcgcacgttgcccgcgttttgtttagcatttctcgggctattgagctggccattctggcggagtacggctgctaacgaatggcgagtcaccatgctggatgtcgggcaggggctggcaatggtgattgaacgcgatggcgcggcgcttctctatgataccggcctggcctggcccgagggagacagcggtcagcagatcattattccctggctacgctggcatcatttgcagcttgaaggcgtcgttctcagccacgagcatctcgatcaccgcggcgggctaaattcggtgttaaaggcgtggccccggatatgggtgcgaagccctttaggctgggcgggtcatttagcctgccagcgcggagaaacctggcagtggcgggatttaacctttcgcgtgctctggccgctgcccggagcgacagcgcaggggaataatcgctcgtgcgtggtgcgtattgatgacggtaaacatagtattctgctgaccggggatatcgaaacgcccgcggaacgggcgatgattagccgctactggcagcatcttacgtctacacttatccaggttccccaccacggcagtaatacctcgtcgggaatcgccctgctgcggagcgttggcggagaagctgcgctggcttccgcttcgcgctataacgcatggcgcatgccatcaaccaaagtgattcagcgctaccgaaaacagagttatcagtggttcgacacgccgcatcaggggcaaattacggtggttttttctccggatggctggcaaatccatggcttacgggatcaagttttaccgcgatggtatcatcagtggtttggcgggaacgcgtag

SEQ ID NO: 189653 - DNA, 1749 bp, Klebsiella oxytoca
atgcagaacgataaagatctctccacgtggcagaccttccgccgactctggccgattatagcgccgtttaaacccgggctaatcgtggcagcggtagcgttagtgcttaacgcggctagtgataccttcatgctatcgcttcttaaaccgttattggatgatggttttggtaaaacggatcgctcggtgctgatatggatgccgctggtggtgatcgggttgatggttctgcgcggcattaccagctacgtttcgagctactgtatctcctgggtttccggcaaggtcgtgatgacgatgcgccgtcgtttattcagccacatgatggggatgccggttgccttctttgacaaacagtccaccgggacgctgctatcgcgtattacctatgattccgagcaggtcgcgtcttcttcctccagcgcgctgattaccgttgtgcgcgaaggcgcgtcgattattggcctcttcgcgatgatgttttattacagctggcagctgtcattgattctgatcgtgctggcgccgatcgtgtctatcgcgattcgcgtggtctcgaagcgttttcgtaatatcagcaagaatatgcagaacaccatgggccaggtgacaaccagcgcagagcagatgctgaaagggcataaagaagtgctgatgtttggcggtcaggccgtcgaaaccaaacgttttgataaagtcagcaataaaatgcgcctgcaggggatgaaaatggtctccgcgtcgtcaatttctgacccgattattcagctgatcgcctctctggccctggctttcgtgctctatgctgccagcttcccgagcgtaatggagacgctgacggcgggtaccatcaccgttgtcttctcttcaatgatcgcgctgatgcgcccgctgaaatcactgactaacgtcaacgcgcagttccagcgcgggatggccgcttgccagacgcttttcgctatccttgactccgagcaggagaaagatgaaggcacgcgggttatcgaacgcgcgaagggcaacctcgaatttaaaaacgtcaccttcagatacccgggacgtgaagtcgccgcgctgcgcaatatagacctgaatattccggaagggaaaaccgtggcgctggtagggcgctcgggttcgggtaagtcgaccatcgccagcctgattacgcgtttctacgatgtcgatgatgggcagatcttactggacggccacgacctgcgtgaatacaccctgagctccctgcgcgatcaggttgcgctggtgtcgcaaaacgttcatctcttcaacgataccgtagcgaataacatcgcctacgcgcgtaccgaagagtacagccgcgagcagatagaagaagctgctcgtatggcttatgccatggactttatcaacaaaatggacaatggcctggatacgattatcggcgaaaacggcgttatgctttccggcggtcagcgccagcgtatcgctatcgctcgcgccctgctgcgtaacagcccgatactgatcctcgacgaagccacatcggcgctggataccgaatcggaacgcgctattcaggcggcgctggacgaactgcagaaaaaccgcacctcgctggtgattgcccaccgtctgtcgacgattgagcaggccgacgagatcgtggtggtggaagatggccagatcgttgaacgcggcagccatactgatctgcttgagcacaagggcgtttacgcccagctgcataagatgcagttcggcgcatga

SEQ ID NO: 189654 - DNA, 981 bp, Klebsiella oxytoca
atgatttcacgcatctggtccggtgagtcgcccttatggcggctgctgcttccgctctcctggctctatggcctggtgagcgggttgatacggctgagctataaactgggttggcgaaaagcctggcgatcgccggtgccggtggtggtggtgggtaatctgaccgcgggcggtaatggtaaaacgccggttgtcatctggctggtggaacagctccagcagcgcgatattcgcgttggcgtcgtttcacgcggctacggcggtaaagcggcgagctatccgctgctgctgaatacggcaacccccacagcggaagcgggcgatgagccagtgctgatttaccagcgtaccggcgcgccggttgccgtctcgccggtacgcagcgatgcggtacaggccctgctcgccgcccacgatcttcagcttatcgtcacagacgatggcctgcagcactataagctggcgcgcgacaaagaaattgtggtgattgacggcgtgcgccgttttggcaacggctggtggctgcctgccggccccatgcgcgagcgtgcttcgcgtttacgcagcgtggatgcggttatcgttaacggcggtctcgcccgtccgggagagatcccaatgcagcttcgccccgggcaggcggtaaatctgctgaccggcgaacgccgggatgcggcggcgttggacaacgtggtggcgatggccggaatcggccacccgccgcgcttcttcgccacccttgaaagctgcggcgtcagtccggtaaaaaccgtcgccttagccgatcatcaggcattggcgcagagcgcagtcgccgcgctggcgacgccgcagcaaaccctgctgatgaccgaaaaagatgcggtgaagtgccgcgaatttgctcaggcaaactggtggtatcttccggtcgacgcgataatgactgaccaacgcgcgcagcggttgctcacggacttagttaccctggcgcaacgctaa

SEQ ID NO: 189655 - DNA, 1230 bp, Klebsiella oxytoca
atgccggtattgtccctctcgcttaaagaagcccgccatcttcaccttgccgctcaggggctgctaaaaaagccccgtcgccgcgcaaagccttgggatattctgcagaccattaagcagatgtccctgctgcaaatcgataccatcaacgttgttgcgcgcagtccttatctggtgctgtttagtcgcctcggccactatccgcagcgctggctggacgaggcgctccgcgccggtgagctgatggagtactgggcgcacgaagcctgctttttaccgcgcagcgacttttcactggtgcgtcaccgcatgctgacgccggataaaatgggctggaaatatcacaaagcgtggatgaccgaaaacgccgagagcattcaggcgctgttggcgcatatagccgaaaatggcccggttcgctcggccgacttcgagcatccgcgcaaaggcgccagcggatggtgggagtggaaaccgcataagcgccatcttgaaggcttattcacagccggtgaagtgatggttatcgagcggcgtaattttcagcgcgtttacgatctgacgcagcgggtcatgccggactgggacgatgagcgcgacgggctctctcaggagcaggctgaagccatgatgttacgtaatagtgctcgcagcctggggatttttcgcgcgcagtggctggcggattattatcgtctgcgtcagcccccgctgccgctactgctggcgagctggcaggaggaggggctggtggtgccggttaacgttgaagcgctgggcgaaatgtggctccaccgtgatgctctggcgctgctggaatcttctcccggcggtaggctcgccgccagccgcagcgcggtgctttcgcctttcgatccggtcgtctgggatcgcaaacgagcggaacagctgtttaactttacctatcgcctggagtgctacacgcccgcgccgaaacggcagtatggctatttcgtattaccgctgctgcaccaggggagactggttggcagaatggatagcaaaatgcaccgcaaaaccggcgttctggaaattatcgccctgtggctggaggagggcgtcaaggtgacgtcgggtctggagagcgggctaaaacgcgccattgatgattttgccctctggcaggacgccacgcgggtgagctgcgggaagctgccggcggaactttttgccgggcggcaacagggttgggaaattgacgctgcctga

SEQ ID NO: 189656 - DNA, 183 bp, Klebsiella oxytoca
atggatcaccgtttacttgaaattatcgcctgtccggtttgtaacggtaagctgtattacagccaggataagcaagaactgatctgcaaacttgatcgcctggcttttccgctgcgtgaaggcattcccgtactgctggaaaccgaagcccgcccgcttcctgtagaagagagccagtcatga

SEQ ID NO: 189657 - DNA, 747 bp, Klebsiella oxytoca
atgagtttcgtggttattatccccgcgcgctttgcttctacccgcctgccagggaaaccgctccaggatatcaacggcaagccgatgattgtccatgttctggaacgcgctcgcgaatccggagccgagcggattatcgttgctaccgaccatccagacgtggcccgcgtggtggaagccgccggcggtgaagtctgcatgacccgtgaagatcatcagtctggtaccgaacgcctggccgaggtggttgaaaaatgcgccttcagcgatgacaccatcattgtgaatattcagggcgatgagccgatgatcccgcccgcgatcgtgcgccaggtagccgagaatctggctgccagcacgagtggtatggcaaccttagcggtgccaatccacgatgcggaagaggcgtttaatcctaatgcggtgaaggttgtcatggatgctgagggctacgcgctctatttttcccgcgccaccattccgtgggatcgcgatcgtttcgctaaatcccgcgaggctatcggtgattcgctgctgcgtcatatcggtatttatggctatcgcgccggttttatccgtcgctatgtgagctgggcgccgagcccgctggagcaaatagagatgctcgagcagctgcgcgtgctgtggtatggcgagaaaatccatgtcgcggtggcggaagtggttcccggtacaggtgtcgatacgccggaagatctggagcgcgtccgcgcggagctgcgttaa

SEQ ID NO: 189658 - DNA, 894 bp, Klebsiella oxytoca
atggaacagttgcgtaccgagctgagccacctgctgggtgaaaaactaagccgcgtggagtgcgtcagcgagaaaccgtcgtcggcgctgtggtcgctatatgatgcacagggaaacccaatgccgctgctggcgcgcagctttacgacgccggggatagcgcggcagctggcgtggaaaatatcgactctcgcgcgaagcggcaccgtccgtatgccggttgtctacggcgtaatgacgcatgaagagcatcccggccccgatgttctgctgatcgaacggctgcgcggcgtctcggttgaagcccccgcccgcacgccggagcgctgggagcagctgcaggagcagatcgtagaagcgctgctggcctggcatcgtcaggatagcggcggctgcgtcgggatggtcgatagcactcaggaaaatctctggccgtactggtaccgccagcgcgtggaggtgctatggagtacgctgaatctttatcaggataccggcctgacgatgcaggacaaacgcatcctgttccgcacccgcgaatgccttatggatttgtttaaaggtttcaatgataactgcgtgttggtacacggtagcttcacgctgcgcagcatgcttaaagatccgcgcagcgatcagctgctggcgatggtggggccgggcatgatgctctgggcgccgcgggaatacgagcttttccgtctggccgagagcggtcaggaagaggagctgctgtggcactatctgcgccgggcgccggtggcggaagcgtttctctggcggcgctggctgtatctgctgtgggacgaagtggataatctggtgaataccggacgctttgaccgcgtccggtttgacctggcggcaaaatcaatcctgccctggctcgcctga

SEQ ID NO: 189659 - DNA, 780 bp, Klebsiella oxytoca
atgctttttacgctgaaaaaggttttaggcggtatgatgctgccgcttcccctgctgctgctgctcattgcgctcggcatagccctgctgtggtttagccgtttccagcgcaccggcaagctctgcgtcagcctcggctggctgctgttgctgctgttgagcctgcaaccggtcgccgatagcctgctcaagccaattgaagataagtacccgacgtggcgaggtgaaaagcgcgtgcagtacgtggtcgtgcttggcggaggctacacctggaacccggactgggcgcccagctccaatctcatcaataatagcctgccgcggctgacggaggggatccgcctgtggtatgaaaatccgggcgcgaaactcatctttaccggcgcagcggcaaaaacaaatccggtcagtacagcagaagccggggccagagtggcagagagcctgggcataccgcgcagcgaaatccttgtcctggataaacccaaagataccgaagaggaagccgctgcggtgaagatggcgataggcgatgcgccgttcctgctggtcacctccgcctctcatctgccgcgggcgatgattttctttcgccgcgccgggctaactcccctgcccgcgccggccaaccagctggcgattgagtcaccgcttaacccgtgggagcgggcaattccttcgcccgtctggctcatgcatagcgatcgggtgggttacgaaacgttaggccgcatctggcagtggctaaaaggttcttcaggcgagccagggcaggattga

SEQ ID NO: 189660 - DNA, 780 bp, Klebsiella oxytoca
gtgcaggatcgtaatttcgatgatattgctgaaaagttttcgcgcaatatatacggcaccaccaaaggccagctgcggcaggcgatcctctggcaggatctgcaaccgctgctggaccggctggggcctgggccattgcgagttcttgacgcgggcggcggcgaagggcagacggcgatcaaagtggcggaaatggggcatcacgtcacgttatgcgatctctctggagaaatggtggctcgtgcccggcaggcggctgccgataaaggtgtgatcgacaacatgcattttgtacaatgcgcggctcaggatattgagcagcatttggaaagtccggtcgatctgatactgtttcatgcggtgctggagtggatagccgaaccacaggcgatgttgcgtaccctgtggtcgatgctgcgccccggcggcgcgttgtcgctgatgttctacaatgctaacggtctgttgatgcacaatatggtcgccggaaatctcgactatgtgcaaatcggcatgccgaaaaagaaaaaacgcacgctgtcgccggactatccgcgcgatccgcagcaggtttacgtctggctggaagagattggctggcagattaccggcaagaccggcgtgcgggtgtttcatgattatctgcgtgaaaaacaccaacagcacgataaatttgcggcgctgctggagctggaaacgcgctactgtcgccaggagccgtatattagcttaggccgttatattcacgtcaccgcgcttaagccgcagatgcaaggataa

SEQ ID NO: 189661 - DNA, 1323 bp, Klebsiella oxytoca
atgagtgaattttcccagacagtccccgaactggttgcctgggccaggaaaaatgatttttctatttcgctgccggtcgacagactctcttttctgctggcgattgccacgctgaacggcgagcggatggaaggggaaatgaccgagggagaactggtggatgcgttccgccacgtgagtgatgcgtttgagcagaccagcgaaaccatcagccagcgcgccaataatgccattaacgatatggtgcgccagcgtctgctgaaccgctttaccagcgaaatcaccgagggtaacgctatttatcgcctgacgccgctgggcattgggatcaccgactactatattcgccagcgcgagttctccaccctacggctgtcgatgcagctctccatcgttgccggcgaactcaagcgcgccgccgactcggcagaagagggcggcgatgagttccactggcatcgtaacgttttcgctccgctgaagtactcggtagcggaaatctttgacagcatcgacctgactcagcgaatcatggatgagcagcagcagttggtgaaagatgatattgcccagctgctgaacaaagactggcgggcggcgatctccagctgcgagctgctgctgtcggaaacgtccggcaccctgcgggaactgcaggataccctggacgcggcgggcgataagctgcaggcaaacctgctgcgtatccaggattcgaccctggcgcgcgacgatctgaattttatcgatcgtctggtgttcgatctgcaaagcaagctggaccgtatcgtcagctgggggcagcaggcgattgacctgtggatcggctacgaccgccacgtgcataaatttatccgtaccgccattgatatggataaaaaccgcgtcttcgcacagcgtttgcgtcagtcggtgcaaacctacttcgacgccccctgggcgcttacccatgcgaatgccgatcgtctgcttgatatgcgcgatgaagagatggcgcttcatgatgaagaggtcaccggggaacttccaacggatctggagtacgaagagtttaacgaaattcgcgaacagctggcggcgctgattgaaggacagctggtggtctataaagagaagggactgccgctggatcttggcctggtggtacgcgaatatctgtcgcagtatccgcgcgcgcgccactttgacgtcgcgcgcattgttgtcgaccaggcggtacgtttgggcgtagcgcaagcagatttcaccggactgccggccaaatggcagccgattaatgattacggagccaaggtacaggcgcatgtcatcgacaaatattga

SEQ ID NO: 189662 - DNA, 705 bp, Klebsiella oxytoca
atgtcatcgacaaatattgaacaagtgatgccggttaaactggcgcaagcgttggctaatccgttatttccggcgctggatagcgccctgcgcgcgggccgccatatcggcctcgacgagctggataatcacgcatttttaatggattttcaggattacctggaagagttttatgctcgctataacgtcgagctgattcgcgcgccggagggttttttctatctgcgcccgcggtcgaccacgctgatcccacgctcggtgctctccgagctggatatgatggtgggtaaaattctctgctatctctacctcagcccggagcgtctggccaacgagggcatcttcactcagcaggagctttacgacgagctgctgaccctcgcagacgaagccaaactgcttaagctggtcaataaccgttctaccgggtccgaccttgaccgtcagaagctgcaggaaaaaatgcgcgcttcgctcaaccgcctgcgccgcctcggcatggtgtggtttatgggccatgacagcagcaaattccgcatcaccgaatcggtgtttcgcttcggcgccgacgtgcgcgccggtgacgatccgcgcgaagcccagctgcgtatgatccgcgacggtgaagcgatggcgctggaaaatcgcctgcagcttaatgatgagaatgaagagaatcagccggatagcggggaggaagagtaa

SEQ ID NO: 189663 - DNA, 4449 bp, Klebsiella oxytoca
atgattgaacgcggtaagtttcgctcgctgacgctggttaactggaacggtttttttgcccgtacttttgatctcgatgaattagtgaccacgctttccggtggtaacggtgccggtaaatccacgaccatggccgccttcgtcaccgcgctgattccggacctgacgctgctgcactttcgtaataccacggaagcgggggcgaccagcggctcgcgcgataaaggcctgcacggtaagctgcgcgctggcgtctgctactccgtgctggacgtgatcaactcccgtcaccagcgcgtggtggtcggcgttcgcctacagcaggtggccggtcgcgatcgtaaagtcgatatcaagccgtttgcgatccagggcctgccaacctccatccagccaacccagctgctgaccgaaacccttaacgagcgccaggcgcgcgtggtgacgctcaacgagctgaaagataagctcgaagcgatggaaggggtgcagttcaagcagtttaactctattaccgagtatcactcgctgatgttcgacctgggcgtggtggctcgccgcctgcgttcggcttcggaccgtagcaagtactatcgcctgatcgaagcctcgctgtacggcggtatttcgagcaccattacccgctcgctgcgcgactacctgttgccggaaaacggcggcgtgcgcaaggcgttccaggatatggaagcggcgttgcgtgaaaaccgcatgacgctggaagctatccgcgtgacgcagtcggaccgcgacctgttcaagcatctgatcagcgaagccaccaactacgttgccgccgactatatgcgtcacgctaacgagcgacgcattcatctcgacaaggcgctggagtatcgtcgcgatctgttcacctcccgcgctcagctcgcggcggaacagtataagcacgtcgatatggcccgcgagctgcaggagcataacggcgcggaaggcgatctggaagccgattatcaggctgccagcgaccatctgaacctggtgcagaccgctctgcgccagcaggaaaaaatcgagcgctatgaagcggatcttgatgaactgcagattcgcctcgaagaacaaaatgaagtcgtcgcggaagcggttgaccagcaggaagagaacgaagcccgcgccgaagccgccgagctggaagtggatgaactgaaaaaccagcttgccgactaccagcaggcactggacgtgcagcagactcgcgcgattcagtacacccaggcgctgcaggcgctggagcgggcaaaagccctctgccatctgccggatttaacgccggagagcgccgacgagtggctggaaactttccaggcgaaagagcaggaagcgacggagaaaatgctgtcgctggaacagaagatgagcgtggcgcaaaccgcgcacagccagtttgaacaggcttaccagctggtggtggagatcaacggcccgctggcgcgtaatgaagcctggaacgtggcgcgggagctgctgcgcgaaggcgttaatcaacgtcatcaggccgaacaggcgcacgggctgcgcagtcgtctgacggagcttgaacagcgtctgcgtgaacagcaggatgccgaacgccagctcaatgagttctgtaagcgccagggcaaacgctacgatatcgacgagctggaagccctgcaccaggagctggaagcccgcatcgcatccctttccgacagcgtttctaccgccagcgaacggcggatgaccctgcgtcaggagctggaacagctgcagtcgcggacgcaaacgctgatgcgccgcgcgcccatctggctggcggcgcagaacagcctcaatcagctgtgcgagcagagcggcgagcagtttgagtcaagccaggacgtcaccgaatatctccagcagctgctggagcgtgaacgcgaagctatcgtggagcgcgatgaagtcggagcccgcaagcgcgctatcgacgatgaaattgagcgtcttagccagccgggcggttcggaagatcagcgcctgaacgcgctggcggaacgttttggcggcgtactgctgtcggaaatctacgatgacgtgagcctcgatgatgcgccgtattactccgcgctctacggtccttcccgccacgccattgtggtacccgatctgtcgttgattgccgatcagctggaaggtctcgaagattgtcccgaagatctctacctgatcgagggcgatccgcagtcgtttgatgacagcgtattcagcgtcgatgagctggaaaaggcggtggtcgttaagattgccgatcgtcagtggcgctattcacgcttcccgacgctgccgctgtttggccgcgccgcgcgtgaaagccgcgttgaaacgctgcacgccgagcgcgaaagcctgtccgagcgctttgcgaccctgtcgtttgatgtgcagaaaacccagcgcctccatcaggcgttcagccgctttatcggtaaccatctggcggtggcctttgaggacgacccggaagaagaaatccgtaaactgaatacgcgtcgcgccgaactggagcgggcgctgaccgcccatgaaagcgataaccagcagaaccgggtgcagtatgagcaggcaaaagagggcgtatccgcactcaaccgcctgctgccgcgtctgaatttgctggccgatgactcgctggccgatcgcgtggatgagatccaggaacgccttgacgaagcgcaggaagccgcgcgcttcgtccagcagcatgggaatcagctggcaaaactggagccgatcgtttccgtgcttcaaagcgacccggagcagtttgaacagctgaaagaagattacgcatattcgcagcagactcagcgcgacgcgcgtcagcaggcatttgcgctgaccgaagtggtgcagcgtcgcgcccactttagctactccgattccgcagagatgctgagcggtaatagcgatctgaacgagaagctgcgccagcgtctggagcaggctgaggcggagcgcgcccgtacccgcgaagcgctgcgtacccacgccgcgcagctcaaccagtacaaccaggtgctggcatcgctgaaaagctcctacgacaccaagaaagagctgctcaacgacctgcataaagagcttcaggacattggcgtgcgcgccgacgccggcgccgaagagcgcgctcgtctgcgccgcgatgagcttcatgctcagctcagcaacaaccgcgcgcggcggaaccagctcgaaaaatcattgaccttctgcgaagcggaaatggataacctgacccgcaggctgcgcaagctggagcgcgattactgcgaaatgcgcgaacaggtggtcagcgctaaagccggctggtgtgcggtcatgcgcctggtgaaagacaacggcgtggagcgtcgcctgcatcgtcgcgagctggcctacctttcggcagatgaactgcgctcaatgtcggataaggcgctcggcgcgctgcgtctggcggtctcggataacgaacacctgcgcgatgtgctgcgtatttctgaagatccgaaacgcccggagcgtaaaatccagttctttgtcgccgtttatcagcatctgcgcgagcgtattcgccaggatatcatccgcaccgacgatccggtggaagcgattgagcagatggagatcgaactcagccgtctgacggaagagctgaccaaccgcgagcagaagctggccatcagctcccgcagcgtggccaatattatccgcaagactatccagcgcgagcaaaaccgtattcgtatgctcaaccaggggctgcagagcgtctccttcggccaggtcaacagcgtgcgtctgaacgtcaacgtgcgggaaacccactcgatgctgctggacgtgctgtcagaacagcatgaacagcatcaggacctgtttaacagcaatcgtctgaccttctcggaagcgctggcgaagctgtatcagcgcctcaatccgcagattgatatggggcagcgtacgccgcagaccatcggtgaagagctgctggactaccgcaactatctggagatggaagtggaagttaaccgtggttccgacggctggctgcgcgcggaatccggtgcgctatcgaccggtgaggctatcggtaccgggatgtcgattctggtgatggtggtacagagctgggaagatgagtccatgcgcctgcgcggtaaggacatttcgccgtgtcgtctgctgttccttgatgaagcggcgcgtctggatgctcgctctatcgcgacgctgttcgagctctgcgatcgtctggagatgcagctgattatcgcggcgccggaaaacatcagcccggaaaaaggtaccacctataagctggtgcgtaaggtcgtgaataatcacgagcatgtgcacgtcgtcgggctgcgtggcttcgcaccgcaactgcccgaaacgctgccgggaacggcaaatgcttcatag

SEQ ID NO: 189664 - DNA, 1794 bp, Klebsiella oxytoca
atgttgctaaagaaacggtatggtcgtcaattgtctgcgctcagcctgagcctggcgtttgcatttgctccactgttcaatgtccaggctgaagagcctgaagtggtaccatcggatagctctgccaccatcagcgagctctcttccgcgctaagccaaagcgcaaaccaatccgcggcggtcgcccaaatggccggcgagcaggcgctttctgccgatgcggcagcgaagagccgcgccgggattgaggcggtactgccgtccggttatcaacccgtatttatgaatccgctggtatcgctgtatgcggccagggatatgaaaccgatgtgggataaccgcgaggcggtgcaggcgtttcaacagcagctggctgaggtcgctatcgccggttttcagccgcagttcaccacctgggttgagctgttgaccgacccggcagtgaacggtctggcgcgagatgtcgttctgtctgacgccatgatgggctatctgcattttattagcggtattccgactcagggcaaccgctggctgtatggcacgaaaccgtatgccatgtcgacgccgcctctgtcggtgattaaccagtggcaggtggcgctggataacggttcgctgccgcagtttattgcgggtctggctccgcagcatccgcagtatgccgcaatgcatcaggcgctattagcgcaggttgccgattcccgtccctggccgcagctcaccggtaagacgtcgctgcgcccgggggaatggagcaacgatgccggcgcgctgcgcgaaattttacagcgcaccggtatgctggatgacgcggcaaaaatttcgttgcccggcgatgaggtggtgagtccgtccgccgggaaaaaggccaaaagcagcggccgtggcgtttacgatcgccagttagtggagggcgttaagcgcttccaggcgtggcagggactgggcgctgacggcgtgattggtcaggcgacccgcgactggctcaacgtttctcctgcgcagcgcgccggcgtgctggcattgaatatccagcgtttgcgcctgctgccgggtaatctggcgaccggaattatggtgaatattcccgccttttcgctggtctattaccaggacggtagccaggtgctggcatcgcgggttatcgttggccgtccggaccgcaaaacccctatgatgagcagtgcgctgaacaacgttgtggtcaacccgccgtggaacgtgccgccgacgctggcgcgcaacgatattctgccgaaggtgcgcaataacccaggctatcttgagcagcacggctatacgatgatgcgcggctggaatagcaaagagactatcgacccgtatcaggtggactgggaaacgataaccgcatcgaatctgccgttccgcttccagcaggctcccggcgcgcgcaattcgctggggcgctataaattcaatatgccaagttcagatgcgatatatttgcacgatacgcccaatcacaatctgttccagcgggatggacgcgcgctgagctccgggtgcgtgcgcgtgaataaagcctcagagctggccaatatgctgcttcaggatgctggctggaatgatgcgcgtatttcagatgcgcttaaacaggggaatacccgctacgttaatattcgccagaatatcccggttaatctctattatttgaccgcgttcgtcggcgctgatggacgtacacaatatcgaacagatatttacaattacgatctccccgcgcgatccagcgcacaaattctacctaaagctgaacaattaatcagataa

SEQ ID NO: 189665 - DNA, 552 bp, Klebsiella oxytoca
atggacaaatttgacgctaatcgccgcaaactgctggcgttaggtggagccgcgctcggtgctgctgccattctgcctgcgccggcatttgccaccctctcgaccccccgaccgcgtattttgacgctgaacaacctgcataccggtgaatcactcaaggcggagtttttcgatggcagaggctatattcaggatgaattagcaagacttaatcattttttccgtgattatcgcgcgaataagattaagtccatcgatcccggtttgttcgatcaactctatcgtttgcagggattacttggtaccaacaagcctgtccagcttatttccggttatcgttctgttgataccaataatgagcttcgcgcgcgcagccggggtgtggcaaaacacagctaccacactaaaggccaggccatggattttcatattgaaggcatttcgttaagcaatgttcgcaaagccgcgttatctatgcgcacaggtggtgtaggatactacccacgtagcaactttgtgcatattgataccgggccagtacggcactggtaa

SEQ ID NO: 189666 - DNA, 648 bp, Klebsiella oxytoca
atgaactatcgtattattccggttaccgcgttcgcgcagaactgttctttaatctggtgtgaacaaaccaaactggcggcgctggtcgatcccggcggtgatgctgagcgaatcaaacaggaagtcgcggcggcaggcgttagcctgatgcagattctgctcacgcacggtcatctcgatcacgttggtgcggcggcggagctggcgcagcattatggcgtgccgattattgggccggaaaaagaagatgagttctggctggaaggattaccggcacagagccggatgttcggtctggaagattgccagccgctgcagccggatcgctggctgaacgaaggcgatacggtcagcgtggggaatatttccctgcaggtgctgcactgcccaggccatacgccggggcacgtggtcttcttcgatcctgcttgccgactgttgatttctggcgatgtgatttttaaaggcggagtagggcgtagcgacttccctcgcggcgaccatagccaactgatcgatgcgattaagcgcaagctgttgccgctgggcgatgacgtgtcgtttattccgggtcatggaccgatgtcgacccttggctatgagcgtctgcacaaccccttcctgcaggatgaaatgccggtctggtga

SEQ ID NO: 189667 - DNA, 1191 bp, Klebsiella oxytoca
atgtttgagaacattaccgccgcccctgccgacccaattctgggcctggccgatctgtttcgtgccgatgaccgcccaacaaaaattaatcttggaattggtgtttataaagatgaaacgggtaaaacaccggtcctgactagcgtgaaaaaagcagagcagtatctgctggaaaatgaaaccactaaaaattatctgggtatcgatggtattccggaatttggccgctgcacccaggagcttctgttcgggaaaggaagcgcaattatcaatgataaacgcgcccgcaccgcgcaaacgcccggcggtacaggtggcctgcgcgtcgccgccgattttctggcgaagaacaccgacgttaaacgtatttgggtgagcaaccccagctggccgaaccataaaagcgtgttcaattcagccgggctggaagttcgcgaatacacctactacgatgccgctaaccacaaactcgacttcgacgggctgctggccagcctgaacgaagcgcaggccggcgacgtggttctgttccacggctgctgccataacccaaccggtatcgatccgacgctggagcagtggcaacagctggcgcagctctccgtagagaaaggctggctaccgctgtttgactttgcctaccagggctttgcccgcggcctggaagaagatgctgaaggcctgcgcgctttcgccgcgctgcataaagagctgctggttgccagctcctactcgaaaaacttcggcctgtacaacgagcgcgtgggcgcctgtacgctggttgccgcggaccaggaaacggtagaccgcgcgttcagccagatgaagtccgtcattcgcgctaactactctaacccgccggctcacggcgcctcggtagtggcgaccattctcagcaatgacgcgctgcgcgctatctgggaacaagagttgaccgacatgcgtcaacgcatccagcgtatgcgcctgctgttcgttaatactctgcaggaaaaaggcgccagccgcgatttctctttcatcattcagcaaaacgggatgttctcgttcagcggcctgaccaaagagcaggtactgcgtctgcgtgaagagttcggaatttacgcggtggcgtccggacgtataaacgtcgccggtatgacgcctgacaacatggcgccgctgtgcgaagcgattgttgccgtactgtaa

SEQ ID NO: 189668 - DNA, 1083 bp, Klebsiella oxytoca
atgatgaagcgcaaaattctggcagcggtaattcctgccctgctggtagccggtgcagctaacgctgcagaaatctataacaaaaacggcaacaaactggacttctacggaaaaatggttggcgagcacgtctggaccaccaacggcgacaccagcagcgatgataccacctacgcccgtatcggcctgaaaggcgaaacccagatcaacgatcagctgaccggttacggccagtgggaatacaacatggatgcgtccaatgttgaaggtaaacagaccactaaaactcgtctggctttcgcaggcttaaaagccggtgaatacggttcatttgattacggtcgtaactatggcgccatctacgacgtcgaagcggcaaccgatatgctggttgaatggggcggcgacggctggaactacaccgacaacttcatgaccggccgtaccaacggcgtggcgacctaccgtaactccgacttctttggtctggttgacggtctgagcttcgcgctgcagtaccagggtaaaaacaaagaccgtgatgttaagaaacaaaacggcgacggcttcagcacctccgcaacctacgcgtttgacaacggcgttgcgctgtccgctggttatgccaactccagccgtaccggcgctcagaaagctgacaaaaacggtaataaagctgaagcatgggcaacttccgctaagtacgatgctaacaacgtctacgctgcggtcatgtactcccagacctacaacatgaccccagaaaacagcgatggtaactacttcgctggtaaaactcagaacttcgaagccgttgttcagtatcagttcgatttcggcctgcgtccgtccatcggctacgtccagactaaaggtaaagacctgcgctcccgcgctggcttctcaggcggcgatgctgacctggttaaatacgtcgaagtgggtacctggtactacttcaacaaaaacatgaacgtctacgctgcgtataaattcaaccagctggacgataacgactacacccgtgctgcgaaagtcgcgaccgacgatcaggcagcggttggtatcgtttaccagttctaa

SEQ ID NO: 189669 - DNA, 1401 bp, Klebsiella oxytoca
atgagcgttgtgcctgtagccgacgtactccagggccgcgttgccgttgacagcgaagtcaccgtgcgcggatgggtgcgtacccgccgagattctaaagctggcttttctttcctcgccgtctatgacggttcctgctttgatcctgtacaggccgttattagtaattctcttcccaattacaatcaggaagtgctgcgcctgaccaccggctgctcggtcgtggtgaccggtaaagtcgtggcatctcagggccagggccagagttttgaaatccaggccagccacgtggaagtcagcggctgggtggaagatccggatacttatccgatggcggctaaacgccatagcatcgagtacctgcgtgaagttgctcacctgcgcccgcgcaccaacctgattggcgcggtggcgcgcgttcgccataccctggcgcaggcgctgcaccgtttcttcgacgagcagggtttcttctgggtttcgactccgctgattaccgcttccgatactgaaggcgctggcgagatgttccgcgtgtcaacgctggatctggaaaacctgccgcgcaacgaacagggcaaagtcgatttcgataaagacttcttcggcaaagagtcgttcctgaccgtttccggccagctgaacggcgaaacctacgcctgcgcgctgtccaaaatctacacctttggcccaaccttccgtgcggaaaactccaacaccagccgccacctggcggagttctggatgctggagccggaagtcgcctttgctaacctgaacgatgtggccggtctggcggaagcgatgctgaagtacgtctttaaagccgttctcgaagagcgcgcagacgacatgcagttctttgccgaacgcgttgataaagacgctatcgaccgcctgcagcgtttcgtttctgctgattttgcccaggttgattacactgacgcggtcaccattctggaaaactgcggtaagtcgttcgaaaacccggtctactggggcgtggatctctcttccgagcacgaacgctatctggcggaagagcactttaaagccccggtggtggtgaaaaactacccgaaagacatcaaggcgttctatatgcgccttaacgaagacggtaaaaccgtcgccgcaatggacgttctggcgccgggcatcggtgaaattatcggtggctcccagcgtgaagagcgcctggacgtgcttgacgcgcgtatggcggaaatgggtcttaataaagaagactactggtggtatcgcgatctgcgccgttacggcaccgtaccgcactccggtttcggtctgggctttgagcgtcttatcgcctatgtgaccggcgtgcagaacgttcgcgacgtcattccgttcccgcggaccccgcgtaacgcgactttctga

SEQ ID NO: 189670 - DNA, 1203 bp, Klebsiella oxytoca
atgacccaattcacttctcctgtactgcactcgttgcttgatacggatgcctacaagctgcacatgcagcaggctgtcttccaccgctacaataatgtacaggttgcggcggagttccgctgccgcggggacgatttgctcggcatctacgccgatgcgattcgcgagcaggttgagacgatgcgcgacctgagactgcaggacgatgaatatcactggttgtcgagcctgcccttctttgcgccagactatctcgagtggctacgcggcttccgctacgacccgcgccaggtcacggtcatcaatgacaacggcaagctgaatattcgcctttccggcccctggcttgaagttattatgtgggaagttccgctgctggcggtgataagcgagatggttcatcgctatcgctcgccggaaatcagcgtcgatctcgcgctgaacacccttgagcataagctgactgactttaaccgcctcactgctgatatcgatatgtcgggcttccgcctgatggatttcggtacccgccgccgcttctcccgcgaggtgcagcaggcgattgttcagcgtcttcagcaagaatcctggttcaccggtaccagcaattacgatctggcgcggcgtttgaatttgaccccaatggggacccaggctcacgaatggttccaggcgcatcagcagatcagcccgaacctggcgagcagccagcgcgcggctctcgcagcctggctggaagagtatcccgatcggctggggattgcgctgaccgactgcattacgatggacgcttttctgcgcgatttcgggccggagtttgcgacccgctatcaggggctgcgtcacgactccggcgacccggtggaatggggcgagaaggctatcgcccactacaaaaagctgggcatcgacccgcttagcaaagtgctggtattttccgataatctcgacctgacaaaagcggttgatctctatcgccacttctcatcgcgggtgaatctgagcttcggtatcggcacgcgtttaacctgcgatattccccaggtgaagccgctcaatattgttatcaagctggtggagtgcaacggtaagccggtggcgaaactttcggatagcccgggtaaaacgatttgtcacgataaagctttcgtccgcgccctgcgcaaagctttcgatctaccgccggttaaaaaagccagctag

SEQ ID NO: 189671 - DNA, 2616 bp, Klebsiella oxytoca
atgacacaacagccccaagccaaataccgccacgactaccgtgagccggagtatctgattagcgatatcgatttgacctttgacctggatgccgcgaaaaccgttgtgacggctgagagcaaggtctcccgccacgcggctacgtctgatgtgccattgcgtctggatggcgaagacctgacgttagtctctctgcggattgatggtcagccgtggagcgactacaaggaagaaaataaccagctggtgatttgcgggttgccggaacatttcactctgaccatcgtcaatgaaatcagcccggcggcgaataccgcgctggaagggctatatcagtccggcgaagcgctgtgtacccagtgcgaggcggaaggcttccgccacattacctggtatccggaccgcccggacgttctggcgcgcttcaccaccaaaatcatcgccgataaagcaaaatacccgtttctgctctccaacggtaaccgcgtggcccagggcgagctggaaaatggccgtcactggatccagtggcaggacccgttcccaaaaccgtgctacctgtttgcgctggtggccggtgattttgacgtcctgcgcgataccttcaaaacccgttctgggcgtgaagtggcgctggagctctacgttgaccgcggtaaccttgaccgcgcgccgtgggcgatgacctcgctgcaaaattcgatgaagtgggacgaaacccgctttggtctcgagtacgacctcgacatctatatgattgtcgccgtcgacttcttcaacatgggcgccatggaaaacaaaggccttaacgtctttaactccaaatacgtactggcgcgtaccgataccgcgaccgataaagattacctggatatcgagcgcgtgattggtcatgaatatttccataactggaccggcaatcgcgtgacctgccgcgactggttccagctcagcctgaaagaggggctgaccgttttccgcgatcaggaattcagctctgacctcggctcgcgcgcggtcaaccgcatcaataacgtacgcaccatgcgcggcctgcagtttgccgaagacgccagcccgatggcgcatccgattcgcccggatagcgtgattgagatgaacaacttctataccctgacggtgtatgaaaagggagcggaagtgatccgcatgctgcataccctgctgggcgaagagaatttccagaaaggcatgcagctctattttgagcgccacgacggcagcgccgcgacctgcgacgactttgtccaggcgatggaagacgcttccaacgtcgatctgtcccacttccgccgctggtatagccagtccggtacgccgattgtcaccgtccatgatgactacaacccggaaacggagcagtacacgctgaccatcagccagcgcacgccgccgaccgctgagcaggcggagaagctgccgctgcatattccgttcgacatcgaactgtacgataacgaaggcaaggtaatcccgctgcagaagggcggtcacccggtgcatcacgtgctgaacgtcacccaggcggagcagacttttgttttcgacaacgtttacttccagccggtcccggcgctgctttgcgaattttccgcgccggtgaagctggagtacaagtggagcgatcagcagctgaccttcctgatgcgccacgcgcggaatgatttctcccgctgggacgcggcgcagagcctgctggcaacctatatcaaactcaacgttaaccgccatcagcaggggcagccgctgtcgctgccgatccacgtcgccgatgcgttccgcgcgattctgctggatgagaagatcgatccggcgctggcggcggagatcctgacgctgccttcagcgaatgaaatggcggagctgtttgcgattatcgatccgcttgccatcgcggcggtgcgcgaagcgctgacccgcacgctggcgaaagagctggcggacgagttcctggcggtttacaacgccaacaagctcgacggctaccgcgttgagcatgccgatatcggtaagcgttctctgcgtaatacctgcctgcgctacctggcgtttggcgataccgagctggcggataaactgattagcgcgcagtatcaccatgcggacaatatgaccgacgcgctggcggcgctggccgcagccgtagcggcccagctgccgtgccgcgatgcgctgatgcaggagtatgacgacaagtggcaccaggacggactggtcatggataaatggtttatcctgcagtccaccagcccggcggataacgtcctggagacggttcgcggcctgttgcaccatcgctcgttcagcatgggtaacccgaaccgcgtccgttctctgatcggcgcctttgccggcagcaacccggcggcgttccatgcagaagacggcagcggctatcagttcctggtcgagatgctgactgagctgaacagccgcaacccgcaggtggcgtcgcgtctgattgagccgctgattcgtctgaaacgctatgacgagaaacgtcaggcgctgatgcgcggggcgctggagcagctgaagggtctggagaatctttccggggatctgttcgagaaaatcagtaaagcgctggcgtaa

SEQ ID NO: 189672 - DNA, 774 bp, Klebsiella oxytoca
atgaccaccgcgcgtcttaatccggggatcccgctgctgcttaacggcgtaagcaagcgttacggcagcaagacgattctgaatgaactcgagcttcatattcccaccgggcaattcgtcgcggtggtcgggcgcagcggcggcggtaaaagcaccctgctgcggctgctggccgggctggaaaaacccaatgccggactgctgctggcgggttcgacgccgctggcgcaaatccaggaggatacccggatgatgtttcaggattcccgcctgctgccgtggaaaacggtgatcgataatgtcggcctcgggctgaaaggtcagtggcgcgaggccgcgctcagggcgctggcaagcgtcggccttgaagaccgcgccggtgaatggcccgcggcgctttccggcgggcaaaagcagcgcgtggcgctggctcgcgcgttaattcatcgccccggattattgctgcttgatgaaccgctgggcgcgctggacgcgctcacccgcctggagatgcaggatctgattgtctcgctgtggcaggagcatggatttaccgttctgctggtcacccatgacgtcagcgaggcggtggcgatggccgatcgcgttttgctgattgaagaggggaagatagggctggatctgctggtggacattccccgtccgcgacgcacgggttcagcgaagctggccgaactggaagcggaagtactgaatcgggtgatgcagcgcggcaagaacgaatcctcgccacgcttagtgagccacggttaa

SEQ ID NO: 189673 - DNA, 792 bp, Klebsiella oxytoca
atggcgacgctttcgcaaaaactcctgatccgcatagccccctggcttttgccggttggcagcgtgattgtatggcaattcgcctcttccgttggctggctctctacccgtattttgccgtcaccggaaggggtactcaaagccttctggacgctctccgccagcggcgagctttggcaacatcttgccatcagctcatggcgggcgcttattggtttcagcatcggcggttccattggcctggttctcgggcttatcagcggcctgtcgcgctggggcgaacgcctgctggacacctccattcaaatgctgcgcaacgtgccgcacctcgcgctgattccgctggtgattttatggttcggcatcgatgaaagcgccaaaattttcctcgtggcgctggggacaatgttcccgatttatatcaacacctggcacggtattcgaaacattgaccggggactggtcgagatggctcgtagctacggcttatcgggttttgctctgttccgccatgtgatcctgcccggctccctgccctcaattatggtcggcatccgttttgcgctcggcctgatgtggttaacgctaatcgtggccgagaccatctcggctaacgccggtatcggctacctggcgatgaacgcccgcgaatttctgcagaccgatgtcgtggtcgtcgccattattctttacgctattctcggcaaactggccgacttcagcgcccagctgcttgaacgcgtctggctacgctggaatccggcctatcaccttcaggaggccaacgcatga

SEQ ID NO: 189674 - DNA, 576 bp, Klebsiella oxytoca
atgcgagtcatcacacttgcgggcagcccgcgctacccttcccgctccagcgcgcttctggaatacgccagagagacgctctcggcggcggatatcgaggtctgccactggcatctgcagaatttcgctccggaagacctgctctacgctcgctttgataacccagccctccatgcgttaaatgaacagcttgccggcgccgatgggctgatcatcgcgacgcccgtctataaggcctctttttccggcgcgttaaagacgcttcttgacctgctgccggagcgcgcgctggagggcaaaatcgttctgccgttggctaccggcggaaccatcgcccatatgctggcggtggattacgccttaaaaccggtactcaacgcgctgaaagcccaggagatcctccacggcgttttcgctgacgatagccaggtcacggattatcagcataaaccgcagtttaccccgaatctgcagggccgcctcgaccaggcgctggaaaccttctggcaggcgttgcatcgccccagcagccgcgcgccggcgctgaaaaccttacagcgggttgagcacgtttaa

SEQ ID NO: 189675 - DNA, 1011 bp, Klebsiella oxytoca
atgtactaccccttcgttcgtaaagccctttttcagctcgatcctgagcgcgctcatgaagtcacttttcaacaattacgccgtgtttcgggtaccccgctggaaatgttggttcgccagaaggtgccgacaaagccggtaacctgtatggggctcacatttaagaacccactgggcctggccgccgggctggataaaaacggcgagtgcattgatgcgctcggggcgatgggttttggttccattgaaattggtactgtgacgccgcgtccacagccgggcaacgataagccaaggatcttccgcctggtcgatgccgaaggtttgatcaaccgcatgggctttaataaccacggtgttgataacctcgtggagaacgtaaaaaaggcgcattttgacggcattctgggtattaatattggcaagaataaagatacaccggtagaacaaggcaaagatgattatctgatttgtatggaaaaaatctatgcttatgccggctatatcgccattaatatctcctcgccgaataccccaggcttgcgtactttacaatacggagatgcgctggacgatttgctttctggtattaaaaataagcaacgcgagctacaagagaaacatcaaaaatatgttcctgtggccgtaaagatcgctccggatctttccgtcgaagaattgatccaggtagcggacagtttagtccggcataatatagatggcgtcattgctaccaataccactctggatcgatcgctggtgcaggggatgaaacattgtgatgaaaccggtgggcttagcggacgtccattgcagctgaagagtacggaaattatccgcatgctgtctgcggaattaaatggccgtctgcccattatcggagtcggcggtattgactcggtgattgccgcccgggaaaagatagccgccggagcgacgctggtgcagatttattccggatttatttttaaaggcccgccgctgattaaagaaattgttacccatatctaa

SEQ ID NO: 189676 - DNA, 543 bp, Klebsiella oxytoca
atgcggatcaaacctgacgataactggcgctggtattacgatgaagagcatgaccgcatgatgctcgatctggctaatggtatgttattcagatcgcgttttgctcgccgcatgttgacgcccgacgccttcgcgccttccggattttgcgttgatgacgcagcgctctatttttcatttgaagaaaagtgccgcgatctcgaattatcaaaagaacagcgcgctgaattagtgctcaatgcgctggtcgctattcgttttctcaagccgcaaatgccgaaaagctggcatttcaatacgcatgaagagagctggcagcccggcgttggcgatgccgccagcgcatggctcagcgataccggccagcaggtgaatctgctggtggttgagcccggagaaaacgccgcgctgtgcctgttagcccagcccggtctgacgcttgccgggcgagtgatgcagctcggcgacgtgattaaaattatgaacgacaggctgcagccagcgccaggcgtcgccagctacagcctgggtcaggcggtttaa

SEQ ID NO: 189677 - DNA, 1110 bp, Klebsiella oxytoca
atggtaaccctttcgcgactttttattcatcccgtcaaatcgatgcggggaatggggctcagccacgcttatgcagacagcagcgggctggccttcgatcgtatatttatggtgacggaaaccgacggcaccttcattaccgcccgtcagtttccgcaaatggtcaaatttattcccgcgccgctccatgatggtctgcatctgaccgcgccggacggcagcagcgcgatggtgcgcttcagcgatttctccatacagcaggagccgaccgaagtctggggcaaccattttaccgccctgattgccccggaccgggtgaaccagtggctaagcgggttcttcaaccgcagcgttcagctccgctggctggggccagcgcttagccgcagggtaaaacgtcacgatgccgtccccctctcttttgccgacggttttccctatctgctggccaatgaagcttcgctgcgcgatctgcaaaatcgctgtccggccagcgtaagcatagaacaatttcgcccaaatctgctggtgaccggcgcggccgcctgggaagaagatacgtggaaagtggtgcgcattggcgaggtcatttttgatgtcgtcaaaccgtgcagccgctgcgtattgactaccgtcagcccggagcgcgggcaaaagcatccttccggggagcccttaagcacgctgcagcgtttccgcacggcgctggacaacggcgatgtcgattttggccagaacctgatcgcgcgaaatagcggcgtaatccgcgtgggcgatgcgttagaagtgctggccagcggcccggcgaaggcctacggcgcaggcgagagtgatactacgccggcacctgaagcgcaggagaacgcgacggtggaaatagcgtggcagggagtgagttttaccggtaataatcagcaaatcttgctggagcagctggagcaacagggaattcgtattccttactcctgtcgggctgggatttgcggcagctgccgcatccggctggaagaaggagaagtcagcgcgctgaagaaaaacgcggtcgccgcagatggcaccattttatgctgtagctgcgtgccgaaaaccgcggtgaagctggcgccttaa

SEQ ID NO: 189678 - DNA, 2106 bp, Klebsiella oxytoca
atgaattctctgtttgccagtacggctcgtgggctggaagagctgttaaaaactgaactggaagggctgggcgcagtggactgccagttggtccagggcggggtccattttcagggagatacgcggctgctgtatcaaagcctgatgtggagccggctggcttcgcggattatgctgccgctggggcagtgcagcgtatacagcgacctggatctgtaccttggcgtacaggccattccatggaccgagattttcactcaggatgccacttttgccgtgcactttagcgggctgaacgaagagatccgcaacagccagtacggggcgttgaaggtgaaagacgccatcgtcgacagctttacgcgtaagaatctgccgcgtcccaacgtcgatcgcgaaaatcccgatctgcgtattaacgtctggctgaataaagagactgcgcatatctccctggatcttagcggcgaggggctgcacctgcgcggctaccgcgacggtaccggtatggcgccaatcaaagaaaacctggctgcggcgatagtgatgcgttccggctgggctgccggtacgccgctgctcgatcccatgtgcggttccggtacgctgctgattgaagcggcgatgctcgctaccgatcgtgcgccgggcttacaccgcggccattggggtttcggcggctgggcgcagcatgacgatgctctctggaaagaggtgaagtccgaagcgcaaacccgcgcccgtcaggggctggcggcgtatgagtcgcgcttttacggttccgacgttgacgcccgcgtcatcgaacgcgcgcagcgcaacgcccgccgcgccggtattggcgaactgattagcttcgaagtgaaagacgttgcccagcttagcaacccactgccgaagggcccttacggcacggtgataagcaacccgccgtacggcgagcgtctggagagtgaaccggcgctgattgccctgcatagcctgctggggcggatcatgaaaaatcagtttggcggctggaacctgtcgctgtttagcgcctcgccggatctgctgagctgcctgcagctgcgcgctgataagcagttcaaagcgaaaaatggaccgctcgactgcgtccagaagaactaccatctcgcggaaaacgaaggcggcaaaaccgcgatgctggcggaagatttcgccaaccgtctgcgtaagaacctgaaaaaatatgagaagtgggcgcgtcaggaaggcattgaatgctatcgcctgtatgatgctgacctcccggagtacaacgtcgctatcgaccgctacgccgactgggtggtggtgcaggagtatgcgccgccgaaaaccgttgacgcgcacaaggcccgccagcgcctgtttgatattatcgccgccaccattgccgtactggggattgcgccgaacaagctggtgctgaaaacccgcgaacggcagaaagggaaaaaccagtatcagaaaatgggtgaaaaaggggagttcattgaggtgcaggagtataacgcacgtctgtgggtaaacctgaccgactacctggataccgggctgttcctcgaccatcgtattgctcgccgcatgctcggccagatgagcaaaggcaaagatttcctcaaccttttctcctacaccggtagcgccagcgtccacgccggccttggcggcgcgcgttccacgacgacggtcgatatgtcacgtacctatcttgaatgggctgaacgtaacctgcgcctcaatggcttaaccggccgcgcgcatcgcctgatgcaggctgatgtgctgggctggctgcgggagaccaccgaacagtttgatctgatctttatcgatccgccaaccttctccaactccaagcgtatggatgatgcgtttgacgttcagcgcgaccatttgcgcctgatgaccgatttaaaacgtctgctgcgtaaaggcggcacgattatgttctcgaacaacaaacgcggtttccgtatggatcatgacgggctggcgcagctgggcctgaaggcgcaggagatcacgcaaaaaacgctgtctcaggattttgcccgcaaccgtcagattcacaactgctggctgattaccgcagcctga

SEQ ID NO: 189679 - DNA, 1908 bp, Klebsiella oxytoca
atgtctttaattagtatgcacggcgcctggctctctttcagcgatgcgccgctgctggataatgctgaactgcatatcgaagataacgaacgcgtctgcctggtagggcgcaacggtgcgggtaaatcgaccctgatgaagatcctcaatcgtgaacagggtcttgatgacgggcgcattatctatgaactggatctggttgtggcgcgtctacagcaggatccgccgcgtaatgtgaccggaaccgtctatgactttgtggcggaaggtattgctgaacaagcggcatacctcaagggttatcacgatgtttcgcagctggtgatgaccgatccgagcgacaagaatctcaatgagctggcgcgccttcaggaacagctggataatttagggctgtggcagctcgatagccgcattaatgaagtgctggaacagctgaatctggatcctaacgccgagctttcttcgctgtccggcggctggctgcgtaaagcggtcctcggccgcgcgctggtaagtgggccgcgcgtgctgctgctcgatgaaccgaccaaccatctcgatatcgaaactatcgactggctggaaggtttcctgaagatgttcaaaggcaccattatttttatttcgcacgaccgttcctttattcgcaacatggcgacgcgaattgtcgatctcgatcgcggtaagctggtgacctatccggggaactacgatcagtatctgctggataaagaagaagcgctgcgcgtggaagagttacagaacgcggagttcgatcgcaagctggcgcaggaagaagtgtggatccgtcaggggatcaaagcgcgtcgcacccgtaatgaagggcgcgtgcgggcgttgaaagccatgcgccgcgaacgcggtgagcgccgtgaagtgatgggcagcgcgaagatgcaggtggaagaggccgcacgttcgggcaagattgtgttcgaaatggagaacgtcaactaccaggttgatggcaaggtgctggttaaagacttcaccgcccaaatccagcgaggcgacaaaattgcgctgattggcccgaacggctgcggcaaaactacgctgctgaagctgatgctcggtcagctgcaggcggatagcggacgtattcatgtgggtaccaagctggaagtggcttacttcgaccagcaccgcgcggaacttgatccggataaaacggtgatggacaaccttgcggaaggtaaacaggaagtgatggtgaacggcaagccgcgccacgtcctgggctatctgcaggactttatgttccatccgaaacgcgcgatgacgccggtgcgggcactgtcgggcggggagcgtaaccgcctgctgctggcgcgcctgttcctcaagcccagcaacctgttgatactcgatgaaccgacaaacgatctggatgtcgaaaccctggagctgctggaagagcttgtcgacggttatcagggaaccgtgatgctggttagccacgaccgtcagtttgtggataacacggtaacggagtgttggatcttcgaaggcgcggggcaaattggccaatacgtgggcggctatcatgacgcgcgcggtcagcaggcgcagtatctggcgaaaaaacagccggtttctaaaaagacagttgaagttgctcaaccgaaagcagaaagtgtcaaacgcgctgccagcaaactaagctataacctgcagcgcgagctggaacagctgccgcaaaaactggaagaactggaagcccagctgcagaatttgcaggagcaggttgccgacccttctttctttggtcagtcgcatgaccatacgcagcaggtgctcgcacagctgagtgaagcggagcaggcgctggaaaccgccttcgaacgctgggaatatctcgaaggtttaaaaaacggcgcataa

SEQ ID NO: 189680 - DNA, 1269 bp, Klebsiella oxytoca
atgtgcgatcatcatcatgctgcgcggcatatcctgtgtcgacaatgtgatctgctggtggctttgccgcagctggagcatcgccagaaagctacgtgtccgcgttgcggaacgacattaacaacgtcatgggacgcgccccggcagcgtcccacagcctacgcgctggtcgcgttgttcatgctgctgctggccaatctgttccccttcatctatatgaaggttggagggatcagcagcgaaatcgagctgctggaaattccgaacgtgctgtttagcgaggattacgccagcctcggtaccttctttttacttttcgtccagctggtgccggctttctgcctggtcaccatactgctgctggtcaatcgggtgagcatgccttccgggctaaaggcgtttctggcgcggatcctgtttcaccttaaaacctgggggatggcggaaatctttctcgccggggtgctggtaagcttcgttaagctgatggcctacggcgatatcggcatcggcctgagcttcgttccctggtgtatgttctgcctgttacagctgaggacgttccagtgcgtggatcgccgctggttgtgggatgatattgcatcaatgccggcgattacacagccgctgaaagtcggcgtctccggtctgcgtcaggggctacgctcgtgctcatgctgcacggctgttttgcccgtcgatgaggccgtttgtccgcgctgtcggacaaggggaaccgcccggcgtaaaaacagcctgcagtggacgctggcgctgttggtgacttcgctgatcctctatatgcccgccaatattctgccgatcatgattaccgacctgctgggcgataaaatgccttccacgattatggcgggggtgatcctgctgtggagcgaaggatcgtatccggtggcgatggtgatatttattgccagtattatggtgccgacgttaaaaatgatcgccattggctggctatgctggaacgccagcggcaagggagcgcgcgactcggagcgcatgcatctgatttatgaagtcgtcgagtttgttggccgctggtcaatgattgatgtgtttgttatcgcagtcctctccgctctggttcgcatcggtggattaatgaatatctatccggcgataggagcagtgatgtttgcgctggtcgtagtaatgacaatgttttcggccatgacctttgacccgcgtttattgtgggatcgtgagccagattcaagccatgaggaaagactgcagcatggaaaataa

SEQ ID NO: 189681 - DNA, 1638 bp, Klebsiella oxytoca
atggaaaataagagcggagaagcgaaagtgcaaaaggtgaagaactggtcaccggtgtggatcttcccgatagtcacggcgctgattggcgcatggattctcttttatcactatagccaccaggggccggaagtgaccctgataaccaccaacgcagaaggtattgaagggggcaaaacccggataaaaagccgcagcgttgacgtcggcgtgattgaaagcgcgacgctgacggacgacctgacccacgtggagattaaagcgcggctgaattcaggtatggaaaaactgctgcaccaggattcggttttttgggtggttaaaccgcaggtcggccgtgaagggattagcggtctgggaacgctgttatccggcgcctatatcgaactgcagccgggtagcaaaggctctgttcctgcgcagtatccgctgctggattcaccgccgctggcctcccctgatgctaaaggtattcgcattctgctggaaagcagcaaagcggggcagctttcacccggcgatccggtgctttttcgcggctaccgcgtaggttcagttgaaaccagcaccttcgatgcgcaaaaacgcaatattacctatcagctgtttattagcgcgcctaacgatcggctggtgaccaataacgtgcgcttctggaaagatagcggtattgcggtggatctgaccgctgcgggtatgcgcgttgagatgggatcgctgtcgacgctgtttggcggcggcgtcagctttgatatccctgaagggctcccgctaggggaaccggtggcgaataaaaccgaatatcatctgtttgacgatcaacgcagcatccaggattcggtatttacccagcatattgactacgtgatgttctttaaagattcgattcgtggtctgcagcccggcgcgccggttgagttccgcggtatccgtctggggaccgtcggcaaggtgccgttctttattccagggctcaagcagaacatcaacgacgattaccgtatcccggtagaagtgcggattgaaccggaacgtctgatcaatcagttaggcgctaatcctgacattcgtaagcatatcgatgatctaatgaatcgcgggctgcgcggttcgcttaaaaccggtaacctggtgaccggcgcgctgtatatcgatctcgacttctacccgaaagcccctccgcgcggcaagatgcaggagtttggcggttatccgattattccaaccgtgagcggtggcctggcgcagatccagcagcgcctgatggacgcgctggataaaattaacaatctgccaattaacccgctgctggagcaggcaaccagtacgctggcgcaaagtgaaaaaacgatgcagcacgtacaggcgacgctggacagtctgaacaagataacgtcaagtcagtcgatgcagcagctaccgggcgatatgcagaatacgttgcgcgagcttaatcgtagtatgcagggcttccagccgggatctgcggcatacaataagatggttgcggatatgcagcgtctcgatcaggttcttcgtgaactgcagccggtactgaaaacgctcaatgataagagcaatgcgctggtatttgaggcgaaggataaaaaagatccgcagccgaagggagcgaaataa

SEQ ID NO: 189682 - DNA, 564 bp, Klebsiella oxytoca
atgaagaaatggctaatagcggcggcggtatgcgcgctgacggcatgcagcagcggcggtgagagtaaaacttactatcagcttcccgtggcgcagggtggcgcgcaaagcgccgcccaccaaagcaaaaatttgctttgggtcgagcaggtgagcattccggattatcttgccggtaacggtgtggtctatcagaccaccgatgttcagtatgtgattgcgaataacaatctgtgggcgagcccgctcgatcaacagctgaaaacgacgctggtggcgaaccttagcaaccagcttccgggttgggtggttgcctctcaaccgctggggagcgagcaggatacgctgaacgtgtccgtcagcggttttcacggccgttacgatggccgggtcatcgtcagcggcgagtggctgctgaagcatcaggggcagctgattaagcggccgttccatattgagcttaagcaacaagaggatggctacgacgcgatggtgaaaacgctcgctcaggcctggacccaggaagcgacggcgattgccagcgagattaaccgcttgccataa

SEQ ID NO: 189683 - DNA, 519 bp, Klebsiella oxytoca
atggtagataaacgcgaatcctatacaaaagaagaccttcttgcctctggtcgtggtgaactctttggcgccaaaggcccacagctgccggcgccaagtatgctgatgatggaccgcgtcatcaaaatgaccgaaaccggtggtaactatgacaaaggttatgttgaggcagaactcgatattaacccggacctgtggttcttcggttgccatttcattggtgacccggtgatgccgggctgtctgggcctggatgccatgtggcagctggttggcttctacctgggctggttaggcggcgaaggtaaaggacgtgcattaggcgtgggcgaagtgaagctcaccggtcagatactgccaacggcgaagaaagtgacctaccgtattcatttcaaacgcgtgataaaccgtcgtttgattatggggctggcggatggagaagtgctggttgacggtcgtttgatttacaccgcaaccgatctgaaagtgggcctgttccaggacacttccgcgttctga

SEQ ID NO: 189684 - DNA, 1758 bp, Klebsiella oxytoca
ttgaccattacgaaacttacccgaaacgacctcgctcctgatacggaaagttatcaggcgctgtttgcacaagccgacttagctcacgcagaggcatcgctctcaggcgaactccagccccgactcttctatggcctggagcagctcctggtcactccggccatttcgccgtttatgctggttaaaattccggaagagccggagtacctgcagtggttggctaacgaaacccgtactttacatcaaccggcacaaacgctctgtggcgttcgctatcaggttgatggcggaaaaatctcgctctccccggcgcaaacggttgaagatgattttgccagcgttgcgccggttgaagccgcggactggatcgaagcagagcagctttttggctgcgtgcgccagtttaatggtgaaatcacgttacaacccggtctggtccatcgtgctaacggcggggtattaattctctccctccgcgcattactggcacagcccctgctgtggatgcggctaaaaaatatggtaacccgccagcgttttgactggttatcattcgatgagtctcgccctcttccggtcagcattccctctatgcccctgagtttgaaagttatcctggtcggcgagcgggaatctcttgcggattttcaggagatggaacccgagctttctgcgcaggctatctacagcgaatatgaagataatctgcaaatcgctgacgccgatacgctgaagcagtggtgccagtgggtctggcaaaatgctcagctgctcgaactcccggggctgtcagctaacgcctggccgctgctgatccaggaaggtgcgcgttatacaggcgatcaggaaaccttgccgctgtgcgtactctggattgctcgccagcttcgcgaagccgccgcattctgtgaaggtgaagagattagcgctgaagagatgcaaaccatgctggagcgtcgtttgtggcgcgaaggctaccttgctgaacgcatccaggatgaaatactgcaggagcaaatcctgatcgagaccgaaggcgaatgcgtcggacaaatcaacgcactctccgtcattgagtttccgggccatccgcgtgcgtttggcgagccttcgcgtattagctgcgtcgtacatattggcgacggcgaatttattgacgttgaacgtaaggccgagcttggtggcaacattcatgcaaaaggcatgatgatcatgcaggcgttcctgatgtccgagctggagctcgaacaacagctccccttcaccgcctccctgaccttcgagcagtcctacagcgaagtggatggcgatagcgcctccatggccgagctgtgcgcgctgatcagctcgctggccaatgtgccgattaatcagagcatcgccattaccggctctgtcgatcagtttggtcgcgtacagccggttggcgggcttaacgagaaaattgagggcttctttgctatttgccagcagcgtgggctgaccggtaaacagggagtcatcattccctccgccaacgttcgtcacctgagcctggcgcaggaactgcaacaggccgttgcggatgagcagttctttatctgggcagtcgatgacgtgacggaagcgctgcccattctgacccagttactctgggacggcgaaggacaaacgttacggcaaaccattcaggaacgaattgcgcaggcgacacagcaagagagtcgtcatcgctttccgtggccgctacgctggttaggcggttcaggttcgaactga

SEQ ID NO: 189685 - DNA, 453 bp, Klebsiella oxytoca
atgaaatatcaacaactggaaaatcttgaaagcggctggaaatggacttatctggtaaaaaagcaccgggaaggtgagcttattacccgctacattgaagccagcgctgcgcaagccgccgtcgatttattactgacgctcgaaaatgaacccgtgctggtgaatacctggattgagcagcatatcaatccggcgctgataaaccgcatgaagcagactatccgcgccagacgtaagcgtcattttaacgcggagcatcagcatacgcgtaaaaagtctatcgatctggagttcatggtctggcagcgtctggcaggtctggcgcaaagacggggtaaaacgctgtcggaaaccattgtgcagttgattgaggatgctgagcataaagagaagtatgccagcaagatgtccagcctgaagcatgatttgcaggtactattaggaaaagagtag

SEQ ID NO: 189686 - DNA, 1071 bp, Klebsiella oxytoca
atgaaaaagacagctatcgcgattgcagtggcactggctggcttcgctaccgtagcgcaggccgctccgaaagataacacctggtacgcaggtgctaaactgggctggtcccagtatcacgacaccggtttctacggtaacggtttccagggcaacaacggcccgacccgtaacgatcagctgggtgctggtgcgtttggtggttaccaggttaacccgtacctcggttttgaaatgggttacgactggctgggccgtatggcttacaaaggcagcgttgacaacggcgctttcaaagctcagggcgttcagctgactgctaaactgggttacccgatcactgacgatctggatatctatacccgtctgggtggtatggtttggcgcgctgactccaaaggtaactacgcttctaccggcgtttcccgtagcgaacacgacactggcgtctccccggtattcgcgggcggcttagagtgggctgttactcgtgacatcgcaacccgtctggaataccagtgggttaacaacatcggcgacgctggcaccgttggtacccgtcctgataacggcatgctgagcctgggcgtatcctaccgctttggtcaggacgacgttgctccggttgtagctccggcgccggctccggctccagaagtgactaccaagcacttcaccctgaagtctgacgttctgttcaacttcaacaaatctactctgaaaccagaaggccagcaggctctggatcagctgtacacccagctgagcaacatggatccgaaagacggttccgcagttgttctgggctacaccgaccgtatcggttctgatgcctacaaccagcagctgtctgagaaacgtgctcagtccgttgttgattacctggtatctaaaggtatcccggctagcaaaatctctgctcgcggtatgggcgaatccaacccggtcactggcaacacctgtgacaacgtgaaagctcgcgcagctctgatcgactgcctggcgccggaccgtcgtgtagaaatcgaagttaaaggctacaaagacgttgtaactcagccgcaggcttaa

SEQ ID NO: 189687 - DNA, 381 bp, Klebsiella oxytoca
atgatgacgcagctgctattgcttcctttattacaacagcttggccagcaatcgcgctggcagctctggctgacgccacaacagaagctgagtcgtgaatgggtgcagtcgtccggtttgccgctgtcgaaggtgatgcagatcagccagctctcccccgctaacgccctggaatcgatggttcgctcactgcgcaccggaaattatagcgtcgttattggctggctatcagaagaactgagcattgaggaacatgaacgcctggttgccgctgcagaagagggtcacgcgatgggctttatcatgcgtccggtaagaaataccgatcagcctggcagacaactttctgggctaaaaattcactcaaacctgtatcattaa

SEQ ID NO: 189688 - DNA, 624 bp, Klebsiella oxytoca
atgaagaaacttatatgtcttaggatccatcagtttcgggcatgtttgtctccattaggaaaaataagctgtcggcccttatttggtggctatagcctggcgatagataacaccgtgtttgccatgatggctgagggggaaatctatcttcgggtttgcgagcagagcgcggagtaccgcgtggcgcataaaaccccgctgttgaagatgcagaagaatggtcgtctggtcgcgctgaagtattatcatattgatgaggaactgtggcgggatagcaaaatgctttttcatttatcggcgctgtcattacagagcgcgcgtcatgaaaaacatcggcagcggcaatccggaagattaaaaaatttgccaaatattagttttcatatggagctacagttgattaattcaggcattacggatgaattaatgctgcgtaagattggggccaaagaagcctggttgaggttacgaaaaataaataaagcgctaacggtgaacattctttattccttacagggggccattgaaggcgtccatgcggccacgctcccgacgcagcagcgtcaggagcttgagaattgggcaacggaacaaatgcgggagagtgagggctattcaggttga

SEQ ID NO: 189689 - DNA, 936 bp, Klebsiella oxytoca
ttggtatccgcattggcctgcgggatatccgagtcgctgtcggagtccgaatcgctgtcagaatccgaatcgctgtcggagtcggagtcgctgtcagagtcagcatcgctgtcggaatccgagtcgctgtctgaatccgagtcgctgtcggagtcagagtcgctgtccgaatccgaatcgctgtcagagtcagcatcgctgtcggagtccgagtcggaatcgctgtccgaatccgagtcgctgtcagagtccgaatcactgtcagagtcagaatcgctgtcagaatccgagtcgctgtcggaatcggagtcgctgtccgagtccgaatcactgtctgaatccgagtcgctgtcagagtcggaatcgctatctgaatccgagtcgctgtcagagtcggagtcgctgtcagagtccgaatcactgtcggagtcagagtccgagtcgctgtctgaatcggagtcactgtcggagtcggaatcactgtcgctgtcagagtccgaatcgctgtctgaatcggagtcactgtcggagtccgagtcgctgtcagagtcggaatcgctgtccgaatccgagtcgctgtcagagtcggaatcgctgtcgctatccgagtcactgtcggaatcggaatcgctgtcggagtcagaatcgctgtcagagtcagaatcactgtcagagtccgagtcgctgtctgaatccgagtcgctgtcagagtcagcatcgctgtcggagtcggaatcgctgtcggaatcagagtcggtatcatcgctaagatcgatagttaatataaatatcggggatcgttcgctgacgttgccggccaggtcggtcaccgtggtgctcagggcgtgggatccttcagccagtgcatcaggagtaaagctccagcgtccgtcctcgtccgcaatcgcggtgcccagtacggtatcaccgtcataa

SEQ ID NO: 189690 - DNA, 180 bp, Klebsiella oxytoca
atgcatccactgcttaagcgtatcatcgtacgcatagggcgacgtcacaccatccagatagttgtaattccagcggatattttgaatcacaggcacatcacgcacctgttcaaggctgagaccgcgataaatgggcgcaccgataatattgtcaataaccacacgggaggccgtccctaa

SEQ ID NO: 189691 - DNA, 876 bp, Klebsiella oxytoca
atgtcatttgaattctctcaaaacccgcaggccatctggctttatcagtacgatgccgatggtgtttataatggttcggtctttatgactattccggcaggcaccggtctgcctgttaataccacgcatattccctgtgagccgggtaaaggccagaccggtatatttaaaaatagtgaatgggaatatgtggacgatattcgcgggacccgttactggaatattcacggcaccggttttgttatttccgcgctgagtgagtctcttcctgaatgggctgtgactattgagccgccggtcgctgatgccggttacgttctgttgttcacggatggccagtggacgcaagttgaagataaaaccggtcagctttattacgagagcaacagcacgaagcgcgttgtctctgacgcgtggttcaccctgccggagggctgcacgttcgtcgccccgccagaagaaaagccgacgttcgtcacccgctggaacggcaccgagtggatctacctcaaagacctgcgtggccagcttgcctggaataccgaaacccgagaggcaatcactattctggaagtcggccccgtgcctgacggttacaccctcaaaatgccgggccagttcgatgagtggaatggttcagcctgggtgaaaaatagggatgctgaacgggactatctcattgctcaggctgaccgccagaaggctaaattgctgtctgcggcatctgagcaaatttcactgttgagctacgccgtcagcagcggtcaggccactgaggaagaagctgcgcaactggctcgctgggaggggtatcgccttgctgttagccgcgtagatacctcagctgccaacattgtctggcccgataaaccgtaa

SEQ ID NO: 189692 - DNA, 756 bp, Klebsiella oxytoca
atgtatcacctggataatgcctcttccgttcctgatatgcccgctattaagccggtattatttaccgagcgccgctggtttaccgaaggcggcgacggtattgcgccgagttatccgggcgcagactggtttaatgctattcaggcagaaatgctgaacgtgctggcgctggcaaatatcacgccggataaaacgcagctggatcagtttgcgcaggccatccgtattttctcctcggactatatgctgccgccgggtattccgtttgcgtggccgggggcgacagcgccgaccggctttacgctgatgctcggtcagggcttcgataaaatcgcttatccgcgccttgccgtggcgtatccctccggcgttctgccggacatgcgcggccagactatcaagtttttgcccgcctccgggcgtgcgctgctgtcttttgaagccgacggcataaaggctcacgcccataatgcgacgattagcagtaccgacctcggcaccaaaacaaccagcgacgacaacgagcacttccatcagggtggaatggttgctccgggtgatgtctgggacagcgattatgtggtcgggtcagataacgattctcatcgcacccgcaacaacaccagcaccgccccggcgcaccatcacaccgtctatataggcgctcatgctcacacggccacggtggccagcaccggcaatactgaaaacaccgtcaaaaatatcgcctttaacgccatcgtgaggttagcataa

SEQ ID NO: 189693 - DNA, 1875 bp, Klebsiella oxytoca
atggcaaaccgcctcaccactgaaatactcatcaatctggcaggtaacctgaccgccaaagcccgccagtacggtgccaacatgtccgagttcgcccgcaccaatcagcgggcgatgtcggttgttaaagcgacatctgttgctgcaggtcgcggccttgatgcgctgggaaatcgatacaccactatgattgcaggcattggaagcagtatgacagttaaaaatgttgctgattttgatgcacagatgaggcgtatgggtacggatgcacagttaactgcagaacaggtaagcaaattaagggaaaaaatccgtgaggtttctaacgaaagtgatatcagaattgatccatccgcccttggtcagggagctagtgagttactcggcttaaccggcgatgaaaaatttcttgatgagaacatgagaaatctgggtctcaccatgcaggcctttggtgttgatgggcagacagccgcaggactactggcacagttctgggagaaaggtgttaaaggggcagatgatgtcagcaatatgctggataagttgtatcagcagttcgcagtgggttcagtaagtgtctctgatattgcgaaagtagctcccaaactcttttctattattggtgagcaggggccgactgccattgcccagatgggagcatttgcacaggttttcgctaaaaccaaaggaagcgccgacgaggttgttaccagtattcaggcgatgtatgcatccttgcaagacaagaagaacattaaatttcttcagcgtcaggggattgatgttttcaaaccaggcacaaaggactttaagcttccgtttgagttaatgagagaaatactcaagcgcgcaaaaaatgaccccttgaagctgcaggatgtattcgatcagacgggaatgcagggtattaacgcattgttaaaacctgaaaacatgaagcttatggaggaattgatttacggcacagctgaatatggtgcaacacagaaggcggcaaaaaccaacgcagaaggatttaatgcggctcttcagtcgttaaataacgaatggcaacgtttcgctgaatcaaaccttgctgaacctatccaggatctggctgatgcgctgaattctgtcgatcatgagactgtgcagcactggcttgaggtgggtaaaaacgttgctatcgccgtcgctggagtaattgcagcacgcaaggcttttcagtttggtaaaggtgtctgggatttatttggtggaggaaaacccaaagggatccccggtggagttacggacatatttggctcaggtgtcatgcctgtctatgtcgttaacatgcctgccgggctcggtggcggtggcggtggcggtgacaacgatatttccgatgcgctcggcgatgcaggggatctgcttggtgagcgtaatgggcgatgggggcgcgcaggccgctggctgggaagattgggcaagatggccggtattgctggtgtcggatataccctctatgacgaagcgaaacagcgatatgagtcatatgacaacatcagtggattaacgcaggatatctcgaaaaacgataatgcgagcccagaggaaagagcatttgccgccgagagtaaccagaaccgtgagcacatgtcagcgttgtgggacgaaatcaggaactggtttgtctcagtaactaacgatcctcagattgctaacccgtcaccgtgggcttcaatgcagccccagaaccagcccggctatccgttcctgcctcagcaactgcagggcgaagtaaaggttattgttgaagataatcgtgttcgagtcagtagcgtcaaagttaacgcccccggagtcacaatgagcgcccagtctggcgtcagcaatgtggagcaggactga

SEQ ID NO: 189694 - DNA, 189 bp, Klebsiella oxytoca
atgaaaaaacagattaagcccgcccgcgagggcctgaaggtgcgcaagcccggcggcgagcacctgaaccccgaaggggaagcgctccccatgagtgcatggtggcaccgtcgtgcagccgaaggcgatgtgatcattgctgatattccggctgcctcccctcagacccgtgcagttaaggagaagtga

SEQ ID NO: 189695 - DNA, 288 bp, Klebsiella oxytoca
atgcgtgacattctcgaccaggaccagcgcctggttattttgcgatctcttgtcgaatgcggcgacagcgccaacgagtcgattctgcagacgtgcctgcagacgtatggtcatcgcgtttcccgcgataccgtgcgcacacatctggcgtggttgcgtgagcagggtctggtcagtctgacggatgtttccggctgttatgtggctgaaatcaccgggcgcggtgatgacgtcgccagcggtctggccacggttccgggggtgaaaaagccccgcgcgagggggtaa

SEQ ID NO: 189696 - DNA, 1056 bp, Klebsiella oxytoca
atgaaaaatattactcacttagtatttatgattatactgatatctctgaaatcctcttttgcttttgccggtaatggctattgtacttccgttgatggtgcagcgaacttacaatatgactggggaacctatacgctaaccgatgtcgctcaaaataccccgggcactattcttgcggaaaaacagctcaatgcttcgggctctccggtaactttaaattgtgattgcagtggagggccctatcaaaacgcatggatttggggtgatacgacgctttccggtaaagtcactgttggggattacaattattatgatatgccagataacgactacttgcaggtcggggtcgttgtttatacgcaaaaagataatatatggcatccactgccgtttgggcccatctcgaatgtgaataatggggatgcctacagctgtaatcaggatttccagatttcgacaggcggcacccatactggttcacaaatcaaagtttcactaagaataaaaaaatcgttcgtggggatgtctactttctcatccgtactcgcggggtcaacatactggacgctcggcgatcagcaaaccgggcatggtggttctccggcaaccaacatttatatttcaggggctattattgtgcctcaaacctgttctataaacgctggtgaaattgtcaccgtcgattttggttcattctattcagcagagttcaaaaataaaggccaggcgcctaccggttataccgccaaaactgtttccgtgcctgtaaaatgcaatggtatggaggcgaacgcgaatttaaccctgcgttttgaggctgagccagcaacggatgaaccaaccgctatcaaaactaccaacgatgacgtaggggtgcaaatcaccgacagtaacggcaatattgtgacaccaaacagtggactgattcccttccaactggacgataatttacaagcgacggtgacattccatgctgcgccgatcagtactacaggccaggttcctggtgaagggactttttccgcccatgcctatctcagagtcgattttgcgtga

SEQ ID NO: 189697 - DNA, 213 bp, Klebsiella oxytoca
atgtgctgggataagtgcccccaagactccacgcaaacgcatcaggaaaagaggtaccgggtgcgttttgcgcaggatcggttactgttttactaccaaaattgtaagaaaacgcttgtgttccattatcaggagtacaccaccccgtatacccccacgccaccgacgaccagcccgccagggttacacccagaattaaaaacaaccgcgtaa

SEQ ID NO: 189698 - DNA, 1311 bp, Klebsiella oxytoca
gtgactataaaagagattgtacggaatgaactttgtactggatgcggtgtttgtatctcagaagataagagtaattcatcagagatgatatggaattctcagggttttttagtcccgcaattatcaaattcctcggatgagaagtcgatggaaagggtttgcccatttagtttgaatggacaatataatgaagacactcttgcaaaacttttttttaagaatgcaccacaccaagatagtgatattggtttttactcgaacttatattttgggttctctaaggaacatagagctacatcctcttctggaggaatggctacttttttattcgagcagattttattgttaaaccaagcagatcatctttttatagttaaagaaattgatggtaagtatggatatcaacttcatagctcggttgattctataaaagaaatatcaaaaacacgttattatcctgtcacacttgaatcacttttttcagaaattgacaacattaaaggtactatagctatttcaggtgttgcatgttttattaaagcaattaggttaaaacaagtttataatcaggaattgagggataaaattacattcttggttggcatcatttgcggggggctaaaaagcaaatattatacggattttctggcgcaatcctcaggctgcttcgatgattatagtaatgcagagtatcgtgtaaaaaaaccagaaagttatgcacttgattataaatttacgtgcaaagaaaaatatggtgaaagaatacatgttgtagaaatgcggaaaatgggagatatgtgggggactggactgtttaaatcaaacgcctgtgatttttgtgatgatgtcacaacagaactagcagatatatcccttggtgatgcttggatcgaaccttatagctcagatggtatggggaacagtgttgtgatcgcgcgaagtgctcttgctgatgatattgttaaaaaagggatagcggatggtagcttgaatttagttcctgcttctcttgagcaagtcaagtcatctcaacaaggtagttttaatcataggcataaggggcttttgtttaggataaaagatgctgaatcaagaggaaggctttatccgataaaaagggctagatttttatctaagcagtctattttgtttaatgaaattcaacgtttgcggatgaaaactagagaaaatagcttggctctttgggttaatacgcaaaatgttgatgagtttaatgattcttttacgccatacctgaataaattaaaaagagttactaaaaaaataaaaaaactacgaggtgttaaataa

SEQ ID NO: 189699 - DNA, 1131 bp, Klebsiella oxytoca
atgaaaattgcaatactgacattgcctcttcacgttaattatggtgggaatgtacaaaattttgcattacaacaaactttacttaagttagggcatgatgtggttactatcaattgccaggaagctaagataggtactttgaggtacggcctttctacagcaaagcgcttgtttcagcaacctaagagtagcagacgcttacttttcaccaaaaaagaaaaagaaattatttctcttaaccacaagcgttttatttgtgattatattaaattaaccgaacctgttgatttcacagagttgagtcttttttttaaaaaaaataaatttgatgctgtatttgttggtagtgatcaagtttggcggcctaagtacacaccttgcattgaatcctatttcttaagttttattcaagataatacagcaatcaagaaaatatcttatgcagcttcatttggctccgataaatgggagtacaatagtcagcagcattccatttgtaagtcactcattgaaaagttcgatgctttatccgtacgagagtctcttggtgctgatatgtgtaaagaatatttttcagtaaatgcacagcatgtgttagatccaacaatgctattgacaaaagaagaatatatagagatttttaagagtgaaaatcttcctaatcataaagggaaattatttaattatacattggacgttgatgaagcgaaaaataagttaataagaaatatatcgtcacatgtacataaagatttttttactacatacccagagaaaacacagaaaaaaactttatttattcacgatattaagacctaccagtatccttctgttccagcttggttgaaatctttttttgatgctgactttataattacagattcattccatggcacagttttttctattatttttaataaaccctttattgcactttctaacaaagaacgtggggcagcaagatttatatcgctattgaatatgttcggcttagagtcgcgccttgttactgatgttgataaattcgataaaaatataattgatgataatattgattatgttgaagtcaataaacgacttgagcaatatcgcataatgtctttagatttcataagtaatgcgttgagttaa

SEQ ID NO: 189700 - DNA, 567 bp, Klebsiella oxytoca
atgtcaatcacaagcgttgtattaactaaagaacaaaagtccattattgcagaagcattagaggttatgcccgaagatctggaagaaataaagattaaagcaaatagctataaaaaaacgtcattcagagacgatttctcaatgatattcaaaggcaatatggccacactcgccaggatggatttgacgcccacagcgtttagaattgtgctttatctcttctcagtaattgattatggaaatattatccctgatttttcacagtcacgtatagccaaagatcttgggctgaataaatcaaatgtctcacgcgcattcaaagagttatttgagagaaaaatacttattcgtgacgccatagataaccaagtataccttaattcaaacttgtgtgttaaaggaatccctcgtcgtttcaatgaagatctgatggataaatttagaaagtccagactggagacagaagactttgccaattcgtttaacttttatcgtgcagggagtaaaacaaagccggttaaaaatcccaaaagaagatatcctacagacggcattccatttgattaa

SEQ ID NO: 189701 - DNA, 576 bp, Klebsiella oxytoca; identical to SEQ ID NO: 129506

SEQ ID NO: 189702 - DNA, 315 bp, Klebsiella oxytoca
atggaaattataaaaatttcaataaatgactttaggggtgaaatgggagttatgcgagggtataacgatgattcagaggatataaagttagtaaaagaatattactacacgcaagctgtaaaccagttaaaagcaattcgctttggtatcgaaatcataaaggaagatgaagatttcaatatacttatatttaagataaatgaagatctaaaaatgaggatgttgggcgacatttccgccatatgctggtatcacttgttaaggcaatcgctaaaattgaataataagttgtgggggaggttcgcctccctttaa

SEQ ID NO: 189703 - DNA, 165 bp, Klebsiella oxytoca
gtgaatataaatttcaaatctgaagtgtttagcaagctctaccagatggcagagaaacaggataccagcatccctgtactcattaacaaactaatcgaaaaagtccttagcgaagaggaaaataatgaacaaaacggaacaatccttaaaagtaaaaatcgttaa

SEQ ID NO: 189704 - DNA, 1470 bp, Klebsiella oxytoca
atgaacaaaacggaacaatccttaaaagtaaaaatcgttaacgccatctgtggcagtggaaaaagctacaaactcaaacaatatataaaaaccaatcctgataaaaaggcgctgatcgccgtcccaactcacgatttagcttctcaaacacaatcagatcttcagaaaatcggcattcctgcatatcacaaccaggtagataatggcgagagcgcaacacgatcactaataaacgcgctggatgatgattttgggcgaaacattgttattgtgactcacgaatgcctactacatttttgtctatatgcataccgtgatgaaaggacgcagaagaaattacgtctatttgatatctatattgatgagattccctcggcctggtacggggctgagatagactacaagaatgaggaatataaaaaatcaaactttccatttttagagtggatagaggaacagaacggtttatattttgttcgtgagcaggacagagaaaagtttcttgcatattacgagagtgaacacgctaatagcaagcttttgaaacaagctctgttctctctgctaacaggtcaggggatgctcctggagcaggacaaatattttttctcatttactgctaacccaatcctgtatagcgccctgtgggctaaatcattcactgtgttaggcgctaacgttgggattagtgagtttgcctacgctgctaaagctattctgaatgcagatatttcggtagctgatgatgacttgcagcctgatctggtgcgtcgtgtccacacggacacaaaacgaattgaaatgctccctgtgtttagtcagaaatgcaccaaaaaactactgagtgaacattacagcgatattctgaacgggacacgcagagcgctgagagacggttttatttacaccagcaacaaagatgagcagcacagcaacggtttttactacgcctcacatgctgatgacgtgttagagagtggtgagcgtgtttcgatggcctcctatggtttgaaccattatcagcacctgcataaggctgcgtttctgggatgtgcaaacctcgatgggacaaccattggacactggcgcaggtattgtgatctaaacggctgggattgggcagaactcgaagagaaacggcaagcagcactgaactatgaaaaggtttatcagtttgtttcccgctgttctgtccgtgtcagagggaacaacaataaacagatttatattgttcctgatgtcggttgtgcggaatacctcaaacaacactattttccagatgcattgatcaaaccagaaatgataacaacagagaagaaaaaaagagatacgagcaaaggtgacaccacgttggaaatcgttaaaaactatcttgaacagggactaaaaccaaaacaaattgcacaactaacaggattagaagcgcgttacattagcaatttaaaactaaaatttaaaaaagcagcataa

SEQ ID NO: 189705 - DNA, 276 bp, Klebsiella oxytoca
atgattgattttgaacagcacaagaacattgtagaagaatttattgaacagcactacccactggcacatagtctgatggttgatagctatattgacccggaagcctattattcaaactaccagatgctactagaagcgatgaataaactgcctgaaaatccagatttcttcttggagtggttactggaagctgatgcagctttgtatattaacctgatggaactgattgttatcaccagaaccattcataacgtttttgaacaagtttccccataa

SEQ ID NO: 189706 - DNA, 303 bp, Klebsiella oxytoca
atggaggatagattgaaatatgatgaaaactgtataagggttttaacagatgaggaattagaacaccattccgcagatagcattttagaaattcttctggatgaatatccgaatacttcacctgaccatctggcgaaaatggcggagtgtttagttacattagggtatagtgtcaatgattatagagattataaaaatggcactctggataatattaaactccagacaatgcaggagtggtttagagaaagaaataaaatcaaaaatgtctctaaacagagactctatttattgacaaaataa

SEQ ID NO: 189707 - DNA, 225 bp, Klebsiella oxytoca
atggtaactatcacaaaaggcgtccaaacgtttgacgggaaaatccccgttacacttttggttgatgacgtcgaaacggctaacgagttaattaaactcgctaaagctgcaaatgttcctgtagtagaacaggacgaagatttaaataaatctaaaaataaaaccactcaagataaactaaaacagattattaaaaataaaggggttcctaatggcactaattaa

SEQ ID NO: 189708 - DNA, 1041 bp, Klebsiella oxytoca
atgttttcatatgatgcctataaaatggttgaccttgccccgatttttgaagttgcaccgagtgaaggttacttattacagaatttaaacatctttgataaatcttcgagtgacggaatttatgttatgctcgatcgccttatcgaagataataaaactctcctgaaccaaccgaaaaaacgttacagttttgaacacgattcaacggctcggactcctgcaaacagtttcccggtagaactcttacacctgcatcgcgaggatactgtgagcgctgttgatttccagaaagccggacgcaaaccggggacagatgttcaggaaaccatactcgatatcgtcgccgattacaccctcaaacatgctaaagcatataaacggtatatcgagtctgcatacggtgatgctctgtttcgtgggctggttcagaccccatacactcaagaagcgccaggtattgattatgcgaacagtttcgatgctccgatgatggcagacactattactctgtccaacggctctaccgatgcgctggaagtgtttaatggcttcctggataaaattagcactgctacagatggtttatggactgacgttcgccgtgttgtctgttttgcctctgcaagtttctataacaacctgcgtttccacgcctccatgaaaagtgcctaccagtacgttgacccgtttaacgagatgaatattgtctatcagcgcaaagaggttttgccaaatgtgcaaaccttcactttgccaggactgagcatcgacgtgatcaaggtgactgacccgcttctgactccgtttatcgctgacggtacagcggttatgctgccagtattccagagtaatacaaacgtttaccagcatctgtatggtcctgcctcagttgataccaaccttgcggcgtctggcatcactcaggaatatttttcttatcagtacgagaaagagcgtggtgaggttgaaattgtatcagaggcgtcggtgttgcctgtcaatcacggtactaatttcagtctggttattactgccaattaa

SEQ ID NO: 189709 - DNA, 1815 bp, Klebsiella oxytoca
atggcaactaaggtagaagccgcaacactggttaacaggattgtttataaatctgatttaaatagtttgaaaaaagtcagaaacgatatgaagaagcttcagcaggagttttctaaatcaaacaaccaggtagcaaaggtcaaacagcaggcagataaacaagtatatcaagcacagattaaacaacagcgtgatattgataaacaacagaaacaagcagctaaacaacaagcagcagatgctaaagctaaacagatagaagcccgtaagctggcagcagcccatgcacgagctttgaagttacaacagcagcaggcaaagaaaatcgcaactcagcaggaaaatgctgatctagcaagaaaacgtgccgcttttactctggggcgtcttcagaatatgagcggagccgatcgctacactgcgatcaaacaggctaatgccattgtagatgcatatgccaggggcaataccagtttaaaatctatgaaccaggctctgagtcaacatcttgttacccaacgtagtattgccagaaataattcaaaacaagctaaacaatcaggtaaaaaatcaaaggctggtcggtctggtagttctggctggttatcccaaaatgttaacgcaattgtcccacagcaattattatcaggagcagcaggtgtatacctaggacaacaaatgtatgctatttcctcacaggaaatatccgattccctcgtcagaaatcaggataggaaaatggttagctctatgggtttaaatccccttgaagccgatgcggctattatggagacgctaaaacgaactggatttgttatgtccggtgctaagatttcggatattgcaaaggatgttcaggataagatcggacaattgagtttaggtcaatggaaaactgataagaagacaggacagtcgtcatattctggcggcggtgaaatgggagattggctccagatgatggttaatcgtggaggctatacccagcagggagctttaaaaactcttcagaatgttaaaggtccagttgaactagccgtacttttaaaatcccttcagaagagtgcaaaactaactgaatctgagtttacagctttagcagaaacaattaatgatttctcctatctggcaaaatctgtagattcaaatggtcagaatgtcatcgatactatgaatatgatggtggaaaatgggttagctcttaatagtgctcaacagaaaactattgatggattaaatcaaatggggattgtgtggggagctattaaggattcctccgctgaccactttaccctaggttttgctgaggcgatgaaagaggccaatttaaattctgataatctggctaaatcattttctgggctaaaccctctgatggagaatttaggccaatctgctggcgaactttccagagtatttcttgattttgcaaacaaaataggtttaaacgttgggaagggtcaaacattgccggatgcagtttataacaccgtagttgatggtagcgctaatagtgctgctgactggctacaaaatttgactggttttgatcctcgtagtgttgggcgtttttttggttctgaatcctcagttgcatcacagatacagagtggaacgttaatgaatcagatgatgccagcaacgccagctttgcagtaccaacctgttattcccgatttaaaggctgattttaacctcacagtgaatccatctccagagtttggaataatggttgaggctgtagctgataagcgcattgaatgggcttttgatgatcagaatttccagattaaccaaagtattttgggtcagtaa

SEQ ID NO: 189710 - DNA, 339 bp, Klebsiella oxytoca
atgctcttacatatcaccctgaactcaggcagaacaatgcgcggtggtcttacgcagtccattattgaaatttgctctgtttcatttggagctaaaacgctatatcaagagggggagatcaaaagccaccgcgtggtttcatggcgtccggttcataacaaaggcaccgaagggatcatttttcttcatgaaacagatattgccgttgttaaatctaatgatggaacggtgcttcatgaatggtgtggtgcggaaggtcagaagcaagaacacaaggcggtcaagagcggagatccctttgcaggcttagaagccgctttgctcgcggcttctcagtga

SEQ ID NO: 189711 - DNA, 237 bp, Klebsiella oxytoca
atgcgcctgacagttctcgacgacgatacgggcgaacgcatcgaacctggtcgcgaacgtatcacggtttatctcaatggcgttgaggtaaagcacgttttctctgctgacgatgatagaggtgtggtgattgccgctgtgcacgatagttgtggtcatttcactgtcgagaacggcgaggttaagcggcagacgctgttcggtcaaatgaggatcgtacgcccatccaagcaatag

SEQ ID NO: 189712 - DNA, 264 bp, Klebsiella oxytoca
atgtctaatgtttacgatgacgattttcaagaagatgatgattttcaagaagatgatgattttcaagaagatgatgattctcaagaagatgatgattttcaagaagatgacgattcccaagtagaagaagaagacgacgaagacgaagacgacgaagacggtccggatagcatcaatgagttgtatggctatgatgacccagaggacaacgaggaagctgcctttgatgatgtgatgaaggctacagaaagagacgatacatag

SEQ ID NO: 189713 - DNA, 615 bp, Klebsiella oxytoca
atgactgatatcaccgtactggcgcagagcctgaaagtggcagcagagaatgctattggggcgcatgaacggctcgcagcatatccatatggtgagattatcgatatctctcagcatgaaggtgaactgattgatatcgatatcactgatctgaatgaattcaacaaagaagccaacccggtaaacatcctcgcgctggtagaggcgctggagaagtcagaattacggcttcatgaagtcgccgtggcgtgcgcaacagcagagcaggcgctggagaaggcgcagcagagaaactcagaacttgaagcgcaaaacgaatatatccgtaagcgctatcagcagctcgatctgctgatcgggaaagatatcctggttatgcaggccgcaatcatcgaatggcaggccactggcgatgctaaaaacgggctggcgtggatttataacacgctcttcgggccaggcgaattgcctgatgaagcggagaaagacgcacaggcatatttcgaccgcaaatatgctccgctcgatgaagagctcatggcgcttcacaagtggttttgggaacaaagcgaggctgaacgtgccgccgctggcatcaaggtggaggctgagtga

SEQ ID NO: 189714 - DNA, 1011 bp, Klebsiella oxytoca
atgcacgcggtagagttcgataatgtttcgcggctgtacggcgacgtgcgggcggtggacggcgtcagcatcgccattcgcgatggcgaatttttctccatgctggggccctccggctccggcaaaaccacctgcctgcgcctgattgccgggtttgaacagctttcgggcggcgccattcgcatttttggtaaagcggccagcgaactgccgccgtggcagcgcgacgtgaatacggtgttccaggattacgcgctgtttcctcatatgtcggtcctcgataacgtcgcctacgggctgatggtcaaaggcgtcggtaagaaagcgcggcatgcccgcgcgctggaggcgctggagaaggtcgcgctcgcgtttgtccacgcgcgcaggccatcgcagctttccggcggccagcgccagcgggtggcgatcgcccgtgcgctggtgaatcagccgcgcgtcctgctgctcgatgagccgctcggggcgctggatttaaaactgcgtgaacagatgcagctggagctaaagaaactgcagcaggcgctgggcattacctttatttttgtgacccacgatcagggcgaagccctgtcgatgtccgatcgcgtggcagtgtttaataatgggcgaatcgaacaggttgatgcgccccaggacctctatttgcggcctaaaacggcgtttgtggccggctttgtcgggaccgccaacgtattcagcagcgagcaggcgcacaagctgtgcgcgatggcgggaacgtggtcgctgcgcccggaacatatccggctgaacgttgccggggagatccaggcggagggcgttgtgcaggcggtgcagtatcagggggccgcgacccgcgtcgaactcaagctggcgaatggcgagaagctgttggtgagccaggcgaatagtgatggtcatgccgcgctaaacgcgccgccggtggggcaaacggtgctggcttcgtggtcacgagcggcgatggtgccgctggagagcggaggctga

SEQ ID NO: 189715 - DNA, 2016 bp, Klebsiella oxytoca
atggctggatttgacccggcactgggaagtaatgccccagcggtactgctggataatgccaaacgactggatgagctggtcaacagtgacaaatcgactgttcccgaccgcgcgggagttgatctggatacctggcgcggaatgatggcgaaaaatgacgagattcgtcagaaccttgtgccattgagtaagcagtacatgacgcttgaagcggctcaggctgatattgcaaacatcccggatggctcaacaacctatgtacgcagcccggatggaagtgcgctggctattgagtatataaacaattccggcacgctgactgcgaccggaaggagaatgatatctaaagattacgttgatgagcagtacgaaagtatcaactctaaaattttcgaacttccccaaagtgcaataccatatgctgccggggtgcagtttactaatggtagtgtggccccgtttatgaatagtgacggtcgccttttatatcttgatgaaaatggtgaagagaaattggttgcgccagcatcagatatatatttaagcccctatgcggaaatacctgattatgttttgccagatggctctgtttgtcagcgcatagtcatcgatcctgaaaacaagattgttgaggcgtggaccgaagatggggggtattattttgcgacccctcaggggttaacccgagttggagaaatatccactgctgccgggcaaattaattatgcgtccgcatcagttagcaccatgtttttgaattatggaaccacccgcctttctgtagataacgacgcccgcccggtgatgtatgttctaccgacgtggggacagtcacttgcccagggctggagtacggtaacagacgacacattaatcgcgacaacaaatctgtacccagaaaatatgtttatgttcacgtctgatcgtggtgaaggcctggaaaatcccaaccgcggagcagaacaaattgactccatttcgcctcttaaagaaacgattaacggtggctggaaagagactgcgtgttcgtcgtcggcggcgcacattattaatgccgtagagagtatgacgggtgtgcgaattaacatcctgcgctatgtggccgcagacggcggtaaagcgtatcgcgacttaactaaaggttcaacagcgtggagcgcgctgattcaggggcttattgacgcaaaacgagtttgtgagtcgctcggttatcgcgtccaagtgcttgggctggatgcaaaattgggtgaaacagacacggacggaacgccgcgaatgtatccagaacaatacacacggtttttgatgaatctggaccgtaactacaatgccgaagtgaaaaggatttttggtggtgaccaccccgacgtcaatatttttgtagagcaatgtagttggcagccgcacggaacctgggatagtcgcgttcgtcaggggcaactgaatgctgatgccatcggcaatatcagattcacaggcggcagctatcagtacccgcacatcggggatgtgattcatattaactcgaaggggcagaatagccgcggcgtgcaactggcgcgcgcggttgtttttgaatgttttgggaccggatttatcccaatcaaaccttaccttgcatattggtctggcagtaatacgatagacgttcgttttttaacgtcagttgaaattaccaaggacacgtcagatgccgttgtcaaccaggcgggtctgggagctggaggcggtttccgagttcgtaagctagcgggtagccgggacgaactgacaattactgacgtatcgataaacagcgcagttaaccccgcgatcatccgaattaccgtcactaatcctgatgctgtcagggacgtgcaaatcggatacgccctggcacgcacgggaaccacaactcagtctggcccaattgagggggcgcgcggaatattcagaaccagcgcagggataacgaatctctacactggtgaaactgaatatcaatggcttcctgcttttctaatggagataaactaa

SEQ ID NO: 189716 - DNA, 828 bp, Klebsiella oxytoca
atgctcgtattaaaaacaacaatagcgtcaacaaaccctaacctgcccgtaattgatatcaatccagaagaagtcgcgatactggcaatgaatcccacggcctggataagtgctgattccggcgttacggcttccggggaggcggtgtctcttgtgcgcgataaaacaggtttgtatgagtgggggctggttacccccactacgacgcatccgccaagagttatcacctccggtacgcgcaaaacactgcgttttgatgtggcggcatctaacccagggatcatgaagaaaaccggtaacgagctgacatttcctgcagatggtatttttacgctgtttatggttcaccgcattcccgctgcgaacacggaggggttcacggcaaccggtggtaatatctgcggaaacaacgctgcagaacctaacgttgcaagattccgtttcgggggggatagctacaccggtaataatattttctacaaccacggcagtaaaagtatctcttcctctcctgagagctttccgataaacacatctgtagcagacgtcagggattacgtgtggcatatctcagttgtcacagcactgtctgattcacattcgtgggagtatgacggtgttgtattgcagacaactgcgtacggtgcaaaaccgtacactacagacgagtcacgaaggttgacggttggcggagctgacagcccgtttgcgttacaattccgcggcgacttgtcgacgttaattctgataccaggagtaatcacagctgaacagaaaaataccgtgtatcagtacctgtctggcattaagagcgacctcacggcgtaa

SEQ ID NO: 189717 - DNA, 951 bp, Klebsiella oxytoca
atggcggaaataaaagaagtactatcttctataaaggaaatcctaatcaccccaattcaagactcaatcgagttcagggccaagaatgctttttttggtagttttgtaatttcatggattgtttggaattggaaggatatattctatttcgtcttatctaaggatgatgttctttacaaaatatcattaattaaatcatctctacctgtaaagtttgagagttgcaccttatttccttactcttatattgtcatcccgatcatctttgctacaatacttactttgtcatatcctttgtttatgtacggtatgttaaaagtacatagatggatattcgataaaattgatttatttaacaatcaaagtaacacaagtaaagtcataagaagaaaaaacttaacagaagcagaggtggaaaatgaaggcattaaagctgttatgcaagcaagaacagctttacgaattgcattaatgcgtcaaaaagaggcagagaagaactctaatgttgattctttatggaagaaagagtctgaattgagagcatcaatacatacatttgaatctcaaaaaaaagagattgaattaattattgacagcctaactgctgagtcggtaaaaatggaaaataaaataacaaaattaagccaagaaaatatggatatcttaaaattaaatgagaaatacgaaacgacatcaagagaactagttgaaataagtatcgaacatgacaaaattaagcaggaaaaaatgcacctcgaagagactgttcgtgacttaaaatcagatgtatcctcaatgacgcatggtgtacaaaaactaagcagagtgcgagagcaacttaataaaatagaagaattaattaatggaggaaatggtagtcttggtgaagaggatttgcagtttttattgagatattgtcgcgctgcgattttatcatccaggtcagagtag

SEQ ID NO: 189718 - DNA, 696 bp, Klebsiella oxytoca
atgtttagaaaattagcagctgaatgctttggtacattctggctggtatttggtggttgcggcagcgccgttctggctgcggcattccctgagctgggaattggttttgccggtgtcgcgctggctttcggtttaaccgtattaaccatggcgtatgccgtcggtcatatttccggcggacactttaacccggcggtaactttaggtttatgggctggtggtcgtttcccggccagggacgtgattggttatattatcgcccaggttgtcggcggtattatcgccgccgctattctgtacgttgtcgccagcggtaaagcgggctttgacgccgccgctagcggattcgcatcgaacggctatggcgaacattctcccggcggtttctccatgctctccgctattgtgattgagatcgtcctgacctgcggcttcctgctggtcattcacggcgccacggataaaaacgcaccggccggcttcgcccctatcgctattggcctggcgctaacgcttatccacctgatcagcattccggtcaccaacacatcggtaaacccggcgcgcagtaccgcggtagcgatattccagggcggctgggcgctgcagcagctgtggctattttgggtgatgccgattatcggcggcattctcggcggcgtgctctaccgcaccctgctggaaaaacgcagctaa

SEQ ID NO: 189719 - DNA, 219 bp, Klebsiella oxytoca
atgaggcgaattaacgctcggcagttaaaggtgggccagcgagtaacaatcaggactcatgatggtgaaacgctcagcggaactctggttgataaatgtgactggcaagtcggttgtcctgtggttgaagcaaatgggattaaatatggcattggttatcaggcagaagttgtgagcatttcagagtcagtcgatattgaaaagcaatcccgcatctga

SEQ ID NO: 189720 - DNA, 285 bp, Klebsiella oxytoca
atggcgacagtggagtttgaaacctccgtcgagggcggtttacagacggggagtcgggttattgactgcgcctattccggcaacggaaatccactggatgaagctgaggccggactaaaggcgaagatagaagcgctggaagccaccagagacactgccgccagtgaggccgctgaaaatgaaaaaatcatcagcaaacaaatggcgctcgctgaggaaatggctaaatctgctgaggaggctttgataaaaaatcaggggggtgaatctgatgaggcgaattaa

SEQ ID NO: 189721 - DNA, 666 bp, Klebsiella oxytoca
atgttgaatttaccaactcatattaggcggcttagaatcgttacattagaacaagccgctttggcaatggctggattatttgattgtgatgatatagaaatggctcgtaatggtaattatctaggttggcgaaaggctgaaacttatagagagactattctccaagcgataaaactaaaagaaatcataccgctaaggttaactttaagtagccctatatatgaaaaatatttaacaaaagattcaatgactatagatctcgataaggttgatatcgacatgcaaatatctgacgctaaattcctagctccagatatatggtcatgggcagagagtgaattaagtgagtttgattaccatgacaaatatagttataaagcatctggttatgagagtcaggtaagtagtgaagtcgacaatcaaattaacgacatccaatgggaatctagatttgctgggagaaaacacgctatagaaatcattgcagcattatccaaaactctcgctgaaaaaacaggacatagattcactcgaggggatagtatcaacgccagtgcgttagctgaaatcgttgcttctcatctaggaattaaagatccgcagttacatcgcaagcttatagctgatgcactaaaggaagcaggactaaatagctgcgcggaatag

SEQ ID NO: 189722 - DNA, 1242 bp, Klebsiella oxytoca
atggcacgtataaccactccattgaccaacacagagatccgtgcagcaaagccggctgccaaagaatacaccttgcaggacggcggtggcctttatctgctagttaaacccagtggttcaaggatatggagattctcttattaccgcccacacgataagaaacgggcacttgtcagctttggatcaattgatgaagtaacgctcgccgatgctcgtaaaaaacgcgagttgtatcggtcactcattgcgcagggtatcgatccgcaagcccaccagcagcaaaaacgtgaagcagaagagctgcgcagaggaaacaccttccggaaagtagccgctgactggtatgaaatgaagaaaagccagaatctcgcggcaaacacgataaaagatatctggcgctcactggaaaaatacgtattcccggacatcggtaacaagccaatcaatgagctgacggccagaatgttcgtcatcatgttggagccgatcagagcaaggggaaacctagaaaccctgaaacgggtattacagcgtataaacgaagtaatggactttgccgcaaacagcggtctgattgaggttaatactgctgcaaacgtccgtaaggccttccctactccggtaaaaaaacacatgccgacaattcgacctgagcaacttcccgaattaatgcatacgctatccatcgccagtattgagcggcagactcgcttacttattgaatggcagttgttgactgttactcgcccagttgaagcagccgaaacccgatgggaagaaataaactttgcagaacacacttggaccatccccgccgggaggatgaagatgcgtcgagatcacatcatcccgctatgcgaacaggcgcgggcagttctggaggtaatgaaacacattagcgcccaccgggaatatgttttccccagctttaaaacgccaacattgccgatgagtagccagagtgccaacgccgcattacggcgcatggggtatcagggagttcttgtttctcacggcctacgcgccatattcagtactgcggccaatgaagagggattcgagccagatgtgatagaagccgctcttgcacacgtagacaccaacgaggtacgccgtgcatacaaccgcagtaactacctagaaaaacgtgttgtgctgatgcgctggtggggagagtttgtcgaagcggcatcaacaggagtgacgctggcaatgggtacccgggggatacgggctgtataa

SEQ ID NO: 189723 - DNA, 387 bp, Klebsiella oxytoca
atgatcgataaaaatcgctccttagggaacttcgactggctgcacgaacagggctttgaaattgcgattgatgattttggtaccggccatagcgcgctaatctatctggagcgctataactttgattacctgaagatagaccgcggcttcgtgcaggctatcggcactgagaccgtcacctctccggtgcttgatgccgttattaccctgagccgccgcctgaagctcaccacggtcgctgaaggggtggaaacgcaggaacaagcggaatggctgcgcgaccacggggtaaactatttacagggctactggttaagccggccgctgacgctggaagcgctgatcgccgcccatgatgaaccggcgaaatatttcacaacccgctaa

SEQ ID NO: 189724 - DNA, 132 bp, Klebsiella oxytoca
atgaaacgtataaatacttgttcaattaaaattgtgagcaagtatttattttcaagaaatcgttcagaaatctatgtcacgttaaaattactgcagcatcatcatattattctgctgcccattgcctcatag

SEQ ID NO: 189725 - DNA, 3684 bp, Klebsiella oxytoca
atgaataccaataacatcaaaaaatacgctccacaggcccgtaaccagttccgcgatgcggtgatccagaagctaaccacgctggggatttccgtcgataaaaaaggcactttgcagattgctgatgccgagagcgtcggtgaaaccgtgcgctatggtcagttcgactaccccaaatccaccctcgtccgccgcgatcgtctggtcaaacgcgcccgcgagcagggctttgacgtgctggttgagcactgtgcctacacctggttcaaccgcctgtgcgccattcgctatatggagatccagggttaccttgaccacggtttccgcatgctctcgcatccggataatccaaccggctttgaagtgctggatcatgtgccggaagtggcggaagcattactgccagagaaaaaggcacagttggtggagatgaagttgtccggtaaccaggacgaagccatctaccgtgaactgctgctgacccagtgccacgcgctgcatcgtgcgatgccgttcctgtttgaagcggtcgacgatgaagctgaactgctgctgccggataacctgacccgtacagactccattttgcgcggtctggtggacggcattccgcctgaagactgggaagacgttgaggttatcggctggttatatcagttttatatctctgaaaaaaaagatgcggttatcggcaaggtagtaaagagcgaagatattcctgccgccacccagctttttaccccaaactggattgtgcagtatctggtgcagaactccgttggccgccagtggttgcagacctaccccgactcgccgctgaaaggcaaaatggactactacattgagccagccgaacagacgtcagaagtgcaggcgcatctggcagccattacgcctgccagcattgaaccggaaagcatcaaagtactcgacccggcctgcggctccgggcatattttgattgaagcctataacgtgctgaaaaatatctatgaagagcgcggatatcgtgcccgtgatattccgcagctgattctgggaaataatatttttggtctcgacatcgacgaccgcgcagcccagctttccggctttgccttattaatgatggctcgaaaggatgaccgccggatattcacccgcgatgtacgcctgaatattctctctctgcaggagagcctacatctggatattgctaagctgtggcagcagctcaacttccaccagcagaaccaaaccggcagcatgggggatatgtttgccgaaaatacccaattagcccataccgacagcgcggaatatcagctgctgatgcgcacgctgaagtgctttgttaatgccaaaacgctgggctcattgattcaggtgccgcaggaagaagaagcggagctgaaggcgtttctcgaagcgctgtatcgccttgaacaggatggggatttccagcagaagactgcagcgaaggcgtttattccgtatattcagcaggcgtggatactggcgcagcggtatgatgcggtggtcgcgaatccaccgtatatgggtactggtgggatgaatagtgatttgaaaatatttgctaaaacttactaccctgacagcaaatcagatctctttgcgatgtttatgcaacgtgctttttctttacttaaagaaaatggatttaatgcacaaataaatatgcaatcatggatgtttttatctagctacgaaactctacgctactggttattaaataataagacatttaccacaatggctcaccttggtgctcgggcgttcgggcaaatatccggggaagttgttcaaaccaccgcatgggtgattaaaaactcttatatcgtaaataatcaaccagtatttttccgattaattgaaggtagcgaagagcagaaaaaaaatgaattagctagtcgcgagaaacgttttgatcataccttgcaagaggatttcatgaaaataccaggctctccaatagcttattggttgagctcacccgcacgttacatttttgaaacttctcctgcaataacatcagtagcgacatctgcagttggcctacagaccggtgataatgacaggtttttaaaatattggtttgaagtacaaaacgataaaatatatctaaatgcaattgatagaaagagcgcgttaagctctcagaaaaagtggttcccatgtaataaaggcggggcatttagaaagtggtatggaaaccaagactatgttgttaactgggaatatgatggtattgaaataaaaaactgcgtcgatgaaaatggtaagctacgctcacgccagcaaaattcaacgttttattttagagaaagcgttagctggtctgatgtaacttcaggtgataatgctttcaggtatatacctaaaggttttatatttgatgccactggtcactcatcattttataataatgatagtgatctccatttatgcttagcatttcttaataatatttattgctcatatataacaaaaatactcaacccaacaatacattttcatgttggctatttcaatagacttcctttccctgaagatataaaaaaacactccgatgaaatcatctctttggcaaaggaggcggtttcattgagtgccaatgattggaatggtttcgaacgctcatgggagttcaagaaaaacccattagtagcggagaaaaaatcttccttaagagatagctttatattttacaaaaataactgttatgataattttaaccggttatatgaaatagaatttaaaaataacaagctttttttagacttatataaattacaagatgaatttaatgcttgcccagatgcatcaaccatatcacttgacgtaaatcctttatatagatatggatcatctttaaaaccggaacaatatcaagccagattctgttcagatagtattgttgaacttctgtcttacaacatcggctgccaaatgggccgctattccctcgatcgcgaaggcctcgtctacgcccatgaaggcagcaaaggctttaccgaactggtcgctgaaggtgcctacaaaactttcccggccgataacgacggcatcctaccgctgatggatgacgaatggtttgacgatgacatcacctctcgcgtcaaagagtttgtccgcaccgtctggggcgaggaacatttgcaggaaaatctcgaatttatcgccgaaagtctctgtttatacgcgatcaagccgaaaaaaggcgaatctgcgctggatactatccgtcgctatctttccacccagttctggaaagatcatctgaagatgtacaaaaagcgcccgatctactggctgttcagctccggtaaagagaaagcgtttgagtgcctggtctatctgcatcgctacaacgacgcgacgctggcgagaatgcgtactgaatacgtggtgccgctgctggcgcgctaccaggccaatatcgatcgcctgaacgaacaggtcgatggtgcctccggcggcgaagccacccgtctgaaacgtgagcgtgatagcctgagcaagaaattcaacgaattgcgcagctttgacgatcgcttacgccactatgctgatatgagaatcagtattgatctcgacgacggcgttaaggttaactacggtaagtttggcgatctgctggcggatgtgaaagccattaccggcaatgcgcctgaggtgatttaa

SEQ ID NO: 189726 - DNA, 1038 bp, Klebsiella oxytoca
atgccgatcatagcatttatccccgatgaagaacgacgcctgatgcgaaaagaagcccagaaaacccgtgataaaaaccatgccagacggctcattgccatactgatactacatcagggaataactgtcactgacgtcgctaaaatgctttgtgccgctcgtttctccgttggaagatggataaattggtttactttacatggcgttgaaggattaaaaagtctcaggcccggatgtgctacacgatggccggttaccgatatccttcaagctcttccgctgctggtacaacgctccccgaaagattttggctggctacgctcgcgctggagtacagaattactggcccgcatgattaatcagctttttaatgtgacgcttcatcgctccaccttgaaccggtatctgaaacaggcgggcattgtctggcgcagagccgcaccaacgctgaaaatcaaagacccgcactatgaggaaatacggcttgccatcaaacaggctctggttcaggagcagacggaccatccggtgttttatcaggatgaagccgatatcgacctgaacccgaaaatcggtgcggactggatgctaaaagggcaacaaaagcgcattgttacgctggggcaaaaccaaaagcattatctggctggcgcgctacattcgggtacgggacgagtccactacgtcagcggcggcagtaaaagttctgatttatttatcaatctgttagaaacgttacgtcgcacctaccgacgagcgaaaaccattatgctggtggtggataactacatcatccataaaagccgcaaagtggagcgttggctggcaacgaataagaagttccggttgctgtttctgccgacgtactcgccgtggctgaatccgatagagcggctgtggctgtcgttacacgaaaccataacgcgaaatcatcagtgccggtacatgtggcagttactggaacaggtaaaccagtttatgaatgccgcttcgccatttcccggtaatcaacacgggctggttaaagtggagcgctaa

SEQ ID NO: 189727 - DNA, 624 bp, Klebsiella oxytoca
atgaaagaaattgatatcaaattgaaaattgtagagtttcttttaaactctgaacccgctgatacatacctagctgctgaggttagatttagtttcgggtcaagacgtgctgatatcgtttcaatttcatcggatattgcaactgtttatgaaataaaaagtgaaaaagattccgttgaaagacttgtttatcaaatggatagttataaagaatattttgattactgttatatagtttgtgtgaatcaaaatttagatgcggtcaggaagaaaattagcacgaatgtgggtattattgtcgtggatgatattagtgttaagagaattagaaaggcaaagcgtattgcccggcaagaaaaattatgtttagcgagcactataccagtgaatgaattgaaaaagatcgttatgaataaaaaagggctatcaaaatacgagttatgtatttcgttagctaatgataaatccctctctgaaataaagagcttatcgagaaagtttttattaaataacatcatgaaaaattttgatatttttcatgatgaaattggtgacattttatcaccagatgacattctaacaataacaagaatgcctcctggtaaaatattaagagtttcttaa

SEQ ID NO: 189728 - DNA, 1002 bp, Klebsiella oxytoca
atgaagactcgggacgctgagttaaaagcggtgtcaaaactctcttcaggagtatttgatcatattctaccaatttatgagctaacaaagtcacgaaaagccaaaattgctccagatggagacattcatcgtagaatgctgactatcaaagatattcagggagaaagaccttttattttagatttaacatcaaatgagaaatatattaacgatcaaatccgacaactcgttgatgaaaaagatggttattatgaatggagatacttcatcaatctttatagccatttgaacattattccaatgatacacatctatgatgatgaagatttttctgaagtacggagttttgttagcgaaataacaaaaacaaaaaagatactggcattacgccttccacacaatttagatgattactctatttttatcaaacctatcgccgatagtttagaagatgatagtaaattttatgttattttagatgcaggccaagttgaaggagctactgataaagaagaagagtatttttcaaatgcttgtagtgatctagaaatgtttaatgataaaattgaagatgttatcattgcttgtacatcattcccctccagtccaattaagtatggacacgatgatcgaggtgaaatacctattttagaagaaaaaatattccaaaaaattagcgaagactatcaagtgaaatatggtgattatgcttcaattaatattgagcaaattgaaatgaaaggagggacttttgtaccaagaatagatatttctttggaggataagtttatctataaaaggtatagaagagacgccggaagttatccattgtgtgcagcaatgatggtaaaagatgtacggtatacaccaattgggatatgggctgatcatgaaattagccttgcagccaaaaatacaccttcgggtataagtccatctttttggattgcggtaagaatgaattatttcatgtcaagtcgtgttctattaagaaactcttaa

SEQ ID NO: 189729 - DNA, 543 bp, Klebsiella oxytoca
atggcgtttatgactaagaaattaaaaagcagtggtgtaataagcggccaagacattgatatgacaacggcttcagagcttattgtttttgctaagaaaaacaatattgaaacaagccctttagatgtttcaagacttaccagtttgttaggtattacaatgcgactagagccgatgaaaggagaagaatcgggttctctcaaacaagggaaaagcggcaattgggtaatgacggtaaactctttacaccatccgcatcgccaacgcttcactatcgcccatgaactaggccattttattcgccatactctcaatagaaatagttttacagacacggttttcttcagaaatgaagaaacaaataaaatggaagctgaagcaaatagattcgcagccgaattattaatgccagagaatgaattcagtaagtttatagaagaaaaatcaaatcaagtggctgatatagcagcacatttccaagtgtcttcaatggctgtgagaatccgtgctcaacaattaggcttcagtggacataatttataa

SEQ ID NO: 189730 - DNA, 705 bp, Klebsiella oxytoca
atgtcgataaaagataaggcacaacatggaggtttaagccctaagccaaaactttgccatcatagtaaatggattacttttctatccattgctttctgcaccttagtaactagttttttttggctcttcattttctatttagttctacgcccaagtttttactcttacattggatttgctgataattttgtgcttaaaaagcccgatataatttctgatcccaagactttacaaaacatcggcaaaatggtcactgatggaacccttttaagtcttgacgatttttggtctttccaaagtaatttatatcaaacaattattactgtgctcattgcactcaatgggatagtagctgcgttttcatttcttattattaaaaactcttctacagcaaaagcaaaagaagaagcgagagatattgctgttgtcgaagtaaaccaatatgtagaaagttcaaaatttgaaaaagaaataaagaaaattttatacgaaaagattgagcctgtacaatttgatttattatctcaaattagttcaattgacgagattaagcttagccaacaagaacacaatcagtcatttgaaaagcttgagcaagaactagatggtttaaaaaggaatcttaaattaattgctgaaagcatttctttaaaagatacctcagatgaagatggcggcaactttatcttaggacggagaacttaa

SEQ ID NO: 189731 - DNA, 186 bp, Klebsiella oxytoca
atggatactatttggcatgacgaaaaagaagctttacctgtaaatgaggtaggttcaccttgggcgatccttgcgccggctcgcttcgttgctattaaatattcgtctcgtcaatgttcctgggccaaggggatcacagctgaccttaatggcgtattcttcgtcccccattatcaatgtgaatga

SEQ ID NO: 189732 - DNA, 1035 bp, Klebsiella oxytoca
atgaaaaacaaatcgatcccggatattgtttatttaggcattgatattggtaaaaattcctttcatatcgtcggcctaaattcgagcggtaaacctgtattccgcgcaagaatgacaagagaacggctcattgattttttttcccgctcgtcatcaatgacggttggaatggaggcctgtccaggcagtaattggctttccaggaaggctaaagcatatggacatctggcccgaattgtccccgctcaatttgtaaaacctttcgtcaaatcaaacaaaaccgatattgttgatgctgaagctatcgccgaagccatttcacgtcccacgatgcgcttcgttgcaccaaaaactgaggcacaacttgatttacaggccttgcaccgggttcggcaacgtctggtttcacataaaacatctgttatcaatcaggccagggcgtttttacttgagtacggtattaccattggtactggtgcgacttattttgtccgcgatgtgccggataaactgacagatgaaaacaatgagctcacgcctgcaatgcgcaccgttcttaatgagctttggatcgaatataaagctatcgaagaacgtttactgctgctacgtaaaagaattgagcatcatgccagtgcagacgatacggcaacgaggctaacatccgtacccggtattggtaaattaaccgcaacagcaatcactgcttttgccggaaatggcaaccagtttaagtctggtcgcgatcttgcggcctggttggggttggtcccgcgagaacattctactggtggtaaacagcggctgctgggcatcagcaagcgcggaaacccctatcttcggaaattacttatccatggtgccaggacatgcgttttaaaccttaatcgcacgaaagatcgattgggcgcatggatagataaaatggaggccagaggtatccaccgaaataaggtgatcgtggcactggctaacaaacttgcacgagtggtctgggcagtattaactcataaatcgacattttatctaccataa

SEQ ID NO: 189733 - DNA, 1389 bp, Klebsiella oxytoca
atgtacattgataaatttttaacagaatatgatgagtcgctgaccggcgagatgaatatcgaccctttgggccaacaggttatctggtcatcctggggacaggacctctttcacggacgcatcacttctattgccaatgatgtcaggcagtatacgctcaacctgctgcaccacagcgtcatccgaaaaataatgctggatgatgctgtgcaaaccgctggcgcgatgaaaatacgctatcctaaaaagcagctcaaagagtttatcgcggcaagccttatccacctggagaatatttatatttattcgatgctgggggcggaacagggcgacgtaacgcttgcgggggtgcaggggattaataaggccagggcaaaatggcatacttcagataagaaccctcagctcacttttggccatcagaaggaaagtgaactgctgacaaaccagcttgcgctcggtactaacggccgctataaatcgccaatgatcagtatgcgttttttcacgacgacctacgactatgatctgccggatagtaagcctgtatgggaggccgctgaagcctttattcgccaggtccccgagttacaccaactgcatgctgatgtactgacctatcttaagtcgctgatgtgtgaagcaagcaaggatgccctgacgcccttcttcagtaaaattcccgacagtcttaaaactctctacgccagcgtatttcgcaaccctaaacatgtgggcaactactcgcaggcattttggctcgccagaaccggtctcaataaaaatggtgcgggtgccatttatcgggtactggagcgagaacgaaaatacccagagcaatcacttttgccgatttcgaatgtttttcttgaggccaggaagaatgcctatgatatgacggagctggatgcaaacgagcggcagacattaggatacattattgaggcagaaccgtttctgtctttaattgacctgatgttcacaggactaaggcggcagaaccagcagagcctcggcgacttcgcgctattctggcagcggaacggactgacgactcagagtttacctaaactgtcgatgaggcttgagcgaaacaatgagctggtggcgtcgctttccggtacgcccaacagacgctttcggcaactgcttgcgctagccagtgggccgtctctggaggagcaggtgcgtgggctgctggcgtatcatagtggattgatggaagcacgtgggcagtttccatggcttatgcttgaaggcaatatcatctcgctgcagactccacctgtacctattgagcaggaacgtaaaagtagcgattgggtaaaccattattacataccgcaattccgtcatttactggatggattatggggaggtgaagtgtga

SEQ ID NO: 189734 - DNA, 1908 bp, Klebsiella oxytoca
gtgaagctcctcaatgcgtttaaagagcaaatagcgcagatggggccgctgaagcgagtctggctcacgacctttaatctcgatatcgcgtttgtcgaaagccggattctgccggccgtcctggatatcgaccagcctgtaggccgcatggactatgaagggctacagcgggcattaaatgaaagcaatattgattttcgcgtttattgcgatccgcgaatgatcgccctggataaacctaaaagaacctcaattgcagtttatcccgtgtcggtgcgtaagcttgctgtggatgaagcattatatctggacggggagcgtagcctgtttcatcccaaggtgttttaccttgaagataagaacaagaaaattgtcctcggtgccggaagcgcgaatcttacgctcagcggctgggggcggaatcaggaggccgtggattttcggacggtttccagcaatgcgcagtatcagcagataaaacagttttttacggcacttgatgaaggggttaacagcagtaactttttccctgtgcgtcgtagattctacggtaaggacccggactggacgtttattcatagtctcagtacgttcacgctggtggacgcgctaagcgcgaatggtgaattgacaacgctcagcgtctggtctccttatcttgccgataatttgcctgctctgatagcgaagttagcagggcctgatctgcgcgttgagctggtgcctgatcttgctgcagggcaattcattcgtacacgctggggagaggagctgcaggcgctaattacggtacagcgattgacgttgtttaaacctcccgccgaacgtgatccgcgattaatgatgacgcacgccaagctgtggctgggagagagtacaacgggccgtcaccttgcgataggctcatggaacttcaccggaccgggctgcagtagcctgagggtaaaggggagaaatgttgaagccgggatcgtacatcccgtcagcaaacggaccacattgtgctcgacggtatgggccgtaaatgagggagactttgccagtgaagaattgctggaagaggaagccctggtgccgggcagtctcccgcctttcgacttgacggttatttttgactggcagcgctgcgaatacaggcttaccggaaagtggtttctcggcaagccgaaggaggggcaccggctgcttctgcccgggatcaaaaaaccggtcagacttacctggaacacagttgacggtacgctggcatctcctttgctgatagatgtcgagcaaagcgcagcactgctggatagccctttctacacgctgcgtaaaaccggtgaagcggactggactggcactattgttgaaacgggctcagaatatcgccgcgccctgcgctttaaatcactggacgatgttctcgacagttatatgaattcctccgaacctgaacaaagcgataatctgatactccgcagcgtggctggtcaggatgaattattcagcgaggagagcgacgagacagagtacctaagcccggaagctaccagctacttccggctgtttcaggcaatgcggctacgcagtaaaacgttatcagccatggataatagagaacaactacaccgtcgcctgttcagcgaacccggttgtctgctggaactggcagaaatggtcaaagcgcgcgttgaaaaggaacccgcgtcagtattcaactggtttctggcacatgaggtcaatagcatggctgctctggcacaggcgcgattggatgataccaacaaaaaaaatgcatcaagcaccgcagatatttccgcgcatcagtggagttcactgcgcattcctcccccccctctgaagggtaaaaaaagtacccaactttatctggatatcatccgcaaagagtgtggatatgacaactaa

SEQ ID NO: 189735 - DNA, 2649 bp, Klebsiella oxytoca
atgacaactaaacaaccgcagcctgttacgccttattgtgtctcggaaaagatgaactttgatgctgccgaccccttttggcgctacgaaacgggcagtaccagcatggcggcaaagcaggctgaaggtgtagctggcctgtggaatttgcttgctgatcagcaggtagcgctgcttgccgatgaagtgggtatgggaaagacctatcaggcaatagcagtgatgctgctaatgtggcaggagaagcctgatgcgcacattctggtcatggccccaaactcgacactgtgcaacaactggaaaaccgagttcactacctttattcataagcatcttagaatgaaagataacccctttacttctcataagggaaaggaaaaatacgcgccgcagtttcatggtcggctggaagaactgagcgctgctgttaaagaaaagtctcattatttctttctgaccactatctattcgttgagcggactggtaccgaaggatgaaaaagacaatgcattttttgtcgctgagaagtatggaaaaatatataggcaggaaataaaagatgctctcgatggtgtgggttttgatttgattatcatcgacgaagcccactatttccgcaaccgtaatgacagccagcgagcaggtgcggcacgtacattctttggggaagggaaagaccggctggcccgaaatgcgctgctgctgaccgcaacgccaaatcattctgcggcacggaatatatacgatatattaagttacttcacagatattacgctgaagtatgacatggatgatgtacgttctttgatggagaatttcgccatccgtcgattgcggaagatgtgcgggagcgataatcagcattacagtaaatatgcatatcgtcgggagcaggcaagtgccgccagtttttctggtagcgctgaggcagagctgttttttgccttttatcaaaaaaaactggttgaagaactggataaagagaacaaaggcagtggcgacaagcggatgatgtatggatacctggagggttttgaatccactggcaatattgagaatgagcaggatgcacatgataatgagcatactcaaactgattttagccaggcgctggattcgtctctgttaaccgggctgacgcggcagtttcatgatgtttaccaccgttttccggatcatcccaaatacgatgtactggttaatgagtgtatgtccgacgatccctttgcactccaggcactatatagccgcaagcatctggtctttgtccgccgtatcccgtcggtgcgcgagataactcagcgtattaatgctcgctatgatgagatgatggctgagcgattaattcggctttggcaactgccgccggaggcgttggagaagtggcgcagtacgcgctggtcccgggaagagtatgaaaacctgatatcggaaaagactatcaatactcaggatacagatgagcctgcagaggagtgcttactggacgatgatagcgaagaaaatgaagcaaagctttccagcaggatcgcggcgcttttcgtgacaaaaacaagtggcatagtgcggcgcacggactgcagtaacgtcagcctgcgctttcgccgtccggagagtttgttatcgctgtttctggaacctgcccgcgatggtatttcggcaacttatacacagtattatcgcagagagtccggagagcggatgcgtgatagctacagtgatgccgcgagggatattcgtcaggaaatgctggtggagaatgtttcaaactatgcccacccgatgcctacggcctggggaattatgttcgatttacttcctgagcagcatcaacatcagatcaggacatggaaagcgcagccgaacggcatggcgatagtcgagaactttgccaactatctgcgtattggctacctgtttgccagcccggtgatggtcgaactttactgttggtttactgaatttaaccgtgtatcccagcgcggcgatgcacagcagcgctacctgcaatttattgaatgggtgacgccgaaattcaaggattcgctgatactgcgttatttctcggcagccatccagacatttgaaacgctgtgtgagaagattgttggtcaaccgcttgataatagcctttacgcctggcgcgaactcagcagcctgaacagtccggcatggtacgccagcggtgagtctcacaaccgtgagcggcttatacgcggatttaactcgccatttttcccggatgtgcttgtggcgacttcggtgatgcaggaaggcgtaaatctgcatctgcaatgccataaagtccatcattacggcattgcctggactcccggcgataatgagcagaggaatggtcgcgtcgatcgcctctttggccgcgtgaatatgctgcttaaagagagcagtaatgccgagatgattattaattatccctatctcgcaagctcattcgatcaggatcaactggcttcattcattcaccataagtacgtcgtggaggaaaaactggataactgtgaaacacatagtttcaatcgagaaattgatacgaaagagaatacatcgggctggcatcggtggctacgggagcctgtcagggatcgcgaagttgaagatccttacccaacgaagtttggtcaccagtag

SEQ ID NO: 189736 - DNA, 1452 bp, Klebsiella oxytoca
atgaaaattattgaccgccatgatgctgtaagtgatcagattatcggtagtgctgttaatgcactcaatcagactaggatgcaggacgaaatattcgaattagagaggcaagctcgtgcgtttgagaatgcgggcgagcaaatgctgaaggttcgtgattttatcgcttcacccaactccatactaggctccacaggtaccaagcatggtgaaattgccgagcaagtagaagtaggtgtgcgtaacgcccgtcaggcgctcgaagagagactacaggatgagtccgcttttcgcgcaacattcgacggggttggccggacggcccctgcggactatttaattgatggcgttgaagtgcaatcaaaattcataaacggcatcaataataatctgacacatgtcctgaaacacatggaagactaccctgacttcacccaaaacaaagcgttttaccatatcccgaaagatacctggcaaacgatacaggatgttatcgacgggaaacctgttgagggaatgaatgagagaagtctgcaggccatcagggaaaaggttgcagaaattgaaaacgcaaccggccgatcatttgcggacgttgtacgtccaggagactctaattataaagatgtccagtgggggaaaatcgatgaaacactcgataaacatgaccaggaattagctgagaaaaatgaggtaaaaaaagccgaaatcgttgaagaacaccaaccttcgctcaacgaagccatgcgagctacggttatgggggcagccttcggggccacttttgctctcggtacgggtatttaccgcaagtatcaagacggtaaaaatatcttccgtggcgaattcgatacagaggactggcaggacgtagggctggatacgctgaaaggagcagctatagggggcgtgtccgcaggggctatttacaccctgacaaattacgcctcaatgggagcccccttcgccagcgcattagttaccgcaaccaagggggtagcaagtcttactatgtcttatcagcgtggtgagatagatctcgatgaatttaccgatctcgggcttatagtctgcgctgaatcagccattgtaggcgctatgaccattgctggccagacattaatccctgtgcctgtattgggagcactgattggatctatctcagggaagtttctggtcactgttgccaaaaatctggatggcaaaaccagccaggccttgcaggcgaaaatggacgatttcaaccgccgtttgaatgacattgagcagcgggcgcttaagcgtattctgtccgagtttgaggcattaggtgagctgacaactgcagcattcaacgtggaaaacaaccgccagttgctggaagcaagcattacgctggcacaagcttacggtgtcgataaaaacaaaattataaaaaatgcggacgatttggatgcttttatgatggcatga

SEQ ID NO: 189737 - DNA, 846 bp, Klebsiella oxytoca
atgttacgtggttccgaaagagaaaccgctttatcaaaacttaaaaaagcaactgaccgttatgaggctcaggcaaaaggtacgcaggaagagattacaaatctattcctgttgcgtcagaaatgcagtgaacaacttattacacacgtcgaaaactatgtgagtcaactggcaaataaaccaaaagaattcgataaatcctggagtgaactaaaagcagaaattgttgagttcgacaatgttgttgaaaaactagaggaggaatatcgcacatcgcacgttggtaaagggactgcaacggcgggagttgccgtcggagccggtgttgcagcattcgcacctacggcagcgctggcagtcgctacgacctttggtacagcatcaaccggaactgcaattgccacattgagcggtgctgcagctacaaatgcagcactggcatggcttggcgggggggctttagcagctggcggcggtggtatgtctgcaggcggtgcgctgctagcgctggcaggtccaatcggttgggggatcggagttgcaggtattgcagggggcactcttctggctcgtcgtaagaacggcaaaattattgacaaagctcagcaggaagagcgtcatattcgggctaaaactagcgaattgctggtaatggaacgtggtgcgaataaattgaaggcactaacatctgagcattatcatggcactgaaagcattattgatgggctggagaagaccgcaccgcgtgactacaaccagtttaatgcacatcagaaagatcaactcggggcattgattaaccatatccatgcattatcaaaactgatcaacaagaaaattcagtga

SEQ ID NO: 189738 - DNA, 225 bp, Klebsiella oxytoca
atgaacaatcaaaatactaccgcagacatcgattttactcacgataaactggtcgacatggctttcatcacatcttataccgggctgacagacaaatggttttataagctcatcaaagacggtgaattcccgaagccgattaaattgggccgcagctctcgctggactgaaagtgaggttaaaacgtggttaaaacaacgtattgaagcatccagagggcattaa

SEQ ID NO: 189739 - DNA, 615 bp, Klebsiella oxytoca
atgagtaaaaagggcataatcaaaacacaatatggtgatggtatcgaaaactatcaaaaaagaataaaagaaactatagtgaaatctttaaatacccaccctcgtacagcactaattagacttgacctgaggtttcccggggaggatatgttttatcgtgatgatcctgccgttatcactcgattctttaaatcacttaatgaacgcatccctgtttatcttaaaaataagcgaaagtcaggtgtaagggcacataatacaacattgcgttatgtctgggttagagaatttggtaaacaaggaaagcactatcatatcgccttattagtcaataaagacacgattcattatatgaatgcattccagactgataaagggaatttttatacaatgattgctgattcatggctaagcgctctggaaattaacaatataaggaaaagatgtctcgtccatttaccacttaactgtacttattatctttataaaaaagatttaataaatggtgacattgataaagtttatgagtctatcaaaagtcgcatggactatttaattaaagtcactcaaaagaaatcagatggggagcgtaacttcggctgcagtgtgaagtga

SEQ ID NO: 189740 - DNA, 174 bp, Klebsiella oxytoca
atgtcgctactaattgctactgcagtgtggggtacagtggttagggtattttataatgtgttagatatgaagtatgagttttttattattgatatgtcatcgttaatagtgatgttaacaatatggattattgtgggtgttagtatatattactataccgacattatttcgtaa

SEQ ID NO: 189741 - DNA, 942 bp, Klebsiella oxytoca
atgcaaactcagattagagtaaaaaatctccgggaatgccgttttttctttatgtatataaaagataaagtattaaagtcagcaagcatcgtttttgatattaataaccctgacatcgctctttcagagcgaataataaacaacactcttgaacgattttatccagatgctccagatcgtgcgttattcattagagaaatggagttaatcttaagtacgacggttctcccggagaaatatttttcatggctaaatgatgacaaaagggcagcttactggttttggggtaatttatgtaattaccctgattttaatgactcgattaataaaaaaattaactcaactaattatacaaaatggtatgaactggcaaagctaactttagtcccaacagatcatagtgaacgatataatgcaataattactgtcattgatactatttgcatatataccaataaatctccacttataagagagtggttgaacgataaaaaactattctggggggaagcaatccctctgttgagtaaatttaaatggctgactccagatgatgaagattccagtaggtggataattaagcttttgggcggataccagaaatcctattgcgagggtaacaggagtgttactccagtaaaaataccatctcctttgagtgctgaggagtgttattataccgtatatgctcttattgacctgtggaaaattcccactgattatcaggataaaataataaccagaatcaataaggctttttatcaaaaaacattcaggaaaaacctctcaattcaaaagaatcgaaaggatatcagcgaagaacatcaaaaaagactggatacattagttaagttttatcgttctgatagaatgtcagttattgaaatgctcattgatgacagattaagaggtgttgaaacaagaatatcaaagtacaaataa

SEQ ID NO: 189742 - DNA, 165 bp, Klebsiella oxytoca
atgtccggtaagttgcccggtacgacgcaggcgcaacatatgtttggtgtgctcccgtcggccctggtcacgtacgcgggtctggcaggcaaagaaaggctcaaaaccttcccgctgcagattctcaagaatagtgatggtcggtatccaggtgtatcggtctga

SEQ ID NO: 189743 - DNA, 384 bp, Klebsiella oxytoca
atggcaaaagtgtcgttagcggtgtttgtgaaatctgcgtttatctccagagctgtgctgtttgttgtggcctttgccatgatgagcgctttgctgctggcaaaaccgcagtcctctcagatgtcatcgatgcagaccaccgaagcacatcagcacgataatgatgcttcccctgatgagcacaacacgctcttatttcattcccacggcaatgtgcatcacctgaatgccgatcattctcatgacatcaataagctttttgcactgacggaattctatgtctggcagggcaaaaacagagctgtgtatggtcatggaagtccccgtcattatttcgtttccctgtctactcctgagcgtcccccaaggtccgggcttgtctga

SEQ ID NO: 189744 - DNA, 2010 bp, Klebsiella oxytoca
atggccgacaacgaaaagcttggctcgacatcaccacagatattgctgaagaacgcaaccaatctggataagttagtcaatggccgcgaatcagagtcattgccggatcgtttcgctgtacttcgccgcacctggtacggtatggagatgatcttcaatcgcttcatcacgtatatcacgggacgtggcgaacaggcggtaggagccattggctggcaggagctgggaaactgggcgaccggcctcacagtcgataatcgccagcaaatcgtttactacaatggctcctggtacaaataccttggagagctggaacatgtcattgcgggggattctccggagaacgatggcggcgtgtggtcggctgaaaacccaacggggaaatggtcgaatattggtgatgcggctcttcgctcaaacctgggttcagacgaactgggtgtggcgtcagtcaactacatccacgtgttcaatgttcccaccaggccgtttgcttactatctgtccaaaaattccggcaatgtcatgcttgcaataagagaggcggcagcttcgggggaatccaccatctttgaatccgggcaaacttatgacattagcgagaacgacattccattcgcgcagaggactgagttcaatggccctgatggtggttatgttaacttcaacattaccaatccggttgggacttacggcacttttgatttacgcacgagcaattctctcggtggcggacgattcaaccggtttcgtaatctccggtttcgataccccaatcaggtaaaggcattaaccgacacaataactgcgccagttacatacccgcctatttttcacggtggtgcgttcgaatcccgatttgaatatcttgatgtcggcaacgcgtattatgcgtttcgactcggtgggacagtcaatgatgtggagtccgggtcggcctctcgggtagtgttagaccagataatcggtgctcctctttatatggggttatcattaactcaggtgctggacgttccaaaaatagaagatattcgatggaattataattatatggcaggatcaacctcggcgtataattacgacattacattgaaacaatggatgcatgacaacggcacagctttccgctgggggcgaattgactgggcaaccatcgtaaatctgtttgcgtatggatattatcgcacgttcttcgagcagtcctggggttttaccggttccgcagacagacttaaattcattggatgcaccgccgaccacagcgtgtaccctgtttatgctcagaacttttctaatcgcctgacctttgtcgcgtgtggttttacgggagataaaagctccgtatttacacgagtagcacctaatgcaatttatattggcaatgtaggcgattcggaagctgtagtttcatttatcggatgtacgtttaacgacttttcagggtcggtggtccagtccaacggcacacaagtggaattcagcggtgggaaaatatatgactttggttatgactccagttcatctctaatccgtaatgctattgaactgaaagctgcgacgacagtaaaaattgacggcaccaaaatcattgcgtcagctggctcctatacacgttgtgtgtatgacggcgggcacggtaattcgaaattgtatataagtggtggcgctgagcttaagggcgcgacatacgaatcataccgctgggatggcggcgttgatggtgggaacaaagaatacattgaccccggcgtgacgatcgagggagctacaacctctgttaatattcgcggcgtcgtttctttttaccagcagaaatatgaatacccgggtaactccatgcctatttccggtacataccaatccggtgatgaagttaagaacaagttcttaacaatacaaggaacagcgggttctcgttacgttattaagagttggctacgtgtaaccacgggcagttcacacgtcttgaatgttgactgggttgcgcagaaagtacctaccggagattaa

SEQ ID NO: 189745 - DNA, 387 bp, Klebsiella oxytoca
atgagcattactatctcgagaaaaataacacaacagaactcggcgtcggcgctgggttttcagattgaagaggctgaaggtgatattgatgtaacctataccgcaaaatcaatcgtttttatctctggtgatatagtcacggttgagtttgaaacatcggtggcaggttacgagaaaaccggcattcgtcatattgattgcccgtattcaggtggcgataacccacttgctgatgcagaagcggcgctcaaactgaagatagaagaagtggcaattgaagccgccgaagctgcagcgaatgagcaacttattgcagagcaaattgcgctggccgaggaaatggcgaaagagactgaggcagcgctgaaaaaccaagtacctgagtaa

SEQ ID NO: 189746 - DNA, 201 bp, Klebsiella oxytoca
atgttgtatttatatgaagcaacactacctgaagacaataatgacagtgaagtcaaaagggcttatgaaatatcacccatcgaaaaagatggctatatagcctcgtttaacttcaataaggcggaggaagccagccaggccgttgattcctggctggcttcacaaggtgttttaagccagtatctggtcaacgccgtttag

SEQ ID NO: 189747 - DNA, 1923 bp, Klebsiella oxytoca
gtgtcgttgagagcgatcgaaccgacctatgataagcagtcaattacactgcacaccgttgtgccagatggcgccattattgatgccgtattcttttatgatgcttcagataccacatctgaagacgacgagtatcgcattatagtgacgcctggcggtgcgcgatgggtaacggattgcgctgatggcattgatatcaggctgggtggtttactggccgatggcagtaactttggtgctgctgcgaataaaatcattcggggtgaagttaaaaaagtcgtcgattcaggcacaacatttattcgtgctgtgcaggttatgcgtgtgccgcaccccacatatctgtctaaaaacgcgtattacacaattgatgagcagattgtcattccgtcatttatggcattcgttggcagcgggtttattgacttgcgaacgtcgctcactgatgattgcattgtcatcagaaatgaagatttcccgggtttgactgccagcatgggcggatatattcagactcagggcttcagtatattcaggaacaaatcagggaaattccgtattcttggtccaggtaataccgtcagcacaggctgcggtattgctatcggtaacacaaaatcaggttatctcactgtcagggatgtatttctggcagatgtgatggtgcgaaactttcgtgttggactggggttttatgggttcgacacttacattatcaccgtcgaacgctgcgattttgttcagaattactataatattgccgggctgggcctcaacaagagcaactcaggggagcgtatattaatacgctcatgcaccattggtaattcgcgctcccataatatttactgggacctggttggatggaatatcacctttgacaataattcctatgattatgccggtggtgcacttttgtgtttagccaatggagcaagagcctgtgtttttagatttacaaacggttctttcggtgagggatatggctcttatcttatcagtcagaacgcaaccgctccggaatgggattatgacaacggaaggctgaataaagtctatatccacgcctctttctttaatgcgcagaaagtggcaggcgaattttcttcacggcggcaactcgtggcgccctcttcaactatgctcgggcatctggagattgttgattctgattttcgcttccctgatgtggagtcagaacctcatgtagcgattctggggtataacgatggcacctcgtcacgtgttcgcggcttcttccgcaacgcaaacacaccctatgaccagtgcctgatgcgttatggtgacagccttaactcaggtttattccgtcttagcggtaccgagggaggcccggtgacattagacccggcgaccaacatgaccttcagtttaaccggaggcatgacggcaacgtatggcgggattgacccggatgatggtctggtggttgttaatctgacggcaaccgccgaaacggatacgcttgaaatacgtaaccaggcgctgctgacgcccgtgaaccggtttaatcagatattttcagcgctgtccatgaaaatgagcgcagtcactgccggtgctgtgacgctgtcaaccaagctgtattactacggcaagccaacctttaccactacgctggagagtagtgcttatcagacatcgaggacatttaattatcttgcttcagtcatcggcgcaacacgaaacatcagcgagctactgactgctgaaggaacacctttgaccactgaaaaatatgttggtgtacaaacgtattgtgaggtgggctatcagtatgcgctaggaacactgaaggcgtcaccggctatacgtgtctcaggatacgtagggacgatgcagattaagctgccggtttactggttgcccaaaggaaccgaagctatctccacatctgattga

SEQ ID NO: 189748 - DNA, 639 bp, Klebsiella oxytoca; identical to SEQ ID NO: 94137

SEQ ID NO: 189749 - DNA, 597 bp, Klebsiella oxytoca
atgactatacaggttggaatatatatttttgataatgtcgaagttctagattttgcaggcccatatgaagtatttacctgtgccaccagagttaaccggggtgatactccactatttaatgtttttacagtaggtgagtcgttaagccctgttcgtgcaagggctggactgaaaatagatcctgatttttcaatggataaacacccggtaatagattgtctgattgttccgggtggggtcgtaagcgctgaacttgttaagcaaaacgtgcttgagtggattgctaagcaagcattaaccacgacgatagccgcatcggtatgtacaggtgcatttttactggcagccgccggggtcatggagggaaaatcggctacaacgcactgggaagatgtgacagatttacgtgctatgttcccttggctttctgtaaaagaaggcgtgcgatgggttgatgaggacgaaatcgtgacttcggcaggaatttcagctggtatagatatgagtctgcatttagttgagcggtttaaaagcagggaactggcattattaaccgctaaacaacttgagtttgactggactgagagccagccgtga

SEQ ID NO: 189750 - DNA, 1452 bp, Klebsiella oxytoca
atggacggaatgaaaagtcatactccggtggtggatcagctcatcggtagtgcggtaaatgccctcaaccaggcgcgtattgacgatgagtttttaaaactctctcagcaagatattgcgtttgatctggctcgtgaacagatgcagaaggtgcgtgactttatcgcctctcctggcaatattatcggcagcatgagtaccaaacatggcgagattgccgagcaagttgaggtggccttacggaattcagagcaggccattgaagaggggctacaagatgcttccacttttcgcgccacgtttgagggagtgggccgcttcgcgcgggcggattatctgattgatggcgttgaggttcagtccaaattcattaacggcaccaacaataacctgatgcatgtcctgaagcacatggatgactaccccagtttcggcaaagatggggcgttctaccatattccgaaagatacttggcaggagatccaagacattctcgacggcaaacccgttgaaggactcaaatcgaccacgattgaggcgattaaagcaaaagtcgctgaaattgagagggaaacacagcggccttttgctgaagtggtgcgtccgggcatctctgattataaagatgtccagctggggaaaatcaacgagacgctcgacaagcacgatcaggaacttgccagtcaaaacgacgcgaaacgaactcaaatcatcggtgatcatcagccgtcactggccgaaggaatgcgcgctacggcgatgggagccgctgtgggtggggctttcgcgctcggaaccgggatatacctcaaataccgcgacggtaaaaatatctttcgcggagattttgatgcccaggactggcaggacgttgggctgaattcgctgaaaggcgcagctgtcggtggcgtatcagccggggcgatttataccctgaccaactgcgcgtcgattggcgccccttttgcaagcgcactggtcaccgcgaccaaaggtgtggcaagccttgctctctcttatcagcgcggggagattgacctggatgagttcaccaatctcgggcttattatctgcgcagagtcagccattgttggtgccatgaccgtagcaggacaggccttaatccctgtgccggtactgggggcgctcattggctcgatttccggtaagtttatggtcaccgtggccaaaagccttgacggtaaagcacgtcatgcgttgcaggcacgcatggatgagtttgcccgccggttaaatgctctcgagcaacaggtgcttaatcgtatcttgtccgaatttgccgccctcggagaactgacggcagctgcctttaatgtcgataataaccttaagttgctggaagcaagtatcacacttgcacaagcgcatggcgttgaaaaagacaaaatcattaaaaatgcggatgatctggatgcgtttatgacggcctga

SEQ ID NO: 189751 - DNA, 846 bp, Klebsiella oxytoca
atgttacgtggaaaagaaaaaaaacaagcattagaaagcctttccaaagccagaacgggttatgaatctcaggcaatggatacccagaatgccatcactgacctgtttttactgcgtcagaaatgcagcaaagacctgattgcccgttgcgagcacttcgtcaaccgtctggcgaacacgccaaaagagttcgataaatcctggggtgagctgagagcagaaattgctgagttcgacgatgtggtcgaaaagctggaagaagagtatcgcgcctctcacgtgggtaaaggcaccgctgcggcgggtgttgccgtgggtgcaggtgtggcggcgtttgccccgactgctgcactggcgattgcaactaccttcggcacggcctctacaggaacagcaatcgccacactgagcggtgctgcggcaaccaatgccgccctggcttggctgggtggcggtgctctcgcggctggaggcggcgggatgtctgcgggaagtgccctgctggcgcttgcaggcccggtcggctgggggatcggcgcggtgggtatcgcaggcggaaccttactggcacgtcgtaaaaacggcaaaataatcgatctggctcagaccgaagagcgtgaagtaagtttgcaaacctcaaaactgcgcatagtgggacgtagcgcggaggagctgaaggtgatgacctccgagcattatcagggtactgaaggcattgtggatgaactggaaaaaaacgcgccgcacgattacaccaaattcaatgcgcatcagaaagcgcagctaggtgcattggtaaaccatatcaatgccttgtcaaaactgattaacaagaaaatccagtga

SEQ ID NO: 189752 - DNA, 333 bp, Klebsiella oxytoca
atgaatatcatcgtggtgctctgtctgaacaacatcgcccggacagtgacaggctattacccactgattaatgccagaaacgtttgtgagttttttatcgccatccggcagatttatctggtcaggcataaggtgtatcttataacggaccgtgcgccgtatcaccaggcctcactggtacaggactggtcagtggtgatgaatgagcatacgcggaacaaccagtatttcgccacatcgaaggacttcctgcaggtgatcaacggatttttcagcgatatcctgccagagatagcgggtaaacgggatagtcacattaacgatattttttag

SEQ ID NO: 189753 - DNA, 336 bp, Klebsiella oxytoca
atgaatatcatcgtggtgctctgtctgaacaacatcgcccggacagtgacaggctattacccactgattaatgccagaaacgtttgtgagttttttatcgccatccggcagatttatctggtcaggcataaggtgtatcttataacggaccgtgcgccgtatcaccaggcctcactggtacaggactggtcagtggtgatgaatgagcatacgcggaacaaccagtatttcgccacatcgaaggacttcctgcaggtgatcaacggatttttcagcgatatcctgccagagagagggacaggaaactatcctcgacacggcaatccgaaactctga

SEQ ID NO: 189754 - DNA, 1269 bp, Klebsiella oxytoca
atgactgatctatataccaacagaaattcacggcaggattttgttaaacatgcatttacacatcacattcagaataatatggatatatttattgcttctgctttttttactgaatttaatgtaattgacagtttgctagaaaaaggatgccatattagaatcattgtaagattgggattccctacatcgccatttgctttagagaaattactttcacataaaaatgttgaagcaaggttctttaccaacaattcattccatcccaaactttatatttttggagatagctcattattagttggctctgccaatttaactaatgccgctctcctgacaaatcaagaagtaatggttagtttgaattcagaggaccacagattcgaagaattaaccagtctattttctaactattgggagtctgcaaatgtactaagcaaagaagcaataaaagattacaaaaatatttacaataaatattcaaaactatcatctcaaataataagccttgacaacgaagttttggataaaataggagatataaattactcaaatataaatagagggaaaaaacacatctcacagagctctatatttttggagtcttatcgaaaatcatatcaaacatcagtctatgcttttgaatgtattgaagagatatactcatcttttcaaagaaaagttcctgaagaacagattccgttacgccttgaaattgattcatttttcagttttgtacgtgattactatgcaactcaagaaacttggttagcccaaccactcggatggactgatatgcaaaaatctcatctgcgtacactagtaaatgaatggttatcaacaccatgggagcattttgaagaaagaattgtccctataaattaccctctcatttacaatgtatttaaatcaccagactcaattgagcaaagcaatgccggagaaatagttgatgcattatgtgttcttcactcttttcatgatcgcttaagattttacaaaggaggactggacacattaatagaagaattctcaacaagcaatgacatcagtcaaataaaaaagaccatcacttatttattatatgggaaaggagatattatcaaaagaatgtctgattgtatctataacgatgaatttaaacttaatgcctttggacaatcaaatgttcaagagctgattggatggataaataaagaaaatctacccgttattaacggccgaacaaccaaggtgcttcgatattttggctttgatgtgcgacaattataa

SEQ ID NO: 189755 - DNA, 1542 bp, Klebsiella oxytoca
  misc_feature (1467)..(1509): n is a, c, g, or t
atgataccaataaaagatctaactcttggctatgctgatgctgaaaattataagagaagggaaaataaagacttacttaacaaagtattcatacgtgataatcacttgtctgaattatgcgagccgaatatatcgtttcttgtaggagagaaaggtactggtaaaaccgcgtactctatctatctctcaaataacaatattaacaacacactagccacaactaaatatataagagagacagaataccaaaaatttatcactcttaaatccgaaaagcatttaagtttgtctgatttttctggtatatggaaagttattctatatttattaatttccaaacaagtattagataaagaaggggcaatttcaaagttactaaactattcaaaattctcatcacttactgatgcaatagatgaatattatctcaaggctttctcaccagaaataattcaagccctcagttttgttcaagaatcgaaaattgcagccgaattacttcataagcatgcagccttaaaaggtgaagaaagagagtctttgtctttttccgaaagcagatttcagataaatttattttatatacaaaaaaaatttgaagaggcctttagccaaatacgtttatctcaaaaccacattttatttatcgatggtatcgatatccgaccctcctcaattccatacgatgattatctagaatgtatcaaaggattagctcacgccgtctgggagattaataacgatttcttcccaagtataaagggaggggaagggagaatgaaggcagttcttttgatcagaccagatatatttgaatccataggattacaaaatcaaaatgcaaaaatcagagataattcagtattcttggactggcgtacagaatatgttaatcaccgtaactctcaattatttgaggtactagatcatctgcttgggactcagcaagaaatgccccttgaaaaggggcaagcctgggaccattatttcccttgggattcaccaaatgttcgtgatgattataaccatcccacatcatttattaatttccttcgttggtcctattatcgcccaagagatatattgcgaatgctcgagattcttaaatcacacaccaacggtgataatgggaaaaatcaatttactctagatgactttgaaaatcctagcatgcaaagagattattctaactatttgctcggggaaataaaagatcatttgtcattttattatggaagtgagcattatgagatttttctaaagttctttgaattcctctctggaaaagatactttcgattatgctgaatacctcttagcatataaacaacttgaaactcacattgactccatttccactacaaagccaaaatttatgacgacagcaaacgacttccttcagtttctgtttgatcttaatgtaatatgctatatagaaacaacagaagataatagtagatttatacgnnnnnnnnnnnnnnnnnnnnnnnnnnnnnnnnnnnnnnnnnnnatcagatattttatggattggcaaaatcattaa

SEQ ID NO: 189756 - DNA, 633 bp, Klebsiella oxytoca
atgagtgagcagagaccacctccgtcacgcccggcacagggaccggtcggctggctactgtcattgctcggtcggattatcggactggttatcggtgcgctggtgctgcgggtggtgctggaactggcggggctctatttctggtggccacaggaggggagcagacatgttttccaggtgatgaagcgggaacagtcggaactggttattgcactacaaccgcatccgttcgggaatgacattgtgatgctgctggaaaaaggggtaacgtacgtgcttatggccaacaggctcctgcagaaaccgttcaccaccctggcctatacgctggtgagttttatgcagcgcttggtatggctcgcctccatgctccctctggtctgtctgtgtgttttaatcgggctgacagaaggtctggtccggcgggatttaagacggtttggctccgggctggaatcggtttttcttcaccgctacgtcatcaggtccggcaattcagtcgccacagtgctgtgggtggtttatctggcacagccgctgtttctgcctacaatgttgattttactgcctatcaacttatggttcgggataacggtatggatggtggctggtagttttaagcgctggttataa

SEQ ID NO: 189757 - DNA, 357 bp, Klebsiella oxytoca
atgcaaagttatatcggagctcgcttacgtgaggagagagagcgcttgggtttaagtcagcagtctatgggggagattggcggggttaaaaagctaacccaacttaactatgagaagggtgagcgagcaccagacacgatttaccttaccgcgctggctggagttggggtggatattgtttatgtcctaacaggccagagaatgcctgcgccgggtggtattgccccacaaaacgaagaagaaaaaaaacttttagagaattaccgcgctatggaccaggcggcgcgcttaaacatacaggcggttggtgatgcgttcgcgcaatcaaagccacaatcaaaaattagcggtgattag

SEQ ID NO: 189758 - DNA, 735 bp, Klebsiella oxytoca
atggaaaatatcctctttattgtatcttcggttgcggcgctggctttttgggttgggttggttaagccctcattggtcggaatgccgaacagaaaaaaatcctctcttgtctatcttcttttgtgtctcattactggcggcatggctggatatcttaaccccgagcaacgatcccctgaagaagtcgcgctagatcgtcaaaaagcagcacaggctgaaattgaagcgaaaaaatttaaataccccaccactacagtcaccgagtatcaatctaaaaacaaaaaagagcgcgaaagtataatttctaactttatgcaatcagaaggccttcccgagtcagatgcgtccaggttctacagttgcttgagtgaattatcggcgactagaaaagatggcgttcgtattggcacagctcttggttggtgtgcagatgattacaaaaaagatcctaagctgctcgatagacgcacaaacttcgacaccttttttgctcagtttagtggttgggatggtgcttatcgtcctcttgaaaaggtcattaaagaaagcatgaatgatgaagactcatacaagcatgttaggacctcttacagaattcttatggatgggacccctcatgccattgtgtctacaacctttagcggcacaaatgtatatgccgctcgcgtcaagcaaacaatatctgcggacgtggatattaaaaccggtcaaataataaccatcattgaacaataa

SEQ ID NO: 189759 - DNA, 306 bp, Klebsiella oxytoca
atgagacagtttaaaatctcccaccccggagagatgatcgccagggatttagctgatatggggattagcggttgtcgatttgctctcaatattggggttacgccagcaaccgtatctcgccttctggctggaaaaactgcattaactcccgcacttgccattcgaatatctgctgcgctaggcagtacgcctgagttttggctcagacttcaaagtgccttcgacttacgccagcttgaaagcgagatagacacctcaaatatcgtgctgtatggcacaggaagcgacgcaaagaccagcgcataa

SEQ ID NO: 189760 - DNA, 573 bp, Klebsiella oxytoca
  misc_feature (443)..(452): n is a, c, g, or t
atgaagaaaataaaaatctacactgaagataatatttcaggaatggcaatccagttatttatcagcagtatcaataaaaatattgatgtattacctttctctgaaagttgtaactttaaaatagagaatcacaccagcagtataattttttttaatttagcaaaagataacttgtcctgctatgagaagatcaagtttatcaataataatttattgaatcctgttgattctgtacctgtattcatagttgataatgttcagtcctttccatattatcgactaatcctcttttcaaaaataattgttatagatcttaaatctccgctttcagattatcaaaaaatacttgacggagtatatcatcgatatatttacattcatactttaacacaaagggaattaattattttcgacttaatatccagcgaatatgattgtaaaannnnnnnnnnttttaagacagtatattctcataggttgaaaatcgtaagtaaacttaaattaaaaaacacacatgacttatataattttatggtcaagttaaaagccgatgatgaattaaattttgaataa

SEQ ID NO: 189761 - DNA, 1068 bp, Klebsiella oxytoca
atggacaaaatcaaacggcgttgggcagtctacgttattggtttactggtggtgattgccgccgccgcatggtggatgctgcgcccaccgggactcccggcaggctttgccagcagcaacggtagaattgaagccacagaggtcgatatcgccaccaaaaccgccggacgtatcgataccattctggtcaaagaagggcagtttgtccgccagggtgaagtcttagcccgcatggatatccgggtgctcaacgaacaacggctggaagccgccgcacaaattaaagaagctgaaagttcgattgccgcagcgaaagcgctgctcgatcagcgtcaaggcgaaatgcgcgccgctgaggcggtcgtgaagcagcggcaggctgaattaaactccgccgccaaacgctacggccgttccagcacactctcacagcgcggcgcggtctccgctcagcagcttgatgacgacctggcggcggcggaaagcgccagagcagtgctggaatcagcaaaagcccaggtctctgccgccagagcggctattgaggcgtcaagaaccagcattattcaggcacaaacccgcgttgaagcagctcaggccacggagcgtcggattatcgccgatatcgatgatagcgaactgaaagcgccccgcgatggtcgtattcagtatcgcgttgctgaaccgggagaagtgctggcggcaggcgggcgggtgctgaatatggtcgacttgtccgatgtctacatgaccttcttcctgcctactgaacaagctggcctgctggcgctgggcagcgaagcgcgaattatccttgatgccgcacccaatctggccattcctgccaatatcagttttgtcgccagcgtggcgcagtttacccccaaaacggtggaaaccagcgatgaacggctgaagctgatgttccgcgtcaaagcccgcattccgccggagctgctggaacagcaccttgagtatgtgaaaaccggcctgccaggtatggcctgggtgcgtctggataaccagcaggcgtggcctgaagcgctgacggtgaggttgccacaatga

SEQ ID NO: 189762 - DNA, 387 bp, Klebsiella oxytoca
atgtctaacactaacgccaattttgagatgaccgggatcctgttagggcaagaagtccgtaaacgtaaaactcctcaggagaagatcgccattatccagcagacgatggagccgggtatgaatgtctcccatgtcgcccgcctgcatggtatccagcccggcctgctgtttaagtggaagaagcaatatcaggaaggcagcctcaccgccgttgcggctggagaggacgtccttcctgcttctgagcttactgcagctctgaagcaggtccgggagctccagcgcctgctgggcaagaagacgatggaagtgaaagaagccgtggagtacggtcagtcgcgaaaatggatagcgcacgcgcccttgttgccaaaggacggggaatag

SEQ ID NO: 189763 - DNA, 1248 bp, Klebsiella oxytoca
atgtccagaataaaatgtcattacagcatgctatcaatcgcaattgctactgtatttaccgtaaccacttcaggaatggcaaccgcggcagaacaaccaataaaaattggtttactggaagatgcttcaggtaattttgctttaccggttattcctaaaattcatgcgactgagcttgcaatagacgagattaatgccaaaggcggaatactcgggagaaaaattgatttaatacaatacgatacgcaatccgacaacacacgttttcaacaaatggcccgtcgtctgattaaaaacgataaagtggatgtgatttttggggcattttccagcgcctcgcgtgaggctatccggccgattatggatcgtgaaaaacagctttactggtataacaatcagtatgaaggtggcgtgtgtgactctaatgttttcgtcactggtgcggttcctgaacaacaattttctacattaattccatggatgatggcgaagtatggtaaaaaagtttataccattgctgccgattataatttcgggcaaatatcggctgaatgggtccgcaaaattgtgaaagaaaatggtggtaccatggtgggtgaagagtttatcccactgagcgtctcgcaatttggtcaaacgattcaaaatatccagaaagtcaagcccgattttgtgatgacattattggttggggcgaaccaatcttcctattatgagcaacaagcggcggcaaaactaaatttaccaatggcgagctccgtcaacgttggccaggcttatgagcataaacgctttaaagccccggcgctgaaagacatgtatgtcacgactaattacatagaagaagtagacagcccggccagtaatgacttcaaacaacgcttccatgccaaattcccgaatgaaccctacatcaatcaggaagcggctaatgcttatgatgcggtttatctttacaaagcggcagtagagaaagccggcacgactaatatggatgctgttcgtaaatcgctggaaagtggtgatatctgtactgatggaccgtccggaaaagtatgtattgatcccaaaagtcaccatttgagccataccatctatctggcccatgtaaaagatgatcattctatcgagatacctaaggtatgggaaaatatcaaaccttactggctaggagacgctggctgtaatttgccggtaaaaccggaccacagccagtacaccccatcatcaccacctaaaaaatcgtaa

SEQ ID NO: 189764 - DNA, 870 bp, Klebsiella oxytoca; identical to SEQ ID NO: 146709

SEQ ID NO: 189765 - DNA, 1062 bp, Klebsiella oxytoca
gtgacaacaacctctcttaatttatcggcgaatggtatgaagaaacacagacaatcctcgagctggctggcgacattgttaattttagctggtgctctcatgctaccgttagtggtcgatagcaccacgatcggtgacttttcctactttcttctctggaccttcggcgccatcggattagctgcgatgtggggacatggcggtattttatctttcggccaaacggcgttctttggtctggcgggttacgcctatggtgtgatgacattaaacttcggcgctggcgtgctctctacctggtccggtttaattgtcgcattgctgcttgccgctgcagcggctgcggcactgggttacctgatgttttacggcggggtaaccggtatttttgttggtatcgtaaccctgtcctgcactctggtcctggaaacctttatgtcacaaactgcaggtccacaatgggctatcggcagtgcgcgtttgaatggtttcaacggtatgtcagggatgccccccttgtccataccatgggttaacggtgacttgccactggaagacaacggcttttattacctgattatcttgctgctcgcgggtgtttattggggggtgaggacgttgttacgctccaattttggcctgacgttggcctcaattcgtgaaaatcctcatcgggcagagatgctcggcattgatatccgccgttatcaattactggtgtttgtgctgggaggtgtactttctggcctgtccggagcactttataccctgtggggatcatatattaccccgtcatcaatgggtttatccgccgctgcaatgccggtcatctgggttgccaccgctgggcggaaaaacatttttggcacggtgatcattacggccatcctggtgtggctatcccaatggttagctgtttatggcagcgaatatgccttgattctactgggcgccatcttgctgttagtggtattagcggcgcccaacggacttttatcctggctggctgagagcatcacccgcttgctctcctcacgccggaaaaaggagggctcgctatga

SEQ ID NO: 189766 - DNA, 735 bp, Klebsiella oxytoca; identical to SEQ ID NO: 146711

SEQ ID NO: 189767 - DNA, 720 bp, Klebsiella oxytoca
atgactaacgttgttttacaaatgcaggagctggccggtggctatggcggtgggcaagttctcaatggcgtaacactgcagctacatgcagccgaggtattgggtttgattggccgcaatggcgtaggcaaaaccacattgatgcgcacattaattggcgttgttccggcaaagcaaggccaaattttattgggcgaaattgatattactcaggcctcaccgcagcgccgcgctcgtttaggcattggctacgtcccgcaagggcgtgaagtttttaccgggctgaccgtgtcggagaatctgcaagtcggaatgcaatttgtccgtgaacatcgcgaatttgcaaaagagatgctggatcgggtactggattacttccccatattgcggcaaaggctcaagcaaaaagccggaactatgagtggcggtgagcaacagcaattggcgattgccagagccctggtgggctcaccaaaggtcctgctgctggatgaaccgtccgaaggtgtccaaccttctatcgtcaatatcattgccgataccctggtacgcatcgcccgggaactccatgtggccgtgatcctggtcgagcaggatattgcgatgatccagcgggccgcacagcgctgtgcggtaatggataaaggcctggttgtagaaacgctgacccaacaacagctctctgatgatcttttaatgcgtcgtcatctggctctgtaa

SEQ ID NO: 189768 - DNA, 987 bp, Klebsiella oxytoca; identical to SEQ ID NO: 146713

SEQ ID NO: 189769 - DNA, 1173 bp, Klebsiella oxytoca
atggggccagatacacccatcaatattggtttactttactccttcagcggagtgacggcggcacaagagttgtcacaatggcgcggagcaacccaggctattgccgaaattaatcaaaatggcggcatcaacggcagaccactcaatgcaattcatttggatccgcaatctgacgatgtactgtttcgtgccatggccgaggaattaattaccgaacatgaagtaaatgtgatttttggcggctatacctccagcagccgaaaagcgatgtcaccgattgttgaaaagtatcgtcggttgctgttttattcgcaactgtatgagggctttgagttttcagaaaatattttctatggcggtgccgcgcctaatcagaattgtgtacagctggctgactacctcgcggctcagtttgggacacgggtttatttgattggttcccgttatatttatccctacgaatgtaaccgcaacatgcaggaattaattctgcaacggcatgacggagcagtgattggtgagcgttatcttgatttgaatgcgccctatgaagcttttctacctattattgatgaggtcatgaaaaagcagccagattttattttcagcactgttgtcgggcagaccgttcctttcctgtatcaggcttataaggctgcaggtttagatcctgcgcgtatgcctattggtagcttaaatacctcagaaactgagattgccattatgggcgcggaggccgcaaaggggcattttacttccgccccctattttcaaagtattaacaccaaggcaaatcaatccgcactcaaacaattccgtaagcaattcggaccggaaatgagtacggacatgaattgggaggccacgtacagccaggtacacctttttgcaaaagccatggccgagtgtggcagtgatcatatctacccgttatcaaccgcgctgaggggtagccagtttgatgctccccaggggcgtattcgtattgatcagcttaatcagcataccgggctatatccgcgcattggtatggcaaatgaaaatgggcaatttacaattgtccaggagtctcgccgtattgtcgatcccgatccctatatgaccaatcagattcagggcgattgggtaacgaagctaacaactgtggggtatccatatgcgccctcacgatag

SEQ ID NO: 189770 - DNA, 207 bp, Klebsiella oxytoca; identical to SEQ ID NO: 146715

SEQ ID NO: 189771 - DNA, 1734 bp, Klebsiella oxytoca
atgccgatagccccttatcttgcagccgcaattcaattcgaacccttaatgtttgccaaagaagccaatttacgtcaattacttatattggttgaacaggcggcacagaaaggtgcacgcttgattacaaccccggaaatggcaacaacgggatactgttggtttgaccggcaggagattgcgccgatggtagaaaccgtccctggcgagagtacagcactttttgctgagttagcgcaacattatcaatgctatatcgttttgggaatgcctgaaatcgaccccaatacatcgctgtattacaacagcgccgtattaattgggcctgagggtgttatcggttgccatcgtaaaacccacccctatatttcagaacccaaatgggctgcggcgggcgattctggacatcaagtcttcgatactccgctaggacgcattggtatgctggtttgcatggatattcacttcccggaaacagcccgcttgctggccctggacggcgttgacgtcatttgtcacatcagcaactggttggcagaacgcacccccgcgccctactggattagccgggcaatggaaaacggttgttatctgctggagagtaaccgctggggactagaacgcggagttcagtttagcggcggtagttgtattattgagcctgatggcaacattgccgcagtggtcgataacggtaatgggatagcgtatgccgaaatagatatcaaccgtagccgccagcgccaggcattaggggagccggttttttatcaacgccgtcctgattattatcacttactattaagcgacagttttttatggaacccgcaggatttctttgggctgtatggacatcagccactccccccaggcaagcagagccgtatcaccgtggcgcagttatctcccggtgagcaagttgaagataatctggcggcgataatcgccatgacaaaagaagctgttttggagcaaggtagcgagctgatcgtcttccctgaattagccttgacaggtcattacgataatgcggctcatgctcaaacgttagaaagcccggcagtgcagacgctggctcgcctggctatacagctaagagtctaccttgtggtcggaatggcagaaaagcaacatgataaaaactacattgcacagatgctgtttgggccagaagggataatcggcagttacaggcaaatccatctttcgcaggaaagccaaaaatgggccagcgcgggagaacactggcgagtgtttgataccgcgcttggcagaattggattgttgtcaggtcacgatgccctgtttcccgaatcagcacgaattctcgctttaatgggatgcgatattattgcgtgttctgctgcgctttcggcaggatttaccgccgcccacgcgggcagctctgtgacacagaatttccctatcccaacaggggccgatccgctgcattggcacttattcagaacccgtgcgggagaaaacaatctttatctggtttttgctaatgcacttgatggtatagatggggcaggaggatttagcggaattttcgggccagaaaccttcacttttccacggcaagaacggctgctttggcaggaaacgctggtcacaacacaaatcgtcgacacacgctctcttgctgacagcccttatccaaccaatgtggtacggcgtaaagatctggttgccatgcgccaaccccatcactataaaccgctgctgtattaa

SEQ ID NO: 189772 - DNA, 213 bp, Klebsiella oxytoca
atggtcagcctgggccgcaaaaactacctgttcttcggttcggatcatggaggagagcggggagcgctgctgtacagcctgatcgggacatgcaaactgaacggagtggagccagaaagctacctccgttatgtccttgacgtcattgctgactggccgataaaccgggtcagcgaactactcccctggcgcgtagcactgccaactgaataa

SEQ ID NO: 189773 - DNA, 306 bp, Klebsiella oxytoca; identical to SEQ ID NO: 134005

SEQ ID NO: 189774 - DNA, 987 bp, Klebsiella oxytoca
atgaaaaagatagtcattattgcttccccgggatgccttgcttcaggctataccgggctggctgatatgttctctcttgccggaagagccatatcagctgctcgcaaggagccgtcaccctttgatatcatgacagcaagtccggacgggcagcctgtgaccgacggaagcgggcggttactgaccgccgatgcggcactggcagatatcaaatcatgcgatgcggttctgatccccgggtttgtacccgatgcatcaaacacgccgccacagctcggtaaactgggcagcatagcgtcatggatacggcaacagtacgtgcatggcgccctggcttgtggctcgtgcagcggagtgtttatgctgggcgaggcggggctgctcaacggcagaaaatgtacgacaacctggtggctgtacgatgagctcaagcgccgttacccccgggcaaacgccatctggggcaatgctctgactgaggataaccgtatagttacggctggcgggccgctttcatggattgatgtggccttacacgttgtgcgtcagcttgaggggacggaggctgcgcgcattgcagcagaatttgctgtagtggatacaacgcctcccgcaagggctgtttatatgcccaccgcgcacctcagccggccggacagtattctgcccggtgcagaattttttataaggcaggaagcatcaacgctgcttaccacaagagaactgtgccggcgccttgccatttcggagcgaacctttcacaggcgtataaaggcggaaacaggcgagtcaccgaaacagtttatcgacaggatcaggtgtgaaatggcaaggctggcacttgaaacatctgctaaaaccataaagcagatcgcagctgatgcaggttacgcggatgaaggcagtttcaggagggtcttcagccggatgacaggcatgaatccggcattataccgccgttgggtgaaagaccgtacccgggaataa

SEQ ID NO: 189775 - DNA, 2163 bp, Klebsiella oxytoca
atgacatcagtaataaataataaatcatcgtcaccagattctgatgaaatcgatttggggcgtataattggtgagttaatcgatcatcgtaaattgattgtagccattacgactggttttactgtgttggcactactctatgctttattagcgacaccggtttaccaagcaaatgcattgatacaggtggaacaaaagcaaggtaatgcaatcctaaacagtctaagccagatgttgcctgatagtcagccgcagtctgcacctgaaatcgctctattgcagtctcgaatgattttaggaaagacagtcgatgacctaaatttgcaagctagggttgagcaaaacttctttccaatagtcggtagaggcttatctcggattataggggaaaagcctgcaaatattgatgtaacacatatttatcttccaaagatagagggacaagattcaccgagtataaaggttaaaattaaggataagaaccattaccaaattgagtatggcgatacgattcttgatggggtagtgggcgaattgttggaaaccaaaggtatttctttattaatcagatcagttgacgctgaacctggcgatagctttactgtaacttatgtatcatcattaaaagcaatcaataatttacaagagtcatttaatgttacagaacagggtaaagatactggaatgttaaatctcacccttacaggtgatgattcagaacttataacacatattcttgatggaataagccaaaactacttggctcagaacgttgctagacaggcagctcaagatgcaaaaagcttggagttccttagtaagcaactgcctgaggtccgttctgagcttgattcggcagaggataaactgaatgcttatcgcaggcaaaaagattcagtagacttaacgatggaagctaagtccgttttggaccaaattgttaatgcggataatcaattaaatgagcttacatttagagaggcggaaatatcacaactttatactaaagaacatccgacatataaagctttagtcgaaaaaaggaagacacttcaggaggaaaaggcgaaacttaataaaagagtgagtggtatgccttctactcaacaagaagtgctaagattgagtcgtgacgtagagtctggcagagcagtatatttgcaacttctaaatcgccaacaagaattaaatattgcaaaatctagtgcaattggcaatgtcagaatcattgatacagctgtcactgagccaaaaccagtaaaaccccgaaaagtgctaattgtggttatgggattattactgggtttgtttgtatctattggtcttgtgttgttgagagtatttttgaggcgtggtattgagactccagaagaactggaagatatggggattaatgtatattctagtattcctgtatcagaatggttaacgaaacatctgtcaagtaataagcgaaaaaaacaagagtcggacactctacttgcagtagaaaatcctgcagatctagctgtcgaagctattcgtagcctaaggacaagcttacatttcgcaatgatggaatctaaaaataatatattaatgatttcaggcgctagcccaaatgcaggtaaaacttttgttagtactaacttagccgctattattgctttaactggtaaaaaagtactcttcatagatgctgaccttagaaaaggatatgttcataaaatgtttgggcaaaaccaacctaagggattgtcagatattttatcggggcaagaagtaacagaaaatgtagtacaaaaagtggtcggaggtgagtttgactatatttctagggggcaaattccgccgaacccagccgaattactaatgcatgagcgtttcgaagccatacttaaatgggcttcgcaacagtacgagatagttattattgataccccaccaattcttgctgttactgatgccgcgattattggaagatatgcagggacaacgttgctggtagcaagatatgaagttaatacccctaaagaaatagcagtgagtattcgtaggtttgaacaaagtggtgtgacaataaaaggttgcattttgaatggcatggtgaaaaaggctagtagttattatggctatggctataaccattatgggtattcttatactgataagagatctgattaa

SEQ ID NO: 189776 - DNA, 936 bp, Klebsiella oxytoca; identical to SEQ ID NO: 161828

SEQ ID NO: 189777 - DNA, 1146 bp, Klebsiella oxytoca; identical to SEQ ID NO: 112544

SEQ ID NO: 189778 - DNA, 792 bp, Klebsiella oxytoca; identical to SEQ ID NO: 112543

SEQ ID NO: 189779 - DNA, 939 bp, Klebsiella oxytoca; identical to SEQ ID NO: 112542

SEQ ID NO: 189780 - DNA, 642 bp, Klebsiella oxytoca; identical to SEQ ID NO: 112541

SEQ ID NO: 189781 - DNA, 780 bp, Klebsiella oxytoca
atgcaaaaaataacacatcaacaattactcgattggttgaaaaaggaagtgaaactttcattaggttgtactgagcctattgctattgcgtatgctgccgcagtggctgctaaatatctcaacgcaccgatattaaaaataacggggaatatatcggagaatctgtataaaaatgcgatgggagtcactattccgggaacaagctattgcggagtcactcttgcggcggcaataggggctattggtggtaacgcggatgccgatttagaagtattaaaagatattactgcgacacaaattaccgaagcctatatatttaatgaatcaggtaacgtgtgtctaaacgcagtagatgctacggattttatttttatcgatattacgctatatagtcttagtgatcagtgccgggtagtgattcaaggtagccatactaatgtcactgaagtttatattaataatataaagcaaatattagtccgagacctaattgccgccaatgatagtggggtactacccgaattttcccttaacgacgcatttaaatttgtaaccgatgtcgccgctaaagacatcatgtttatgctgaaaagtgctgagattaataccgcgctttctgacgaggggcaaaggaagaactatggtttgaacgtgagtggcgcgttgtcgcaagccagaaaaaatggctttatcagcactgacttactgagtcaaatgttgatcaacaccactgcggcatcagatgcccgtatgggcggcgctgatcctacccgcgaatag

SEQ ID NO: 189782 - DNA, 429 bp, Klebsiella oxytoca; identical to SEQ ID NO: 101359

SEQ ID NO: 189783 - DNA, 321 bp, Klebsiella oxytoca; identical to SEQ ID NO: 161841

SEQ ID NO: 189784 - DNA, 996 bp, Klebsiella oxytoca; identical to SEQ ID NO: 161838

SEQ ID NO: 189785 - DNA, 195 bp, Klebsiella oxytoca
atgagtggcgtggatcaggcaccagcgcgaatccacggggagatggttgtacagccactccaccgggcgctcgccggaccaggccaggcagtcatccacctctttttgctgttcagcaatatgaatatgaatcggctgctggccaggatggcaggccagaatggcgccaatctgctccggcgtaacggcccgtaa

SEQ ID NO: 189786 - DNA, 1968 bp, Klebsiella oxytoca
gtgatcattccaccgcgcaacgcagaggagagcgaaatcgccattgaagctcgcggcctgacgatgcgctttggcaattttgtcgccgttgatcacgtgaactttcgtatcgcccgtggcgaaatcttcggtttcctcggctccaacggctgtggtaaatcaacaaccatgaaaatgctgaccgggctgttaccggccagcgaaggcgaggcctggctatttggccaaccggtcgacccgaaggatattgaaacccgccgccgcgttggctatatgtcgcaggccttttccctctacagtgaactgaccgttaggcaaaacctcgatctacatgcccgtctgttccatattccggatgcggagatccccggtcgggtcgccgagatgagtcagcgctttatgctggaagaggttgaagacaccctgcccgcctcgctgccgttaggtattcgtcagcggctatcgctggcggtcgcggtcattcaccgtccggaaatgttaattcttgatgaacccacctccggcgtcgatcccgtggcccgggacatgttctggcaattgatggtcaatctggcccgccaggatcgggtgacgatttttatctccacccactttatgaatgaagccgagcgctgcgatcgcatttcactgatgcatgctggcaaagtgctggccagcgatacgccgcaggcgctggtcgaacagcgcgggtcggccagcctcgaagaggcctttatcgcctggctacaggaggcagcagatgccgcacagccgcctgctgctgaggctgcgccgattcccatgattgaacacaaaaccgaaaccattgctccgcgtcaggcgtttagcttgcgccgcctgtttagctacagccgtcgcgaagcgctggagctacgtcgcgatccggtacgatcgactctggcattgctgggcacggtgatcctgatgtttattatgggatatgggatcagtatggacgtcgaggatctgcgatttgcggtactcgaccgcgatcaaaccgtcagcagccagggctggtcgcagaatatcgccggttcacgctattttatcgaacagccgccgctgcaaagctacagtgaactggaccggcggatgcgcaacggcgagctggcggtggctatcgaaattccgcctaattttggccgcgacatcgctcggggaacgccagcgcaaatcggcgtgtgggtggatggcgcaatgccaaaccgggcggaaacggtgcgcggctacgtgcaggcgatgcatttggcctggcttcaggagatggccggtcgccaggccagccccaatcgcgatacctcactgatttctattgaaacccgctatcgctataacccggacgtgaagagtctgccagcgattgttccagcagttattccgctgctgttgatgatgatcccggcaatgctcagcgcgctcagcgtagtgcgtgagaaagagctgggctcgatcatcaatctgtacgtgacgccgaccacccgcagtgaatttcttctgggcaaacaggtgccgtatatcgtgctggggatgtttaacttctttctactatgtgcactgtcggtgtttgtctttggcgtaccgcataaagggagcttcctgacgcttatgctggccgcactgctctatgtcacgattgccaccgggcttggcctactgatctcaacctttatgaaaagccagattgcggcgattttcggtaccgcgattattacgcttatcccggcgacgcagttctcggggatgatcgatcccgtcgcttctctggaagggccgggccgctggattggccagatttatccaaccagccactttctgaccattgcgcgaggaacgttttccaaagcgctaaatctgacggacctgtgggcatccttcataccactgcttattgcggttccgctggtgctgggcctgagcgtgtggctgctgaaaaaacaggagggataa

SEQ ID NO: 189787 - DNA, 1125 bp, Klebsiella oxytoca
atgcgcggattacgcaatatttataatttaggcatgaaagagctacgcagcctgcttggcgataaggcgatgctgacattaattgtcttcgcctttaccgtctcggtttactcctccgctaccgttatgccggggtcgttacatttagcccctatcgctattgcggatatggataaatcgcagctctcatcgcgcattatcaacggtttttatcgcccctggtttttaccccctgagctgattaccgctgatgaaatggacgcagggctggatgccgggcgatatacattcgcgatcaatattccccctaacttccagcgtgatgttttagccggacgccagccggagctgcaggtaaacgttgatgcgacgcgaatgagccaggcgtttaccggcaatagctatatccagaatatcgtcactggtgaggtaaatagctttgtcgcccgctatcgggataacagctcgttgccagtcgagctagccgtcaggatgcgttttaacccgaatctggaacaggaacgtttcggggccgtaatggcgattatcaacaatattactatgctggccatcgtgcttaccggttcggcgttgatacgtgaacgagagcatggaaccgtggagcacctgctggtgatgccggtgacgccgtttgaaattatgatggcaaagatctggtcaatgggtttggtggtgctggtcgtttctggattatcgcttatattgatggtccagggagtgttgcaggtgccgattgaaggctctataccgctgtttatgcttggagtagccctgagcctgtttgctactacctcaattggaatatttatgggaaccgtggcccgctcgatgccgcagttagggctgttgatgattctagtgctgctaccacttcagatgctatccgggggatcaacgccacgagaaagtatgccgcaggcggtgcaggacatcatgctcaccatgccgacaactcatttcgtcagcctggcgcaggcaattctatatcgaggcgcagattttgcgattgtctggccgcagtttctgacgctgctggctatcggtggcgtattttttacgattgcactgctacgttttcgtaagacgattggagagatggcttga

SEQ ID NO: 189788 - DNA, 237 bp, Klebsiella oxytoca
atgaccatttcccatgttgcacggcttcatagtgtgaatgcaaaccagatcttcgcctggcgaaagcagtacaaggaaggtagtctcaccgcgatcatggctggcgaagatgttgttcccgcctcagaacttgcggcgacggtgaaacaaatcaaagagctacagcgcttgctgggtaaaaagaccatggagaatgcgctgctgaaggaagccgttgagtatggtcggcaaaaatga

SEQ ID NO: 189789 - DNA, 2181 bp, Klebsiella oxytoca
atgaaaaaaaaagtgattgaagcactttttactggttgctgttcggatccattctctacacttggtatgcattgtaccgacgccggactggaagttcgtgcattattacctgatgccaccgatgtgtgggtcattgaaccaaaaaacgggcgcaaagtcggcaagctggaatgccttgatttgcgcggtttctttagcggcgttctgccgcgtcgtaaaaatccttttcgctatcagctggccgccacctggcacggacagcagcatctgattgatgacccgtaccgttttggcccactgttacaggaactggacatttggctgctgtcggaaggcacgcatcttcgcccctatgaaacgctgggcgcgcatcccgatacgatagacgatgttgtcggtacgcgcttctcggtctgggcacctaatgcccgccgggtgtcggtcgttggccagtttaactactgggatggtcgtcgccatctgatgcgactacgtaaagagtccggcatctgggagctgtttgttcccggcgcgtttaacggtcagttgtacaaattcgagcttattgatgcccacggcaatctgcgggtgaagtccgacccttacgccttcgaagcgcaaatgcgcccggaaagcgcctcgcttatctgcgggttgccggaaaaggtcgagcagcctccagcgcgcaagcaggctaaccagtttgatgcgcctatatcgatttatgaagtgcacctcggctcctggcgccgccacaccgataataacttctggctgagctatcgcgagcttgccgaccagttggtcccgtatgccaaatggatgggctttactcatctggagctgctgccggttaacgaacatccgtttgacggcagttggggctatcagccgaccgggctgtacgcgcccacccgtcgcttcggcacccgggaggatttccgctactttatcaacgccgcgcacgccgcggggcttaacgttattctggactgggtgccaggccattttccggcggatgactttgcgctcgcctcgtttgacggcacctcgctgtatgaacactgcgacccgcgcgaaggctaccaccaggactggaacaccctgatttacaactacggccgccgcgaggtcagcaacttcctggttggtaatgcgctgtactggattgaacgctttggcattgatgcgctgcgggtcgatgcggtggcatcaatgatttatcgcgactacagccgcaaagaaggtgagtgggtaccgaacgaatttggcggccgggaaaaccttgaagccattgagttcctgcgtaataccaaccgcgtgctgggcgaacagacgccgggggcggtaacgatggcggaagagtcgaccgattttgctggcgtttctcgtccttcctccactggcggtctggggttctggttcaagtggaacatgggctggatgcatgataccctcgactatatgaaactggatccggtataccgtcgttttcatcacaacaagatgaccttcggtatgctctacaactacaccgaaaactttgtcctgccactctctcatgatgaagtggtgcacggcaaaaaatccattctcgaccgcatgccgggcgatgcctggcagaagttcgctaacctgcgagcctactacggatggctgttcgccttcccgggtaaaaagctgctgtttatgggcaatgagtttgcacaaggacgtgagtggaatcacgacggaagcctcgactggcgtctgcttgagggcgtagacagctggcaccacggcgttcagcgactggtgcgcgatctcaaccatacctattgtcgccacaaagcgctgcatgagctggatttcgaccactacggtttcgaatggctggtggtcgacgatcatgagcactcggtgtttgtctttgtgcgtcgcgacagggagggtaacgaaattatcgtcgtcagcaacttcaccccggtaccgcgccatgattatcgtttcggcatcaaccagcctggccgctggcgcgaagagctgaacactgactcaatgcactatcatggcagcaataccggtaatggcggcatcgttgaaagcgatgtcattgccagccatggtcgcgagcattccctctccattacgctaccgccgctggcgacgatctggcttacaagggtgcctgataatcaataa

SEQ ID NO: 189790 - DNA, 1281 bp, Klebsiella oxytoca
atgagtaaacatgaatataatgacaatgtcatgctggcacgccagttaccgcttaaatctgtggcgctgatcctagcgggaggtcgagggacacgattaaaagacctgacagcaacccgggcaaaaccggcggtacattttggtggcaagttcaggattattgattttgctttatcaaactgtattaattccgggataagacggattggggtcattacacaatatcaatcacattccctggttcagcatatccagcgcggttggtctttcctcaatgaagagatgaatgaattcgtcgatttattacccgcccagcaacgcgtgcatggtgagaactggtaccggggtactgccgatgctgtcacacagaacctggatattattcgacgctatggtgcggaatatgtcgttattctagcgggtgatcatatctataaacaggattattcccggatgctgattgaccatgttaaaaaaggagcccggtgtactgtggcctgccttcctgtacctgtggaatacgcaagtgcttttggtgtcatggctgtggatgaaaatgataaaatcattgattttattgaaaaaccttctaatcctcctactgtgccgggggataaaaccaaatcgcttgccagtatggggatctatgtatttgatgctgaatacctctatcagctactggatgaagatggtcgggatgaacagtccagccacgatttcggcaaagatattattccagcaattacggtatccggagaagcctgggcacatcctttcccgcgctcctgtgtgcagacagataataatgcagaaccgtactggcgtgatgtcggaactctggaggcctactggaaagcgaaccttgatttagcttccgtggtacctgaactagatgtttatgatcgcaactggccgatccatacttatgtagagtctttaccgagcgcaaaatttgttcaggaccgcacaggcagtcatggaatgaccatgaattcactggtctccggcggctgcattatatctggttctgtcgttgttcattcagttttattctccagcgtacggattaactctttttgcaatattgattcggttgttttattacccggtgtgtgggtagaacgttcctgtcggttacgacgctgtgtgattgatcgtggatgtgtgatccctgaaggaacggtcattggtgagaatgctgtcgaggacgcccgtcgtttttatcgttctgaagaagggatcgttcttgtcactaaagaaatgctgaggaggcctgaataa

SEQ ID NO: 189791 - DNA, 588 bp, Klebsiella oxytoca
atgggcgtgtcgcgtgcgcaattatcacttcgggttaatcgttccgccgactggcaggatgggcggtgtaaccagcgcgatgaagaagcggatgcggcgctgctatggcgcatactggtggttatcgccgatatgccgtgttatggctaccgccgggtctgggcggtgctgcggcgtcaggcccgcgatgaggggcttgcgccggtgaatgctaaacgggtttatcgggtgatgagcgaaaacagcctgttgttgctgcatgacaggccgccgcgcccggtgccgggtcgggaacacaacggtaaggtggcggtggcgcagagcgatcagcgctggtgctctgacggcttcgagttcggctgcgacaatggcgagaaactgcgggtaacgttcgcgctggactgttgcgacagagaagccatagactgggcggcgagtaccggtggctacgacagttcgaccgtgcaggatgtaatgctgaggtcggtagaaaagcgcttcggcgataagttgccggacacagcggtgcagtggctggcggacaacggttccgcgtataccgcgcatgaaacgcggaggttcgcctga

SEQ ID NO: 189792 - DNA, 279 bp, Klebsiella oxytoca
atgaatgtctcccacgtcacacgcctgcacggtattcagcccagtttgctgttcaagtggaagaagcaataccaggaaggcagccttacccccgttgcggccggagaggaagtcgttccagcttcagagcttactgctgctctgaagcaggtccgggagcttcagcgccttctgggcaggaagacgatggaagttgagatcatgaaagaagccgtggagtacggtgtatcccgaaaatggatagcgcatgcgcccttgttgccaaaggacaaggaatag

SEQ ID NO: 189793 - DNA, 483 bp, Klebsiella oxytoca
atgaggtttttaaatggaattaaatatgtgactgctctgggagtaattactatctcctgttcagtaatggcatcaccttatggagattcagatgttctgttcggatgtgtcataaaaggtaaaaccactaaagaggtggctgtgttaagaaataataatgaggtcgcttatttattcggtaagtcggatattaacggagatggtggggttattcctgaaatcactttggtgaaaaatgtgagccagttaagtcaggcctggaattacagtagggctgagggtgtgtcgatacatacattgaacataccagaaaacgagtatacttactctgtttcctatatcgatgatggaaaaaatactgatggggaaataactgttttaaaacagggaaaagaaatcagtacgataaaatgcgatgatgtctgggaacaacatctgggtgacagcaatatgatgcatggtatccccgatgagtcagagtga

SEQ ID NO: 189794 - DNA, 279 bp, Klebsiella oxytoca
atgctgttgctggtctggcttgggatctgggttgtatatggcatcgggaactttgcgttcaatggtagcaaagcgatgctggaacgtacagcatgcgaggtggtaacggatatctatcataaacagttacgtcaatactcacagcaatgtgagaacgtaacgttaactgaaagtgaagggaaacagcactatggatttgctcaacttagtgatggtacaactaaagatattaccgtgacagaacaatcagatggtaagattgttgtatatattgaatag

SEQ ID NO: 189795 - DNA, 570 bp, Klebsiella oxytoca
atgaaaaaaacagtattaattaaaaatcaaaaaagcaggaaaggtttttctctcttagaattattgttagttcttgggattatcgctgcattagtagtagccgcatttatcgtttatcctaaagttcaggcttcacaacgtgcacaggctgaaagtaataacatagcaacaatacaggctggtgtaaaagcactctatacatcagcatccagttttaccggattgacaaatactgttgcggttcaggcgaaaatattcccggataacatgttaagtggttcaggttcttctgcaacacctatcaatgcattcaaaggaaatgttgtcgtggcatcggcaaatacagggccttccgcagcaacaggctcctcatttacaataacctattcaaatgtgccagcagcagaatgtaccaagattatcactgcagccgcagggaatttctatacagcaggtgtaggaacagcaggtaatgttaaagccgcaggtgaagtattagatgttgctaaaaccgcaacgcagtgccaaagtggtggaaatagtaatacgttgatatttacttctttataa

SEQ ID NO: 189796 - DNA, 612 bp, Klebsiella oxytoca
atgagagagtcagtattagttaaatataggaaaggtcaaaaaggattttccctgttagagcttttgttagttcttgggattgttgcagcactaatagtagcctcatttatcgggtatccgaaggtaagagatgcaagatatgttgatatcgaagctaaacatattggacagatttatgcctctgtaaggaatgtgtatgccgggcaacctgactacagcgggctggcaacaactgctgtggctataccagcacaatttttcccggatgatatgctttccaaaaatattacatggggaatatcatcatggggcggctatgtcgtcgttgacgctaatgatgccagtccatcaggactggcagcttcatcatttacaataagttattcagatgtgcctgatagtgtttgtataaagctaatatctgctgttgaaagttccttctataatatctatgtttcaaaccaaaagggtataaatggcagtggtgaatcagcgggtaagaattatggaacaatggttaaacaaaatggggctggcatcgacataacactaatgacatccacctgtaatagtggaggtcagaataacagggttgtatttctggcactttaa

SEQ ID NO: 189797 - DNA, 306 bp, Klebsiella oxytoca
atggatacagaggataaaaaaaagaaagcaaaaaaatcattacagcaaaaaattgccagtgctcagctacgtcttaatcgattgcaacataaatcaaaggttgaagccaaacagattgaaacacgtcagaagatcattcttggtgctgaagttgcaaaagcagttgatagtaatgtgtttgatgtggacaaagagttggttcttggttttcttttggacattggcgatcttaatgatgaagaagtgattaaatataaaaagaaagggcgtgcatttcttcttgaaatgaagggcaggcagatttaa

SEQ ID NO: 189798 - DNA, 672 bp, Klebsiella oxytoca
atgaatgtatttaacagcaatgattatgaaagggcctgcatatggtatgaacgcatcaaatattgcgttgaaaaatttaacataaaaatagaaattctaagggagaaattagcagtggatttactgaataatcaaagtgtcaactatttccatgccgattaccaatcgataatagataactttgaaacagaggtttatcacattattgaaacatatgctgtagatcagcaatacctgccatttttgtttatgataattgaggaatatgctgatctaatatatgactcaaccagctttgttttacgtgttttaagtcacaatggctttcatgaaccacacaatattccgacttttggttacgaagtgtatgaggctataggtctcttaaatttagatattgaagatataaaagagcagacaatatataagtatcataaaatggatttttcctatcatgactggcattttaagtatggtgaacaagagttgatgaactcatgtgctggttttgagagtcgagttgcaagactatttaaagattatggatttgataaaacttgtattcctgtattgatggcaattattattaatgaagtggatcacatttacgggttttcagattatggttttctagagtctttaatcaaagcaattgaaaacaggatagggtga

SEQ ID NO: 189799 - DNA, 159 bp, Klebsiella oxytoca
atggcaaataaaaataaagcaatgcccacttacgcattatcgcttcgctctaatgccgtggggtctaccgacggttgcctgccgcaggctaaaaccgtttccttcggaaacaaaatcaaggtcaacgtcaacgtcaaccccaacgttttccttacgtaa

SEQ ID NO: 189800 - DNA, 1512 bp, Klebsiella oxytoca
atggcgatatacagttttaaaatggagaacatcagcagaggcgaaggcaaatcttcggttgcctccgctgcctatcgtcatcgtaaagttttcactgataatcgtactggtgatattcatggtcgtaaaacagcgcataaaaaggaccttgcctttgcgcagatttttgcccctgaaaatacaccaccagatctgatagtagatagtgaaacactctggaacgctgttgaagcatcagagaagaggaaggatgcccgtctcgccaaagagtttaaaattgccctgcccgctgagctaacaccagaacaaagcattgaactcaccgctgcttttgttcttgaacacttcaccaagaagggaatcattgtcgatgttgttatccacgatatcagtggtcataacccccatatccatatcatgggaacaacccgtgaggttcattctaccggctttggtaaaaaggtccgtgagtgggataagcctgaaacgcttgatggctggcgtaaaggctggcaggacttctgtaacgaattccttgagaaatatgagcatgaggttcgtgttgaccaccgttccatcagggttcagcatcaagaagcacttgaacaggcagtagtggctgttaacaatgaagacaaagctatctggcttgccaaagctgaagaaacaaaccgtgacccaatgaggcatatccctcgtagtcgctggaacactcaggccgctcaacaacagcgtgctacagaacaggctgttcgtgatgacaggaagaaagaagccaaaaagacgtattccctgtttaaagatctgccactggatattgtggttgatgtcaggagctttactgtatctgttctccctgagccggaggaaatcgtgttggctgatgttctcgccagtacagcagataacagaaaaaccatacctgctccgacgattccagtttcacaaaaaagaccagcaacaaaatcatatcgtgatcctgataaggtaaatcaggttaaccgacaatcaaaaccatcactggtgatcccggcttcaccccgcactaaactgaaaacccctacctcttcaacagcgggcgcagttaaacgtgcgcctgttaaaagcaagaggaagcaagttaaacctcgtcagagtggcgtgtttaagcgtttcacagtctatatcatcgatttctttaaagagaaatttgtctgggccaagaagaagccagcccctgtttcagttgatgcggaacacgataagcgtatagctgaaaactatgtgttcgatgaagttcaaggcatctacgtcccacgcgctgagtatgaaaaatgtgccagatttaacagcgatgactacaagcctaccaaggaggagagccgacgtttcccaagtcgtccagagaagggtaaaactgatgctgataacagtgtgacttttacgccatcaatgccaccagaatgtactggaaagagccatgtcccaaaattgaggccaccggggtatcgtcataatcgtgattatgagtga

SEQ ID NO: 189801 - DNA, 1980 bp, Klebsiella oxytoca
atgcgaaatataaattcaatcatgttgagacttgccaagagagcagagaaattacaaccagaccatcttatcaagtcttttgttgatgttggacccacatacaccctgttgtctagcaacgataatcaaataatgtttggtcgcagaggaactgggaaaacacattttttggctgttctttgtaataatgttcaacaaaaaggcattatttgtgtccctattgatatgaggatgattggttcttctggagggattttttctgactccaatatattattaagtgaaagagcgaccagattactttctgatacgctatgtaaaattcatgaagttatattggattatatttttgagaaagagatagataatgcaactgaaatagcactgttattgaatgattttgttgagaaagcaacatcattaagtattgaagggattacagaagaagaaaagagttcatcaaatcaaaacttgatgaattcaacgttaaccgcaggattaaccaacaaaagcatatctgctaatttttcactttcagatggaacatcatcaaataatacagatcgcttaaaagtatcaggaaaaaaaacattaagaattcactttggagaaataacaaaattactcagcaatattattgccaaattacctgagaaggaactatgggttttaattgatgaatggtctgaagttccactggatctccaaccttaccttgcagagcttctgcgccggattttgtaccctatttcaggtattacggtaaaaatagctgcaattgcacaccgttgtaactttatgataaatgagcacggcacaggtgttcgtataggaattgaactcggttccgatgcttcatccgttattaatttagatgaatacatggtatttgataatgatcgcgatgccgcaaaaaaattcttcaaaacacttcttcatagacatgctcaggcaatagataaaaattccatatgtgacgctgaaacaaatttatttataaatgatttatttactcaaccatcagcatttgatgagtatgttcgtgctgttgaaggtgttccacgcgatgctataaatattatttctcttgccgctcaatcggcgctggaaaataaaatatcgatagttcatatccgtaagtcagcacagaaatggtttcaagttaacaaacatgctgctcttaacagcaaaccagaagctgttatattacttgataaaataatcaatgaagttattggacatagaaagtctcgtggttttttaataagtaatgaaaataatcacccactaattgattatctttatgacatgagggttattcacgttttaaaacaaggtgtctctgctcgcaacaccatagggaaaaagtacacactctacactcttgattacggttgttatgtagaattgatgtcatcaagttctgccccgttggggctaattatcgaatccgatgaaaataacaagctaaaatacatagagataccaaaatcagattacaggtcagttaaaaattcaattttagattttgaacaggacaactctcaattaagattgaatctggttgtatccactgatcatcttcaactacccattaacgctggcaaaaaaataaatgtagagaaacctattgacaataaaatattaaacttaatgcccaaaaacattggtattttaaaaatagaagggacaatatatattcccattatcatggtagccttggtattaaggaaagccagaggatttgagaaaagtcatgctgtagagctaacaaaaataattaatgaatacattactatcgatataaacaggcctaagatttctactactaacatgtctagagagcttaggaaagacaatatattagacctcccgtggttagaattttatgagaatggcaggagtcctcaattttctttgcgagacaactggaaaaagtattggaagatatattttgaaaaaaccgcccctgtattttaa

SEQ ID NO: 189802 - DNA, 324 bp, Klebsiella oxytoca
atgaaccagcgagaatcccatagagaaatcttttgtaagcgtttaaaagaagcgcgacttgctgctggcttgtctcaaaagaagctgggcattgctgccgggatcgacgaatttgtagcaagtactcgcattaaccgatacgaaaaaggagtacatgaggcagatatccatactgctcaaaaattagcacaaacgctaaatgtcccattagcatatttttatgtggaaaatgaccagcttgctactatcgtgatgaactttgataaactgtctgaggaagatatagaaaatataattgtcaaaatcaaaaactataatcaatag

SEQ ID NO: 189803 - DNA, 474 bp, Klebsiella oxytoca
atgtgtctgattgatacagatacaaaaaatataatcaaggttgatggttatggttcaaataactacaatagaaaacttgggttctatcggttgtcaattcgtgatgacaaatccgatattgtcagtatcgcatcgcctgatgcgacaaatacagaaatagaggatttattagatcctgaactcatgttcacatcattaattaatctttctaaaagtgatagtactttacgaagctttatgagtttatataatttgaataaaagtgttaaattcactaacataagtaatgggatgagttttttagaaaggaaaacaaagtcgtctcatgaaaaaataaaagatttttgtgattatctatcgactagtaagcttaaaaaactcattgcggaagagtacaatagagaccccagtaaagttatagttagacctgaggatcaatgggttatcagaataaaaaaattcttctctaaatga

SEQ ID NO: 189804 - DNA, 255 bp, Klebsiella oxytoca
atgcataacgtgattgaaatgaagcagcagcgctggccctttgctggtgttgattatacgttggttgcaaaaggtgagctacgtctgatcacggaagattcggggcgccttgctgctatcgctgaagatcatcgaattgctattgagggtggaatgttttttaaggagcctgacgggtttgataaaatcattgaatgtcttcagcaggttcaggatgaatttaatcgtgctatgaaaaaaggtaatggggcctga

SEQ ID NO: 189805 - DNA, 972 bp, Klebsiella oxytoca
atgttcactgacattgaaaatattttacaatcacagaaaatctctggtgaagctttttttgttgctgatactcaaggtgttgtagatatatttaaagttaatcttgaacctaatgccgaagtagatctgaccacttcattttccaaaagtataatggataatatcattgaacctaacagaggtaaggcagtaatcccacttgtgtcaacattactggaacgagacaaacaagttttcgaatatgaccatttagcaatcaatcacctccctattgaatttacgaagatgaacgatgtgctaaatttcggagtcaatggtaatgcaacacagtttgatttcactacacaaagccttacatcggtaaaagccgtaatttaccatatttgtgatggcaatgggaacagtgtagtaatttaccaacacaaataccctgtttcactacataagaaaacaaaaaaatctttttttagtttaaatggcagaaccttagataaaataactcatgatagtattgatataaatgacactattgactttttcttcttccagaataaatattacgcattaaatattaaattacttgaaagaatgtatgggttagagagtgtgatagataatcttgcaaacaactcaacgccattgataatcagtcttggaattgttaacacacaaggtatgccagcaccgctagatattttcaaggatatgtataaagacagggcatttatgcgtagacttgctatggtctcgaaaggaagcttagtacaaacgggggtatcaatacctcaaatacaacaagtaatgcagcaattccctgtttttcagagaaatattgatctgacaggtggcttagtgaaccttaatacgaaagatcaaaaaagatattttatccgactacttaataatgaagcttcttttgctgccctcgacaactcgcccttcctggctgttgaaaaagactccgctgcttaa

SEQ ID NO: 189806 - DNA, 594 bp, Klebsiella oxytoca
atggatagcaggccatatcttaaaacagtactatatatactatcactgtggcttttatttttatcattattaattatgtcctacgataaggttttgataaaaaatgtgtgggactatattttcactgaaaattttacttttccgatctcgtcattgagagtgagaaatattgttttcatagttagtttggttttcatctttatcggtgcaattattttaataattcttgcaaatagttttggttcgggctggtctgttgcatgtactgtatcagacattagcaatgaaaatcatgagcatttagaatttttaaccacttatataatgcccttagtttttactgatgtcgacagtaaacgaactgtattaaatttaggattgatgatatttgtcatcggcgcgatatacgtaaaaacaaataggttttattcaaatccatcacttgcaatactcggattcagaatatacaaagctaatgttcatgatagaggtgttaaaaaatgcacaattatatgccgtggtgttctaaaaagcacagatagtataaagtatataaaaatcgacgatgaaacttatttggctaaaataatatag

SEQ ID NO: 189807 - DNA, 1125 bp, Klebsiella oxytoca
atgagtgagtggtcaaacgtaaatctagcgtcattgttgtcgtttggtaatggcaaatcccggccattagattctggaaatattccagtatatggcggcaacggtattatgagctatgtatctcactttaactatgatcatgaaacaatcataattggtcgtgtaggggcctattgcggtgctacttattatgaaaataagcccatttggatttctgacaatgctctgtcagccaaagcggttggtgaacataatacaaaatatttatattatctattaaaaaacttagatttaaatcaatttgcagaaggttcaagtcatcctctgctaacacaaaagctgttaaattcaattgaaacaaaaacagcattaaatcctaatgaacaaaaatctattgcctctgtgctgtcctctcttgatgacaaaatagatctgcttcatcgccagaataaaactctggaatctatggctgaaaccctgttcaggcagtggtttattgaagaagcacaagatgaatggcctgaaaaaagcctcaatcaatatgttgagctaaataaatcatcaataagtaaaaagtatgatttcaaagagattcaatacttggatacaggttctctaaccaaagggaaaatatctgaacttcaaaccatgctgttatcagaggcaccaagtcgagctaaaagattagtcaatgagtttgacataataatatcaacagtacgcccagatcagtgtcattatggtatttgcattgatccaccgtcaaatctcgttgtttcaacaggtttttgcgtcatttctggcaaatcaattagcccattttttatttactatcttttaacttctgaggatatgaccgaatatctgcactcaatagcagaaggttctacgtcaacctatccttctttaaaaccagaagacattggcaatgttttattcctctatccaggtgaggaaaaattaaaaaactttcataaacttgttggctcttactggaacaagattcataacaactacaaaaaaatacagaccctagaaaccctccgagatactctcttaccgaagctgatgagcggtgaagtacgggttcagtatgcagaacaagcaatcgcgtcagtagcataa

SEQ ID NO: 189808 - DNA, 480 bp, Klebsiella oxytoca
atgcaaaagacatgccacttaatgattggttcgtacaaggctattacacagtgggaggttttaaatattctcgtacttttgcaccattcagaggcaaaacagtcccaaaagagtgcaagcttgataaacaacttgggcgatttatgcttgctaccagttttacatcatcactcatcgcatatgctatttcgatacaggacgaagcaaatttccgggaactggagaagacggaaaatctataagtttttaacaagacggttggtcaatccattatgtactggaacagtcagtagaaatggatttgcaacaaccttttctgttaagcactataatttatccaaaatattaacgtccgcttcacaacctgagacattcgacaagctttttatggcttcagtaagggcgactttcgcgcttccagtgccagcaaatatttcgcttcgtcgtaccgggttctggtcttcctgcagcggtaaatga

SEQ ID NO: 189809 - DNA, 774 bp, Klebsiella oxytoca
atgtcagttattaaagttgttcttgcagggatcatgttagtagcaggcctgtcttctcaggcagcaatggctaaggaatggaaagaaatccgcattgctacagagggtacgtataaaccgtttagctacattgccaatggcaaactgacaggctttgatgtcgatattgctaatgcactatgcgaaaagatgaaagccaaatgtaacatcgtgtcgcaggagtgggatggcatgattccggggctgatgtctggcaaatatgatgcaatcgtggcaagtatgtccattacccctgagcgtcagaagaagatagattttactgacaagtattacgccactccggcccgctttatcgcgactaaagacagtgacatacaagaaaccacaccagcttcactgaaaggcgtgactgttggtgtgcagggctcgacctctcaggcgacctatctcgaggacaacttcaaagataccgacgtcaaaatgtataaaaccgtcgacgatgccaacatggatcttgctaacggtcgaatcgatctcgtgttttccgatgctgcaatcctctctgactggatgaagtctcctgaaggggcatgctgcaaatttgtgggtggtgatgttcgcgatgaaaaatactttggcgtaggaaaaggcgtaggcgtgcgtaaatccgatgcggacctgcgcgatcagttcaatgcggcaattaaagccattattgctgacggaaccttcgaccgaatcaacaagaaatatttcgacttttcgattaagtaa

SEQ ID NO: 189810 - DNA, 711 bp, Klebsiella oxytoca; identical to SEQ ID NO: 94300

SEQ ID NO: 189811 - DNA, 684 bp, Klebsiella oxytoca
atgtttgagcttttacaggaatacggtccccgcatgctgaacggtcttggcattacctttcagatagtactgacatcagtttttgccggtgcgatcctgtcaatgttaatcctgatgctgcgtatgtctggctcatcgatactgaagtcagtttctcttgcttacatctactttttccgtggcacaccgctactggcccagacatttttggtttactacggcgcaggtcagttcaggcatgaattacaggggctcggtttatggtggttcttccgtgaagcttactggtgtaccgttttcacatttacgctaaatacagcggcttatcaggctgaaatctggcgcggtgcgatccagtcggttccaggtggtcagcatgaagccattcatgcattaggaatgacacggacctccggctttctgaaaatccttcttcctcaggcctccattgtcgcgttgcgccctttgggaaatgagctggtactgatgatgaagtcatcagcaatcgccagcaccatcacggttatggaagtgatgggaaccaccgcgcttgccttttcacgctctttcgatttccaggtttatttatgggcagcaattatttacctggccattgtagaaatcattcgccgcctggtattgaaaatcagtaaccgtctgacaagacacatggtcagggcctga

SEQ ID NO: 189812 - DNA, 753 bp, Klebsiella oxytoca; identical to SEQ ID NO: 94298

SEQ ID NO: 189813 - DNA, 747 bp, Klebsiella oxytoca; identical to SEQ ID NO: 94297

SEQ ID NO: 189814 - DNA, 1071 bp, Klebsiella oxytoca
atggtaaccggcatggcagacaacatttcaatggaagcggaagcgaccaatgcgctgacagcgcagcagagcgatattgactgtgactttgcagcagacgttcttcttgagcactacggcattcgcggtgaagtccgcaaattgcgtagtgaaagagatcaaaactttctggttgaaagcgcggatggcgctaagttcacgattaaatttgcccatccaggtgaagaacggatggtaagcaatttccagactgagctgatgcatcacatcaatcttcgtgcccctggcctgccgattcaacaggtcagagcaacgtcagacggtcgttttgaactcattcttgattgcctggggcaaatgcgtacggtcagagtcgttacttatcttgaaggtaagctaatggcacagtcacctgcgactaatgtacagaaatataatcttggcagcatggctgggctcgtcaccagtgctcttttggatttcagtcatcccgctcaggatcatgtgctgctctgggatgctcaacatgcatcatcgctgcgcgaatacatgaaagtgattgttgcacctgctcgccgtgccatgctggagttttgtctggataactttgaatcacgcgttaagccacttcttccctcgttacgtaagagcgttgttcacaacgatatgaacggcgacaacgtgctggttgatccacaaaatactgacgaaatagccgcaattcttgattttggtgacgccgtctgcacagcgattgccattgatgttgcggtgggagccacttatcagatgggaaccggcgagcgcttgcttgatggcgctctcgcctaccttcgaggctacatagcacaggttccgcttcaggaagaggagatcaacattatgttcgatctgttcctcacccgcatgtttgtccgaattgtcattaccgaatggcgtgcacgtcagtttccggataaccgtgaatatattctgagaaacaccgcaaccagctgggcacagctggaacagttattgtctctgccgtttgaagaaactcgctccctcattgaatcagcctgtaaggaataa

SEQ ID NO: 189815 - DNA, 1350 bp, Klebsiella oxytoca
atgtcacagtcattttctcccactgctggtatgcagaatgggtttgatattgcccgtgtgaatgagctcaatactcgtgaacgtgaaatcgtgtcacgccgcgaatcactgcttggcccatcctataagctgatgtatgaacatccggttgagtttgtgcgtggcgaaggcgtgttcctctatgatgccgaggacaatgcctatctcgactgctataacaacgtgccttcagtcggccactgtaatccggcagtggttgaggcggtctccagccagattgccacgctcaatactcacacgcgttacatgagcgaaaacattcttaactattctgagcaactgctgaatacctttgagcctgagctcggccacgtcatgtatacctgcacgggaagtgaagctgttgatctttccctgcgtatcgccaagttctataccggtggtaccggcattatcgtgactgattatgcttatcacggtatcaccacaacagtggcagctatctcaaccactatgggtaaatacgtcccggttgatcagcatgttcgtacggtccgtgctcctgacgcctatcgagccggtgaaggcgtggatgtggcgcagcgactggctgatgatattgaagcagcgattgcagatatggcacgccacggcatcaaatttgcggggttcattgcagacagcattttctccaccgatggactactgaccacacctgctggcttccttaaaaaagcgattgatgtcgtgcacaagcacggcggcgtttacattgccgatgaagtgcagcctggcttcgggcgtaccggctcgcatatgtggggttatcagcgccacggtattaaccctgatctggtggttatgggcaagccaatgggtaatggcctgccaatcgcagcggttgttgccagacctgaattgctggcagattttggccgtaaagttcgctatttcaatacctttgcagggaatccggtctgtattgctgcagcacaagccgtactgaacgaaatacagaacaaaaacctgatggagaattcacaccttctgggtgattaccttctgaatggtttccgtgtgattgctgaaaattatacccagattggggatgtacgtggcgcggggctttatcacgcgattgagttcgttaaagatcctgacactaaagagccagataccggattaacacgtaaagttgtcagtgaactgcgtgagcgccgtattcttatcagcacaacgggtaaaggagagaacagcctgaaaattcgtccgctgctgacattcaatcaggataatgcggatctgctgcttaaccagttcgaagacaccctcaaagcagttatcaggtaa

SEQ ID NO: 189816 - DNA, 879 bp, Klebsiella oxytoca; identical to SEQ ID NO: 94294

SEQ ID NO: 189817 - DNA, 321 bp, Klebsiella oxytoca; identical to SEQ ID NO: 181692

SEQ ID NO: 189818 - DNA, 1692 bp, Klebsiella oxytoca
atgctttcaaaggaaagattaagcgcaatacgcgcgaaagtcaatagagctgatagctctacaaataaaaaaagtgcaacactttcaagcgtttctataaacggtgatcgaatcacagaacgcaaaaaagaaagtttcaaaacggcgaatagttttattattcgcggcaagattgaagaaaatgaaacgctaacaaaacgcggtgaacgttctttgaactgcgctcaacagcgttatattgtcgttgttaatggtaaagcacataccgtatttactcaccgctgccgctctcgtcattgccaaaactgccagcgcattaaagcgtttgtgtggcaagaaaaaatgaaagagatatttccagatctcatttctaaatatcctaatcacaagtatttatttattacgtttacagttaaaaatccaaaactaaaaaatctaaaatctgtattgatttgtatgtctcgcgcatacgctaaaatgtttcaacgtaaagcgtttaaaaaatggtttgttggtggtattcgttctactgaaataacacgaggaaatagcggagaagatgaggcgcacccgcattttcatgcgctgatctgcgttcatccttcatactttcaaggcgtgaactatatgagcgcagacgtttggggccagaactggggcgagtgcttagaagctgaattcaaaaaggaaggtttagaatataacgccgctgattatccaaaaggtttcccgcgcgtagatattcgtcttgctaaatcagcagacagaaaaacggatattaccaataaaaatataactgagcatggcgagcagcttataaactacgttttaaaatatagcgtgaaaggttcagacttgctcaagaacgggaaggctgatgcgtggttttgggagttcgacaagcaagtaaaaaatattagaatgatagcagcaagcggcgatattaaaaaatcactcgctaaacttgaacgcgatcagtttgattattataaagaacaagaaaagatagaaaaactaatatctgatgatgtgaactttaaagcagataaagcagtgtttaaaaaggaagatgactacaactattatttagaaagcaaaaaagataagtttcaatatatcattgaagcgattgaagctaaagcgtataactatcaatgctattataaagcgttattatctgaccatcttttagcgtttagaagtggtatcgatggcatcattgaaaactttcgcaaaataaataaaacaaaaacgagagaagattttgaaatgttagaagcagcagagcaggagcttgtaaaaatacaatgcgaaagaatagaacgcttgcgctttatttgtgatgcgcttgtaagagtcggtttatataaaaagatgtctgattttgtgtatatgaatatacatacaaatgaaaaaactgttattgtaaaaaataacatcgtagatattttgaaagcagcagaacaaaaacttttaaacgattttaaccaaagtttcatgagacttgaaagcgcaaaaactcaagacgtattcaatgctattgttgagaatgtaaatgaaaaatcagcactgattaaacttgtaagaaatgagattttagccgctggcgcgtatgcttatgacgctgataatctcgaatatatagatcttgaaactaacgagcgtttagaagttatagcgactatagaataa

SEQ ID NO: 189819 - DNA, 456 bp, Klebsiella oxytoca
atgtattatttaatatgtggtctatttatagctatattttttattgcctgtctgctttccgttatatatgccgctgaaatatatcagtggcagcattacaacgcttacaagtttaaacgctggttgaaaagtggaagtataaaaaaagatgaggagcaagaaaaaataaaaagggaagtaaagaaaatgactatagataatattttaagactcctcaagaaatacaaaatagattttgacgctaacgagttagtgaaaaatgattttaatattaaaatgaaatattacaaacttatattagctgagaaagaaagactgaaagaaaataaaagattagatgaagagttaaaacaaaaaataaaaatagaaactgatacgtttgacgctgaaaagtttcagaaagaagcagaagaacgatttaaaatattcatgaaaaatcgtaataaaaataaataa

SEQ ID NO: 189820 - DNA, 246 bp, Klebsiella oxytoca
atgaatataatgggttttttgggttttgtagcaaaagcaaaacctgacgtggatgatggcggcggcagtcttattcccgccgctatggggttttttatttgtgcttttttagttgctattattgcgtcagttgtttcaagtgcttttcgttctgctaaaaactctgctgatgtgagtataaataatgcgaaaaaatatcacgtagccttgataaaagagcagtatcgaagaaaagggggcgggtaa

SEQ ID NO: 189821 - DNA, 411 bp, Klebsiella oxytoca
atgaataacataagacctaacctaaaccctcaaagggaaggaacggcggacatggtgaaccgtctgaacttctatgatacgtcttttacttgcttacatttcttaatgatagattttgataatgacatgcaagaaatgaaaagaaaaaaagattttcatccgctgatgcttttgaataaacacgatagagcgagtttagatttagagatattaaatattattagaatatcacttgctagcaaaatgttagatattcaaagcgatgaactcttgggcgctgatttatattttaataaaagagatgagttagatatgggcgaggatgcaagaataatagcttatgtatttagagactttgtaaaacagaggatagaagcagcgattaaaaatatggaggataaaaatatatga

SEQ ID NO: 189822 - DNA, 342 bp, Klebsiella oxytoca
atggcgtttaatatagaaaaatataataaagtaaaaaaagagcttgagcaaaaagcaaacttattaaataggatggagcaagaaatgaaagctgaaaaaaggaaagaggacgcagcgcgtaaaataaaagttggcgctgaactaataaggatagttagagaaaataatatagagacattagattttgctagcgatatttctttattggttggagctttaactaataatctaatattaaaaagaatacacgatcagcgcgagtttttgagaaatgaaggcgataagaggcttaacgaatggaaactaaaaaacaacaagaaaaggagcaaggcggatgaataa

SEQ ID NO: 189823 - DNA, 315 bp, Klebsiella oxytoca
atgataggaaataataacgatgattacgacgagtatttatttgacgacactgtagaagtttctttgagttgtgaagatgatgaagattatttaaaagagcaggagcaagaaaaaaaatctgttttacagaaaatgattgagtataaaaatgaaaatactttgtttggttatttatacgaaatatcggggatttttgggtttactgtggttttattaataggttttattctaactctgccgattttatttattgctggagttattgcgttttttattacaatgaaagaaaagagagaggcaaaaaatggcgtttaa

SEQ ID NO: 189824 - DNA, 321 bp, Klebsiella oxytoca; identical to SEQ ID NO: 129668

SEQ ID NO: 189825 - DNA, 1209 bp, Klebsiella oxytoca
atgcgggccgttatccagtccagcgctatcctgaatcaacgcactgcgctgactcaggaacgcgaccgcctgactcagtttcgatatgaaattgaaaggctccgaacgcggcgaagggctgccgacgttgagctggccgcaggacaggctaccataagccagttcaatgaaaataaccgggaactgcttgcagccattgaggctgaaggacccatagtacagttaaatcagcgtataaagttggcatacgatggcttcctgccagaacttcagcaatacatggctgcactgccaggcatattgctgcagggattgggtgaacaggcccgaaatctgtataacgcatttaaccgaagcgatgcatcaggcgatctgctgtacgccctccacctgccggttgctgaaaacggcaagattgaagtcgaattcagggggcaaccaggcactcgttacgatgcgctgattattttcagtgaaggacacatcaaatgcctggggctcgccatactcttggccaagaatatcatacagggctgcccggtggtcatctttgatgatgtggttaacgcgattgacgatgaacaccgggacggtatctggcgcactttttttgaggatggactgctggatgacaagcagataatcctgacctcacatgccgaagaatttttaatccgcattcaacaggagctgggggcagcacgagctggtgccatcaagcgttacaaattcctgcctcacacaggggaacacgaactgcgggtagacagccatccgccgacgaagaactacgtcctgttggcacagcaggcgctggatggggatgaaaaacgtgaagcgctccgccagtcccgtcctgcacttgaaagcctgactgacagtctctggtcctggatgggcaggcgcggggacggacgcattgaaataaaacttagcgggccgcgatccccatgggagctgaataacaaatgctctaaattaaaatcggccgttaatcgcattgcagcccaatatcccggtgcaccggacgcagttgtagctttagagaggttgctgggcgtcagcggtgcgagcattgaatggggatatctgaacagcggcgtgcatgattcacagcgggaccacgagtttgaccgcgccacaataaggatcatcgtggagtcgatcgtatcccttgatgctgcaatcagcatcatgagaaaccgatag

SEQ ID NO: 189826 - DNA, 1536 bp, Klebsiella oxytoca
atgggtgatgaaagtcagaaaaatcataaaattagagtcgctcagtatctgaggatgtccacagaccatcaacaattctcaatcgacaatcaggctctttatctaaaaaaatatgcagaagatcacaatatggtgattgtagaaacttatgatgatgaaggtaaaagcggagtctccgcttcaggtagaaaaaacttcaacagactaatagaagatgtcgttacaggaagagtaaaaatagaagctgttcttgtttatgatgtcagtcggtttggtcgatggcaagataatgatgaggcagggcattatagttatctactaaaatatcatggggttaggattatttattgtgctgagaacttaccagatgaatcgcctgaaatccaaatgcttacacttcctgctcttagatatgctgctggtgctttcagtaggaatctttcagtaaaagtttttgcgggacacgtaaaccttgttaaaaggggatactatcagggaggaataccaggatatggattaagaagaaagttaattgataataacaatagaccaaaaatgatactttgtcctggtgaaagaaagagcctgcaaactgaccgagtagttcttacccctggtacaaaaaaagaaataaagctggtaaaaaagatatttaatatgtttatttttgatggattaaatgaatatcttatcgcaacaaaactaaacagagaggggtatacatatagtgataaaacagaatggaacaggagcagaatacattcaattctaattaatattcgctacacagggagatacacttataatcgtacttcacagaaattgaacgcccaaagaattcagaatccacaagaagaatggatcgaatatgattcatttttcaagcctataatttcaccagagaaatttagattagctaaagaaatcattgacaatcgttcaaaaaaaatgaccaatgaagaaatacttaattttttgaaaaaagttctcattaaacatggtaaaatttcaggttttattatcgatgaagatgataatggtccgtcgagtagtgtcgtagcaagtcgttttggtgggcttttgaatgcctataaactcatcaattacacaccagaaagagattatcgatttatagaaataaactcagccttaagggttagacatgccgacactattaagacaatatgcaaggaaattacaaatagtgaagtaacaatatctgaaaataaactcattacgatcaataaaagcttaacctttaccataatacttgcacgctgtagaaaaacctctacagataaatgcagatggattgtgagattagacagaagcattaattctgacatcaacataattgtaaggatgaatagccttaatagcgtcccccttgattactatatcctcccttctattgattcatttgaaaatgaattaaacctaaaagaaaataacagccttctctttgagatgtatcgattcgacgatatcaacatattttttaaaatgctttcgaccaataaaaaggaagtagcttaa

SEQ ID NO: 189827 - DNA, 630 bp, Klebsiella oxytoca
atgaaagatgatcaaatccacatgattaagatatccgacataaaagtagtcatcccacgttcacgaaataaacttcgacattcggaaattactgaaagtatcgacgcaagtggactgagaaagccaataaccgtacgtcgaatcgtggacaaaaagtatcaattcgctttaatttgtggtcaaggaaggctcgaatcattgacagctctaggagaagaattaacaccagcaatcgtacttgatatagatgaaaacaaagcctacataatgagtctggttgaaaatatggcaagagtagttcctcgtgctggtgaacagttccaacgtataaaggaaatgacagagcaaggattaaccaataaggaaatatctaactcgactggattatcattacactggataacaagtctgacaatgcttatcagtaaaggtgaaaataaattattatccgctgtagaatcaggaagcatacctatctcgcttgctgttgagattgcaagagtcgattttgaaggtggtcaggaattgttaattaaagcatttgataaaggtctaataaaacacaaagatgtaggaaaaatacgtgagatacttgactcacgagatgaactgtctcttatacacatctga

SEQ ID NO: 189828 - DNA, 396 bp, Klebsiella oxytoca
atgtctaacactaacgccaattttgagatgaacgggatcctgttagggcaagaagtccgtaaacgtcaaactcctcaggagaagattgccattatccagcagacgatggagccaggcatgaatgtctcccacgtcgcccgcctgcacggtattcagcccggcctgctgttcaagtggaagaagcagtaccaggaaggcagcctcaccgccgttgctgccggagaagaagtcgtgcctgcctctgaactcacagctgcgctgaagcaggttcgggaacttcagcgcctgctgggcaagaagacgatggaagttgagatcctcaaagaagcggtggagtacggccagtcgcgaaaatggatagcgcacgcgcccttgttgccaaaggacggggaatag

SEQ ID NO: 189829 - DNA, 426 bp, Klebsiella oxytoca
atgaatgtaattgaatctaaaattgctggattagggttcctgcaggcaattattgccagaatggctaataattccttttatattaaagggtgggacctaacattatttgttgcattagttgcattaaaaaaagatgtatcacaatattcgagctatttactacttgcgttaatagtgagtaccatagcgttctgtttattagatgcttattatctacaacaagagaggatttttaggaaaatatataactatttggccgaatcaacttcagaatccattaattatttcagcattaaccctgcgctatataaagataaactaaatggtgaaattctttcatataaaagctcattaacctccacatctattcttctttttcatataccaatgtttgttgctgtttttatcttttttgtattgttttaa

SEQ ID NO: 189830 - DNA, 864 bp, Klebsiella oxytoca; identical to SEQ ID NO: 162747

SEQ ID NO: 189831 - DNA, 279 bp, Klebsiella oxytoca
atgagtatcttcagcgaagagagaacatcatgggaacgtgaaatgctgatccgcgaggcgatagaaaacgctgagcagggtttcactgtccacctgagaaatggtgcgcgtattactgtcagctctaacagcccgtcgattgacttaattatttacggtctggaaaaaaccattcgcggtaatcatgagcgcgcacgaatgacctttattgattttatgtattactggcacgaaaggttattcaagcaggttaaaagaaagccgcgacctaaccactaa

SEQ ID NO: 189832 - DNA, 1173 bp, Klebsiella oxytoca
atgccgcacaagaaagtagcattacagctcattgaagaaacgcttaaagaactcgagtcaccaaaaggttccttgttctcggctatacaaaaattacagcggaccgcagatatcattaatgacgatgataaaaaggtatggtgtgctattcatttgggtgacgaaaaatatacaaaaccacttaaattgttcttaaagttcttaatcgataacaaaaatactactacgaaggcatatgaggaaaaattaaataaacatataaaatcgttatctgatataggtattaagtctggtgttcactattcaaatgaagaacttacgttaaaaaatgatgaaagtggtggtggatataataacattggttttattgaagagacatatgctgaccttgtgaggagaaagaaaggcaatgatggcactttctataagaataatttaaaccaacatatcaattatgtgaggaaaaaagcacatgaactagcatcacaaatatataatcagctaaaattctcaggtactgtcagcaactgttttgacatattgaagaatgctgtcgatgataaattattagatctaaatccagctatcgcagaacagttaatgttggcatttaaatctatctcgtcagataaagaagaagaatggtctcaagctttaactacatgtcgtaggcttctggaagggttggctgatgaactttaccctgcatcgaaggaaaagtttaatggtcggacagttgggcaaggtcaatacgtaaaccgcctttgggcatttatggatggggctattcaatccgaaagtaataaagatcttgccaaagcacatatagattttcttggatcatggcttgataaagttaataagttaacaaataaaggtgttcacgctgagttagatcgaattgaagctgtcaagtcagtattccacacgtatttagttgtggcggatttgcttgagtatatgtcaaatactaaagtttctgtctctaagcctgatatcaacaaagctactttagatgaacttgaagctttattagatgttaatcgggcgatcgccaaagaaattattaaagctcgagttcgtgaaggtaaacttgatcttgatattttggggggcattagaggtattgggcctaagacacttgaaaacataaaagaggtgtttattatataa

SEQ ID NO: 189833 - DNA, 1137 bp, Klebsiella oxytoca
atgacagataaaactaagctggttgcgattgcacgaaccgatgacatgagcgctcttgaagcactcaagctgttacggtttcgccgttacaatacggcaagaagtcagttaagagtcacaagtgtctggtctgcatggtgcgccaggcacggtctgccccccttccccgttacagcagttgatgtcgagcgctatattaatgggctgaatggatccgttaaaatggcgaccatttctcattttattgcatgcctttcaagcgtaaacagcagcctgggttttccagacttccgcaacgttctgatcaaagcactggttcaggtatggcgggcgggggagaatgagaaaaaaatcgtcaccggtcaggcccttccatttcttatatccgatctcaatattcttcgccggtcactgcataaaagcgacgacctgagagacatacgcgaccttgcaatgatatgggttgggtttgaaaccctgctgcgtaacgtggaaattcgaaggattaaaaccggcgacctgaaatggcaaaatgacacgtcctgttaccttctggacgtcatgcggaccaagacaagcctctcaagtaacctggcatttcagctctcaccacaatgcagtcagcatgtcagacggttgattgagacggtggaatacaccgatactgaaaccttcgggcaccgttttctttttcagcctgtgaacatccatacaaaccgatatttcccgtccaccagcagtaagctatcacggggtaaatccatagacaggatgctggtcaaagcaggattcagtcaggggttactgacgcagctacagaatgaatcaaaggtatcacgggaagatgttggtatgctgtcctctaattcactgaaccaggcatttgcacgcctctgggggattgccgggaaggtcggcgacagtaaccgacagtccgggcggtaccggacatggacaggacacagtgtgcgtgtggggggagccatagagctgtttaaggccgggtactccctggaaaagattaccgagatggggaactggtctgatccaaagatggtcttccgttatatccgtggatatcttgccagtgaaaaagccatggtaagctttatgcgtaatcatctggacgatatatag

SEQ ID NO: 189834 - DNA, 489 bp, Klebsiella oxytoca
atgatgatggttttcgggatgtttgtttttacgctgcgtactacgccttatcagcgattacagcattcgcaggtatggcgacacgttaaaaatgaccgggttaacgggtcggctgggtggcagtatatcgggccgggtgaagatgagattacgcttgatggtgtattgtacccggagattactggtggccgcttttcactatcggcccttgagaccatcggctttactggtcgcccctggccgttgattgaaggtgacggactgatttacggaatgtacgcattgacacgcctggatcgggaaaagtcggagtttattcgctatggcaacgcaagaaagatcaatttcaccattagtcttagccgagtagatggcgactttcgctctaagttgcaatcttcttctgtcagcgacgtgctttccgacttacggaccagcgcaaccaaagcggttaattccgtgtctgactcactaagcagcctgttttaa

SEQ ID NO: 189835 - DNA, 1278 bp, Klebsiella oxytoca
atgaaagggatgcaaaaaatcaaaagaggaaaaacctttaacgggctaatttcttatttattaaaacccgcttcgcaccataaatcagctccatatgtgatcggcggcaatgtcatagaaagcttcgcagaagcgttaagtgcagagttcaacacaacgaagcttctacgttctgatgtcagtaaacccgtatggcataattctttgcgtcttcctgcgggtgagcatctaactactgaacaatgggttgaggtcgcagatgactacatgaagcgtatgggcttctctgagacgcatctacgagcttatatacttcatgacgataaggccggtcagcacatccatatcatcgccagtcgcatcgaactcagttcggggaagctctaccttggaaaaaatgaaaatctcatcagcacccgcatcatccagcagctagaactcgactattcactgaccagaaccaagggtaagggtctggaattcttagtatcaccatccacagcttcgccctcacctgaaccgaaacgcaaaaaatcacgtaatgaagcgatgatggagaaaagaactggtgagctatgccctaaaaccatcatccagaacgctctggaagtattccttgccgataaaccgtcaaccactgagtttgtgcatcagcttaacgcacaaaacatcagagcaatcccgaacatcgcttctactggacgcatgaacggcttctcattcgaatacaacgggattgctttcaaagcatctcagcttggcaaaagctattcctggacagctttacaggacaaactcgattatcagccggaacgcgataatgctttcctgtttaaactgagagcatctgtcagtgaagcgccttgtatgttcatgactcctgacgctcctgaaatcacaacagcagccgttaacagccccatagaagcgcttatccatgataaccataaccgtgctggtcaggacgaatacactaacgcttctgtaaagcagcttcacttagaagcaggtgctggtgctcaagaagcgtttgcaaccgaagcggtaaaagaagcctctaagcaaagctatatggtttcaatgttcagatggttagaaaccatcccctatctcaataccattattaccatcttcaaaaacctcaaaatcccaacccttaaacgccctctaaaatacaaaaccatcactgacgtgagagtgatagagataacgcctctccccaaaaaaaatcttattgtatcagcacctcaatccagaagagcttcgctttcaatgtag

SEQ ID NO: 189836 - DNA, 666 bp, Klebsiella oxytoca
atgagtatctccaccacgaaacaccgcaatgaagaagtcaacgttagtctttctgatcgtcggaaagcagagattacggcccccaggtttgaactttttggtgaaacttacacgtttgttgagactttctctggcactgtcattgattcaaacccaggcaataaccagatctgggtaaaaagcaacgctggggatgagaggcagattcccgactacggtatcccgttcagaagttcacacactatccataaatacgagcttcgtcagtatggtaaaaatagctcatgttatgttcataataatgccctaattattaaaaagaacacaggtgaaaacgatgtaaacttaaaaaggaaaaccattattatccccgcttttctgacaatgctatttcataatgcttcgacgacatctttcttcagagcaatgcctgttccgaagtggttttatattctcttcactttgctctgcatggcttcattcattgcattttgttcattgctcgtaggattcaaagacggatatgtgtgggatgagcacaagtatatgtggtttacatatttcctctcaaggatcggaagtttcgtttgtattaaatggattaaaagaagaagcgagaggtttgatcatgaactcagaaatcttatcgatttagtaaaaagctaa

SEQ ID NO: 189837 - DNA, 282 bp, Klebsiella oxytoca; identical to SEQ ID NO: 101482

SEQ ID NO: 189838 - DNA, 522 bp, Klebsiella oxytoca
atgtttctggtctccctggctgaaggctttattcacctgttccaggccgcaggcaaaatcttcctcgacatgatgaccgggcttatcccgatgctcatctgcctgttgctggccattaatttcctgatgaagctggtcggcaccgtcagaatggagaaagtcgccgccctgctcggccgctcgcgcatcctcacctacggcgtgctgccggtgctcggctggttctttatgagcagccccggcgcactcactttaggtaagctcctgcctgagaagagcaagcccggctatgaagatgcgctcggcaccaccgctcatcccctcaccagcctgtttccacacgtggtgccgtcggagctgtttgtctggctcggcgtcgccgccgggattaaggcgctcggcctgcccgttacctcgctggccctgcgttatatcgccgccgccatgctgattggcctgatacgcggaattatcaccgagtacctgttcctgcggctcagcaagcgggggaatgccccatga

SEQ ID NO: 189839 - DNA, 1227 bp, Klebsiella oxytoca
atgtacgacagtgaattgaaagcatttgcgaaagagcaagagcaaaagttgatcaacgccttggcaaatactagagaacactttggtaccaattttgaagtaagaaatcgagatgactatcagcgcgattacgcacgaattctgtattcatcatcatttcgcagattacagggaaagatgcagcttttcgaagtcgatcctgaaaaattcaacagaaacagattaacgcacagtcttgaggtagcgcaaatcgccagaagtatcgcatcagacctcgaactggttcatcccgtggtggttgagctggcagctctcgcgcatgatatcggcaatcctccatttggtcattcaggtgaaaaacttcttaacgagctgtctgaggatattggaggttacgaaggtaacgcgcaggcgctacgcatcctgaggaagcttgaaaaaaaatatgcaggctgtagtggtttgaatctgacttaccgcagcttgctttcggttattaaataccccaatacccgttctactgctaacaaattcatttatgatgacgactttgatttttacaataacctgctttctgaaaggcagctcgatctgaaatctggagagaaaacgattgatgcgcagataatggatcttgcggatgaaattgcctatgcagcacatgatctagaagatgccctaagcagaaacatggtcacgatcgaagacattgagtatgaatttctgatttctgacaaattccaatgcgcgttagaccagtttagggaacttgtcagtaagtcaaaagtaacagcctttcaggcaatttcacttaagacctcagaggagtttgcaatgattttccgtaaggaattgacctccaatattgtcaattgcctcgtcacggacatttctgtaataaagaacaaaaatggcttttatgagcttggattcggaaatctgaatgccttatcggaaggtctaaaaaagcttctttttaaagtcatcatgagaaaacgtaatatacttacctatgagttcagaggaaatgtgataatcaatgatttatacgttttctataataaggatgaaaattataagttcctctcccctgaacttaagttttccttgcccaaagaggacactgatgcctttgaggccaagaaaaagcgggcggtggttgactatatttccggtatgatggacacgtttgctataaaagaatgggaaacgcattgcctgaaataa

SEQ ID NO: 189840 - DNA, 534 bp, Klebsiella oxytoca
gtggatgaagcgtctcttaaaaatcacaaggaactgaacgtaaaagaagatgagctaaaggctatattgtcacagaagaataaaactcaaggaagccagtttgatattatgttggcttataaaaatatagaaatatcggaagttaaactcaggatagcaacttcagaacgcaatgctttagaatatattttatcacatgctggtgacttcaatgatccaaaactcgtttctgaattaaatgccaccaataaaataatagatgacacaagatctaaattaattataaacaacaaagaaattattaaaataaaaaataatgttcaagatttgttgagtaaacgtcaaaaagaagatctcaatttttgggatttcttcttttacagcattggaatatcaacaacaactacatttggtgatttagtagccaactcaagattaatcagaatgctagtttgcatacaactgttgttatctattttggtgctagccaacgtaactcaaaatttcttgtcaaaaaataaaaactccctatga

SEQ ID NO: 189841 - DNA, 237 bp, Klebsiella oxytoca
atgaagcatgatgctgaaatggtctttgtcgtgggagaaagtaataatatctgcggtattgaaattccaactgctgatttgcttgaatcactagcaattaactcagggttgcatgtaaagaataaattctaccatgtaataaataacagaagtggtatgagacttaacagaaatagttcaggcgggagtataaagagtgaaatcgtcttttgttttgggaaaaaaaagcatgtttaa

SEQ ID NO: 189842 - DNA, 873 bp, Klebsiella oxytoca
atgagaagagttcatgatatatctaagtggtttactgaaatttcattaaatgaactatcatttatcaaatatcatttgataaaatacaatcaaaagaatttagaaaatcatcccgtatggtcttttcttagaattgcctttagtagcataattatcaaagcttcaaaccaaaaaggagaatctcattattcttcagttaagaaaaatgatttcagaggaagagttgtttctctctttaatgatagtgtaacctcggttataaaatgtgccaaaagtttcacttcagagttaggtgaagacaatttacgaaaaagaatagaatgccaggataataaaaagacaattgaatttagcaatggtagaacaataacactggttaatacagattcacgaaaaaaccataatcccttaccatccatttcagcagatttggtcgtatcttcaccaccctatttgatgtcatgggactatggcctatatcataaatttagattctattggctagactttaatcttgacgaatatgaagataccgaaattggaagacatcttcgtagacaaaatgatgatatcgaaagatataaactagatatgacagatatattttccagactatcaaaatccgttaaaaatagtggacgaattgcattgataaatgcaccttccatagtacatggtcaacttgttgatacaaatgagattctttccgaatgcgccaatgaagtcggttggaaaatggatgaatgtgttgagtcaatagatatacccggccctcatcacggtatgtatggaagcctagaaaaaagaaatgttatggcaccgggtaaagccggaaaaaaagagcatgtgttaatattctcgaagagaatataa

SEQ ID NO: 189843 - DNA, 639 bp, Klebsiella oxytoca
atggtcaggcaaaagtgtagcggtattaggcgcagctatttaggtgtgcacgccataattttacaaggtacacaaggtttagatcttaataagcgaggtgataactgggctatttatcgatatatgttgccatatcaaaaggcaaacaaaatataccctacactaatagcacctgttttatacttgccaaatgatgaagatcagtgtagagcggaaatggaagttgcaaatttattagcaactatattttatgctcccaatttaatctcagataagaaattatctattggcaaaaatttagatgatattgttttacatggatttaatggtaatatagctccaccaattaattctattagggtttcagataaagaagtagttgttaaaattggcgcaagacccgagcgtgcaagctggaggagtaaaggtagtggacaaatggatccatatattggaatgattgctgctgctaaatatgcttattgctttgaccacgcgggaaataaaactagagatttagttgttgagtttacttttcttcctgatggtttcttttattttacagactgggaatcaagtacatcattgtacaaaagacttgctttcgaaatagctgataaggttgttttttgtggctga

SEQ ID NO: 189844 - DNA, 1206 bp, Klebsiella oxytoca
atgtcatatcaaataaaaaaatttgtgatgagcaatggcgaacgaggatgtttggttctcgataaagaaacacagttgcctgtttattatcaaaatctctatcttacaaccaatgtcaggaatagaagtgcgaccgcatcaacgatggagatagttgcaacaaacttactaatactaagcaatttcctcaaaagcaggaaaataaatataattgataggattgaaattaaggagttcctaagtgtagcagaagtggatgacctgatccgttatgcaaggcagagatttgataagcaaaagattacaaatgtaagattaataaaagggtatcagattgcaagaagaactttcggctatagaattcatgttttttcgagctatcttaattggctgtgcggtttacttcattctattaagggaattcatgctagatatgaagtcgagagtttcatagaaagtattagagcacatctcccgctaaataaatctcttagcatgaatgacagaaaagataaatcactgagcaaagaagagataaaaaaactgtttgagttattagaaattgaaggaagccaaaatccttttcagaaggatgttcaagtgagaaacagactcatttttaccttactattgaattgtggtttaagagcaggagagctattaaatctaaaagttaatgatttaaatcctagggattacacactaagtattttcagaagacatgattgcattgaagatcgaaggctgaatcaacctttagtcaaaactggtgaaagggaaattccattgtcggacgagttagcattggagattttggattacataaataactatagaaataaatacaccaaaaagaagaagcataacttcctgtttgttacacacagttcatgtaaaacagttggagaacctttgtctgtttcagcatatgaaaagataatttcgactattaaaaaatcaagcccggaattaaagaatttatcaggtcataaattgagacattcttggaactatttctattcaagtgaaattgatgattcgaatttagatatcagccgaaaatcaggtttaaggtgctatctcatggggtggtcaaaagattcaaagatgtcagaaaattataacttcaaacacatatcaatgaaagaaaaggaagttattggaagagtttatgactctttgaggaaaataactaaaggggaatga

SEQ ID NO: 189845 - DNA, 1314 bp, Klebsiella oxytoca
atgaaaacaagcactttaaaaaaagagaatgtagtttttgcaatgatgaaggggtatgggttcaggatttcagataataaatggaaattagatataaataattgtgtttgcccacataaggttgccgataaaatgccagagtcgatgcgtgttggttatcttaataccttggcatatttttcgtctgaatatagtgcaggctacataaagaatataaatcacatctttagccaatggctaagattgatggatcttgaaatgattaattccaaagcggtttatcaatttaatgttagcttaggccctgagaaaaactataagctaaattcaataaagaattttcttagtaaatggaaaaaactcggttatgaaggagttgataactcagctctaagaatgctggaaaaaataaccattaaacctaatttaacaggggaagccgttaaacgaagagatccgaatagtggaccactaacggaagaagagctgaaaatcatacttgaaagtatcaggaaattgttgaaagaagataaaatccctctgtttatgtattgctacgttattctattagcaacaacgggaaggaggccatcacagctaacttcgttgaaagcgaaagatctcatcagaacggaagagggttgttttctaaatataccgaaagtaaaacaaaggaagaacttcagaagtgagttcagcatgatgagaatcgacgatagcctgtatgaggaacttataaccttgattgacctgaaccagaaacatatcgaagatagggtcaagaggaatattagtcatttaaaaaatgaattacctatactcatggacattaaacaatatgtattaattgatactggacaaagtttagataccatcatgacaactgattttttacatatgaagaattcttttatctcaaacagactaaataatttgactactaaattcaacattggctcatcaagtaataacggccctatacggattaatgcaagacgatttaggtataccctgggaactcgtttagcaaaggaaggtgcatcagttgaagtaatagctaaagcattagaccataaatctataaactcatcagggatatacgtaaaaaattgtccagacaatgttcatgatatagacaagatgcttaatcctttttttgaaccgctatcaaagatatttcttggagaagaacagtcaaaaaacaagaagctctttactgaatatattttaaattcgttcggattttttaatgataaaaatgaccaaattgaatgtttcacttgtaaaaactttagagcctggagttcccaatga

SEQ ID NO: 189846 - DNA, 132 bp, Klebsiella oxytoca
atgaatggcattgagaagttatttcttgaacttgatgataaagaagcaatggcgctggcacagtttattaaacgtctgacctggactgagatgagggcctgtgccatcagcgaggctttgttgaataaataa

SEQ ID NO: 189847 - DNA, 297 bp, Klebsiella oxytoca
atgaaagaaattgagctgacaccgaaagcagaagaagatctggaagctatctgggactacagcttcagacagttcggggttgttcaggcggatgcgtatatcggccgaatagcggcggtgtttgatgtgctggccatgcacgacatcggcacgcatcgcgcggagctgggagaagatatctgctcgctgccggtggaacagcacatgatctattttgtgacatcacattcggtggttacgatcattcgtattctcagccagtctcaggatacggcgcgacatgaaccctggagataa

SEQ ID NO: 189848 - DNA, 261 bp, Klebsiella oxytoca
atggcccgtacgatgacggtggacgtgggtgaagagttgcgcgaatttatcgattccctggttaaggccggtgattaccgtacccagagcgaggtcatccgtgacgcgctgcgtttactgcgcgagaagcaggctgaatcacgccttcaggaactgcgcgacctcctggccgaaggactcagcagcggcgaggcaaaaccatggaacaaggatgcattcctgaataatgtcagggccagggtggcaaatgaaagaaattga

SEQ ID NO: 189849 - DNA, 543 bp, Klebsiella oxytoca
atggcagcacgtggcgttaacaaagtcattctggttggacatctgggacaggatccggaagtgcgttacatgcccaacgggggcgcagtggccaatctgacgctggccacgtctgaaacatggcgtgacaagcagacgggagagatgcgcgaaaacaccgagtggcaccgtgttgtcatgttcggcaagctcgcggaagtggcgggcgaatacctgcgtaaaggcgcgcaggtctacattgagggccagctgcgcacccgcaactggcaggacgatgccggagtcacgcgctacgtcaccgaggtactggtcgggcagaacagcaccctgcagatgctcggcggccgccgtgaagccggtgtgcctgagagcgccacgcagtcgcagagtcctgccaccccggcacaacctgctcaggccgcgactaaatccccgaaagcaaagggcggtaagaaaggtcgtcaggacgccgccccgtctcagcaaccgcctcagccactcccggatgatttcccaccaatggatgatgaagcgcccttttaa

SEQ ID NO: 189850 - DNA, 420 bp, Klebsiella oxytoca
atgaaacatctgaacactaagactgcaaagtcaggaaatcgggcgcagagaagaaaaaacaagagcaagggcagagtgaaaaccatcgtttacaagccacgacgggtgggaccgtcttatttgcgaaacactgaagggcagagaccagcgctagcgatgccagccatcccggcagagcgcgaaaaaatcagcggctgtgactggctggactggaatcagctgtcagcgctcggtcttattgtccgcattaacgccgaaattcttcacccgcttgggttggcaatttttcgtgacccggctaacggcatctcagcgggcgctatgattgcgccagatggaaaatgggaatatgagcctgatgttattgaagggctgcgggtaagactctccgattattccggaaaacacggtcacttttga

SEQ ID NO: 189851 - DNA, 1605 bp, Klebsiella oxytoca
atgaagattaaactctcaatatataaagcaaaaagattcaatgatgatattgaaaaagttttgaatttggagagagtgagaaatccgattgagttcaacatagatgaggctagggtgtatttgtatgcaaaacaattcttagatcccaagcctcctgagtggacaactttatttacaagccaaaagccagaattggatcataatttcttcgggaaaaatagtagcactggtgcagtcttggttgttgaaatgaataactcaagatatctaattcctttcgggacagggcatcacttaattaatgataatagtattgtcaaaggttttggtcttaaaactacacttaattgtattgaacataacaaaattcgtagtttggataaaggcagccataatgaaacaaatctattaactcgtagtcaaagtagtaaagaggttgatatttttaaccttaaaattgattccgagatggatatacttaccactctgacagggacttccactgaagatgttttaggtaataaaataacgggtaaagatgcatttgtaattatgcctgatattgacctgaaatccatcccggagttgttaaataaaatagactccatttattcgcagcctctccctgaagagtttgaatgggttaataatataaaagaggcagatgaagcagaagttgagatacttgattcaattctggtcgatttaataaaagcaaaagattttaatgacatatggctgggtgaacctgaaattgtagattgggagaatcagataggctattgttttgagaagcggcaaagaagcatgatttatgaaagtttgtcggttagtcatatttgtgagtattttgaaagtaaaaagattgaaattactttaaatgatctcaaaggaagcagtttgcatgttttagatgcagattatcagtctttaaaaaaatggtctctttatagatgtctgtatgctgagataaaggaaggtgatcaaaactatatcctgagagattcaatttggtacgtggctgatagaaagtttgtttccaccattgataatgaaattaaacgaattaagctgtatgaggaagccgacaaattcccgatttattcttataaaagagaagagcaatacaataaagaaacttgtcttgctgatcaaagctttactcatatggatcaaaagttcatatatcatggtggtgggcgaagtaaaattgaattttgcgatattattagaggtgcaactgattttattcatgtgaaatattatagcggtgcgcaaagcatgagccatctattttcacaaggatttataagctctgaacttttcataagcgattctgaatttcgattaaagcttaatgaaaaattgccagcgcatataaaattagctgaccatacattaaggccagaggctcagaaatacaaaatagttttcgcgattgccacaagtaaaaacctcccagatgacttgcctttgttttctaagataaatttgaagaattttaataaaactatttctaatttcggatacgaagttaggatctgcaagatagatgtagaccccacaatttataaaaagaaaatttgtaaaccccaaaaaaaataa

SEQ ID NO: 189852 - DNA, 192 bp, Klebsiella oxytoca; identical to SEQ ID NO: 134334

SEQ ID NO: 189853 - DNA, 1170 bp, Klebsiella oxytoca
atgacgacttcatcatactttttctgggtaaatccgttaagacataaaataactcagagctggaaaggttatgaaccttcactcgaaggacactcaaaactaccagacataaaatccgtaatagctattgctgagattttctcaaaagatgaaagccaattgtctacaagggacattttcactacttctgttcttgcactactcatgtgtgctccaggaagaatttcagaaattttaagtcttccagcggattgtgagattattgaaaaagatgacaaaggcattgaacgatatggtttaagatttttttcagcaaagggttatgctggggatatcaaatggattcctacagtaatggtccctatagctcaaaaggcgatagcccgattaaaaaaactgtccagcaatgcaaggtttgcctcaaggacaatggaaggccaaggcactgatccatccaaatttgcactcgttaccacaaagcctcagaattttccttggtatgatgaagaaaaaagaattaaatattcaaatgctttatgtcttttatttgacaggcaactgtgtcagaagacaagaaaagattttacatcttttttcaaacccacggctgagttttttaggatggatattaatgcttttgcaagtattaaaggcacaacaaacctgttcaaaagacacggctatatcaatgaggatggtcttccatattctattagaactcatcaattaaggcatctgctgaatactttttctcaaattaatggcatggatgagttcagcatcgctcgatggtctggaagaaagttggtctcacaaaatgtttcctatgatcaccgatcacacttacaaatgactaagctcataagagaaaaaacgacaatcgaggcaagtaataggcatagaaaaaaagaaatagctatcatggatataactgatttcgattcattgaatgatggagctgtgctcgttactaagcacggttactgcaagcactcatatgcttttgacatatgtggttattatccaatacaagactctggaaaggatgatgaccgactattggtaattcataataaaattattgaaaaaacgtatcatgataaaaatgatgggaatgtcaatgctgaaaaatggtatgagtttcaaaataaaattataaaaggagagtaa

SEQ ID NO: 189854 - DNA, 735 bp, Klebsiella oxytoca
atggagggatatgtgccatatcagaaaaaagttttatccaaactagttgaaatgtatttatattttcctctgtatagatatttatatatctctggtgggttgcatgattttttggaaaatacagagagcctatgtgagagttcaattgattcctattgccatcgaatgtccgatgcgtttaataaaatgaaatcaccctctatcaactcattgagtaacacttcttcaaatattatatttaacaattgtggtgccgagaattctaaagtgggtatagtaaattgtgattatgaaagcataaccataaacaatgggttgtttgtaaatctggataagatgtatatgactgaatatgatggggtttttaatatgactaatagtaaagtaacaataaatgattcaaaagtaagagatgttgatactatgatttcttcggggcgggaactagaggtaaatataaacaattctgactttaaaagaataaatacaatgatacacctgtatctaaaacaagaaaatgataatgagcttgaggaagcacttaataaaactccagaatatataaaggaagagttttatcaagagatggctaaaacccctaaagaaaattggactgataaaataaaaagcctcaaaatatccaagtatttagatgcagttgaggaggttagtgacgtagtaggacgactacttaatttgtgggataaggtttcttcaggtgtgaacggttcctaa

SEQ ID NO: 189855 - DNA, 246 bp, Klebsiella oxytoca
atgttccacaacccttatcccttcattattcatcttaaggatttcatctatcaacgaggcatagaaactgaagtattcctccatagaaaatgtgaacgatgctttttgtgcaaacccatagggactaacaggtcggataaacatgtccttgaggccaagagacaagtgagcctggacaatcgattcaggatgcctgataagatctttagtaactgtagtaaccgttgcaacgcgaccagcgcctaa

SEQ ID NO: 189856 - DNA, 525 bp, Klebsiella oxytoca; identical to SEQ ID NO: 112539

SEQ ID NO: 189857 - DNA, 300 bp, Klebsiella oxytoca
atgactaaatcagcaaccgtaagtaagaaaccacgtaaacagcattcgcctgaattccgcagcgaagccctgaagcttgcggagcgcatcggcgttgccgctgccgcccgggaactcagcctttacgagtctcagctatatacctggcgcagcaaattacagcagcagaaaacgtcttccgaacgggaaaatgagctggccgctgaaaatgcccgcctgaagcgccagctggcagagcgtgacgaggagctggctatcctccaaaaggccgcgacatacttcgcaaagcgcctgaaatga

SEQ ID NO: 189858 - DNA, 867 bp, Klebsiella oxytoca
atgaagtatgtcttcatcgaaaaacatcaggctgagttcagcattaaagccatgtgtcgggtgctgcgcgtggcccgcagcggctggtatgcctggcgtatccgtcgcctgcagctaagcccgcgtcaacaatttcgccggcaatgtgacaaagcggtcagtcaggcctttcatcaggcgaaacagcgctacggcgcaccgcgcattactgatgagctgcgcgaacagggggtgaaatacaacatcaaaacggtagcggccagcctgaaacggcaggggctaagggccaaagccgcgcgtaagttcagtccggtgagttataagccccataatctgccggtattcgataatctgctgaatcaggatttcaccgccagcgcaccgaatcagaagtgggtgcaggacatcacctacattcgcaccgatgagggctggctgtatcttgccgtggtgattgacctgtggtcccgcgcggttattggctggtcgatgtcatcccgaatgacggcccggctggtatgcgatgccctgcaaatggcgctgtggcggcgtaagcggccaaaaggggttatagcccacagcgaccggggtggtcagtactgctcagcagattatcaggccctgtttaagcagcacgaccttcggggcagcatgagtgcaaaaggctgctgctatgacaatgcctgcgcggaaagctttttccacacgctgaaggtagagtgcatccacggtgagcgtctaatcagtcgcgatgatatgcgtacggtggtatttaattacattgagtgcgattacaatcgctggcgtcgtcacagtgcctgtggcggcctcagcccggaacaatttgaaaatcagaatctcgcttag

SEQ ID NO: 189859 - DNA, 1032 bp, Klebsiella oxytoca
atgccgatcatagcaccaataccccgtggcgaacgacgcctgatgcagaaagctattcataaaacgcgcgataaaaatcatgcccgcagactcacggccatgctgatgcttcatcggggtgaacgggtcagcgatgttgccagaactctctgttgtgcccgttcatccgttggtcgctggattaactggtttacgcactcaggtattgaaggcctgaaatccttacccgcagggcgctcccgacgctggccttttgaacatatctgcaccctgttacgtgagctgataaagcattctcccggcgattttggttatcaacgttcacgctggagcaccgaattactggcaataaaaatcaacgagataaccggttgccagttacatgcagcaaccgttcgccgctggttgccatctgcggggcttgtatggcgcagggccgcgccaactctgcgtatccgtgacccacataaagatgaaaagatggcggtaatccacaaagcgctggatgaatgcagcgcagagcatccggtattttatgaagatgaagtggatatccaccttaatcctaaaatcggtgcggactggcagttgcgcggacagcagaaacgggtagtgactccggggcagaacgaaaaatactatctggccggcgcactgcacagtggcacgggtaaagttagctacgtgggcggcaacagcaaaagttcagcgctgtttatcgctctgctgaagcacctgaaagccacttaccggcgggcgaaaacaatcacgctgatcgttgataactacattatccataaaagccgcgaaacacagcgctggttgaaagcaaatcccaagttcagggtaatttaccagccggtttactcgccgtgggtgaatcatgtggaacggctatggcaggcacttcatgacacgataacccgtaatcatcagtgccgctcaatgtggcagttactgaaaaaggtccgccattttatggaaaccgccagcccattccccggaggaaaacatggtcaggcaaaagtgtag

SEQ ID NO: 189860 - DNA, 1032 bp, Klebsiella oxytoca
atgccgatcatagcaccaattccccgtgacgaacgacgcctgatgcagaaagctatccataaaacgcgtgataaaaattatgcccgcagactgaccgccatgctgatgttgcaccggggcgagcgcgtcagtcatgtggccagaacactctgctgtgcacgctcatcgattggtcgctggattaactggttcactctgtctggtgctgaaggcctgaagtcattaccgtcaggacgtggcaggcgctggccgttcgaacatatttgcgcattgctgcgtgagcttgtgaagcattctcccggcgatttcggttatcagcgttcccgctggagtaccgaactgctggcgataaaaatccgtgatgtcaccggttgtccgctacatgcctcaaccatccggagatggttacctgctgccgggctggtatggcgcagagcagcgccgacactgcgtatccgtgacccacacaaagaagaaaaaatggtcgctatccatgaagcactggcgaaatgcagtgcggaaaatcccgtgttttacgaagatgaagtggatattcatctcaacccgaaaatcggtgctgactggcagttacgcgggcagcaaaaacgtgttgtcacaccgggccagaatgaaaagtactatcttgccggtgcgctgcacagcggtacgggaaaagtcagctacgtaggtggaaacagtaaaggttcatctttatttatcagactgttaaaacatcttaaggcgacataccggcgggcaaaaacgattacgctcattgtcgataactacattatccacaaaagccgtgaaacgttgcgctggctgaaagcaaaccagaagttcagggtcatttatcagccggtttactcgccatgggtcaatcatgtcgaacggttgtggcaggcgcttcatgagacaataacccgaaatcaccagtgtcgttcaatgtggcaactgttgaaaaaggttcataactttatggataccgtcagcccattccccggtggaaaacacgggctggctaaagtgtag

SEQ ID NO: 189861 - DNA, 156 bp, Klebsiella oxytoca
atgattggtaaatttaccttagaatatatattacgtataaaatttctcgcttcctcaggagattcagcccatattgttaacattaacagcctcattaattttcatataaatagcttaaagcagttatgcaataacgaaatatccattcagctataa

SEQ ID NO: 189862 - DNA, 516 bp, Klebsiella oxytoca
gtggctattccgaaaaaactccggctgttcaccgtctttgtggacggcgtgaaccatatcggcaaagtccccagcgtgacgctaccgaaagtgacccgtaagaccgaagattaccagggcggcggtatggtgggcgcggtggctgtcgatctgggactggattccggggcgctcgatgcgtcaatggttgttggcggtgtggtcgaagagctaattctgaaatacggcggtgatatcgacgaaatgcgcctgcgctttgtcggcgagatttacagcggcggtaccagctcactgctggaagttgagatgcgcgggcgtatcaccgaaatcgatccaggtgatgccaagcagggtgatgacaccaaccacacctacgccatcaaaaacacctactacaagctgtcggtggacgataagccattgctggaaatcgacctgctgaactttatctacaagcggaacggtcagaatctctatccggatcgcattatgtcggcgctgggtctcggcagctga

SEQ ID NO: 189863 - DNA, 516 bp, Klebsiella oxytoca
gtggctattcctaaaaaactccggctgttcaccgtctttgtggacggtgtgaaccatatcggcaaagtccccagcgtgacgctgccgaaagtgacccgcaagaccgaagattaccagggcggcggtatgctcggttcggtggcggttgatttggggctggattccggtgcgctggacgcgtcaatgattgtcggtggcgtggttgaagagctgatcctgaaatatggcggcgatatcgacgaaatgcgtctgcgctttgtcggcgagttttacagcggcggtaccagctcgttactggaagttgagatgcgcggacgcatcaccgaaatcgatccgggtgatgcaaaacagggcgatgataccaaccacacctacgccatcaaaaacacctactacaagttgtcggtggacgataagccgctgctggaaatcgacctgctgaactttatctacaagcgcaacggggaaaatctctacccggatcgcattatgtcggcgctgggtctcggtagctga

SEQ ID NO: 189864 - DNA, 918 bp, Klebsiella oxytoca
atgccactagctattgaacagttagatgtttctaaacatgatgtaattatatcgagttgtcatgcagtagctaagggtgttttaactggacctgatcaattgcatattagctacattcattctcctattaggtatgcttgggatcttcaacaccaatatcttcgggaggcagggttagataaaggtttcaaaggacttttagcaaaatatattcttcacaaaatgagaatgtgggatgtacgtactgctaatggagtagatcactttattgcaaattcacattttatagctaggcgaattaagaaagtttatgggcgtgatgctgatgttatttatcctcctgttgacgtagagagatttaaattaaatgagaataaagaagaatactacctgactgcctctagattagtgccatataaaagaatagacctcattgttgatgcattcaaggcaatgcctgataaaaagttgattgtcattggtgatggtccagaaatgaaaaagatacgtgacaaagcaagtgcaaatactgaaatacttggctttcagtctaatgaaattatggaaaattgcatgcggaatgctaaggcatttgtttttgcagctgaggaagattttggtatcactccagttgaagcacaggcctgtggtactccagtcattgcctatggaaaaggaggcgtcttggaaacgatacgtggaatgtcgaaaactactccgacaggagttttctttgataaacaacatgttgactctataattgatgctgtaaataaatttgagtcgaactttgatctttttgctccgattgaatgcagaaataatgccatgcggttttcagaggagcgatttaaaaacgaaattcattcatatgtaaacgataaatggaatgatttcaaaggacgtattgagaattaa

SEQ ID NO: 189865 - DNA, 180 bp, Klebsiella oxytoca; identical to SEQ ID NO: 134355

SEQ ID NO: 189866 - DNA, 564 bp, Klebsiella oxytoca
gtgttacgaacagatggaaccagaatcgaattaattggtggcagcatttccaaattcggttttgattcacaggccgacagggttcgaaatggcatagaactgctttccccgacgacgattaaaatcgttggaacccgtattgatggctcttcagggacgcatacccgctgcgtgtttgatggtgggcaggggaattcaacgctgcatatcggtgatggttcagaactgattggggcaacctatgaatcttaccgctgggatggtggtgtcacgggaggcaataaagaatacatctcacgtgaagcggtcatcgaaggtgcaacaacggcggttaacgctcgcggcgttcattcgttttaccagcagaaatacgtttaccccagcacatccatgccaactaccggctcattcaaggccggggatgaagttaccaatatgtttaagcaaatacagggcgtagccggttcccgttacgtgattacgagctggttacgcgtaaccacgggcagttcacacgtcctgaacgttgactgggtcgcgcagaaggttccgacaggggattaa

SEQ ID NO: 189867 - DNA, 330 bp, Klebsiella oxytoca
atgaatgtacttggactacagaatatacgtgggaccatagttgaagataacttcttatctgaactggaagcctctggtggtatcgtgcttcatgccaatatgtgctatccagtagctgaatacaaggacacagacattagaatagctatcgagccgatagatcttgcgtacatgcgagatctgaccaatgactatgcggtaatgtccagaaacaatgagtatgagcacaaaattgagggcgatctctttgaggcattatctcaggctgtagatagatttaagagtgctgttgtgttgtatatgtttgttaaaacaatccctatatattaa

SEQ ID NO: 189868 - DNA, 633 bp, Klebsiella oxytoca
atgctgatctggccgaacttcatcgcctacaacccactgactggcgtgaatgaagagttccccgccgtggcgtatgcgctgggtctgcgggcgcttatcgacaacgagcagggctggcataaatcactgtcaaacgtgccggttaaaaacgtgctggggattgcgaaggacgtgttctgggcattgcaggcggaggactccgacgccaacgagctgaacgccaacgagatcaccacgctgattaagcgcgacggcttccgcttctggggcaaccgcacgacggatactggcgaatttattttcgaggtattcacccgaactgcgcagatcctggcggacagtatcgcagaagcgcagttcaccaccgtggataccccgctaacccctgcgaacgtgaaagacgtggtgagcgggattaacgccaaacttcaggcgctggtcacggcaggcaagctgattggtgcggcctgctggtatgacgtcgttgataacccggtaacgggcattcgtcagggtaaagccatcgtgcgctacaactacagcccggtgccgccgctggaagatctgacgatgatccagacgttcaccgatcagtattacgaatccgcttttgcatcgctgggaggtgaatag

SEQ ID NO: 189869 - DNA, 225 bp, Klebsiella oxytoca
gtgcttcgcgatgatatcgttcatcttctctaccagatccatacgcttaaacgtgatatgaccactacccttttggaaaaggcgaatagtgaagagatcatctccgaatacctgctgtcgtggattatcgcgaatgaaatccatcagtcggatagtcacatcgtgccggttatcgggaatggttttaccatccagcaggaacaacatgcgctccagatcggctaa

SEQ ID NO: 189870 - DNA, 216 bp, Klebsiella oxytoca
atgaataagaaaatattagtattgtccgttttatttggtttttcaactatgtcccatgctagtgaaccaaaatatgctttccctcaatcggataagcctgttatatcaaaaattaaaatcaaaaatgctcctgtggattcagggaaatatgggcatggggaagtgttagcaaatgggatgtgggttaaaggtaatactgcaaaccataagaattaa

SEQ ID NO: 189871 - DNA, 258 bp, Klebsiella oxytoca
atggcgacagtggagtttgaaacctccgttgagggaggtttacaggtggggagccgggttattgattgcgcctattccggcaacggaaatccactggttgaagctgaagccggaataaaggcgaagattgaagcactggaaaaagccagaaacactgccgctaatgaggacgctgaaaatgaaaaaattatcagcgaacaaatggtactcgctgaggaaatggctaaagcgactgaagaagcgttgcaggaaaaataa

SEQ ID NO: 189872 - DNA, 2004 bp, Klebsiella oxytoca
atgcaaccaataattaacgataatttaccccgtaattaccaaaaatgctggctaccttcatcaactgatattccctggctaatacgttatcttgacaacgtttatctgcccgaaggagaagatattataaaaagcacgttaataaatgaaattactgctttaaatcataacattaagaactcaaaatctctgcaagaagcctctctttcatttgttttagatgagaataatatggtgtcagaacaatattctattgattatcaaaatgacactattcgtatagtatccggaggatggcaagggttcctgtacgcctggttcgatcttctgagaaaggcatcttcagtgctgaattccccttggcagtcaacacaaaaaccggcgtttcctgtgcgtatgattaaccattgggataatttggatggcactgtcgagcgtggttacgccggcaattctctattttttcataataaccaaattcactacgatgaaatacgcctgcatcactatgcacgcctgcttgccagcgttggtattaacgcgatcgctatcaataacgtgaatgtacaccatcatgaaacggccctgattgacgatagccttctccccagcgttgcccaaattgccgctattttccgccagtacgcgattcggcttttcctgagcgttaattttgccgcgccgatcgaaaccggagagctttctgtcgcagacccgttagacccacaggttatcgactggtggcaaacgcgcgcagagaagatctaccagcagatagccgattttggcggctatatcgtgaaggcagactctgaacaccgacccggcccatttacttaccagcgaacgcatgccgatggcgccaatatgctagcccgtacgcttgcaccttacgatggattattatactggcgctgttttgtctacaactgccaacaacagtggtatgaccgaacaaccgatcgggcaaaagcggcatgggataatttcgcaccgctagacggacaattcctcgacaacgttatcttacagataaaaaatggtccgatggattttcaggttcgtgaaccggtgtcccctttactcggcagtatgccgaataccaataaagtgatggaactgcaaattacacaggaatataccggccaacagatcgatctttgctggctggtaccgcaatggaaaaccatcctgaactttgatacccggccgggcgaacgcgacgccacgattcttgacattctggcaggtcattctcaacaccatatgcagcacagcggaattacagccgttgtgaatactggtgacagcgtcttctggacggggcatcccctggctcaggcaaatctttatggctatgggcgactgctatgggatccgctcattgacgaaaaatcgctcgcggaagagtggtgtaaactgtcgctatcaaccgcgcctaaagccgtggagacaattagccaaatgctgctaagcagttggctgacctatgaaaattacacttccccgctcggcgtcggctggatggttcagccacatcatcattacggtccctcgatcgatggttatgaatatgatagctgggggacttatcactatgccgatcgttatggtcttggcgtagaccgtacctcagatagcggtactggatatgtaaagcaataccatcctcttaattgccaaatgtacaacaatccgggtcgctgcccgcaggaattattactgttcttccatcacctgcaatatcgccacgtactaccttccgggaaaacacttattcagcatatttatgacagccatttcagcggcgtcaatcaagttgaactgtatatccaacaatggaagacgctggagggggacattaccgaagatatttattctgaagtattgcaacgtctggttaaacaacttgctaatgctcaggcatggcgcgatcagataaacacttacttttatcgaaagtcaggaatcaaggactctcgcaaccgcaatatttatccataa

SEQ ID NO: 189873 - DNA, 1476 bp, Klebsiella oxytoca
atgagcaaccctgtagctatcaagctaaaaacatatatcggttatggcatgaccgatttattctccagcggtgcatttgcaattatagccgcttggttaatgtatttttttaccaacttttctggtttaaccccgattcaggcgggttcgattttatttattgcgaagataattgataccgttgtcagcccatgtgtcggatatctgaccgataacattggcaacactcgtttaggaaagcgattcggtcgccgaagaatatttcttttgctgggcgcggtgctggtgtatgtctattcattactttggatccctggcatgccctacttttattacatggttgtttatgtttccgttgaaattattgccgccctggtcattattccatgggaaacgctagcttctgaaatgaccgatgattataagcagcgcagtattctttccgcaatgcgactattttatggtggttttagcacctggctggcgacctttttacccggaagattatttgcgcatttcggtacatcagatagtcgtgtcttctttattaacggcgttattttctcaatcatcttcatgattgccctgttaatgacctggtcaacaacgtgggaacgaaaacaagaaaccagcgaccaggttgaaagcccccgtcgattcagtctgaaggacgtatttgccgggatggcatcgacactgcggattcgctgttttcgccagcatctgactatgtatgtcctttctttcacttcattagatcttttttatacggtatttatttattttattatctattcactaagcggcacggcaattcttgcttcaaatctgttggccgtaggcatcttcctgactggctggagtaacgcactgcttgcatgggccgtaattcgctacggtcagacgctatgcctgaaggtatgcctcattgtcagcctgatgtgtttcttcgtctttggcgggttctatctgtggaaaccgctgctaatgctgcccatgatgtacgcaacctcactggtctatcaatttttcaaaggcggctacgtctatatcatctggaatatttatccctttattcctgatatcgacgaattagtcacgcgtaagcgccgcgagggggtttttgccgggattatgacgttggcaagaaaaagcacttccgcactggccggcatgttaatcggtatcgtactgcaacttgttcattttgatgcttcaagcacgactcaatcactcacgactgttcacggtattaccggtctgttctttttgggtaatgtattactactgctagtcagcacgcttatcgcgtttcgcttcaaattatcaaaagaaaaccatcaaattgttaaagatgaaatctcacgactcaaaaatggaggtcaactagctgataccgatccacaagtcaaatccgtgttgttctctttaaccggaattgagcacgaaaaactttggccagcaaagaatacttaa

SEQ ID NO: 189874 - DNA, 705 bp, Klebsiella oxytoca
atgaataaaatctcttttttatgcacagcagtcggcttggcgtttgtgagcagtagtgcgtcggcaatgaaaatcactgactcatgggttaacttccgcgaagcctatatgtctggtagcgagcaattccagactaaaattgaatacggcatgaaagtggatgacaacctttacttcagcattcaaaatacttctggccagggaaaacacctcgatgaatttaataaccgatataacgaaaccgaagtgaattataaaataccgttggcttcacgcctctttttctggccgggttttgtttttaattggggttctaatggcagcgcatttgatccctatattaaacttggcgttcaggtcaccgataacttcatgctgattggtggctatcgttataatcagaataattatcaaagctatgacaattacgggaattatactgaagattccaatcaggagataaacctgtgggccgatctgaacgtcacagacaggatctggatggagtacaactttacctatcataagcgcgataaggatttccgctatggtaacggcacgacggagagttacgagcatactctggcgttaagttacaagattgatgatcgctttactccctatatagatgtctcgcagctggacaaagccagtaacggtgatgatgaaaaccgagtgcgtatcggtttgtactaccatttttaa

SEQ ID NO: 189875 - DNA, 492 bp, Klebsiella oxytoca
atgactaagaataaattctacctgtgctttgtttttttgttctgcgcggtcttcgctctgattatttatctactgattttactgaataagaaaaataaaattaaaacatgtgaggcaaatgtttactttactatttcatcattgaacgattcatacacttttgacggccatgttttatttgatatgagcaataatagtggctatgtttctttgtctggaaagatagtcgatggtgatgaatcgtactatctttcgcaggatatagcctttgattatatggccgatggtgagggacgatacaaaatattaccgggtgataaaatcgataatagatatggaagtattcctgatgatctcattatacctatttatgatatcatgggattgtccggaaaatcacccatctttatttttacccggaacagggactacattgtctggggaacgctcaattcaccggtgatgacctgcgtatttactatggatagataa

SEQ ID NO: 189876 - DNA, 927 bp, Klebsiella oxytoca
atgcatacgcctgactgttgggtagcatacctctcgagacctggtatgatgtgtttacaagacttcaatttccccgggatgctacagggctcaacacgttcagagcttgtcttaccgcagcatactcaggtattcacaggatgcagaataattatgaagtacttaattgaaaacaaactgatttataatgctgagtctggtgagcttattcgtattgatattggcgtaacggataagcaccaattaacgaaaacggccaatcatattctggccatactgattgaatcccacggtgagattgttcctcggcaaagcctgttagagagggtgtgggagtctcgtgggctcgaagcttcaaattcatctttaaaccaatatattagtattctcagaaagaaactatcatccctgacgggaacagagaatattattttgacaaatcctggcgttggcttttatctgtctgcagatatcaaaattaaactatgcaatgaagtcagcaacgggctatctcctccacggcgaacccgttaccactggtttagttatctgatacgtggaggtattttagcactaatccccagccttttttttattttgcttgctaaatatgaagttgttgttccatctattcgtttgaaagagtccgacaatctgactcgtatcggcaactgtcaattaaaatcgtctgttcccatccccgagagaatgcaggaaaaagttcttaatctaatggagatgcatcatcctgggctgcttgaacactgtcaaagtagtccggccagactaatcgtttatgtccaaagaagggtccttcatggtaaatctggcgccgtttttacatcattttgccctgtgaatagcataagccataagacgctctattgtcataatttttacgctaatcagtggaggcagcatgactaa

SEQ ID NO: 189877 - DNA, 234 bp, Klebsiella oxytoca
atgaaaaaggaccgccaggcggccctttttgagggagaaggtgaagaattcgccggaaacgaagcggcaaactggctctttcggctaaaaccgcaccatttcagtgcgcgatatgtgacttttttgcaccacctcaggccgcgggatcgcgactgcctgattatggtgcatcaggcgatcagcgactcttcctgcgtgctggccgccagctcttcgccaaccagctgcagctga

SEQ ID NO: 189878 - DNA, 168 bp, Klebsiella oxytoca
atgcgcagaattaccttacaacgtccgtttcatttttactcatgcaatattcttattacctgcaggaaagggcataaggctgatggcaaccctgttttgggtacgctcaacgcattttgccgggtggcggctgacgccttacccggcctggaaaacccgcaattttag

SEQ ID NO: 189879 - DNA, 615 bp, Klebsiella oxytoca
atggcaaatgaacacttaacgtcgtcccccgtaggcgagttcgttatgtttgccagcggtgatgggaaagtacgtgttgaatgctgctttgaaagcgatacactttggctctcgcaggcaatgatctgcgaactctatggtaaagcgaaagccaccatcagcgggcatataaagcatatatttgaagaaggcgaacttgaggaaaattcagttgttcggttttaccgaacaactgccagtgatggtaaaaattatcaggttcaacactttagtttgcctctgatacttgccgttggctatcgcgttcgctcccctcgcggcactcagttccgccagtgggcaacccagacgctccaggaatacctgatcaaaggttttgtgatggacgatgagcggttaaaaaatccgcctgttggtacatcggctgtacccgattatttctatgagatgctggagcgcatccgcgatattcgcgccagcgaacgccgtgtttatttgcgcgtacgagaggtatttacctgctgtgctcgcctttctgccggccggcgccttgcccggcctacattatctttgggtctgtgtaatacccacagagctgcgctgcatggcgtttag

SEQ ID NO: 189880 - DNA, 1032 bp, Klebsiella oxytoca
atgccgctggcggaagcgctaaccggactggcgcaaaccaaattcgccatgtgcgtatcgctaatcatggtgattggctttggctggaacctgttctttgcccgcgtgacgccgtttaaatacatctttctgaccgggcaacataacctttatctctccgcgctgcttaccgtgacgctgaaggcgctgggctacagcgacatgacgaccatcattgtcggctccgtcctgctgggtctcgccgcctgcctctatccggctattgcgcagccgtggatgcgaaaaattaccggtaacgatgagatcgcgatggggcactacgtcaccctggcctacgccgcatccggctggatcggctcaaaggtcggcgatcctaaacaatctaccgaaaagctgaatctccccggctggctggggatctttaaagactacatcgtctcagtgtcgatctcggtgagcattttctattacatcgccgcgctcgccgccgggaaagccgcggtcaccgctgcggccggcgggatgcactggctggtttacccgctctttcagtcgctgacctttaccgcctcgctgtacatcattattaccggcgtacgcctgctgctgtcagaaattgttccggccttccttggcatctcggaaaagtttatccctaacgccaaacccgcgctcgattgtccggtggtctttccctacgccccgaccgccacggtgctggggtttatctcttcgtttgtcggcgggctggtggtgatgggctttctggcgatccttggccagaccgtgattatcccggtagccatcccctacttcttcatcggcgcgaccgcagcggtatttggtaatgcctccggcggctggaaaggcgcgattgccgggagcttcatcaccgggatcctgatcggcatcggccccgcgctgatttacccgattatggagtccgtcggtctttcaggcaccagcttcccggaaaccgacttcgtcgcgctgggtctggtcgtgtactacatcggcaaaatgctgccctaa

SEQ ID NO: 189881 - DNA, 864 bp, Klebsiella oxytoca
atggggagtggatggcatgaatggccgctgattattttcacggtctttggtcagtgcgtggtgggcggctttattgtactggctctggcgctcatgaaaggcgacttatcgcgtgaacagcagcagcgcgtggtgtggagcatgtttggcctgtgggtgctgatgggcgtgggctttattgcctcaaccctgcatcttgggtcgcccatgcgcgcgtttaactcgctcaatcgcgtaggggcctcgtcgctcagcaatgaaatcgccagcggggcgcttttctttgctgtcggcggtattggctggctgctggcggtggtcaataagctaccggcgggactgcgtcatctctggctgattattaccatggtgctgggggttatctttgtctggatgatggtccgcgtttataacactattgatacggtacccacctggtatacggtctggacgccgctgagtttcttcctgacgatgtttatcggcggtccgctgctgggatatctgctgctgcgcgttgcggacgttaccggctgggcgatgcgcctgctgccggcggtgaccctgctggcgctggtgattagcgcgatcgtggggctaatgcagggaagcgagctggcgacaatccatagctccatccagcaagcttccgcgctggtgccggactacggctcgctaatggcctggcgtctggttgcgctggcgttggccctggtctgctggatcgctccgcagctcaaaggctatcagcccgcattgccgatgctggggctggcttttgtgctaatgctggtcggcgagatgatcggccgcggcgtcttctacggcctgcatatgaccgtagggatggcaatcgccagctaa

SEQ ID NO: 189882 - DNA, 792 bp, Klebsiella oxytoca
atgaacactcttttatccgatcttaaaaatgctgtggaaaccatgtctaaatctgcttttgatgatttcctaatcgagatgatcaaaaatctcgaaattgaattactcaattccagcatctatcaagatatggaaaaaaagatattttttgacaaactctacctttttagtcttcaagcaaaaaaattagaacttagtttttatgaatgcagacaaaaacaaattgaaataaaaacccgaatagaacagatgcaaaatgaattaaaatacaacttcaccattgaaaaaaacactttatccaaccatataaatgaaatcaaaaaaactctaacagacggaagcctacttccacatctcgctggtgaagaaatctctaaaatactagagaaaattaaaaatgatgacattgacattttttacattaaacacattgaaaatataatattaaacttaaagtacagaacaacttcaaacttggacatttttagtatcagtcgctccgtaagaatcaatgcaggccaagtaaaaaaatataaagaaagcaaggaaaaaacaatacaatacatcaacaatacttttgaatcacccctatcaaataataaaaaaacagaaaaaaaaattgaagagaaaaaaattgaaaacgatacatacattgaaatagaagatatctggaaagagcatttaaatcatttctttgaccttggatacatgttagatacaacccttagaaatgtgttatccgaacgatataaagggcctagaaaacatttagtctatgactcagaaatttaa

SEQ ID NO: 189883 - DNA, 630 bp, Klebsiella oxytoca
atgtcatcaagaatagagaggcaaaagttattattagtcgaaggtcgtgatgaaattaatttcttcagtgcatttctaaatgcagaggggataactgacgttcaaatcgttgaatctaagggtaaagatcagttccccactgaacttgagttgattttaaatgaacctaattttcaaaaagttacctctatggggattgtaagagatgctgatgacagtcaaaaggctgccgtagaaagtatatgttattacttaagaaaaaactctcttcccattcctaaaggacataacacctttgaaagtgatggagcaatgaatgttgggattttcattgctcctggatttactgataaagggatgctggaaagtttgatattggaggcgttaggagatcatccagtgaaaacggcctctaaaagatatatcgacgaattaaaggctattttggcgcctgataattcaggctgtccatatgtattccctaaaaatattcacaaggcatacatgcacgcatttttagcagggatggagaagtttataccaagtgctggtatggctgctttaaaaggttattttgatttgacatcacctgtttttgatgatgtgagagcttttttgaggaatttataa

SEQ ID NO: 189884 - DNA, 228 bp, Klebsiella oxytoca
atggctgattccatggatctcgtacagcaacgcgtcgaagaaaacctgcagcgccatatccagaacgcccgagccagaaagccgggcattgcccgcgttctttgcatcgactgtgacgcgccaattccaacagctcgcagacaagctatcccgggtgtgcagtgctgcgtgacttgtcaggaaattgctgaactgaaagggaagcactacacccgaggagcgcagtga

SEQ ID NO: 189885 - DNA, 201 bp, Klebsiella oxytoca
atgctgaaaaatgaaccctcatttgcgtcgcttctcgttaagcaaagccccgcaatgcactgcggccatggctggattatcgcgaaagatggtaaacgatggcatccatgccgctcgcaggatgtacttctggctgacctgtccactatcaaacaggggaaacaatggctattgaaggtcctgcagcgactgttccactaa

SEQ ID NO: 189886 - DNA, 510 bp, Klebsiella oxytoca
atgtttgactatcgcatatctaaacatccccatttcaatgaagcctgccggaccttcgcgctacgccacaatatggcgaagcttgcagaacgtgcaggtatgaacgttcaaaccctgcgtaataagctcaacccggagcaaccgcaccaactcacagcgccagacatatggttgctgaccgatctcaccgaagactccacgctggttgatggttttctggcgcagattcattgcctgccatgcgtaccaaccaatgaagtcgctcgggagaaaatgcctcagtacgtcctaaaagccacctctgagatcggccgtgtcgccgcttgcgcagtatctggcgttcagatgaatgcgactacccgccgccaggttgtcgaaagcgtcaactccgttactcggctgatggcacttaccgcgatttcgctgcagacgcggctacaggctaacccggcaatggcaagtgtcgtcgatatggtgacaggccttggatcttcgtttgggctgagctga

SEQ ID NO: 189887 - DNA, 981 bp, Klebsiella oxytoca
atgtcaatacaaataaacacattccgccatattgatggcgagcataaagcaacgatcatgcagaatcgtggtgggcaaaaagtcatcgaacgtatcgttacggcctatggtttcacgtctcgccaagcactctgcaagcatttcggtatatcgcaaagcactatggctaatagatatgcgcgcgatacattccctgctgattgggtattgatctgcagtatagagacaggttcttctatcgagtggctatcgtttggctccgaatcatcagtatcaacatcagagctaaactcaccggaagggcctactcagagcaattcagtgattgatgactgtgtgcacgtcgcgaagaacccaattgagaccatcataaaccccaatgaaggtggaaaggcggcaattaaacgtttaatcgaggcatatggttttacaacaagacaagccctagcagaccatcttcaagtctcaaaaagtactttggctaacagatatatgcgggacacctttccagcagactggataataaggtgcacgcttgagacaggcgcatcccttcaatggctttcattcgggattggttctgctttcccagtttcaaaagaaagtgacacaactcagttaaataatgatgcaactactaatgtagttatggtcaaacagaaaaaaatcattgatggggttttatgtgacgataatgtatatagcttggacagaacgcttttagccaaatcgttgaaaaatcctttagtagttagagatgctgataaaagttatttggtagatgaaagctattctgaacttactgatggcaaatggattattgaaattgaaggtaaggtaagcatcaaggatttagttaaaatgcctttaggaaaagttttacttacggcctcaagcccatcgattacattcgaatgtatggcaaaagatattaaaccaattgcaagatgccactattatttaatggtggaaatattttaa

SEQ ID NO: 189888 - DNA, 1080 bp, Klebsiella oxytoca
atgtctcgaagttttgctgtttgggggtgtcgaaattaccatagcagttccaattcaggttataattccgaacatgtaaatttcattgatgaatttcatgttaatttttggaacgtcagcgcacattcttgcagttatttagattttggtgttacttttaaaacaccagatgatcctgcaatcactgatcacggtgccatttgtatattcattccatttataaaaaacaataacgattttacagacctcagcgaaaacctcgagtccagtagagatcttgttactgctgtatttaatgaatatcttatcgacacaaaaactatcgatggcagacatttaaaactcattctcgcgaataaaggggagctagtagttaatactaagctacctttccgtggaggagaattagaccatagagtaaagattactcatatacatgatggcactctaatagtgtttaagctaaaagactgtctaacatccgaaaacttatgtaaccattatattcgatttagaataaacttaaataaaactgatatatcaggtttagtaaaaacattttatccaaaagatctatttttaaaaagtaatattgagcgctctgacattattgatttcaggattaatgaacaaagaaatcttccttctgagatatctacaactttggcaagtgcggcttgcactcctttaaagtgtcatctttttataattagagatatggttgatgattgttcagcttcaggttcaaactataaaggttgtcggatacttgaatcagaaacgtggacaaaatactttaatcgtgacgtctcatttggtaaagacgacccgatgatttaccattggaagatctcgaataaatctgactctagactgaatgatttttctgttgttgttaaattcaaaaatgtaaagtcaaaattaagtaaaatttttgcatacatattttacggcgcagcattaacattcattatgaaatttgtacctacagagcacttagacaaaaaaatattcatccttgggtctttatcgttaattgcactgtacataattgctcattttttaaaattcagaaaatag

SEQ ID NO: 189889 - DNA, 1074 bp, Klebsiella oxytoca
atggaaaatttaaagcacatcagtttcaatgaggttaattttgacgatgaattttttgactcattgaaatctgattataaagtgggttttgttgaatggtttcataaaaaggcaagtgatgcgaaagaaaaagcgtatgtacttttcaatgatgataactccattgatggatttatgtatctgaaaattgaaaatggtgaagttaatgatgtcacaccgcccttagaagactcaaaacatctaaaaattggcacttttaaattcaatactaagggtacgttaagaggtcagcgttttttaaaaaaaatatttgaccacgcattaagtgaaaaggttggagatatatacgttactgttttcgataaacatgattacctcattagactctttttgaactatggcttcataaaatacggaaaaaaagaatcagataacggaattgaaaatgttttagtaagagaaatgagtacagatgatttaaccggtgatctgcttgcagattatccttatatcaacaacagaaacaaagaagctaaatatttattatctatttaccctgattttcatactcgtttatttccggattcaaaactaattactgaatcccctgatattatcactgatgtttcacatgctaacagtataagaaaaatttatatttgcgccatgcaagatgtggcaaatattaaaaggcatgatattcttattatctaccggacttcagataaacaaggccccgcacattatcgctccgtggcgacctcattgtgtgtagttgaggacgtacgagatatctattcattcccaacagaacaggattttattaaatactgcgcccgctacagtgtattcactgaggccgaattgagaagtttctataaatcaaagaaatatccgcatattattagcttcacatataatcttgctttaccaaaaagaataaatcgtgctaaactaatagaagacgtcggtttaaacccacaggcatattggggtgttttaaaattaactgacagagaattcgacgacattattaaacttggtgctgtagatgaaagtattattgtcaattaa

SEQ ID NO: 189890 - DNA, 372 bp, Klebsiella oxytoca
atgaaagtattattgtcaattaaacctgaatttgttgaaaaaattcttaatggaactaagaaatttgagtttcgaaaagggattttcaaaaacccagatgttaaatctgtggttatttactcgacaatgcctgtagggatgattgttgctgaattcgatatagctgatgttatcgaaggcaaacccagtaacgtctggaaaaagactagtcgctatgcggggatcagtaaacagttttttgactcttactttcaaagtaaggaaaaagcctttgcgattaagattggtgatttaaaaatctatgaacagccacgtctgttaagttcattaggggacaacgtcactgcaccacaatcttaccgatatctatga

SEQ ID NO: 189891 - DNA, 324 bp, Klebsiella oxytoca
atgatcagagatacagttatgaatagcgatgattttgatccattaacagatttactgattggagaagcggtcttatccctacttaaaagtaaggggcctataagtcaacaggcgctgatcggtaaactccaggctatgcaggcgggagaaatggattcaaagcggcggaacgccctggggcgtattatcgatgaaatcagtaacagggtagctcgccgtagtaagaaaataactctgggtacttcaggcgctaaaaataattgggctgaacaaaatgctttattaggttctcccccgcggcctggtacaaataaaatccactga

SEQ ID NO: 189892 - DNA, 333 bp, Klebsiella oxytoca
atggataaaagtgaagtctatttagatatgcttttttggtcgttgcctcatataaggaatatagcaacgcataaccctctagccaggcttaaagacaggtctacctattatgagtcagaacttgtttgccaatttcacttattgctcaagtataaaagttttactaaaaatgatataagttttttaaattcccgggctagatggtattatgaaaactgtgacaaaaataagagtattctttatccttctcaggtgaaaaggatttctttgttatttgctatggttcccgaagaaatgaaagggttgcttgaatggaatggcccttgctgctag

SEQ ID NO: 189893 - DNA, 456 bp, Klebsiella oxytoca
gtgccggaaccgaccgagctgcccaataacaactcatccattcaggtcaccaccctcgccagcggcgaactggcgctggtatttaaccacatgagcgccgccggcgcgctggaacgccgcgcgtcgctttatgatgaaatcgacgatggcgataacagccgtaaagagccggaagtcaccagcggccgctcggcgttctggggcgcgccgcgcgcgccgatgaccgtagccatctctgcggatggcggcaaaacctggccgtggcagcgcaatctcgacgaaggcgatggctactgcatgaccaacaactcgctggataagcgcaaccgcgaattctcctatccgagcatcaaacaaggggcggacggcacgctgcatattgcctacacctggttccgtcaggcgattaaatacgtgcatatcacgcccgaatgggtgaaggagtccgcgcgatga

SEQ ID NO: 189894 - DNA, 270 bp, Klebsiella oxytoca
gtgcaccgggtcgtttcgccgcccgccgaccagcagcggctgtcgatagcctttttcctcggcgcccagctggatgccgtggtccccgtctacacgctacctgacgagctggcccgcgaagccctcggaccggatagcgacccgcaaaacccgctgctacgcgaagtgggctggaattacctgaaagggcgtctgcgttcgcatcctgatgtcgccgaacgctactaccaggatgtttttcgcgaacgcgccgagcaattgatcgtttaa

SEQ ID NO: 189895 - DNA, 366 bp, Klebsiella oxytoca
atggtggtagcgattgacggtttgtataaagataagacgggcattgatactcgatattattatactgacaaacaaggaagaataactcatgcaaaggggcaatatcgggtaggtgaagaacaacgcgaacccacgacctggcaatatctttatgataatcagaaccgcgtgatacgcgaagtggtaaaacacgcggattttccgtctgatatcctcatcgactattactacgatatcaatgggcgtttagcgcatattaccgaagaggcccgcacccgctcgctgcgctgggatgaacaagggcgctggttgtccagtatgcttcagggacagacagccagtaatactatgcgtttcgagaattaa

SEQ ID NO: 189896 - DNA, 828 bp, Klebsiella oxytoca
atgcgaaaaaaaacaaaagttattatgtccattttcggcgtcgtggcttgcggcgcggcatttacgttctggcaatggaatgactgcgctgaggcgcagcaggccattaacagaactaatgttctcattatgacgcagtccccggcgctggctggcaatccgcaaatagtccatattgctggtaataccaatagctatcgtgaaacgctggacttctcccgctgcggtctcctggagaagcaggtcgtgacttcgtattctggtattggcgcggtgtcgatcaaaactaaaatgacgctcacccgacaggagcaggataaagaaaaagggtggatacaggagagcgttgcagaaggcagtcatggaacccgtattatttccgaccgccatttttataccgacgatcttggacgaatcgcctggatgaaaggaaaaacgacggttaacggcaaaacgcgcgagcagaatacctggcgatatcactacgacgatgcccatcgattgctgcgcgagacgataaacgatgatcaaacctcgcaaaattacacaactgaatttcattatgatgaaaacggtcgcttaataggcacttctgcaatgcatcggatccagacgctgcgctgggatgaccgtggacgctggctttctagtgaggtcgtgcgcgaaaacgctaagaggaaattagtacagcaagatgtatgttcagcatgggatcgcgtgggtaactgtacggttaatgagatggttgagacggaaagttcgctaaagggagatattgtagaaaagaaacggatgcgatctgatacacaaattcattatcggaactaa

SEQ ID NO: 189897 - DNA, 435 bp, Klebsiella oxytoca
atgaccaatagtcagttaatcagagagtcaatcacccacgaattgaaaatttatcctgaattcttctcggctgtctgtactggtgttaaacgtgcagagctacgtagaaatgacggtgattatcgggtgggcgatacccttcacttgctggagacaccgcgcggtagctgtcacagcacgggagagtttatcaatgccacaatcacccatatcgctgacgttggcgaatggatgccgggttatgtcctgctgagtgttaagcgggaaacggtggacagcgagccgatagtgatggacggactggttaaagccgtagagttctatgagcaggttaaacgcgaaaatccgccagtcgaaacaggcgcatggaaagatgctgttgattgggtgctgaaggaagcctgccgcgccgccatgctccagttgagaggatga

SEQ ID NO: 189898 - DNA, 201 bp, Klebsiella oxytoca
atggcacatgtgaaagtgaaagaattggttgttgcagcgtacgctacggcacctgacctaccaccagcagcagcccaattaatgcaagacatagcgtcaaggctggatgtgacctttgtcgcccttacagaggcaatggaccagaacaccgctatggccgcgatgatagcgaacctgagcgaggaaaacagaaatggctaa

SEQ ID NO: 189899 - DNA, 675 bp, Klebsiella oxytoca
atgaaaacaatccaggaaatcaggcggttaaacgccagaaaattgcgtgatggtgttggcggtaatatttacttcgccaatatgattgatcgcgagccgactcaaaccagccggttcatgggagatggcgccactaaaaacatcggcgatgcaatggcaaggcacattgaaaagtgttttgacttacctactgggtggttagatcaggaacatcaaaccactaatgttgctaaaacgcccgatgtctctgatacatatagaaatatcaccatggttccggttatatcctgggtacaagcaggagcatggaccgaagttggctatgctgaggttgatttgaatagcactgaaaactatccatgccctgttccttgtgggccgatgacttatattcttcgtgttattggcgactcaatgatcgacgaatataggcccggtgatatgatttttgttgatcccgaagttccagcagtgcatggagatgatgtgatcgccttaatgcacgattctggtgagactacatttaaacggttgattgaagatgcaggacaacgctatctaaaagcacttaactcaaactggccagaaccttacatcaaaatcaatggtaattgctctatcattggtaccgtaattttttccggtaaaccaagacgataccgaacgaaaacataa

SEQ ID NO: 189900 - DNA, 201 bp, Klebsiella oxytoca
atgaaagagttctgggattcattaactaaagagcaacaaagcaatttagctgcaaacgttggctctacacccggttatctgcgtttagtttttaacggctacaaaaaagccggatttgatctggcaaaaaaactggaaaaaagcacatccggtgcgatcacgaagtttgatctccgaccagatatctattccaaacaataa

SEQ ID NO: 189901 - DNA, 372 bp, Klebsiella oxytoca
atgcgtgatatgcaacaggttttagatttgtggggcggatgggcggcagctgacagctccggtactgattattctcacattgcggcaggtttcaaggggttgctgccgcatggcggtaaaacgcgtttgcgttgtaccgatgatgacgcgctgatcatagaaggctgcatggcaaggcttcgagataagaagccctatgagcacagtttgttagtcgctcattacctttacggcatttctaaacgcaaaatagctaaggcgcaaaagaaagatgagaagttgatccggatcgagatacagatggcggaaggtttcattgatggatgcctttcgatgttagatgttaaattggacatgcatttcgaatgttaa

SEQ ID NO: 189902 - DNA, 258 bp, Klebsiella oxytoca
atgattatttttggtaatattttggtttgttttaaagcgaatatgatgccatcagggctggagcttgcagaactgaagatagatattgcagcaagcacaaaaccaaatagaattcccgctaccgttgataataccccggcagtgcttaagatgtccgtgtgtgccatcgggcttatatatttatttaaaatatatgtaagcacacaactagcaattatgttaataatgatttttatgaacataattcattccagttga

SEQ ID NO: 189903 - DNA, 930 bp, Klebsiella oxytoca
atgactgacacagcacaggttttattactcaagcaaaaaaaaatgcgaattggcttctataccagttcctctggcactaaaaatacaacttcaaatgctcaaatagcattcgataaaatgtatcgtaccatcgtaaccccttctcaaaatgcctatacggcagagtttcaaaggaagaaacttaaaattgtatttattgaaaaggatactcacgcaaattattattttggctatatctcttgctcgagggatggctttcaccttccatatattggtgatgaaaactgggatgaacataacatacctctggatgacaaaaaatatatagttgagagaacttattttatctattactacgaaaccgacatccttgtactttcccaaaaccatcttggccccaaagattcagatttagcatttttattgtttaacttttcagaaaaaacgaagccagttgcatttgaggctatatggaaaaaagaaagtataaaagaactactcgaaactggtagtacactgcgtagttgcgagataacacttgctgctccgagaaaatttagtgctactgattatgatttatccaactcattttccaaaagcatgattgaaatgatggctggaatgggaggttcacatcttaaacttaccctccgtggacgtgcatcgcaaaaaaaacttgtcagaggttacctgtctgacgaagtaaaatctggaattaaagagttaattgaaaaagtacctcatcttttgcgtaaagctaacgtcactgaaccaaaagatactaaaacaaaaagtttgcttgaccaagtattgatcagtgaaaaaaatgttagcaccaaagatggttatgctaaagaaagcgatgtgcgtacagcattaatccatgctaaaattgataataactcatatcttaaacaatatgagatttaa

SEQ ID NO: 189904 - DNA, 327 bp, Klebsiella oxytoca
atgtccctggagttatccgaaacgcttcacttcagaccagcaagcgaacaactaaccaaagacttggatggtcgctgggtcatcttactgaacccctgtgatggttggcatatcgctcacattgttgcgcttgaagaagatggcgaggtctatcatgttggcgcttatcaatttgcaggggatgagttcgagcctcacgaattctatgtcgcatgggccttacttccagagtctcttgcgttggctaaccattttgacgatcagcgtctgagccctgagattagggctgctcgctggcgagagtgggtggagaaaatgaagcagtaa

SEQ ID NO: 189905 - DNA, 387 bp, Klebsiella oxytoca
atgtcaaaaccaccattggtacctgattccgcacaagttgagacatccgagtctaccgcatcagctcaactatcagcttctacggcggcaagatacagacaagccaaagaagctcatgaaacagccaaagagcaagctatccgtgacttgactaggaatatcaatttaactcctcagcaaatgatggatgcgatggtagacatccaaaacgcgcataaacatattgatagctttaccacccgaattgcggaagttgctagtaccgaaattacatcaactgacgccaccacaatgcggaaaatgcgtgctgatggggcaactgatgccaagattgctgagtggtttgatactaaccctaccaaagttaatcgcatgattaatggttaa

SEQ ID NO: 189906 - DNA, 198 bp, Klebsiella oxytoca
atgtcgccaaaagaagaacaccaggctatgtacgatgatgtctgtcgagtgctgggtagagctatcataatgctaaaagaaaccggccaacctattacagatcagactttgcatttgatgcttcaaattcataatgatcagacaaaagatctgtatttgacgaaaatttacacaacagccagaagggttattggttag

SEQ ID NO: 189907 - DNA, 408 bp, Klebsiella oxytoca
atgagaaaaatgctattgatttttaccctgttactttctggatgtgtaacatttacgcaaatgaatgatgggttaaatgcattgaaaggaaaggataaaaaaatagcctttgaagtgttaggctatcctagccaagaacaaactttcgatgatacgaaagtatatacatgggtaaactctgtaaatgatatagctgcgctctcgtctccacaaattacaacggggacatttggaaacaaatcttttaacgccactactttgcaaactgattacgtccctgttacttacagttgcaaaattcaaatagcaacagatacatcaggaattattaaaaactataactacgatggcaatatgggtggctgtgaatcttatattcaccggttaaacaattactttaaaaaatag

SEQ ID NO: 189908 - DNA, 417 bp, Klebsiella oxytoca
atgagcgacaaagatatcgagcagcaaattcaggctaaaggcttaaccgcgccgcgcgttacgcctgatcatatcgagagcgttatcaaagagtgccattatctcaacgtcggcgaagcggttcaggcgggctggcctgataagtcggcaatggacgattgcagcccagcgctgaacctgctgacgatttgtgttctggtgctgcacaacggcttcaccgtcacgggcgaaagcgcctgcgccagcccgcaaaacttcgacccggagatcggtcgcaagattgcccgcgagaatgcggttaacaagatttggatgctggaaggttacctgctgaaacaaaagctcagtgagcagtgtaccgatgagcgcatgtgtgaaaactgctactccggccagggcgcctgtaaaaacaagtaa

SEQ ID NO: 189909 - DNA, 222 bp, Klebsiella oxytoca
atgtgtggtagcgcacccaaagtagttcagtctgacccgcaggccgaagccgatgcagcagcagacgcagcggccaaagctgcgaacgctgacgcagcagcgcgcaaaaagcgcaaacagggatcatccctgctggccagcggcgcagaaggcgcgacggatacaggttcttccctgctgtccactggcgcacaggccgcaaaaaatacgttaggggcttaa

SEQ ID NO: 189910 - DNA, 255 bp, Klebsiella oxytoca
atggccaatgttgattatcaagacacaaccatctaccgcgataatttaaatcgtgtcgttgtcatggtgaggggaaataatcgccgagagtttactccagatgaatggaaagtgatctgtatggcggctgatatcgatttggaaaatcgggtatacgcattaagcagagcattggaattgcggagcatgcgctgggatgaagagcgtaatctactgctaaaacgcattgatgagttagagaaacgccatggctag

SEQ ID NO: 189911 - DNA, 153 bp, Klebsiella oxytoca
atgaaaaagctttttaaacaggattttaaaaattacagcgggcgtacgttgcgagttttcgccctgacattgaactttgttgtgctgtttatcgtgattgcggcgctgtcagccttcggtatctgcatggttaacgtctgggtggatcaatga

SEQ ID NO: 189912 - DNA, 195 bp, Klebsiella oxytoca
atgttaacaactgatgcgatcaaatattttggtagtaagagaaaactggctgaggccgctggcgttaaggctcctactgtctatgcgtgggggcgtttagttcctgagggtaaagcagctcgtttgtctctgatgactgatggcgaacttgtttatgacccaaaggcttaccaactgccagccaaatcagcttaa

SEQ ID NO: 189913 - DNA, 567 bp, Klebsiella oxytoca
atgacttctactactgcaattgctatcgctgccgatatgtcgaaactccaggcgcttctggaaaatgaagacggcttcggtctgtctccggaaatgattgccgacacaatggaaggacttgagttgcaactcggcgacaaactggatgcggtgtttgtgcatgttcgcaatctggaaggtctggcaaaaacctgcgatgaagaggccaaacgcctcgccgcccgaaaaaaatcattcgaaggcaagatcacgaacctgaagaagtatgttctccagtgccttctggccgccggtcaggatacggttaaaaccgccaaaaatacttttaccgcacgcaagggggctataaacgtcgtgatcgataacgatgagttactgccggatgaattagtgacagttcagacgttagtcactccggacaagaaagccatcaaggaagcgattgaatcagcacaggcagcagcggcccagattaccgctgacggcggagagataccggaagaactgttaaacccggtgccgggcgctcaccttgagattggcgaacgttcgctgcaggtgcgctga

SEQ ID NO: 189914 - DNA, 504 bp, Klebsiella oxytoca
atgaagtatgtctttattgaaaaacatcaggctgagttcagcatcaaagccatgtgtcgcgtcctccgggtggcccgcagcggctggtatgcgtggaatcagcggcgtgcggggataaactcacgccagcagttccgcctgagttgcgacagcgccgtgcacgaagcttttcaccgggtaaaacagcgctacggcgcaccgcgcctgaccgatgaactgcatgctcagggttatcgcttcaacgtgaaaaccgtggcagccagcctgcgtcgtcaggcgctgcgggcgaaagcttcacggaagttcagtcctgtcagttaccgcgaacatggcctgccggtgtcggagaatctgctgaaacaggattttacgccagcggtccgaaccagaagtggtccggtgacattacgtacttacgcacggatgaaggctggctgtatctggctgtcgtcatcgacctgtggtcgcgtgctgttatcgggtggtcaatgtcatcacggatga

SEQ ID NO: 189915 - DNA, 912 bp, Klebsiella oxytoca
atgtacttccctttactgagaggtaagcagtacgagttgatagcattaaaagagttatcaactattgttcctaacgatctttttaaaccggtaattgaacccgtacgaaaaaatctcaagcagctcgaagttgcagttaagttgttgaataaaaacaaaattataccaattataattgttaactctgaaataggtgaattaaaaggtaatacaaataattttattaacaatctatataatattaaaggaatatcattcataccgtgtattaaatacatcgatgatattcaagattttgatagattgaatggtattataaatggtcagaaagcatcctatgttgagagtggagtaaccaaagagctagtttctcgtttaaaatttttttctattaacattatacctgaaggttctcctaatactgttttacagcagttatccaatatagtattaatggatgatccctttaaaaagaaaaaaaggaacgctgactatccttctaattcatatttttcggacttgcatgtaaggtattccggagttcataattcagtaattggttttggtgattttaatatcgcgggttcagattacgctgagtctggtggtcctgcatacgtagtgactattcatgtgagctatctagatagtaatgaatttgatgctatgtcagtcagacatttttcttctgtagatgatggaactccctcgaatccatcaggtaaattccagcaagctttagaaaaacttgtattgcacgatcaaaactttcccaatttttttgataatacatcaggcctaagagggttcaaattgttgcatgtgcgaagacattaccctggattaggtcagattaaacaattgtcaatgcaacatcatattgaaacgatctgtaacttcatcgcagtctag

SEQ ID NO: 189916 - DNA, 867 bp, Klebsiella oxytoca
atgagcaataataaaagtattggacagctatttacaagtcaggctattaatgctgttgcagatggcgatttttccttactccatgagttaataggtaatgttttaactcctaaatttttccctgttaaagtatccgaaatattcgatatagcatttaagaaattatcacatgaatataaatcagaatattttttcaaaaatattatagcaaatgaagtatttttgaaaaaacataagaaaaatgaagctgtaatgctttctgaatttcgagttggaacaaataaagctgattgtgtaatattaaatggattgtcaacttgctatgaaataaaaacggagttagataatctaaagagattgccagaacaattagattcatatataagcttattcgataaagtttatgttgtagcagcaaaaactcacatcgaaaaaataaaactaatcgttccagaagctgttggtatcattgaactcacagataaaaataagctggaagaaattaaacctgcgttagccatcaactctgaaattaatccaaaattaatgattggttcaatgaggattgcagaatataaatttatggcagaggaaatgtcagggggtaaaattaacctcccaaacatggatgtatattctttctgcttagaaatatttgagaacacagattcttataccttaagaaaacactttcgtaactctctgaaaaaacatagggctaatgatattagcttcattaatacgctacctagatcactaaaatcatcggcaattagctatagtattactcagactcgtcagagatcgctgaccaaaatactatcaagctatattgaaaaggatgatatatgtacttccctttactga

SEQ ID NO: 189917 - DNA, 492 bp, Klebsiella oxytoca
atggtgctggcgaaccgctacgactggcagctctttctcgaagtcaccggtcccggcgggagcggcaaaagtattctggccgaaatcgcgaccctgctcgccggggaagataacgccacgtcagccgatatcgacacactggaagacccacgcaagcgtgcctccctgattggcttctcgcttatccgtctgccagaccaggaaaaatggagcggtgacggcgcagggcttaagtccatcaccggcggcgatgcggtctcggttgacccgaaataccagaacccctactcaacacatatttcggcggtgattctggccgtgaacaataaccccatgcgcttcaccgaccgcagcggcggtgtgtcgcgtcgccgggtgattatccacttcccggagcagattgcaccggaggaacgcgacccgcagcaacataacctaactcagaccggcaacagccggtcttttccttatatggccattgccgaaagctga

SEQ ID NO: 189918 - DNA, 447 bp, Klebsiella oxytoca
atgagcgaggcagaatttaccgccatgagcaccagcgacaaggctttgcgggtgcatgagcattacggcgaagtgctggcggtggatgcgaacggccacctcctgtcccgctatgaaaacggcatctggaaaaatatccctgccgccactttttcacggaatgtggctgatttattccagcgcttacgcgccccgttctcatccgggaaaattgcctcggtggtggagactctgaaactgattattccgcagcaggatacaccggcacgccgtctgattggctttcgccacggggtacttgatacccaaagtggcctgttcagcccgcactgtaaatcgcactggctgcgcacgctgtgcgacgtggattttaccccgccggtgggggggaacgctggagactcacgcgccgaacttctggcgctggctcgaccgtgcggccggtaa

SEQ ID NO: 189919 - DNA, 537 bp, Klebsiella oxytoca
atgtgcctgacgatatgctctggccgtccggtcgcaggctcccttaaggccgtccagctcaaaagacaacacctcagccatatgatcacattcctgcgccagttcccgacgcgccacgcgcgccagatggcgttgtttcagctcgtcagtaatgactgcacctccggcacgaaaggcagtacgccatgcaccggaatcattgccgttttcctgctccagttcgttttttgtgcttttacctggcagatggccgccgtggtttcatccattcggctggcattggcaagatgcgccgaccgtgaccttaacggcgacggccagagtaaagcgctgcggccgcagatgcctgtgagggcatggttgccctgccgccggtgttcggtgactggaatgatgcgtttatacagtacggcgaggaagccagcgcaaagccatttatggcgccatccggccaccggcgcaaagtccgttcgataccatgagcgaggcagaatttaccgccatgagcaccagcgacaaggctttgcgggtgcatga

SEQ ID NO: 189920 - DNA, 312 bp, Klebsiella oxytoca
atgcgcgataaattcattgatgcgatccacagttgttctaaaatccaattaactttttactcaaaagaagataatgcgataatcacgagattaaccgctccaatggacttcgggcctagccgtagagcacatgataaaagtgataggtttcatttttgggattacgaaagtgacaagaaaaatcatgttctcagtttgcaacctgaagccataaaatctctagtagtaacagatcaaaacttccacccgcaggagtttgtgaactggacacctaactggtttatcgctagagactggggccaatactcgtaa

SEQ ID NO: 189921 - DNA, 573 bp, Klebsiella oxytoca
atgataaatgctatactgtttttatatacagatatcaatgcagataaggaggattatatgttaaataagcttgccaaatatcttcttactgctagctcagtagctcccgtatttttcaccttagctttcctgtcctatatatcaaagcactacaaattcatgattgcttacctatctctaggtgtaactattcttttattgtgtgttttgatcgtcaagtatgcaataaaccataactctgtcactaataaaaaactaacaaatgcctctcctgccgataaggaaataacaaattactttttaacttatctgtttcccttgattagcgggccagaagctttcatggacgtcaggattgcgtcattttttgctttgagtttgtttttttacatcagtttttcaggctcttacagcttcaacccattgctgtccttttggggatataaatattatgaagctgaagatgatacaggcgtaagctttgttgtattatcaaaaaaaccattgctaaaggcatcaggaaatcgtattaatttgattaagcttactgattacacatacatagcaatatag

SEQ ID NO: 189922 - DNA, 894 bp, Klebsiella oxytoca
atggaattatttgcaataacagataataccgttggcactcgaattgttaaaattgttactgacagaccaacgcaaaatgtaataactcagttattcaatgaacaaaaaacattttttgaagatcgctatactgaaggagtagagttttcaggtggatatatcacaagcggtgatgagttctttgtaattcctgattttgatgatgttatagctgtattggatgcaattaataatcccacagcaattcccgaatgggaaccagaagatatctctgcattcaatattatcgctcttttttcaggttatcctgaagagaatgaaaaacctgcaatcgccttgattcaaagcttcgataaaagacaagtcattgataatagaagaacaatttttcacaaaccttttcaagcaggtaataccttctgtcagtctgctgagcatggcatcgtcattgataataaactaacagccattctaacaggtacagaattgaaatttaaaagtttccatatgctgcgtaggatattcgatgtggatgcatatttccgagaagccacaaatgaagagttaacaactttttcttcccatgaaaaattttcagttgctcagggatttgatttaacgactattgctgattcagtcattagaaagaaagtttccttgattaacaaatcaagaatacttgaggactactctgtcactgagttaaggatttcagcagctgaaattggtgtcgttttagatactgaaaatgctggcgaatttgagaaaataaaaatgccacaaataaggaaagacgttaaaagattattgcacttcctagatgaagactatttcacctcacatataacaagaacgctgtatcgagcaaactctaaacgtcgagaagatgtataa

SEQ ID NO: 189923 - DNA, 489 bp, Klebsiella oxytoca
atgcctaatttttctgacttagttgatgcttataaaaaaataccttcgggtttgtttttttctgtggctcttttattggcatttattatatttatgccttttaattgggctggtttacttggtatttctgagtttcgaattaattatcgaatatggcttgggcctgcatttcttttagtattagcaatgttatcaagccgtattttttccttcttgaaagtcagtgcttctgattttcaacttaaaagggagcgcattggtttactgactactttaactcatgatgagaaggattatctcagagagttcattgataaagatacctctacaatatctaaagatataagtgatggggtaataggttccttaaagtctaaaggtattgtttatcgaacctcaaatattggattgcattacaggacgtttccttttagtttacaaccttgggcaagagctttattgaagaaaaaacctaaattactgggttaa

SEQ ID NO: 189924 - DNA, 660 bp, Klebsiella oxytoca
atgaacaccaagaataatggtaggtcacgatggcaataccgtttcaagctcctgagtttaaaaaacaagcatttaattgcccaaattgcgctgcttttcgcacagcaaaaatgggaacagttgtattatgcatatcaagataaagcagttcctatgtacactgcgtcttgtgaacattgtcaggaaaaaagctactggtacatggaaacgatgataatacctacttccgctaacgttgaaatgcccaattctgatatgccagaagattgcaagaatgactatatggaagcgcggagcattgtaaacctatcaccgaaaggggctgctgcacttcttcggctttgcttgcagaagttaatggttcatttaggcgagccaggcaaaaatatcaatgaagacattaaatcgctcgtcgctaaaggattgcctccactggtgcaaaaagctgctgatatttgtagaataatgggtaatcaggctgttcatcctggagaaatcagctttgatgacgatcctcagatggcgcatagccttttcaaattgctaaatattattgtggatgaccaaatcaccagacctaaagaaatagaagccatgtttcaaagtatgccaactaatgctttaaaagggattgaaggaagagacaaaaatcaggggtaa

SEQ ID NO: 189925 - DNA, 573 bp, Klebsiella oxytoca
atgattttagataatgaaaaattattaaagatagaaaatgcattaatgtgcttggagatattctcacgggatattcatacgttttttgcaatggcaaattatctaaatatattagataaagatccttatatctactcaccgttcagaaatatatgcaatgccttgcttggtgatgctgcagtgagatggtgtcaggttttcggtacgtataatgaagataaccattggaagaagataattaatgatcatgaagcatttatgtctaaacttttaaacaatgttggtatagatactctatcttatgaagaatacaataaagaaatgagagagtttagaaataaggcgattgcacatttcgaaccacaatacatgaatgcggaaaacattgttccgacatttagcattgcaatgaaaacatcatcctatcttcatcgttatttgcgtgatttattgcctgtggggatgaggaatagtcatcctgaggatttgatgcagtttggggaaataacagcgcagtgtgttttgaataggctggatgatgattttatttaccatcccatgaatatgctgtga

SEQ ID NO: 189926 - DNA, 477 bp, Klebsiella oxytoca
atgattcgagatgctatattttcaccctgtgggaggtatcgctattctttgtctcgtgtatgggaaccgaccaagccttatgtactgttcatcggtttaaatccatcatacgcagatgctgaacaagatgaccggactttgacccgctgtatatcgtttgccaaaagctggggatatggaggtgtttacatggcaaatttgttcgcttatgtacatacagaccgtttcgaaatgttgaaggctgatgatcccatcgggaccgataatgacagatatcttgttgagatcatttccaacgctggagtagtgattgccgcttggggcaatgaaggacgatatttaggtaggtctgtagctgttggcaaaatgttaccagaaaatactaagtgcttggccttgaatgccacgggtgagccaaaacacccattatatgtgcatagcaatacggccttgataaaattccccctcagcgcttga

SEQ ID NO: 189927 - DNA, 1386 bp, Klebsiella oxytoca
atgaaagttcgaacgtttatcgcggccacgctgctggggttactgtcgctcggccatgccagtgcaaaaaatcttagcattaatgaccttccctctgaagaggtgcgtacgctgacccaacaggcctatatattcagctatcccctcatcatgaactacgcaacgatgtataaacaggctatcaaccaacatgcgccggagtatgttggtggctttggccattttcggcattatggttttgcaacctccgagaacaaagatattgtctcgcctaataacgacacgccttattcctgggcgtgggtcgatctgcgggcggagccttggatactggtgatgcctccggtagatagtgagcgttactatgcctcgcagtgggatgatatgtggggatttgtgctggatagccctggttctgtgatggatggtgataaaggcggcatttatctgattgcgccagcgaactggctgggtacggtgcccgccggcgtaaaacgcgtgattcgcagcgaatccttgtttgctggcacgttgacccgtaccggggcgaatgggctggacgatcttacgcaggtaaaggcgattcaggcgggttaccagcttatgccgctgcaccgctacttacagcaaccggcccctgctttcgcgccgccagtaaagtggctgccttttgtgcaaggcgatgagaaaacgccggaagcgtttaagtatgtgaacctgatgctggcttacacattaccggatgcgcgggataaaaccgtgctggcagcgatggcgaagcttggcattgcggcagggaagccctgggacacggcaacactcagcgcggctacgcggtcagcgatgcaggaggggattcatgatgcgctggaaaccatgacggcaaagatgaaaaatgtgagatcaagcgcgctgtttaacactcgtgaaaatctgcaaactgactacattgatcggatgatcggcgtttatgtcggtattttcggtaactatgcttcccaggccacctattttacctggcacaaagatactgatggtcatcagattaatactgctaacgggaactataagctgacctttaaaaggggagaaacgcctcctgccgactacttctggtcaataaccatctatacgatgccagagcgttttctggtgcctaatgtgttgcaccgttactcgattggtagccgtagcccgcagctaaaaaccaatatggatggcagcattgatatctatatttctcagcaagcacccgtaaaagagctggagtctaactggttgccagcgccagatggtgagccgtatatcattatgcgagtatacgggccgggggaatcggtaatgaatggcggttatgaaccaccgcctatcgtcagactgaagtag

SEQ ID NO: 189928 - DNA, 1467 bp, Klebsiella oxytoca
atgccacgccgatttatatttcaacctgccgtcattgcgctactggcgcttggcgcctgtacctcagtagcaaatgccgcggaaaaaaatgcacctgtcgcggtacaaatagcaatggccgcagagaataatgtcagtgaagcctacatccgtctgctggcgcgcaatgcctatttctggggttggcccatggcgaatatttataaccgccgactcatgttctctaaagtgcctcaaccctctctactggatggcatagttccggtttcctcattgaaccggctttctatgctgtcagattatattgatcccatggaacgccatgttgcctgtccgaatcaggacgttgtctatggcggcgccgtactcgcactggataaagacccgattgtggtccaggtacctgacttcggcgatcgcttttgggtttaccaggccgtagatattcggaccgacagctttgctgagttaggggcgcagtatggcactaaaccgggcttttatctgctagttggccctgagtggaagggtgaggtacctgcggcaataaccaaagtcttccgctccacctccaatacaggaatgtttattccacgtgtattccagagcgacgcccctgatgacaaaaaaatcgcccgcgctgttatttctgacattgatatttacccgctctctgaattcactggtaagatgaaaatgcatgactggagcaaactgcccgtcataaaatccgcaaccagtgaagatcaccaacaaagcgaaagtcagtgggtcaattctgaaaaattctttgatcaacttcccattctgctggcagatagcaaaccacttgccggggaggagaccctctatcaacagttacaatatttaagcatgctggcaaaaaacgatcctgaaatgcgcaaggtaatgattgatgaagcgcagaaggcagagaaggaactgatttctcccctactacgatttagcagcttcggtataaatctcccgcatcactggtcgacgataaataatggcgctgaatttggtaaagattattacacgcgtaccgccgtcgccagatccaatattctggtgaataagaataaagaaacgaaatatttctatcttgatgccagcgatgatggcaaggtgctgcacggcgataaacgctataccatcactctgccgaaagggaaggttcctgttaacggcttctggtctttgaccctgtataacagccaccattttttcgcgccaaacgccatcaaccgttactccgtaggcaccaaaacgccgggatttaagtacaatcaggatggttcgttaacgttgtatgtgcaggcaaatgctccaaccaaagagcagatgcagaactggctgccatcgccgaaaggggaaaacttctcgctgtatatccgcgcctattggccagcgcaggaagtgctgaacggcgaatgggtgccgccggcggtaatcgcccaataa

SEQ ID NO: 189929 - DNA, 855 bp, Klebsiella oxytoca
atgatacttaaaggattaaatacagcgccgataaaacagggcgatcatcttttcctgatgacatttaaagttaataaccctgagaataaaaattgtattttttatatgcaactcacgacattagtagatctactaattattctacgcagccgtataactaaagtagggaaaaaccttgcagagcaaggtaatatttataaagagaaaattaaagctgacattgagatacttacaaagaacatacctgagattagccaatcggaggtaatgcaaccaaatccaatgaaccttgttacttctctggcccctaaatttggcgatgagaaaacatccctaatcttagctttacaaaatgaaaaaattattaccttagatattgatgatacacaagtagaattttgcatcattgctattcaaaaagctattgagactatcaatgataatgaaacaatgaacattattggatctttacttgattttgtactactcttttcagttgatttaactaaccttgattatttaaattacaaagaaataagccatgaactctggaaacaaaatttattttcagagtatttagcagttatttattgttttgaaactgaacggggtaaagaaactctctgcggaactatcattaaagctaatactcaacctgacactcaagaaatgcaaagtataattcacagagtcgcttcactaacgccgatgttaaaatcttttcaggggaaatacacactatgccagactttttgccagaaaattaccccagattcaaaccagattttaacaaaagaagtatgtcttgctcagctgcatgcattttgtcttaaaatgcaaaccaggcttaattag

SEQ ID NO: 189930 - DNA, 1287 bp, Klebsiella oxytoca
atgaagaatgaactctatcgcaaggaagcgattgaatataagagaaattattggaaaggaaaggctctattactggcaggaatgccgtcctggctgataggatcgctatcttttttattcctgatatgtttaatattaactttaattttctgcaactacacacagcgaattgacgtaaaaggggaagtcataaccctccctcattcaatcaatgttttcgctccacaacaaggttttgtaataaaaaaacacgtagctgtcggagatattgttgaaaaaggaacacctctatatgaaatcgatgtttcaagatcaaccatcaacgggaatgtcaacgagacaatgactgcggtcattaccgagaagataaagaatgccaatgaaataataaataaaatactaaagaataaaacggaaacgttggatgcattaaatatacaaatcaaacagtatgaattaacgctgcaagaaactgataaaatgttgaaaaatgctggagatggcttgaaaaaaatgaaggacaacctatctagctacgataaatacttaaaggaaggattaataactaaagatcaatataactaccaacattcgttatattttcaacagcaaagtacttatcaatctctagttagtcaaaaaatgcaaattgcatcccaactaacacagttaaatagtgacaagattattaaaggagcagattttgacaatcaaatatctactcaaaaaaatcagataaatgattataaaaatcaaagggtagaatctactgctaatggtaatgttgtcgtgaaggcaaccgctgcaggtaaaattgaatctgtttctgttacagctggacaaatggtagataaaggtagtagtttagcacaaataaaaccaacagggaatgtagaatactatcttatactatggctacctaataatagcatcccttatataaatccgggtgatacagtaaacattcgttatgatgccttcccttccgacaaatttggtcaatttcccgggaaagtagtatctatttcatcggtaccggcatcacgacaagaaatgtctgaatatacaaatgcaataactaatcctaatcaacaggaacttgctttatataaagcgacaattaaaattgaaaaaactaattttatttatagaaacaaagtattgaaattatctaatggtttaaaggcccaagcgatagtttttctcgaagaacgccctctttatatgtggatgttcactccattttataaaatcaatcaaagcgtgagcggccctataaatgaataa

SEQ ID NO: 189931 - DNA, 387 bp, Klebsiella oxytoca
atgaaagaattaacagctatcgaaatggatactgtatccggtgcaggaatcaaacagattcttgatggaactcaaggtatagttactggccttgtcgatgcaaccataggcgctgccattggtttgattggatatgcgtcaggtggtggtcttcagggtgggttaacgggtaatggcgctggtggcggagctattggtttcggaactatctctatggggataggcgctctttggggagcgatccagggcggaatctttggtactatcatgggcgcatataatggagctgactatgttaatggtcaaatcactcatctaattgatggaatcctggatggtactgctggcggctttaaggctaacggtggttttagtataagcttttaa

SEQ ID NO: 189932 - DNA, 366 bp, Klebsiella oxytoca
atgaaagaattgacagcaattgaaatgaaagatgtttctggggcaggtattaagcaaatcctggatggctcacaagatatgtttaccggattagtagatgctgcagttggtgctgctatcggattaatcggatacgcttcaggcggtggacttcagggtggcctgactggtaatggctcaggcggtggtttacttggcttcggtactatttctatgggtattggcgccttgtggggcgcaatccagggtgggatctttggaactatcatgggtgcatacaacggggctgactatgttaacggtcagataactcgtctcattgatggaatcctggatggtaccgcaggtggatttaaagcaaactaa

SEQ ID NO: 189933 - DNA, 657 bp, Klebsiella oxytoca
atgaagaagagttgtttatttcttgcgactttcttcggcgcgctcacttctttgggggttcacgcgcaagaaaagcagaaaccaaagacagaggaagcccccacaataagcaaagaggatttggcaaagtgccaggccgaggaaaacggcacaaaaaggttaggttgctacgatctgttgttgccgccaaatgagatacagaacccggaggaaaaaagcgacacagggaagtggcaagtatcaacggtcgaatcagatattgatgactcgacaaatgtttttgctatgctgacagcagatttaccgatctcatcaaattttggaagaacctccacccccgtacttttcattacatgcagagagaagaagactgagttattcattaactgggatgtctatttaggacttggtgaaacctctatgcttcacaggcttgataagcaaaaggcggtcacaaaagtgtgggatatatcaggtaatacaaaagcagttttctacaggggcaggacaattgattttatcaagagccttgagaagtctggaaaaatgctggcgcagattactccatataatgagaattcagccaccaccacattcgatctcaaggggctttcagaggccatcaaaccactacagaagtcatgcgggtggaagtga

SEQ ID NO: 189934 - DNA, 249 bp, Klebsiella oxytoca
atgtttaagtgtcctatctgcggtgccgttgctaaaacgcgcaccagtcgtccattgagtaataccaccgttcgccattatcaccagtgccaaaactttgagtgcagcattacctttaccaccctgaacagcgttgaaaagctggtcacaaagcgcggccatcgcgaaaagttgccacctggctttatcccctcagatgcattcccatcatcccactatggtgatgcacagttaagcctcgccgtataa

SEQ ID NO: 189935 - DNA, 1155 bp, Klebsiella oxytoca
atggcactgacgacaggcactatcgacaaagcaaaaacgctactgaatgaaggcgtccagcgctttcaggactatcagtccgagctgtcacgcgtgccggccttcagcatcctgatgggcggcaaggcactaacgcagctggatccgcgcatcatttctctggagcttacggacaatcgcggctttgaggccgacgagctgaccattgctatcgacgacagtgacggactgatcgagctaccgccgcgcggtgccgagctttcggtgtcgctgggatggcagggtgagccgctggtttacaaaggggtttacaccgttgacgaggtcgcccactcagggccgccggacagactggagatcaccgcccgcagcgcggattttcgggacgagtttaacgttaagcgcgaggtatcctggcacgacgtgacggttgagcgcatcgtgtcagccatcgccaggcgctacaaactgacgccggtgatttccgagcaactgatgagcgccgagattgaccacgccgaccagacccaggagagcgatatgtcatttctgacgaggatggccgatcttctgggggctattgccaccgtcaaaaacggtagcctcttgtttatcctgccgggcggtggtgtcagtgcgaacggcatggcgctgccgcagtttgcgatcacccgttccagtggcgaccggcattcgttccgcgtggctgaccgcgacgcttacaccggcgtgcaggcgtactggctggatctggagttcggcaaaaagaaaaaggttaccgttaaggagcgcaagaaaaagaccgagaacaagccgcgcagcagcgcaagggaaggggattatatcgccggtgaagatggtaacgtttttgtgctgcggacaaccttcaacaatgagattgccgcccagcgagccgctgcggcgaagtggcaacagctcaaacgcggcgccgccgaatttaatatgacgctcgcttatggccgcgcagatctgtacccggaaatgcacggcacggtatcaggctttaaaacggatattaataatcaggactggataattgcgaaggccacgcactcgatcgacgacggtggatttaaaacgcagctggagcttgaagcgaaaatacctgaatggattgcagaaagtgagggttag

SEQ ID NO: 189936 - DNA, 1182 bp, Klebsiella oxytoca
atgaccgacaacttttttcacggggcgcgcgtcaaggaaaataccgacctccagaccgcgatcaatgacattgattcaacggtcattggtctggtcgcggtagccgaagacgccgaccctctcgcttttccacttaacacaccggtgcttgtgacgcgggttttcagcgtactcggcaaagcaggtaaaaccggctctctgtataaatcgctgaaagctatttctgaccaggtcagcacccgcgtgatcgtcgtgcgcgttgctgaggctaaggtcggggaagatgaaccgacgcagtcgcagctgattatcggcggcacacaggctgacggcagctacaccgggatgtttgccttcctgacggcggagcagaaaacgggctatcgcccgcgcattctcggcgtgccggattacgacaccgccgaagtgaccgcacagttgcgggttatcgcaaagcagctgcgggcgttctcttacagctactgccacggctgcgacaccattgcggaggcgaaaacctaccgcgagacgtttgcagagcgcgagggcatgctgatctggccgaacttcatcgcctataacccggcgaccggcgtcaatgaagaatttcccgccgtggcctacgcgctgggccttagggcgcttatcgacaacgagcagggctggcataaatcattgtcaaacgtgccggtcaaaaacgtgctggggattgcgaaggacgtgttctgggcgttgcaggcggaggattccgacgccaacgagctgaacgccaacgagatcaccacgctgattaagcgtgacggcttccgcttctggggcaaccgcacgacggatactggcgaatttattttcgaggtgttcacccgaactgcgcagatcctggcggacagtatcgcagaagcgcagttcaccaccgtggatacaccgttaaccccggcgaacgtgaaagacgtggtgagcggtatcaacgccaaactgcaggcgctggtcacggcgggcaagctgattggcgcggcgacctggtatgacgtcgttgataacccggtaacgggcattcgtcagggtaaagccatcgtgcgctacaactacagcccggtgccgccgctggaagatctgacgatgatccagacgttcaccgatcagtattacgaatccgcttttgcatcgctgggaggtgaatag

SEQ ID NO: 189937 - DNA, 1056 bp, Klebsiella oxytoca
atgagtgaacgtcgtttttattccatgctgacgcaggccggagcggaaaaaatagcacaggcacaggtgagcggtgtcccggcggggtttgtatttatggcggtaggggacggcggaggcattgtgccttccccttcatcagagcaggccgggctgattaatgaggtctggcgtgcagagctgaacagtctgactgtggtcgacgagcaaaaaaatattattcaggctgaagcgataatgccgccgcaggtggggggcttcaccatgcgggaggttgcgctgtttgatgaggagggggtgtgccttgctgtcggcagtctgccggtcacgtacaagccggaactgagcgaaggttccgggcgattctctgttgtgcggatatggctggcggtcagcagtacggaagcggtacagctgaccgtagacacctcggtaatcatggcgtcgcgggaggatgtggataaggcgaaggatgaggcgatggactataccgataaggctctgcaggaagccatcaccgaagccatcacagcggcaaagcgtgatttctgggaagaagaaaatccgccgggaacggtgcgcttctttgctcaaaatatcgatccgaacgagaaatggccgtggtcgcagtggacttatactggcgagaataaaacgattcgcgtcggcaaggctgacggttcggacgttgccacgacaggcggcagcgataccgtgaccattgaacgcgccaacctgcccgccgtgcagattgatgtaaccggagaaaccagcgagcagcctgagcagacgctgaccacgaaacctgccggtaagcacaaacacggcggcgtgccgagccgggaaaatccgtgggagattggcggcgatatcagccagcgctttaacccggcgaacctgggcgaaactgatgaggccccggaccatgagcatgatattgatattccaccgcatcaccatgacgtcaccggtaaaaccgccaacctcggcgaaggtcaatcattcagcgtggtggaagcccataccctgctgatgtgctgggcgagggtggcgtga

SEQ ID NO: 189938 - DNA, 603 bp, Klebsiella oxytoca
atgaatagctcacttctcccgccgtctgccagcgcgtggatgcgcagtgccgagagcgcatcggccaggctgtcagctattacggtagcccttcgcacactgtggacgccgacggcatgccctgttgatttgttaccgtacctggcgtgggcgctgtcggtagaccggtgggacaaaagctggcccgccgctaaaaaagtggcagcaattcagcagtcgtactggctccatcgccgaaagggtacccgcgccgccgttcggcgggtgattgaagatatgggtttttccgccacatttgcggagtggttcgacgtcggcgacgagccgggaacattcaggcttgaagtggatgtgaacgatgtcggactgacaccgaaaacactggatgaattaaaccgcctgattggtgaagcaaagccggtgagcaggcacctttctcaaataattatatcaacgaaaaccagaggagaaatctggatggggattgcaccttattgcggcgagattattaccgtttacccgtcagattatgagcctgacgacacgatttattacaacagcgtagcgcactacgacgataaccaccgatattccggggcgtaa

SEQ ID NO: 189939 - DNA, 396 bp, Klebsiella oxytoca
atgaaagcgaccgccattctcgccatcgtgatgtttgctctgctgatcgccgccgtcagtgggtttgcctggcaaagccataagcgcgaacaggcagaacaatcactgaccggcacccgggaagaactgaagcaaaccggcgacgtactgaccgaggtcagggcgctacgccacgacgtcagcctggtggaagcagggctgaagaagctaaaccagcagcgcaccgcaacgggagagcaccgacgtgaaaacatcaaaaccgcactggccggtaacggctgcgccgttgctcctttgcctgttgctggcgctgacagcctgtaccaacgagccgaagaggtcagcaccgcagattattcaggagcccttacccgaaagcctgacggcaaaaactga

SEQ ID NO: 189940 - DNA, 849 bp, Klebsiella oxytoca
atgaatacaatcattctcgccgtcgctttgattagcggctacctctacgtcacacgatcagtttctgcgagatataaatttaagcgttccgaaggctgggacgcttatttttatgtagctgcatggggcgttctgttcaccctcgccgcatggcttttatgttctttcatcagtgtgttgggaattttccgctgggtatatggcttcttgttgtctcatgattttattgaagaaaacaccataaagcgcgtctttcccctatcccccgcagagcaatttaaattcgctgatttcaaattcgcagtctttggcgtgacgtcaatgtttctggcatgggcggcagggcatggcatgagatggtatgtctgtagcagcactgaccggaggattgacgcgctggttaaagccgtacatcacgacccgctcgaaagccttctgattgaagccgccgttagaaagatgccggtgatcatcaccctgggatcgagaaaattctacgttgggatagtggattgccctcagtttgagcatggaaagacggattatttgcagatgttaccgctgcttagtgggtatcgtgacaaagataatttgacagttaatgtcaccacgaactacaagcgccactatatggatagcggcattcttggcggtgccagcgacggtcaggttactcttgcggacttcaggacgctggttccgagggatgagatcgaaggcatctcgttttttgataccgacacatattcgcaattcaaagcaaaagaagagtcggacaagataggctcagccgcgctatcacccagctttgttccgagaaaaagtgataatttgccaccccaatcgtaa

SEQ ID NO: 189941 - DNA, 216 bp, Klebsiella oxytoca
atgtcatttgcatttggattgtcattatccggggctatgttcagttcgaaagagcggctgaccaaggctctgaaggacaacaaaaacagctacacaattagccgagatggctacgtgtcccttgacctcaataataaagaggtcgttgatgctattactcgccagatcgagaagctcggcgatatcaaggaagagtctggaaaaaaaggtgaatga

SEQ ID NO: 189942 - DNA, 678 bp, Klebsiella oxytoca
atgagctatctgggaagcaaagcggccagcggtgtttatcaaaaaatcatcgccgagatgccgccgcatgatacttacattgaaacccacctgggaggtggtgcggtaatgctgcgtaagccgcccgcccggcgcaatatcggaattgatatcgacgtcgatgcgctgaaaaattttgcgtttacgcatcagctttcagatgtgagtctcgttagtctcgacgccgcagattatctggagaagttcgatttttgccacgccggccgggtgcttgtttatgccgaccctccatacctgccggagaccagaaccagccgcgcacgctaccgctacgaatacaccgtcaccgatcatgagcgcctgctgacttgcctcatgagcctgccggaaaacgtcagcgtgatcctgtctggctacccgtcgcggctttacgatgaaatgttagcgggctggcgtagcaaagaatttcaggccatgacgcgaggcggcgtgcgaacggaaaaaatctggatgaactacccggaaggtcgagcctactcccacacattcgcgggcaaagactacaatgatcgctaccgcattaagcgaaaggcgcagcggtggaaagacaagttttcggcccttcctgccgccgagcgtctggcgataatgcaggccctttgcgaggtggatgagtaa

SEQ ID NO: 189943 - DNA, 234 bp, Klebsiella oxytoca
atgaaacagggctatatcatccactttagagcgagcagcgcagaagggagaatactttatgagggaaaccgttccgtggttgtgacttgtggtaaagatgggtttgttgatccccgtaagctacttcacaaatgcacctcaatgatccttgccgaatatgaagggtggcgaggccctgacgggcgctgcgaactcgttaataaagtcatcatcaaaagcgtaatgaaattgtga

SEQ ID NO: 189944 - DNA, 225 bp, Klebsiella oxytoca
atgagccagattgatgccgttgttactcgggtgatcgagtactggccgattagcgacttctggatggtggaagtggaggtgatggtcgatggccagtacctccgcactgatatctccgcgagcacaaaacgcgaggcccgcgctattcagcctggcgacaccgtgctgataccggttgtgagtctggatagcgactttgccgatgaagatgaattgccattctga

SEQ ID NO: 189945 - DNA, 957 bp, Klebsiella oxytoca
gtggttaagtccccgatcaaatgggccggcggtaaaacccgcgtgatgccgcagctgctgaagcacctgccgaaagccgattgcctgattgagccattcgtaggcagcggtaccgtatttatgaatacggattaccgccgctatgttctctgcgacagcaatcgtgcgctgatcaacttctttcgcgtgttgacctccgatactgagcggctgattagcactgcacgaggaatgttcctgggtggcaataacgaagaacggtattacagccgcagagagctatttaattcgatgcagtggagtgacacgggtaagcccgataccgccttgctgtatgccgctttgttcctgtatctgaatcgccatagctttaacggggtatatcgcgtcaatcagaagggtgaacataacgtcccgtttgggaaatacgcagcaccttactttccggctgatgagatgcgccgctttgccgaaaaggccaacgacacaaacgcgattttccaatgtggtgattttcgtcacaccatccctgacgtcgtgccactggcatatgacgcagttatttactgcgaccccccctacatcccggccagcaaaaccgccaatttcaccgcctacggcaagccgtttaccctggacgatcatcgtgccttggttgcaaccctgctcgatgctcatcgccagcatggcgcccgctcggttatctcaaacagcgatacgccggaaacccgcgagatctattccgctttcaatctccacgccttcagtgttcgccgctctgtcagcgccaaaagccgcgacatggccggtgaagtgatcggcgtacttcctgattccgccgattgctacacgcgcagctgcgctagctgcgaagacgtcgaggaatgcttagcgccgacagcgatttggatcggggttgatatggccgccggcttcgataacggggagccattctga

SEQ ID NO: 189946 - DNA, 228 bp, Klebsiella oxytoca
atgcatccgcgtctctccgtcatttgcagcgcaccgctgccggtctgcaacagggcgctagccgccctgaaatgcttcgcccgcggccagcgcaatttctcccgcgttatgccgcatgcctatctcgcgatccgcattggtcgccgctggcgcttgctcagcaagaacggcggccagcagtggcggcttatgacccacgaaacctacaaccaggaataccgcaaatga

SEQ ID NO: 189947 - DNA, 273 bp, Klebsiella oxytoca
atgttcactaaagaaaagacttcatgggaacaggaaatgctgatccgcgaggcagtggaaaacgccgaacaggggtttactgttcacctgaaaaatggttgcgtcattggtgtaccagcaaatagcccgtcaattgatttaattatttacggtctggaaaaagaaattcgtggtaatcacgaacgcgccagaatgacgtttattgattttctgtattactggcacgaaaggttattcaaacaggttaaaagaaaacctcgccccaaccactaa

SEQ ID NO: 189948 - DNA, 399 bp, Klebsiella oxytoca
atgaaaagagaatacgccgacaaaattaactcattgctgcaatgcttccatttcaacaaagagtttctggaatggaaccacgattattcacatcaacttttacgccacggcgtatcccacctttatcacttcgcgatgctccagggcgagaatgatgaagccacgcttgaagagctgcgcaacatcatcatttcgatcactaacggcgatatcccgaagccatacgacctgtcatcaatggacgccgagcaaccggagacgacaggcaagaccgtgatgtttgttaagccgctggcggtaacggtggaagttacgccggaaatggtacaacagctaaagcagtcaatggcgactatcccccgccaaatgagaaagccacccctctattcccggggatag

SEQ ID NO: 189949 - DNA, 219 bp, Klebsiella oxytoca
atgaaaagtgggaacggcggggcggtatcgcagttgaatagtaaaaccagcctttatcgtggctttactattctgaagctcccgcgcaaaaaaccatatagccgccagcggtatcaggttacgcatggcggccattacttcggaattgattttgcgttagctgaagcctgcaaaacgatagaccgaattatgaataacaaacgtttcacgattcattaa

SEQ ID NO: 189950 - DNA, 273 bp, Klebsiella oxytoca
atggaagctcaggactacacaatcaagtatccgcttgacgccgtccacgtcgaaaagttcgccgagctaatcggcaaaccgaagaccgcggtagaggaaatgatcaaggctagaaagctgccggtcattgagctgcgcgaccccaacaaaccaaacgcccgcgcaggtgagcgctgggtttatatccccgagtttaatcgcgcagtgcgcgaggcgtactacaaccgcccggtagagcagcgtgatgcttggttgctgtggatggggctttaa

SEQ ID NO: 189951 - DNA, 486 bp, Klebsiella oxytoca
atgaaattcacccttattcgtaacaagaccaatccgaaatcgtattgctggaaactcgatatcggagatgaaattctctttaaaagtcagttctttgatagcttcattgacgccattagaaacctggaaaactttcacttggggctttcttcaataccggtggttgacgaacatggcgatcttctccgccctcacaaacccaaccccgatacccctcactccctgcttatgcgcgtcactcagacagctgatcagcgttggcggtgtgagctatgcacccttgaaggtggctctctaactgaccttggccttttcggtaccagagaccatgcaatcaattactccacatcgtttattcaggacatctataacgactcaactgttgccgacgaacatggctctatgccgccagtcctttcgttttcccgtcggtaccgggatacatttggcattgttgacgagcatccttcagtccatcgcggttga

SEQ ID NO: 189952 - DNA, 981 bp, Klebsiella oxytoca
atgtcgattaagaagctcgatgatggtcgctatatggtggacattagacctcgcggggcagcaggacgccgcatccgcaagacgtttgacagaaaggctgaagccgtcgtgtttgagcaatacacgatagcgaacgctagccaaaaagaatgggcaggaaagcgcgccgaccggcggccgttaagcgagctgctcaatgcctggtggcggtaccacgggcaaaaccatgaaaacggcaaaaaggagttcaatcacctgttgaagacgattaatggcctgggtgatcccgccgttagtcggttgagcaaaagggatttgatggactaccgatccggccgtttaagtgccgggattaaggcgtcaacgattaatcgtgagatgtaccggctgtccggtatgttcacgaaattgatacagatcgaggaatttggcgggcagcatcccgttaacgggcttccaccactggcggaagaaaacccggagatgacatttcttgagcgggaagagatcagcaatttgctgaacgttctggagggggattctctgttagttgccctgttatgcctgagcaccggcggaagatggtcagaggtcgccacgcttaagcggtcgaatatcgttaactgccgcgtcacgttcctgaagacaaagaacgggagaaagcggacggtgccgatctctgaagaactggaaagtaaggtgaaaaaagaggccagcggaaagctgttcaaagtggactacgaaaggttctgcaaaatactgcgggaggtgaaaccggatatcccggagaaccaggctacgcacatcttgcgccacacctttgcgagtcatttcatgatgaatggcgggaatattatcgcgctgcaacagatcctggggcatgcgaatattcaacaaacgatggtctatgcgcacctgtctcctgactacctgcaaaacgcggtcacgctgaacccgttgcagggaggaattgcggcataa

SEQ ID NO: 189953 - DNA, 918 bp, Klebsiella oxytoca
atgataaaggcaagtgtttggtcaggcgcgctggcgctggcggccctgattagcctgccgctgcaggcggccgagccggttaaggtcggctcaaaaattgacaccgaaggggcgctgctcggcaatattattttgcaggtgctggaaagtcatggggtgaaaaccgtcaataaaatccagctcggcaccaccccggtggtgcgcggggcgataaccgccggtgagctggatatttacccggaatataccggcaacggcgcgttcttcttcaaagaggagaacgacccggcgtggaaaaacgcgcagcagggatacgaaaaagtcaaaaagttggacgcggaaaagaataagctcatctggctcaccccggctccggccaacaatacctggactatcgccgtccgtcaggatctggcggagaaaaaccacctcgcctcattaagcgacctcgccggctatctgcaaaagggcggcgactttaagctggccgcctcggcggagtttattgaacgcccggacgcgctgccggcgtttgaaaaagcctacggctttacgctcaagcaagagcaactgctgtcgctggcgggcggcgatacggcggtcaccatcaaagcggcggcgcagcaaacctccggcgtgaatgcggcgatggcctacggtaccgatggcccggtcgccgcgctgggtctgcaaaccctgagcgacccgaagggcgtgcagccgatttatgcgcccaccccggtagtgcgtgaagcggtgttaaaagcctatccgcagatagccgactggctacagccggtatttgccagcctggatgaaaagacgctgcaaaagctgaacgccagcattgcggtagaggggctggatgcgaagaaagtcgccgccgactatctgcaacaaaaagggctgctgaagtag

SEQ ID NO: 189954 - DNA, 1302 bp, Klebsiella oxytoca
atgaggtacagaactcttccatacacgtttcaacgaaacggcaattactatctgcaaatccggctttcaaatggcaggatgtataaaaaatcccttctcactgatagttatcgtgaagcatctgctttgatggttggtgttattccgcacattccttttgttaaatcattagctacaccgatcccgatgtttgatgcttttgtatcaaacctgattgtgtcagaacgtaagacagtgaaagttccgcagttactcagtcagccgattgttgtacctactgaaatcgttgagccagtggcacaagttgtatccgaaagggtgctaaccctttcggatacatgggcgatgtacaaagatgaaaaagggcgcaactggacgaaatcgatctcaatggcaaatgagcgttacatggaagtgttgctaactgtcttgggaggcgaaactgatgtaacgatgatcacaaagcaggacattaagcaggtgatggaagttgttgagaacctccctaagcgcgttgtacagccttatcgatcaatgaccatccagcaactgatagaatgtgatgatgtgccaccggatgatctcgtgggtgttgaagctattcataagcacctcaaaatctacaaatccttgtttaaaacttttctcactgaaagcaaagacgttttgcagaagtccccaactgatggagtagtggcagcaccttcaaaagcgaggttcggtgcttacagcacagcagagatgaaaaagtttgtggggtgggcgctaaaacagcctgacaactggcaaaagtggattacattgctgctggcatacaccggagccagaagaggcgagattgccaaactggagaagtcacagataaaattcgatgaagacagccaacggcattacttccttattgcagagggagggcaggggaaaactgaaaatgctaccagacaagtagtgatccactcgaaattgatcgaatggggatttatggactacgttgatcgccaatggaaggagcggattttctcagaagttgcaggaacgaacatgacgaagataggaaaaatgttttcagatctccgtgatcagcttggtattgcgtatctcgatgattacgggcaaagacggcttttgcacagtattcgtcattctgtttgctctactgcgatggctggatgggtaaagaacattctgcatctacaacaaacggttggtcacgagaaaagtggcgggattactaaacgctatttacatacattcccactgcaaagcatttgctatgtgatcgatggtttaaattgggaatga

SEQ ID NO: 189955 - DNA, 720 bp, Klebsiella oxytoca
gtgttactaaataaattaactgttgaaaaattccattcgataatggaaagtattcttgagcgattagagaaagatgactatctctcatgggattttatcaatcggttatctaaaaatggatgggttcccccattagcttttgattgttatgactactttcaatgcccgtcatcagaattatcagataaagaaattgaattagggttcatgaatttttttgaacttaattttgaaagcgtatttttaaaaataataaatcttgaagaggaacaaaatccttttatccacaagatgttattagaggtaattcaagcatacaggcaaggattttatcaaatctgtattccttcattgtttgcaatacttgaaaggtatttggctgatctttcaaatgatggtgacttaagtaatgtgaagtatggtatgggtttggctcgaaaagtttggattgaaaaagataagaacggtcaatttattgaaactgatggtgaaattccttatcagtttgtgcagagttgctatttaattaaacaattcttagataagtattttacgaagattgattttgaaagttttgattcgttgaatagacacgcatttgctcatgggagacagcaatactatgcaactcgagttgatgccgtgaaattgatttttattattacaaacattattagcatgtattatcagattgaattcattactcctgaggaagagtaa

SEQ ID NO: 189956 - DNA, 132 bp, Klebsiella oxytoca
atgcaaaaaaaagataattctatctctgatctgattgacattattaaagctgtagataaaagagcaggctctgtcaacgttctagactcgcccctcgggtgtacggtcattctgataaacttcactgtctga

SEQ ID NO: 189957 - DNA, 603 bp, Klebsiella oxytoca
atgtcagataattatgctggtcttattgggacagttgtgggggcaatcattacaggaggcttcgcctggtttactgattggcgtaagaaccgttcgaagaatgaaaaagatttagaagtgttagccctaaaactgacttataaactagatcggtatgttgcactgtgccttgagtgttcagaagatgatgggcgcgagtattattatgaagatgaaggtagatgctctggatcggtgtttagaggttatgtcattgaatttcctgattttaagctgggaaaattcgaagatatcgattggaagttgttacctgtgaatttaatgcacgaaatttttacacttcctacaaaagttgacaatgcaaagcagcgattcgtcaaggaatggaacgaatttgatgatcatttaaacgatgattatcctacaacaaaacgcgccaaggaattgacagacctcgcgatttatttttataacgtatcattcagcttacggacgttggcaggactaccgctccctgaggattcaatcatcatagatacacttaataaaaataaaattaacaacgataaagattacgatagattatttattcgaaaggaatga

SEQ ID NO: 189958 - DNA, 420 bp, Klebsiella oxytoca
atgtctggaatgcttgcaagtacagcggcggctgtagggatcattgataaggctgtcggcatcgcaaagaaacttgcggatgatggcggtgagcttgataaggccacgcttaaacttgagcttgctaacctcatgacagagcttgccagcgttaagatggaagtgatcacaacccaagctcttcttttcgaggctgaacaaaaaaacaaacagcttgaagagcagcttaaggataagcacaccttcattttcaatgatggactttactggaaagaaggcgatgaaacagcctattgtcccaaatgctttgaagttgataaggtgcaaacacacatgattttttcgcgtgccgttggtcaatactccgcaagttggtattgcaataattgcagaaacagcatttatccaaaatcccgctaa

SEQ ID NO: 189959 - DNA, 150 bp, Klebsiella oxytoca
atgaaaaacagtttactggtgctgacactggcgttactgccagccctggcaaatgccggacaaattacgatgacccacccacaggaggaacagacgaagagcgggaaaacgctacgcacgtatcagaacagcaattacctgttcacttag

SEQ ID NO: 189960 - DNA, 561 bp, Klebsiella oxytoca
ttgaacagagcagtggtgttagacgaacagcaagctaaagcgatcagggaatggctaaacgctcataacaagagcctgatagctgacgttacgttaatgatgcaagccgccgtattgcgtgtgggggatgccgtagcgttacgctttgacgacgtgatcaacggtgagattgacatagaagaacagaagacagggaagcgtaaagccctcacccttccggctccagtggtgcagatgatcacacgtcgccgcgctgagtttcccaatgatgtgcatgtgttcagaagccagcgtaaccgatcaatgaacaagcaagcgcctgtacgacgcgaggaagtgagcaagcagatcgcagaagccgctaaagctatcgggattcatggcactgtatcggcgcacagcttccgcaaagctggcgggaatgccatctacaaacgttctgcaaacaacatcgcgttagctatgaccgtgcttaatcacagcaacatcaccgacaccaggcgctatctggatttagataaacaagccgttagtcgtgtgatcaatgagatggacttataa

SEQ ID NO: 189961 - DNA, 282 bp, Klebsiella oxytoca
atgaacaaactatacctattgaacgaagccacacatcatcaaatcgaatgtaacactgtttgccaacgtctttataatcacttggcatctctgcaccgtgagaatggaaaattccgttccagcattagacaattatcaagcgctctgggctacagtgaatccggtgttaggtattggctatctctgatgcaacaagccaatgttattacgctcactcgtaagagcaacgattatgattttgatgtgtttcacaatgtctctttcatcacctctaacaattaa

SEQ ID NO: 189962 - DNA, 381 bp, Klebsiella oxytoca
atgagtaaaaaagaacgtaatactatcacccgccttgagcgagagaacgtaaacagaatcaaatcatcccgcctctacattaaatctcttgaggaaatcccaggggaattaatagaacacattgaagaagtacattcaacaccgccctctgtggaagagtgggccgcgttaaatgatcttctcgaaagttcgagcggattgtattacaaaccacgtaaacgcaaagtttatagttgggatgattcaaatttgaagaaatggcaatgcctgggcttctcatcccttgagcattacatcacttataaccagataaataacaccgtagccggagtgagagaacttgacggattatttttaacggagaatgacaactatgattga

SEQ ID NO: 189963 - DNA, 210 bp, Klebsiella oxytoca
atgattgaagaaatcacacaacacccacattttaaagaacgtgttgaatacgtagaatacctattcgaacaagccctctctctcgaaaaagaaaataaaatagaagagatcgaacttatcgttgatgtactggctacagaagccgcgccattcctggcagggattcaggctatcaaaggtattaaggagcgtatgcaagatgcagaataa

SEQ ID NO: 189964 - DNA, 333 bp, Klebsiella oxytoca
atgcagaataatcaccctgaatggctaacagacgtcctgcaccaattccactatgaacatcacgccccactcctggaagccgtaaacactatgcagcaagacaaaaccccacaaagcctgatgcaggtggtggcgcttatgatgacggcttgtagcgagttagggagcatctctacagcttgtatgcaggttgaagggctacaggatgatccggcattgctggaagagcttaacgaacttgtagcaagcattcaggatgttaaagagcaagtgggtgaaactattgaagaattcaaatcctctggcattgcagaggaatgcgctataacataa

SEQ ID NO: 189965 - DNA, 225 bp, Klebsiella oxytoca
atgtttctgatgaactatgaccgcgtgatcactcacaaatcctcttcacttgtcctcactgaaaagatgatgaaacaggcggcgcatgtattaggcgtaagtgtcgaagagattcgacaggctacagagaaattctggcctacagccacgatcacaaaatcaaatacccctcacccatcatcagggcttgaggaacgattaaaactattagcaaaaggaaaataa

SEQ ID NO: 189966 - DNA, 1878 bp, Klebsiella oxytoca
atgttagaaattcaaacctcacgtataaacaacgtggtttcatttacggttgatcagaatagtcttagagaggctaagaaagcggggaaggatttacagaagtattttcaatcgattgctgatccaaagattcgttttcagacacaaaagaaaaacagacagaaagcccgtaaacaagccgatgatgcacgttttaacgataaccctcgtgacactaaggaaatgaaagcccaacgtgcagcagagaagcagaaagccagggaagaaaaagccaatcttaaactacgtcaacaagtgcaacgtagagaggaaacggctgatcttaaatttaaaagtgcgggcttacagcttcgcggcattgctgggaaatacggcgtagaccctgcaaaacaatacgaggctcttaaattcgtacaggaacaaacagaagcctttaaaaaggggctaatttcaagccaacgaatgaactttaccattcgtgaacgtatcaccgatttacgccgtgaggctgcattacaagcccgtatcactgccagcacacagcaacaagcgattgcacagcgtcaagcgaagagaatggattataaaggcgcggcggctggtatcaaagagaaggggctgaatgtgatcggcggcggtgctggttttattggtgctactgctgcattagcgggtggggcaggagtcttgtctcgtatcaagcagcaaggagatgaaaatctggagcttgtccgaatgtccgaacgtaccaaactgaatcccaacgctgttaaggcgatagtcacttggggacagcaacacggtgttgattccgcatctgtggacaaagtaacggatggcttcggtaaagatacccgcgagagaatcagcgaaacggtattaaacagccagttcaaaggcggtaaatggtctggtggaaatagcgccgttgacgaagtgttaaataagtttggttggaacaaatcgcagctatcacagtatgaagataatccgcttgattacctacaagcaatagtcaatgaaggccagcgtcgtgggatgaaagacggtgagatcgggcatcttctcgaaaatacttttgatgatgggatgcactacctcgatcttttcaaaaataacggtgaacaatttatttcgactctgaaaaagctggttgattccggtcagacgctgaacgacgagcagatcaaacaagcctatgcttacggcgatctcaccgttgcaatgggtaatctgatgaatggtgttgataacagtctattcactggctttatgaaaggcttcgctgacggtggcgacgagcttgtcaaaaacactcaagttatcactgaatcggctggaatgcttggagagggcttaggagatctggctaaacaggtgacgggctttgttggtgagatttccggcgtagtgtctgatctgaatgcagggcttcgttctcgtttccctcagtggttcactgatagcgataagccagcggcccaggctctctacgatggtgctgtgggtggttctgcggatgctacagcagattggattcagaataagacaggctttgatactcgctcagtggggccagctatcatggattggttaggcgttggtggtgctaacgctggaacagcggcaaatcaatacagcctaaatggtgattctcttcgtggttctgcaatgtcactaaccagcggtaacgcgccagcgtacaaccttgcaccagtgtttaatctgacagtagcgccacaagtaccgctaacaattcagagtgacgcttcgcgccttgctgattatgtcgatttccaggcgagagcctcacaagccagcttcatgcaatcgctcacgttgtcagcgttaagcggtcaatcatcaacgggtggctaa

SEQ ID NO: 189967 - DNA, 459 bp, Klebsiella oxytoca
ttgaactttgatgatttgtcttccgaagaacttgatcagcatgttatggatcgcctcgtatttgaagaagaggaattatctcccatcttaaaggggcatctatttattgagaaagttcttgaaacattaatttcaagaaaccttgttgagcctaaggcatttttcaggtctacccgttcttatgatttaaaagtagatttggcctttgctatgggcttgctcaataataaatactattctgcattcaaagcgattaacaaagttagaaataactatgcgcataagcatgattacaaggtcactcttgaagaattgaatgctttcaaatttgattgggaagaaatccagaataaagcatttgctgtggcatgtggaaaaagtattggcgagggggcaagtattgccacaatgtttttatgttggaaagcaatacatctcctcgacaaacaagaagattaa

SEQ ID NO: 189968 - DNA, 510 bp, Klebsiella oxytoca
atgaaagttatcaaatattggcaggtgcttctttttcgtattagccaaccttcctccattattaatgaccgtaagcccattgaaaccttggtatttgttggttactcaaaagaaaagccaaacattaagctcggcaccgggttaagtattgagctatttacagctcctgactcgctggagacccagattatcagggaccacctcattgacatagtgcgttgctttccagtgtgtgaagatgatggcgacgaaaaggatggcgcccctgagaaaatccacgatcactcctgcgtaaactgctttgccgataaaggccaatgccttgtcgagtgccacgtttccgacgttaataaggctcgcagttcctccttcgaagacgtggtgaagccggtaatcaaatggcttaacgaaaacgccaaccctcacacctctgtaatcattgatgtgaccaacgccacgctgctcaccggagaaattggcgtccatacggaagagttcattaaggactga

SEQ ID NO: 189969 - DNA, 324 bp, Klebsiella oxytoca
atgcaaaagagcagatcgcactggacgcatcgggagccacggctgatatcagggttgctgttgcgaatgatgattgcactaatcggcctgtgcctgctggcgcagttaagcggttgcaacaattcgcgaacggtttacgtcaaggtgccgtcggtcccgttaccggccagcctgacagctgaaactcctcagccagaaatccctgacaacctgacgtggggccagagccttgatttaaacgtcagcctgctatcagcgctggggcagtgcaaccgtgataaggcggatatcaggcaagcagagaaaaaacgagcctcgcaatag

SEQ ID NO: 189970 - DNA, 504 bp, Klebsiella oxytoca
atggctatgtcaccaaagctgaggaatagcgttcttgctgccgttggcggtggtgctattgctattgcatcggcactaatcaccgggcctaccggcaatgatggtctggaaggggtgaggtataagccgtatcaggatgttgtaggcgtctggacagtctgctatggccacaccggcaaagatattatgctggggaagacctataccgagtctgaatgccgtgcgctgctcagtaaagacctaaacaccgtcgcccgccagattaacccgtacattaagaagccaatccccgaaacgatgcgcggggctctgtactcgttcgcgtacaacgtcggtgctggtaatttccagacctctacgctgctgcgcaaaatcaaccagggcgaccagaaaggcgcgtgtgaccagctgcgtcgctggacctatgccggcggcaaggagtggaaggggctggtaacgcgccgcgagattgagcgtgaggtttgtttgtgggggcagaaatga

SEQ ID NO: 189971 - DNA, 816 bp, Klebsiella oxytoca
atgaaactggaagcctccttaaaacacttcagcccacaaggcatgcatatcagcgacgacgtgaaaagcacatcaccgaatcgcctgaatggcacagacgtcatgacagggatcggggtgactagcagccgggcgcggttcggtctggcggcgttcttcggtaaggcgggcatcagtaagaccgatgagcagctggcggtgcaggcgctggcgcgacatgcccttgatacagcaccaaagaatgtgcgaaaggccgcgggtaaagcgctggggcgctgctgcctggtgctggcgcagtttgcctttgcagagtattcccgttcagcggaaacaacgggagcctgcagggtgtgccgtggctcagggaagatacagacgaccgtaacggagcgcaaagtcacgtacccgtggggtaaggcaccatactgggcgaagatgtcccgcgccgttcgtccgtccgactgggagaagtggactgaagtaacagccatcgtcaacggtaagtgtgaagcctgtgacggcaagggggaggtaaacgcccgctgccgctgcggtggttccggtcaggtgctggaccgcaaagcgaccaaagagcagggagcgccggtatataaaacctgtgagcgctgttcggggaatggtttcaccagcgtcaagtcagcgaacgcacaccgggcgatccagatgtacatacctgatttacatcagtcctcatggtcacgcaactggaagccgttttatgaagggctggtggatatgcttcacaaaggcgagaggcaggctgctgcagaattcgagaaggcgaccagttactga

SEQ ID NO: 189972 - DNA, 369 bp, Klebsiella oxytoca
atgcagatttttaacatcaccccaatgggcaagccccgacaaacccgcgccgacaaatggaaacaacgagaagtagtgcttcgttaccgggcgttctgtgatgaggtcaggctgaagaaggtcgttatgccagaggcgggaagtcacattaccttcatcctgccgatgccggcgagctggagccagaaaaaacgcgtagcaatgaatggtcaggctcatcagcaaaagccagatgccgacaacatgattaaagcgttgatggatgcactgtttgctgacgacgcgcatatctgggactttcgggtaacaaagctctggggtgagaccggacaaattttaatttctgatatcggagaagtggccgcatga

SEQ ID NO: 189973 - DNA, 1380 bp, Klebsiella oxytoca
atgacacctgtctggaaaaatgaagatctggaaggagcggttatcggcgccttatttttgcgcggtgctgaccctgaggtactggatatcctttcccggctgccggcgagtacgttctcggtgcgtcagtatcgtgaaatctataccggcatctgtcggcaagcccgcggtggaggagtgattgatccgctgctgctctgtgagtctctgccagcgcttcagaccaccattctggaggccacccgcgttagttgggcgaaatcggccttggtctcttacatcgacgttctgcgtcgcaatgccggtgtccgtgatgcagaggccgcactggaaaaggtgctaaaccagattaagagtgccagcaatggtgatgctgcgctggctgccctggagtccgtaaaacaggtggtttcagccatcgatatttctgcagatactgtgcagcctgtccatatttccgatctgctcactgccgtggctgacgaggtagaatcccgcaaccaggggagggaggaaacccgaagcctgcttactggcattgaggagcttgacgagaaaacgggtggaattgaagccacggatctggtgtttatcgcggcgcgtccctcgatgggcaaaacagagctggcgctggatattatcgagaaggtctctgcacaggggcatggtgttctgtttttcagcatggagatgtccgacacgcagatcgccaaacgcatggtttctgccgctggcggtatgcctgtatccagactgaaggcagtcgaaaagtttgaggatgaagactgggcgcgattctttaacggcatggagcaactggttaaccgcagcgtttggatcaccgacgcaactaacctcaatatcgaccagattgaacaaaccgcaacccgctataagctggagcatccagaaattgccctggtggtcatcgactatctggcgctgatcaaaattcagagcacggcccgctacgacctggctgtgggggagctgtcgaaggggttgaaacgtctcgccaaaaccaacaaaacgccagttatcgccctgagtcagttatcccgcggggtagaatctcgccccaacaagcgcccgatgaactctgacctgaagaactccggggagattgaggcggatgctgacctaatcctgatgctgtatcgcgatgaagtttacgacccggaatcagccgcaaagggcgtagctgaaatcaacgtgacaaaacaacgcaacggcgaactggggacaatttatcgccggttctataacgggcatttcctgccgatcgaccaggaggaagcccgccagcgctcaacccccaaacctaaaccgcagcaacgtcgctataccagagggagccaggcaaataatgcagatttttaa

SEQ ID NO: 189974 - DNA, 879 bp, Klebsiella oxytoca
atgttaaatttaaacaaacaaaaatcgcgccacgacctgaaagccgatcgggagcgccttgcagaagaattaaattttgcgctggagcacaaactcccgtggggatacagcggctggaactcaggaaacgccgagattacctcctgtgaaaagcatggagattttgagcgattcacgctggtgggaaaggcttttcgcggcggtgagaatttcaaacattcgcaatgtcctgcatgcctccgggctcagctggcagagattgacgcggagctgcgtgcgttacgcgtcgcagacctgatggacgacgcaggcattgcccgccgttttgaagaatgcgaattcgaaaactatcgcccggtgaatcagggggctagcaaaaatctggccggctgccgccattatgctgaaaactggccgcaggtttttgagaccggcaaggggcttgtgatgaccggcaactgcggtacagggaaaaaccacctggccatctcgacagcgaaagccatcatccgtaaccatctcgccagggttgaaattactgatgtgatgcgcgttatgcgggccgtgaaaagcacgtggcgccataattccgaaaccacagaagacagcgtgcttgaacgctatgcgtcgctggacctgctgattatcgacgaggtgggggtgcagtttggtagcgcttctgaactggccatcctgcaggagatcgttaacgcccgttatgaaagcgtgttacccaccatcctgatcagcaatttgaccttcgagcagcttaaggactccattggtgagcgcattgtagaccgggtaaccaacggtggtcgcaatcggctggcgttcaactgggaaagcttccgtggaaacgacggggtgcctgaatga

SEQ ID NO: 189975 - DNA, 264 bp, Klebsiella oxytoca
atgaatattgcatcccgtaaaaaagacaaccttgaaataacaatgcgtactgatttccctgtactcattgaagcaaatggagcactcaggacagcacagcacgcagatgcgtacgccaatcaactcagggatgagttcaatacattgctctttgctgcgatagccagaacagataagcatgtcgccggtcgctttaccagtctgctcaatgagctttgcgttatgactggttccacagtgaacaatattagaaaaggtcgctaa

SEQ ID NO: 189976 - DNA, 255 bp, Klebsiella oxytoca
atgagaatgattgaatatcgtggcgtacttattcccgcgccgccaccgatggtgcaattaagttgcgagccgggatttaccgggcgggttgttattgagctggaagatggtgaattcgtcaaacaatacccgctccgcaaagaagaaacattctgctcgcctgaggcttttctcgaactggctcaggaagctggatatcaggtgatagctccagccagggaggttgaccgtgctgacagcaatacgaattcctga

SEQ ID NO: 189977 - DNA, 582 bp, Klebsiella oxytoca
atggatcacacagcatttaacccggaaccgacgtcaaccggcatccggttgtctgaaagccggattattggttactccgccgctattcgcgagcttgataacggccgctatgacaaacaccttgccgatggaatggaaattctggcctgcatcatggaagcggtagaaagcaactggatcacgctcaatatcgaaaaagagttgatcctctggcgctggttactggctgccgtgttcatcactgaggagctggagaaaaacggaactgtcgacgttccgaatgatactggcggtgttgatactgctgttatctattccagcaagcatggcgccattagcgtctatccgggacctgaacgctttgcgctcgccaaccacgttgaggccggcgccatcgagaaatacgggcaaaaggaagggttgccgctggcgctgcgcatgtatcaggacatggtcgtttgtgacgacgaatgcgggttccggctgtcatctatgggccggcagggcttcaacatgctgcacgacggctttatcgagcaaatccagaccgagggcatgccaggcatgccggttatgcactga

SEQ ID NO: 189978 - DNA, 822 bp, Klebsiella oxytoca
atgaatatgaaatccgtcaacggcgtactgatgatgagcagcagtgaaatcgcagtggttaccgataaagaacctaagcatgttgttcgcgacattaaagcaatgctggaacagctgggtatctatggtccaaatctggacgatgatgattttaaaggttttttcatttcatataaggattactgtggacgtaccgttattgatgaaatctggctaaacgaagacctttcgatgacgctcattacaggctatgacccaaagcgccgactggccctcattgaacaatggcaaggtatgaaaaaggtgcttgagcaaccgcgcattgcagccaagcccgcgcaaccggagatcggaattaacccggattttgcagcgctggcccgcacagtcgcagaagccaccgccgctggggtgatgaaaagcatcttggaaaccaccggccttcaggccatagtccatatcagcgcgatggtctccaccccgtcgacagcacctcatatcgatcatatcggccacgcagcgcgggaagaagccaaagaaccagagtatgtgccggtccacaaagtttcctgggctaccggattatccgatggaacctgccgccggctggtcactttctccgaccttccaaactgttacatcgatggcattcgtgggctttgcgtgcatcgtgaatttttcatggcggcggtcgaggtcctgattaaggaatccactccaccaaccaaaggccgtaaacgctggcagcacccggagttcggcgggttcgagcttcgcaaggagccagcggagatcttcaacgagggtgatcacggtgaataa

SEQ ID NO: 189979 - DNA, 1890 bp, Klebsiella oxytoca
atgaaaaaaacgctcaaggtttcgttactggctctgtttatttccaatggcgcgtttgccactcaatatgcgttgaacagcgaatacctcgccgtttcatttaatgatgcgaattctgcgatggtgcttaaagacgttaaatcgcagcatcagctttcacccgaagaacttttttttctcactcttccggatgaaacagtcattcacgctgctgactttaaaataaagcatgtggataagaaagataatgccattatcattgattatgcccatccttattttaacatcatggtaaaattgaatctggttaaagacaaatacgtcagcattgattacaccatcgccgctgttgataaggcacgggaagttgccaaaataacattcttccccaccagaaaacagtcgcaagcgccatgggtagaaggttcaataaatagctcaccgattattgctgactcattttttatattgccgaataagcctgtggtgaacacctgggcgtatgaagcaacaaccaaccttaacgttgagctaaaaacgcctttacagcccggtacgcccgtcagctataccacctggtttggtaccttcccggaaaccaaccagctacgacgaagcgtcaaccagtttattgatgcggttcgcccgcggccctataagccctatctgcactacaacagctggatggacattggtttctttaccacctataccgaagcggaagttttagttcgcatggatgaatggaataaagaatttattagcggacggggcgtgccgctggatgccttcctgcttgatgatggctgggatgatcgtacaggaagatggttatttggccctgcttttagccatggctttagcaaagtcagggaaaaagcggatagtttacatagttcagttgggctgtggctttctccctggggtggatataacaaaccgcgagatattcgcgtatcccatgctaaggaatatggcttcgaaaccgtcgatggaaaattcgcgctctccggccctaaatattttaaaaacttcaatgcacagattattaatctaattaaagaagagcatatcacttcatttaaactggatggtatggggaacgcaaattcacatattaaaggtagcgagttcgcatctgatttcgatgcttcaattgccctacttcataatatgcgtagcgctaatccaaatcagtttattaatttaaccaccgggaccaacgccagcccctcatggcttttctatgcagactcaatctggcgtcagggtgatgacattaatctctacggtcccggcacgccggtacagcagtggatgacttaccgggatgcagaaacctggcgttccatcgtacgaaaaggcccgctattcccgcttaactcactgatgtatcatggtattgtaagcgctgaaaatgcctattacggattggagaaagtgcaaacggatagcgatttcgccgatcaggtctggagttattttgctacgggcacccagttacaggagctttacatcactccgtccatgctcaacaaagcaaaatgggacactctggcgcaggcggcaaaatggtcccgtgctaacgccgatatattagtcgatacccactgggtgggcggcgatccgacagcgctggaagtgtatggctgggcatcctggagcaaagaaaaagccattctggggctacgtaacccatcggataaagcacagcaatactatctcgacctgacgaaagcatttgagcttccacatggagaaacttcaaacttcacgctaagaagcgtctacggaagtaattcaacattcccgagcaactaccagggtgcagttattgtcactctacaaccgttacagatgctcgtcttcgaagcaactcccgctaaataa

SEQ ID NO: 189980 - DNA, 1134 bp, Klebsiella oxytoca
atgacacaaattctgcgcgccaggcgtctgctgacggaacgaggctggctggacgatcatcagttgcgtattgacgagggggtcattactgccattgagcctattccgacagctactgtactccgcgatgcagagctactcgcccctgcttacatcgatagccacgtccacggtggcggaggggtcgatgtgatggacgatgcgccagatgtactcgataaactggctttgcataaagcgcgtgaaggggtcgccagctggctccccaccaccgtcacggctccgctggagaagatacgccgcacgctggaacgtatagcgcaacgctgctattccgacggtcccggcgcgcaggtgctgggaagctatctggaaggaccctactttacgccgcagaacaaaggggctcatcccccggaattgtttcgcgagctggatctcgtagaactggatgagctgatagccgtttcccgccataccctgcgtgtggtcgcgctggcaccggaaaagcctggagcgctatcggcaattaaacatcttaagcaacggggcatgcgggtgatgctgggacatagcgcagcgagctgggagcaaacccgtgccgcttttgacgccggcgcggacggactggtgcactgctataacggtatgaccggtttgcatcaccgggagcccggaatggtcggcgcagggttaaccgacccacgggcatggttggagcttatcgccgatgggcaccacgttcaccccgcagccatgaagctgtgctgctgctgtgcaaaagaccgggtagtgttaattaccgatgcgatgcaggcagccggaatgcctgacgggaactactcgctatgtggcgaaaaggtcgatatgcgcggcggtattgtgcggaccgcttccggtagcctggcgggcagtacgctgtcggttgatgcggcagttcgcaatatggttgaactcacaggaactgcgccagaggacgctattcatatggcatcgctgcatccagcccgcctgctgggaatcgcccaccagttgggttcgctaaaggtgggtaaacgcgccagcgttatctctctcgacgacggactgcatttacaacagatttggattcagggtcaggtttttcctctatag

SEQ ID NO: 189981 - DNA, 129 bp, Klebsiella oxytoca
atgaggaagctgaccgttaagccgctttcttttgggtatagcgtcgtggacaggcattcatctgtcctgtgtttcaacctgccgtatgaagcaaaaacccccgccatttctgacgagggttttctttga

SEQ ID NO: 189982 - DNA, 129 bp, Klebsiella oxytoca; identical to SEQ ID NO: 189981

SEQ ID NO: 189983 - DNA, 801 bp, Klebsiella oxytoca; identical to SEQ ID NO: 188393

SEQ ID NO: 189984 - DNA, 921 bp, Klebsiella oxytoca
atgaaaccgacccttaatcagttgattaacttttgcactgttgctgaaaccggaaacatcggcaaagccgccagtaaactcaatatttcgcagcctcccttaagccggcaaatagcccagctggaaaccatcctcggtgcaaagctgtttaaccgggccgctaaaggtgtcagtttaacccttgccggagagcaatttctggtggactgccgcgcggtgctggcaatgctggagctggcctgtaataacgtacgggccgtagaatcagggcagaaaggtgtgctgaaattaggtgcaacaatgtatgccagctatagcgttgtgcctcatgttgccatgcagcaccgggagacctattctgatgtggaattgcattttcaggagatggtcccctctgatttacacgccgcattagaggatggcagattagacgcggcaatcagcttctccgagacggccactccgggaattcattcactggtactcttgcgtgagccgctaatcgccgcccttcctgccaatcacccccaggttcaaagcgagcatttcagacttgaatcactctgtgatgacccgttcatcactgttccgcgccagagtgcaccgatgctctacgattccatccttcatcagtgcctcaaggccggatttagcccgcaaataggactggaagcctccgtacagcagactgtgatgaattttgtggcccgtggcgttggcgtggcgcttattcccgcaagtatggagaatgcccaattgcgtggtgtggtttaccgtaggctggaaaatccgaatatggtggagaatatgttgatgtggtcgacaaagaacaaaaacccggctttaccgggttttgtgaacctgtgccgcagtatcagggataaactggatgcagcgcagtccggacggattaacgattaa

SEQ ID NO: 189985 - DNA, 759 bp, Klebsiella oxytoca
gtgcttacagaaaagcaattgcttgagcttattaaggcattacagtcgtcaaatttcacaacagcagaaatcatctggttaagtctcgccgtagttatcgcagctctggcaatgagtttcctagtttcaatcgttacagaaagggctaaaatttctgcaactaattctaactatgaaacactgcgggaacaattatctataaacacagttactattaaagacatagagaaaaaaataacatctgagttatggatctctcaacagatctggcaaaaaaaatatgatatgtatgaattcatctatgcacaattactagcaattaaaaaatgggcagacaatgagtttcatataattgaacttcatatgattccaggatggatagcaagcagtcaccagccatattttaatgaggagcaagaaaaacaattttaccaagaaattcagcaggctcaagctgagattgagaacacaatgaatgataaagacgttcaaagtaaaaacaaagaattacaacaaaaattaagcattgcaatgacatcgttaactgaaatattaataacaaaaacaattcttttgaatgctaatgtaactataaaattagaggagttaattaaaaacattggcttcgatccctctccactggattatgaagaacctgatgactatggacaaagaataaggtcagcgattgataaagcattgaaagaaataagaataattgcaatttctgatctggaaattaagcatcatgaaagttaa

SEQ ID NO: 189986 - DNA, 642 bp, Klebsiella oxytoca
atgaaaattaacttaataccaatctggttatggataaaacaatatcaacattctcttagagtttttgggggtgttttttttggggccgctttgatagcagcttttttttggatgtcaggatttgatatagaacctatcgcatttgctctgggaatgcttagttcattattcttagccagtccatcggtagcagaatattttttaccagaacgtaaacctgtcagagatatgacatatgaggaaatcttaaatttcattcccaaaactgaaccatctcaagattggcatgggatttcaagggaatgggccagcgaacggttccttaaagaagacccacgccttcgtattcgagccaagttcattgatgaaggaattcaatgtgaaaattttatagaagattgggctaacaatcatccagatcccagagcaactggatattggtatgagctttattacgacggggcattcttagacagatttttattggtatctgttgatggtggtagagctaatatccctccacctaatttactaactaaagaaattagcttgttaaattatcatgttgcgaaaatacatgacacccttggctcgttagatgagtatattaaacgttctggtttaactattgaaaaaacataa

SEQ ID NO: 189987 - DNA, 1320 bp, Klebsiella oxytoca
atggggagtaagtggaaagaatgtgaattaggcgattttattgagcttaaacgtggttatgatcttcctaaaagcactcgaaacgaaggtagcatcccaataatttcctcatcaggttttactgatttccatgacaaaccaatggttaaggggcctggtgtagtaacaggtcgatatggaacaattggtgaggttttctattctgaagaagatttttggcctctcaatacaacactttatgttgttgactttaagggaaacgatcctttattcgtgtattaccttcttcagacaatttcgtatgcagactatacagataaagcagcagtaccaggagtaaacagaaatcatctgcacaaggccaaagttaaagtacctatttatctagatatccaacaaaaagtggctgcccagctttatcaattagagaaaagagtcacgcttggtaagcaaatcaaccaaaccctggaacaaatgtcacaaaccctgttcaaatcctggtttgtggattttgacccggtgattgataacgcgctggatgcgggaaacccaatcccggaagcgctgcaatctcgcgccgaactgcgtcaaaaagtacgcagtagtgcagatttcaaaccacttccggcggatatccgtgcactgttcccggctgaatttgaagaaacagagttgggttgggtgccgaaagattggtatcacaaaaatgctgaagaaatcgcaacaatttctatcgggaaaacacctccacgtaatcaaaaggagtgcttcagccacaaaaaagacagcaattacacatgggtctcaattaaggatcttggtaattgcaatgtatttattaaagaaagcagtgaatatttaactactgatgcagtaaataactacaacgtaaagattgtacctaaaggagctgttttattaagcttcaaactgactattggccgaatagcgatagcagagagcatattaaccaccaatgaggctattgctcatttttataatatgaagcatggggtcaacaaagagtatctgtattcatacttacagcattttgattacaatactttaggaagtacatcctctattgcaacggctgtcaactctaagatcataagaaaaatccccattcttttacctgatactgatatactgcatcaatataaaatatcaacagatatcatatttaaaagaataagcttcaacaatcgaaatacatatgatctaaccgcccttcgcgacactctgctccccaaacttatctccggcgagctgtctctggaggatctcccggatttagtgaaccaaaccgaacccgcataa

SEQ ID NO: 189988 - DNA, 684 bp, Klebsiella oxytoca
atgcgtcaaaaatcattccgtaaaggtgtggttgaatgcgatatcaccgctacaggtgctatgcttaattacccagcaaataaagttggcgcaataattaaagatcagctaatcacacaactttcccaaaaattagatactgaattgaaaccaattgaatttgattttgaaaactccactgtttcaacaagaaataatttcttccttagtgtaataaatagtgttgaaaagtatgacgtattcgacgttgtcactgtggcggttaagaaaatagaagataagaaaggaaaggataactcttcatcatcagattcaaacaatgatttagtaggagaagcatttactggagaagttagaaacgctattctacgcggaaatcagattttaacttcaaagatctatagtggattaaactcggaaagttattatatatataaaataacttggaagattagagaaataatcccggccttagggtctgatcaatctgattgttacacagttgagattgagtttagtgataaagataaggctaaaggcttaaagtattgcgttaaaaccgttcagcgtttttccgcaaaaaacaaactaaacattacaactgataaccccttaaaaaacgaacaggaaaaaataggaaaacttatttataaaaccgccttagatgtctattctaaaatataa

SEQ ID NO: 189989 - DNA, 678 bp, Klebsiella oxytoca
atggaaaaaagaatcgtgttttatgatttcgaaactccttacaatcaggagcagattagcaaaagactgattgaaaaccaatttacaaaagacgcaaactcaggctttaacctacagaaaataaataacagtgggatttactttcgacacatcaaaaaaatcatcaacattgacaccgtggttactccttttggcgaaaaatacgaaaataccacaattacttacgcaaccaacgaggttaaaataactgataagtctcttcatatcattaacccctctaggtcgctcaccccctttagaacggacttgttaaaatctttaggttttcaatgcaccataagcaataaaaatatagaactatcttcactattactatccttgcgtgaaaagaatattaatatcaccttaactgatattgagcttacaacatatgatctatttaaggatgcccgagttaaaatggtcatctcttctaatagtgatttagttagcaaggcagaatcttatttgaatgatataaaatcgaaaatcacaaaaataggcttttcgttactatttgatgatgaggattattttattgagatcggttgcaaaggtactttgaaaatctcaggagatctaatagaggataagctagaatattatattattaatgacattctaactttagatacttga

SEQ ID NO: 189990 - DNA, 1098 bp, Klebsiella oxytoca
atggcaacaggactgacactaacgacggcgggcgccgctgaaatcgaggccgcgtatcaggcggaggaggttgtggatattaccgccgtactgatcggcgatggtggcggcgtgacattgccgaccgatcccgatgacctggcggcggtgaccgcgctttttggtcagtttggccgtgaaacctttgactctgattcaagctatgaggggtttatcagtggtcagattgttattaactgcaaggattatccgggtaagacgctcagagaggcgggactggtcagcgctaagggtacgctcatcgcttacggcgcatacccggcgacatacctcccggcgcaatccgattccattatcaaagagatcattctgacgcttgtgctgacgttgacacatacctcaagcgtgcagcttgttatcgatccggcgcttgccacactcacgcaggaaacgggtgataaacgctatctgcggcgagcacaaaatcttgctgatttaaacgataccgaagaggcccgggataatcttgaactgggtaactcagccacgcgggacgtgggtaccgaggcgggaacggtagctgcgggggatgattcacgcatcaccggagcactgcaaaaagagagcaacctctctgatttaaccgacgttgaaagtgcgcgcgagaatctggggctgaacggtgacggcgaggggtttaggggtatcgttgacgccattctttatcctggaatcattatccctagtgaaaaaagcccggctgagcgttttccgtggcagacctgggagagtttaagcaatgcctttgccgacagggtagtacgcattggttctcagtacggtgcgaccggcggcagcaataagttaaaaatcgcagccagcaaccttccgccgcactggcacaaatcgggtgacagatcacctggtgagacctgggatccgaccacgacacacggcacggacaaccagaagagcgggccgctcaatatgacagcaggaacctatatcgacgcagcgggcgagcaggaaaccgcaaacgaatcactcgatgtgaccaacgagtacgtcaccctctgcttgtggaaacgaacggcataa

SEQ ID NO: 189991 - DNA, 216 bp, Klebsiella oxytoca
atgaaaacattcaatcaaattaaaagcctgatcggattttgccagaccgatgagtttttcctggaatacctgcaaatgctccaggctgcgggggttattcatcccgttgaaagcgatattgatgctaacagcaaaactgtcagtgatgatttttatgatcgtcttgccagcgtgtatggcattgaagcagaggaaacactatggcaacaggactga

SEQ ID NO: 189992 - DNA, 3030 bp, Klebsiella oxytoca
atgaccgctaattatcccgccagcattctgccacccaacgccaccgccgtggagcgggccatcgacagggccagcgccgctgcgctggagaggttgccggtatatctgatccgttgggtgaaagatcctgacagctgcccgctggcgctcctgccgtggctggcgtgggaatatcaggttgatacctggaatattaactggtcagagcaaaagaaacgcgatgcgatcaagcgcgcccactacatccaccgccatcgcgggacggtcgccgccgtccgtcatgccctggtggacagtcctttcggaacggatattgttgaatggttcaatcagaacccgaaaggggatccgtatacctttcgtctgaacgtgtatcagaacgatttgccggtgacggaatacgaccagcaggatctgaaacttgcggtgctgcgcgccaggaatctgcgcagctggttttccgttcacgtatttggccgacttcagggaacctcatatgcggccggttacatgtacgccacggagaaaatcacgccgcgctttgtcccgttgcaggtggttttatcccgttacgagctgaatctggcccctggtgacgcggaaacggtcacggtaaccatcctccctgaatatgcggaagataaaacctttacggtaaccacgtcggatagaacaattgcgaccgccagaatagtcaacggcgctattctggttacgggcgtgaagcggggcacctgttcggtcaccgtcacgacgactaacggcgtcagtgcggtgatcagtgtgaaagtggtcgcggtgatgaagttcatcacccgcatcgacaatgcaagccgtccgttgttctacgtgcgcatggatgaggattttacaattgattacggcgacgggacagacagccgggaatacaccttcgaccacgcgagtgcaacctggggatgggtgatccccacgcgcttactggaggagggccaggaatacaccataacggttaaaaacactgaaagcgccagtttccagcgcacgtcgggtaacgtttcagtgacgttgaatcccgtgcaggaaatcattcttttgacgggagacagggacaatctagtttctttcgcgagtggcgcaactggccttcacaaggtccatgcaggggcttttgacgatctgccaaatatccagaaatgtacctccattttccggggctgctcgtcgctgactgaactgccagagggtttattcgcgcggattactggtgtcacagatttctcagcggcattttatggctgcacggcactcgttgctgttcctgatgggctgttcagcgaattatcgcaggtgacgctattcacctcagtgtttgagaactgcacgcggctgctgagtgctggcaaaaacacattccggggctgtgctgctgcgacgcatttcaccagtgcgttttcgggatgcacatcccttatcgataccgggacgggcatttttgacgggtgtgtcagtggcaataacttcggttataccttcgatggatgccgtgcgctgacaacattgtcagcagatttattcagcgatgtgcctggtggcgtctttacggcgattttcagaggctgcacggcgctgacgcagctaccgccgcgcctgttccgccactgcctggaagctacgcatttcggcggggcattcagtggatgcacgcaactgctttctgtacctgatgaattctttaaggatttacccctggttaaccattttggaaccgttttttccggctgttcttcactggtaaaagcgggaaaagctgtgttttctggctgtgcgcttgcgcaaacattttcctccgctttttactattgccgtgttctggaagaagtgggcgatgatatttttgaggggtgtgtcagtgcaactacctttgccagcgtcttcaatagttgcactgcattaacggcgctaccgtcgtttgtggactgtaacaaggcaacgagctttgaccgggctttctatgcctgttcttcactgacagccgtcagagcagaggcctttgcaggtaaatcactggtcacgacgttctattatgcattcacccaatgtacatccctgaaaagcatcggggccggggcattccgtgactgtagttccctgactaatctgacctatacatttatgggctgcacggcgctggtatcgctggccggggatatgtttgcaggatgcagcaaagtgacgaatatcactggcctgtttaatcagtgctcgggccttgccgtactgcctgaaaagctgttcagcgatctgacctctctgacggcaatggggagcaccttccaggactgcaccgcgctggccgcgctgccgtccgatctgtttgcgggttgtgtcaacctgacttccctgacgctgacgttctccggctgtactgcgctggcggtattgcctgctgatttactgaaacataacaccctgctgatcagtgccggttctacgttctacggctgcgcggcgctggtgagcattccgccgtcgttgtttgcatcgtgcccgcttatcaccgcattcggcgcaacgttccagaataccggcgtggtggaaataccggaaaatctgttcagtggtaacccgctggtgacggcctacggccagaccttcaggggatgtaaaaacctgcgctcagtgcctgccggtctttttgtcgccagtatcaacgccacgacattcactaatgtgtttgccgagtgcatcgcactggaagaggtcgggcccggtctgctgaataacttaccggccacgacaatcggctacctgtttgacggctgcgtgcaactgaaaaccaacgtcagcacgatattcaacctcagcagttattcgacgattgtcaccacgacggccacattcaggggatgctctgccctcacgggtaagggcctggtatttatgggcaaggtgccaaacgtcacggcgcattattacgcgttctacaactgcacaagcctggacgatttcgcagatttacccggtaactggataacgaataaattatga

SEQ ID NO: 189993 - DNA, 516 bp, Klebsiella oxytoca
atgagttttatcgcgcagcgccccgtcagacctgctgaaagtgatgtgacagacgtggacgacggcggcgcacagattgccatcggcactttctggccgacggtaaaactccacgatctgcgcctcgctgcccgcatcgccggtgacattacaacatcccgattaatgcatatggcaacggaggccgcgctgcatgtcgcggatcagctgaaagactggcgtaagcaaagagaagcggaaggcgctgaatcgctggcttctgtactgctgacttccgccggtgagcctgtcgagcagattaacggcgaaagcgcaaaagtttatcgcttccggcgtgcggtctactccttcacgcgcgccagcgtactggaaggttacagggacgtcggcaccacgccaaagggcgacaaggatgcggaggccctggacaggcaaatagacgacctctggcgggacgggcgctggagtatttcagatatccgggaagaaccccgtatttactcggagcttttctga

SEQ ID NO: 189994 - DNA, 879 bp, Klebsiella oxytoca
atggaggctgtgtattttactagaactacgggtggcttaactgctcaaagacatttttatggctcagagtatatggtttatatagaaggtaaagataaggagtcaaagggtactacatacgatgaaaaatattacaaatctattctgaattattttctaccaggaaaaaaggtgacaattaaagtcgtcggatcttgtaatgatgtactgcatacatacaagaaaatattagattctaatattacgaatactatatgttttattgatcgtgattatagcggtattacctttaattatatttctgattacaggttaatcagaacttatggttatagttgggagaatgatttttggtctattgagttatgtcattccctgataaataacttgactaattacgatcctaatgcgcttagggaattatctaccaagcttaagtttggcatttcacggctagcattcttacataaaattaatgtcacatgcactctctttgagtttaatatcttggcgttagggtgtaagggacagggtggaattatatatgattctaaatctgattttctagttagtaagtctgagataaaaagaattgttcttccattaaaaaaacgcccagatataaaagagttgcattttttttataaacaaattaaaacactgccagaaagattgattcaaggtcattattttgaatatatcttactgcgtgcaataagagatgtgtccaaaaaatactctcctgaaaatactacagcacccgagaaaacgattaaaaccatctctttttctcaattcatggggaaaccatcagattttttacctacagcgatcattgattattaccaagagaaattaaagttttttttggaaaaatag

SEQ ID NO: 189995 - DNA, 1266 bp, Klebsiella oxytoca
atgaaacttataagtgttcgaattgaggggttttggggggttaaagatgtatcgtttgattttttcagtgactataatttcataataggaccaaacggcataggtaaaacaacagtattaaatttgataacctctgtgtttaaggtcgatatagactctatagcaaaggtccaatttgatcatgtattaataggcgttattggttttgataataatctatataatatagatgttacaaaaggaattggcgatgatgatgaatgtattataaattttcaaattttcaacttgagtagcgatatcaaagctttttcgagaatgtttagaactgtgttacaagatagaaatgatgattacaatagagttagaaggtttccaaggaattattttcagtatgaggatgcaaagaaaataattaatgaaatgataaatatagtttggcttccgattgggaggtttactcctgaaaatgataaggaatatagattgtctgctcatggtaattctgttgatatgcggcttgatgctgtacttgaaggtatagtgaaatatgcatcagtaattaataaaaatatatcaaacgaaatgacagaatttcaacgagacgctttgatatcctccatagattcatcttatactgaggggttggaaaagaataaaaataaacgagactcatctcacgatatgcatgatctgatggaggtttttcaagaggttggtattcctgaagccaagtataaaaagcgcgttttaaaaatgttcacggttcttgaagaagtggtgagtaaaatcaaggaagggaaagagaatactcttactcaggaagaggtgacaaatgcatttagtttgtccagaactagatatcttgtcgaaagatataatgaatacaaaacaaaaaaagattttatttctaataaaattaatttttttattgagcagttgaatgcgttgttcagcgataggaaagtttttttcataactgactcgaatgaattggcgtttattagcgaggggcgagatgatttgagtttgtttgatttatcatcaggtgagaaacaattgataatattgcttggcgaagtgcttcttaatgaaaataacccctgtgtatttatagcggatgagcctgagatatctcttcatgtttcatggcaagaaatgcttgcagaggtaatgggtcagttaaattccaacatgcaagttatttttgcaacccactctcctgacatagtatcaaaaagaaccgataatataattctaatgtaa

SEQ ID NO: 189996 - DNA, 666 bp, Klebsiella oxytoca
atggtacacgtttttacgtatcaactcgcaatttttttcactaacaccattactagaccagatcaatttctatcaaagttaaacgaatcctcaggtaacattttcgattcgatgcctcagattatacccttaccacctgaaatccctccagaaattcctcgagttagttcaacgagtgcatcaggtatttatagcatcaacatttcactatcaagaatggatataaccatgaatatggttgactcacctctaaaggaaggcgatgctatttccgatttcattctaaaagctaagttaatcatcaaaaacatacctagtgatgttcaattaaatagaattggcattataggtagctattttgagctggataaaaacccagcgataacactctcacgtaaactagccaaaaaagatttgggcaatgtctcagaattcaatttaagatataacaagccatcatctgatttcggctacacatttaacaacatttattcaatcaacaacgcgcagatcgatactcgttccatttcttcaaatggagtcttcattcaaaaagatataaataacatgcctagcgagaccccgatgagtaaagatttgctcattgaaatcctcactaaaaaaataaaggaattagcaacaagctctatcgaggggatcttgtaa

SEQ ID NO: 189997 - DNA, 642 bp, Klebsiella oxytoca
atgcaagaagaaaaactaaaaaaagccattgaagaatgggatgcagtaatacatgagaattttcacaaaggaatgataaatggagctagcttggccacaagtgagacaacctctatcttagataaatttagcatgtggttattagttggcgttggtggtactgctgcattaattattgcgaatattgataaaataactccatatactggtattataggatttaaatgtattgttttgtttttgtgtatgtctgcagtatttggttttttatctaaatatttttctatagtagtgcactcgtctgttgctgttagcattcgaatggctcagatctcgactgaggagttaaaaaaatacgaggaaaactgtaaggcccgagatgaggtagggcaggaaatatcatacgttagtaaaaaaaatgtagatgtgaatgagtttattaacgactacatcaaattatacccaagtgattttttgaggaagaagataaaaaagacattcgacaaaatgagtcaggacaaacttcatggcaacagaagtgctgtaaaatgtgtagtttatcaaagtgtatgtttagttttgcaagctcttttttacatattctttcttatatctgtagccgtattaatcggtatcaaatag

SEQ ID NO: 189998 - DNA, 1266 bp, Klebsiella oxytoca
atgttcgcgctctgtgatgtgaactcattttatgcgagctgcgagaccgtgtttcggcccgacttgaaagggcggccggtggtcgtcctgtcgaataacgacggttgtgtgattgcgcgctctgcggaagcaaagccgttcgtgaagatgggagagccgtactttaaacaaaaagatcagttccgccggcagggcgtgatctgcttcagcagtaattacgagctttatgcggacatgtcgaaccgggtgatgacaacgttagaagagctttcaccgcggtgcgaaatttacagtatcgatgaagccttttgtgatctcaccggcgttcgtaactgccgggaccttaccgattttggccgggagatacgtgagacagtgttacgcaggacacacctaaccgtaggtgtgggaatcgcccaaacaaaaacactcgcgaagctggctaatcatgcggcaaagaggtggcagcggcaaaccggcggggtggttgacctgtcaaatatcgacaaacaacgtaagttgatggccgcactgccagtgaatgaggtttggggcgtcgggcgccgcatcagtaaaaagctggaagctatgggcatcaaaaccgtgctgcagctggctgatactgatatccgttttatcaggaagcattttaatgtggtgctggagcgaaccgtgcgggagctacgcggggaaccttgcctcggtctggaggagttcgcgccggtaaaacaggaaattgtctgcagtcggtcgttcggtgggcgtatcacggaataccatgagatgaggcaggcgatatgcagttacgcttcgcgcgcagctgagaaacttcgtggtgagcaccagtattgccggtttatctccgcatttgtcaaaacgagcccgtttgcgctgaacgagccgtattacggcaacagcgcatcggtcaagctgctgaccccgacccaggacagccgggatataatcgccgcggcgaccaggtgcctggatgctgtctggaaagatgggcataggtatcagaaagccggcgtgatgcttggtgacttctacagccagggcgtcgcccaattaaacctgttcgatgacaacgctccgcggcagaacagcgaaaagttaatggaggtcctggatcatctcaatgccaaaaatgggagaggggcgttgtactttgcagggcagggcatacaggccggttggcagatgaaacgagagatgctttccccgaggtatacaactcggttttcagatattatttcagtacggtaa

SEQ ID NO: 189999 - DNA, 420 bp, Klebsiella oxytoca
atgaagttttacacaccaactgagctccgagaggtcctatttataccgctattcagtgacccggtgcagtgcggatttcccagcccggctcaggattatgttgaacagcgaattgatctcaacgagttgttgattaatcaccccagcgctacatatttcgttaaggccgccggagacagcatgatcgagggcggtatcagtgagggcgatctcctggtcgtcgatagctcgcgtaaggctgagcatggcgatatcgtgattgcttctgtcgagggggatttcaccgttaaaaaattgcagctgcgaccgacagttcagcttaaccctatgaacagcgcttattccccgatcgtcgtcgggagtgaagacacgctcgatatttttggcgtcgttacctacataattaaagcggcgggctga

SEQ ID NO: 190000 - DNA, 243 bp, Klebsiella oxytoca
atgtttgtggaactgatttacgacaagagaaactttgaggggatggccggtgcaagggagacaattacggctgaattaactaagcgagtccacaggatttttcccgatgccgaggtccgtgtaaagccgatgatgactttgccggcgatcaataccgatgccagtaagcacgaaaaagaacaaatcagccgggttgtccaggagatgtttgaagaggcggatatgtggatgatggaggagtga

SEQ ID NO: 190001 - DNA, 243 bp, Klebsiella oxytoca
atggaaattgcgaatgtgattgtctccggggtgcgcatctacctccctcaggataacattttacccaggccttcaactgatatgctgacctttgccgtcgttaaggacccaggccttatctctgactacattctgatggtgcataagaatggtcgctgggaactggccacaccaaatttttacaaggagaccgaacaggccatcatggcagctgtgaaaatcggtgaaaaagtttggcagtag

SEQ ID NO: 190002 - DNA, 477 bp, Klebsiella oxytoca
atgacaattcttgagcgactatatgccagcagcggatcggaggttattcacgatacgttgcagatatcggcaggcgatgataactactggctaaccagtggctgggatgacgtctcagtgacgctggaaaatggtcagccggcgacgtttgaagccagcgcgatagatatcgctttaccagccaggaacgccgacgggacacaggatttaaagtttgctatcagcaatattgacggaagggtttctgaggcgatcgataaaatcctggatgaaatgaaatcagccacgctgacatttcggcggtacatttcatccgatctgtcttccccggcatcatcaccgtatacgctcgatatcaaatccggctcatggaccccgacagcagtgcaggtcacggcgggctatatgaatatcctcaaaacagcctggccccgtaaacgttacaacctcgccgagcatccgggcttacgttactaa

SEQ ID NO: 190003 - DNA, 177 bp, Klebsiella oxytoca
atgaactatctcattaatcgactgaaagagccgtcaacctggcgcggcatcatcttggtcattgctggcgtatttggctaccagatgcctccgggcattcaggaaaccgtcatcgctggcggtgtggcgctggctggcgtggttggtgcggtaatgccggacagcgttaagaagtaa

SEQ ID NO: 190004 - DNA, 408 bp, Klebsiella oxytoca
atgaaggcgttaccacgggaaaccgccaaagccatttacctgtcgcaatactggactgaaccgaaattcgaccgcatcgccgagttgtctccagccattgcgcaggagttatgtgataccggcgtgaacatggggccgcgtgtcgccagtacattcctgcagcgctggttatcggcgctgaatatgcagggcaagctatatccggatctgaatccggacggtgcaatcggcaacatcaccatcgccgccctgaaaagttatctcgctgttcgtggcaaagatggtgaaaccacgctgctgaaggggctgaattgtagccagggcgctcgctatcttgagcttgctgaagctcgggcggcaaatgaagattttctctatggttgggtaaaggaaagagtggaactatga

SEQ ID NO: 190005 - DNA, 183 bp, Klebsiella oxytoca
atgaaagccagcatccgtgccaaggtggagcacccgtttcgcatcatcaagcggcagttcggcttcgtgaaagccagatacagggggctgctgaaaaacgataaccaactggcgatgttattcaccctggccaacctgtttcgggtggaccaaatgatacgtcagtgggagagatctcagtaa

SEQ ID NO: 190006 - DNA, 378 bp, Klebsiella oxytoca
atgatgaagtttttaaaagtagcagggatatctgttttagcgctggccgtgtttatagcagtgcttatagcgtggtactggctggacgcccgtgcgtctctccaggcggatatacgcgcctgcccttcagtgacgacagagcaggccacagccgccgttttaaagaatgtcctgttaaatggcgaacggctgttttcgaagccccatttaactcaaaaggatgtgatcattgaggaacgaggggtgcaggtaggacagaccggcacgctggtaccgttcaggattgacggcgtaactgaccggcgttacttcggtatgacaggttgcgcatcgctggatgcggttgaatacgccacggaatattttacagagccctga

SEQ ID NO: 190007 - DNA, 492 bp, Klebsiella oxytoca; identical to SEQ ID NO: 148805

SEQ ID NO: 190008 - DNA, 567 bp, Klebsiella oxytoca; identical to SEQ ID NO: 100986

SEQ ID NO: 190009 - DNA, 435 bp, Klebsiella oxytoca; identical to SEQ ID NO: 100988

SEQ ID NO: 190010 - DNA, 585 bp, Klebsiella oxytoca
atgaaggaattaatactgttaattcctctgggcagcgctttgcttttaaccgggtgcgcgggcacagagacggaatttgaatgtaatgccacgacatcggatacctgtatgacgatggagcaggccaatgaaaaggcgaaagcaaaagaggaaagtgcttcggcaaagccggctgcggcagggttgccacaactggctgagggtaatttcagaacaacgtcagttaattcgtacccgttgccgccacagcccaacctgacccgggccagagtggccgtggaaaaagatcgagcacgtgcagtgtacctaaataatccaacggcaaagaatgaagcagcatatttcgaaaccgagaaacggagccagtctttgccggtagtaaaaatgtctttaccggtggtcgcgtcaacgttttcgtcaccgtcaacgctgccaggtaattatccccggccattgagaaaaggggaggagacaacgtctttgtggatagcgccgtatgtagattcagatgatgtttatcaccagcccacaacggttgtatttgtggttaagccatcggcatggggccagccccgcattaactaa

SEQ ID NO: 190011 - DNA, 279 bp, Klebsiella oxytoca; identical to SEQ ID NO: 100989

SEQ ID NO: 190012 - DNA, 189 bp, Klebsiella oxytoca; identical to SEQ ID NO: 100990

SEQ ID NO: 190013 - DNA, 402 bp, Klebsiella oxytoca; identical to SEQ ID NO: 100991

SEQ ID NO: 190014 - DNA, 300 bp, Klebsiella oxytoca; identical to SEQ ID NO: 100992

SEQ ID NO: 190015 - DNA, 384 bp, Klebsiella oxytoca; identical to SEQ ID NO: 100997

SEQ ID NO: 190016 - DNA, 261 bp, Klebsiella oxytoca; identical to SEQ ID NO: 100999

SEQ ID NO: 190017 - DNA, 327 bp, Klebsiella oxytoca; identical to SEQ ID NO: 101002

SEQ ID NO: 190018 - DNA, 753 bp, Klebsiella oxytoca
atgcgaacaatacatgccgccatgctggcggggtgcctttgctgcaccctgatgccggcttacgcaaaagacgcgggctggcagtggtacaacgagaaactgaagtcccgggaagaagagcaactgccggcaccagcggcctcaccgccgcaaatggatattctggagaaacaggcagctctgcaacatgcaacgaaaaaagcattagcggaagccatcttgtacccctcagtgccggcttttgtgaagttcttccgtctccagaactactggacgcagcaggctggcctgttctcgatgagcgcaaagaaagccatgctggaaaacccggagctcgattacaacctgcagtacagccactacaacggcactgtgaaaaaccagctggctgccgactatgccgaacagcgaaaggcaatctcctccctggcccggcactatggcgtgatgtttttctaccgcggccgggaggccatcgacgggcaactggtccaggtcatcaaaaacttccgcgaaacctacggactgagcgtgataccggtctccgtcgacggtgtggtgaatcccatgctccccgacagccggctggaccaggggcaggcacaacagctcggcgtgaagttcttccccgcgatgatgctggtcaatcccaaaagcgggcaggttaaacccctcagttacggctttatcagccaggacgacctggcgaaacagttcctctatgtctccagtgactttaaaccaaacttttga

SEQ ID NO: 190019 - DNA, 441 bp, Klebsiella oxytoca; identical to SEQ ID NO: 112533

SEQ ID NO: 190020 - DNA, 360 bp, Klebsiella oxytoca; identical to SEQ ID NO: 112532

SEQ ID NO: 190021 - DNA, 567 bp, Klebsiella oxytoca; identical to SEQ ID NO: 112531

SEQ ID NO: 190022 - DNA, 669 bp, Klebsiella oxytoca; identical to SEQ ID NO: 112529

SEQ ID NO: 190023 - DNA, 732 bp, Klebsiella oxytoca
atgaaactaaataaaatcatggctgtaatggtcatcagttcagcactggtgctttccggttgtagcgcaatgggtacagcaattaaaaagcgtaatctggatgtaaaaacacagatgagcgaaacaatctggctggagccgtcaaataataagaccgtttatctgcaaatcaaaaatacctctgataaagatatgagcgggctccagtcgaaaatcaccagtaccgtcacagcaaaaggctaccaggtcgtcactaatcccgataccgcgggttactggattcaggcaaatgtcctgaaggccgataaaatggacctgcgtgaaacccagggctggctaagccggggttatgaaggtgcggcaacagcggctgcgctgggtgcagggatcaccgcctataattccagttcagccggcgcgaccctcggtgtcggtctggcagctggactggtaggcatggcggctgatgcgatggtggaagacgtgaactacacgatgatcaccgatgttcagatctccgaacgggccaaaacccaggtacagacggataatgtcgcggtattacgccagggtacctccggtgcgaaagtgcaaaccagcaccgaaaccggtaatcagcataaataccagacgcgcgttgtctccagtgcgaacaaagttaatctcaagttcccggaagcacagcctgttctggaagaccagctggctaaatctatcgcgaatattctgtaa

SEQ ID NO: 190024 - DNA, 693 bp, Klebsiella oxytoca; identical to SEQ ID NO: 112528

SEQ ID NO: 190025 - DNA, 342 bp, Klebsiella oxytoca
atgggcaaagtccaggggatttttgttggtcaccgaaagtttgctgtagacagcgactggaaaaaacgagaagaagagcgacggtatcagcagcgttgccagaaatttgatgcatggtcagaaaagtggatcaccgtctacagacttaagtattaccgtctgtggacagacgccgccatacgccgctggcttggtgagccccagcagcagggcaaatataaggttttctctgttgaagccgtcaggatagcggaaacacgcccggattttcaggcatggctacagccccgcattgataaaaaacggaccatggctaaaatttcagaaatcacctctctctaa

SEQ ID NO: 190026 - DNA, 756 bp, Klebsiella oxytoca
atggaaaatgagctagaaaaactcaataaaaacataattaacattagtgatgttgatgctcctgtttataggatatttagttttgaacgatttttagaagtaattgctgcaaaacagttggtattagttcgaccttctatgtgggatgatccatatgaaaactttttcctcaagactgaagtggtttctgatactggagaaatagcgtctctggagaaccttagcgactcatggtatggtcagtgttggactgaaaacgaagacactgatgcaatgtggagaatttatagccctgaaaaaagaggagtgagagtaaaaacaaccatccgaaaactattctccaccttgaacaataaatctgacgaatattgcagtctaaaatacttcattggaaaggtaagttataaggataaagaagaaatcaaagagttcattacttcaacctcatttacggcattcatcagtggagggcaaaatacgcaattcgctgagctattatgtaccaaaagaactgccttttcccatgaaaatgaagtcagactcattgtcgatgatataggtgataaaaatgggagtggggatctatataaaataaatatcactcctgatgacctttttgaggaaatctgccttgacccacgtttgtcaagtacagactttgtaaatctaagagcgaaaattcaggggatgggtgtcagcacaaatataatacaatcagatctttacaaactagacctcccacgtttaaaactgtaa

SEQ ID NO: 190027 - DNA, 1767 bp, Klebsiella oxytoca
atgagtgaattgagtacactggagcataaaattgtctctcttattctggaagagtcagcggggaaatccgatcctgaggtcgcactaaaactaagcaacgacccggctatttgcgggcttataaatgatttaagagagtgtgtgagaaacccggggctcaggttaccgttgtctgacgccactgctcataaagaggttgacgccgcatacgttagccagcaggaaagcagcttacttacgttctgtggtgaacaatcgccacctcccattcagaacgatgtaaaccaaaacgacgaccataatgcacaaatggatgttgtacaaatcaaaccagaaacatccaggcaggatatgaatgaaactcctgtacatgagaccgctgacacgactaatcagcaatcttctgtgcaggctttatcagtgattaatgatgtgcaacaggctttgtcaaccgcatcagaagcagagatatcgggcattatagatagtgacgatacattggaatcagctgaatcgcctcgtcagtctgaggcgatcttactcagaccgggagaaataccccacaaaaagacgacggagcattctcctactctccagaaagcgcctgacgtatccattattcttgcaaatgccagggtcggtgaatcttttgacgcactggtagatgtcattactgacagcggtgttacggcagaagtgacagatattcatttttcccaagatatcggtctgctcttttgtaaaaaagagaagcgcctgaaaggaacgccagcattcagcggaaactttgaaatgacagtgaaatggtcatgtccctcacattcagataatgaaaaaaagttactttttgttgtgaatcccgaccccaaaagcctctggaaagtgattgatccccctgccgacgctccttttttcaaaaagagtatcgatcatcgaaatatcagctctgcaactgtaaatatcgttgctgcaagtcgacgtggacgttcccacgaacatgccggtaccttccgcgacgatgatttttatatcaatgtcagtgatgaatccggatggaacgtgttgctggtggcagacggagcaggtagtgccagattttctcgtgaaggctctcgcattgtagctgaaaccgttggtaactaccttttcagtcaactaaaagcagaaaagggtcatgaaatcaaagacagagtactgcgatggaatagcgaagatcagcgggctgtatgggatttcatgaatcaccatttcaggcaagctgcgttactggctgtgcataacatcagtagtgcagcaattatggcccaggacaaagcaaagtcattctcaacaactttactggcgaccgtcacttttcgtgaaggctctgaactgtttgctgcgtccttctggcttggcgatggcgctattgctgcatatggaccggtcggaaaggtcagggtccttggggctgccgatagtggagaatatgccggacagacacgatttcttgacgctgaggccgtcagtgattcaggtttcagtaaacgcatcagtataggtaagtggaatgatgtctctcaccttgtgctgatgactgatggtgtatccgacccgtggtttgagacagacaacggactacagaatccgacgaaatgggacacgttaatgacagagctgaatcctcttctctctgttcctgatctggcctcatcgcagctggtggagtggttaaactttttctccccgggtaatcatgatgatcggacaatcgttgttctctggtga

SEQ ID NO: 190028 - DNA, 309 bp, Klebsiella oxytoca
atgctgcatgcagtgaatacgcagcatggtctccagcggatagggccgtcggccattgcccgccttgggataaaacggctcgatgacagcggtcatattctgccatggcagaatctgctccatgcgggagaggaaaatctcttttcgggtctgacggcgcttagtgctgaattcactatcggcgaaggtgagttgatggctcatgatgtccctctgggatgcgctccggatgaatatgatgatctcatatcaggaacttgttcgcaccttcccttgggctttctgtctcagaaaagtaactttctttga

SEQ ID NO: 190029 - DNA, 981 bp, Klebsiella oxytoca
atgagtgaaactaagcacatatctgaaatggcagaaagggtagcaaataatttattctcaatttttaaatggaagagaaagattgcttctgatttcagttgggattgtgtgagccccgatgagcatggaggaaaaaaagatcacccttctgactgtgttttttattacagagatccttatgacaacgaggtcaaatacattaatactgatcttaaaagttatgcgaaaggttcaataacaaaagaacaaattaataaagcaatcaactctctttcatacgcaacgaattgtgcaccatataatgacaattggaaaaagttatttaagccagagggtaactggtctgtagttggtatgttgtttgtttacaatcattgcggaggatacaatggagactttaatgaaatagtaaagggaatagaaagtgatgataatcacttagacaacggaaaaatgatatatattttttcgccggatagaataaaaatattaaatagtattgccaacgatataagtgtaatggtgggaaaagaagaattacctaacaaaagtcattttagcttctttcatccaaatgaaattctaacaaaaaatcatttcagccatgattattcagaaccagcaactattaatgtactttcttcaccttggattataattaaacatgccgattgtgagaatgaaaaagctggctatttggtctattacacaaaagatggttcagaagatgacgagtttgactattttattgatgcccttagttattaccaaataattaacaacaccagtaacgttaggattaaactcacaataaaaaatgaattcgccgctagtaatcttttaaactcaataagtaaatactatcagtctttaggtcgtaccgaaagcgaatcaaggcaaatcgccagtacaatggtaaaaggcactattgatatggttgtaccacagttttctgctattgaaattggagttttgccatga

SEQ ID NO: 190030 - DNA, 1293 bp, Klebsiella oxytoca
atgttttacttaaaaaacaggaatttttggattttcggtgccttttgctttttctatttctttatcatgggcgcggtactgccgttttttccgatatggttgcatgatgtcaaccagctcgatcagcgacaaaccggactggtgtttgccagcatggcgctgtttgccctggtattccagccagtttttggctttgttacagacaagtttggtctgaagaaacacctgctgtggatgattatcttcctgctgctgtttctggctcctctgtttatctacgtgttctcaccgctgctgcaaagccacttttttctgggggctctgttgtgcggtatttatcttggactggtctgcagcggtggctcgccagccattgaggcctatattgagaaagtcagccgccgcagccagtttgagtatggccgcgcccgcctgtttggctgtatcggctgggcaatttgcgcctccattgtcggctatatgtttactattaataaccagttcgcgttctggctggcgtcgagtttctcgctggtattggccggtttgctgtatctgtttaaaccggaagaaaacgcgactctggcggtagcggatggcctggcgctgaatcaaaaacccatcaagcttaaagcggcattgggattgttaaaaatgcgcaaattctggtgtctggtgatgtatatcgtcggggtggcgtgcgtgtatgacgtcttcgatcagcaattcgctaacttctttacctcctttttccgcgaccgacacaccggtacccaggcgtttggctatgtcaccacgctaggtgaatttcttaacgcttttattatgttttttgccccaccgatcattaaccgcattggcggcaaaaatgcgctactgattgccggtatgatcatgtcggcgcggatcatcggttcttcccttgccgactctgtgacggaggtgattatcctgaagaccctgcatatgtttgaagttccgtttctgctggtaggcattttcaaatacatcaccacccagtttaacgttaatctctccgcatcgatttatctgtgggggttttgcttctttaagcagctgtcagccatcggcatgtcctacgcggcagggatgatgtacgtcacttacggtttcaaaacctcttatctgatccttggctgcaccgcgttgctgtttaccattatttcagccttcgcgctgagcggtaaggtacggcgagctaccgggcaacccgcacaggacgtatcgttatcgaatataaaaggcgaattcggatcggaagcgcaacgttaa

SEQ ID NO: 190031 - DNA, 1539 bp, Klebsiella oxytoca
gtgactctgactccgacagcgactcggattctgacagtgattccgactctgacagcgattcggattcggacagcgactcggatagcgacagcgattcggactctgacagcgattctgactcggacagcgactcggatagcgacagcgattcggactcggacagcgactcggattctgacagcgattcggattccgacagtgactctgactccgacagcgactcggattctgacagcgattccgactctgacagcgattctgactctgacagcgactcggattccgacagcgattctgactcggacagtgattcggattctgacagcgactcggactctgacagcgattcggatgctgacagtgactccgattcggacagcgactcggattcggacagtgactcggattcggacagcgattcggattccgacagcgactcggattcggacagtgactcggattcggacagcgattctgactctgacagcgactccgactccgacagtgactcggattcggacagcgattcagactctgacagcgattcggattcggacagcgattccgacagcgactctgactctgacagcgactcggatagcgacagcgattctgactctgacagcgactcggattctgacagcgattccgacagcgactcggattcggacagtgactcggattccgacagtgattctgactctgacagcgactcggattctgacagcgattccgattcggacagcgactcggattctgatagtgactcggactccgacagcgattcggattccgacagcgattctgattctgatagtgactcggactccgacagcgatgcggattcggacagcgattcggactctgacagtgactcggattccgacagcgattcggactctgacagcgactcggattctgacagcgactcggattctgacagcgattccgattcggacagcgactcggattctgatagtgactcggactccgacagcgattcggattccgacagcgattctgattctgatagtgactcggactccgacagcgatgcggattcggacagcgattcggactctgacagtgactcggattccgacagcgattcggactctgacagcgactcggattctgacagcgactcggattctgacagcgattccgattcggacagcgactcggattctgatagtgactcggattccgacagcgattctgattcggatagtgactcggactccgacagcgatgcggattcggacagcgattctgactctgacagcgactccgattctgacagtgactcggattccgacagtgactccgattctgacagcgactctgactccgacagcgactcggatagcgacagcgattctgattcggatagtgactcggattccgacagtgactccgattccgacagcgattccgattctgacagcgattccgattctgacagcgattcggattcagacagcgactccgatagcgatatcgaggctgtaccggatagcaacagcccggatgtggtga

SEQ ID NO: 190032 - DNA, 324 bp, Klebsiella oxytoca
atgaaatataaagtcagaaggggtaaaaatggtttcgtgaattactatgagataaccaccttttcacgtattttgaatattttagcatctggcatattttacatattcgacgttttatttcactacatactgatgatgccctttataatttcctggtatttaatttatatcatttactttagtgatgccgggttatccagcctgatggaaaatatgaaagatggagtagggatgtgtctggttttaaatctaccaacagcatgtttatatgtagcatataaaacatggagagattacaaaagcgatacaattacgtcaccttaa

SEQ ID NO: 190033 - DNA, 759 bp, Klebsiella oxytoca
atggcagactattattctctttctgcatttgttattaatgccacccccgttcagagcgctgttttactggaagcgatgaatgagctatttgagcctgacgataacttcattgctaagctcacctcctctacgaacactgaaggactgtctgaaatggagcgtattgtgcgtcactgtgtgctgaatcatccggacagaactgtcgaagaagttattgaagactgcgactggtcatttgatggtgaaatatgttcggaaggtttccttgttcatagtgattgcggtaatttcaattcagaacatgcagcgctttttgctcaggcatcacttattgccttcgagagaaatgaacttttagaatttcagatatctcacacatccgataacttcaggcgtaccgatggctatggtggcgctgcttgtgtcgtatcccgtgactttattcgctggaccggaaactacgagttccttgaggctgagcgaacagcatttacagagaatatgcgctattacttctgttcttttactgagttcaatggtgagcttgaatatcctgtgtcattcattctacgttgtccggctaacgtaaacgctgatcaacgctatgatgccatattgcttaactatcgctgtggcggagaaaaggatgccgatggcggtgttcatttcagctctggttctgctatcaaaaatgcagtccttaagcctgtaactccggatgaataccgagtgatgaaaggttatctgaaagtcatctga

SEQ ID NO: 190034 - DNA, 753 bp, Klebsiella oxytoca
atgacaaaacaaattttacccaatgaattagccgagattgtaaccggtctgcttgtcaatcctgtgctgctgggggagctggatagtcgtgaagctcaccagaactttatgcaggatataggccgcgtggttgccgattactgtggtggacgggtgaacggaatcacggacggcgatgtcactaaggcgtacctgtcagagattgagtgcaccccttgtcttcacatcgaacctgatgagcgtctgccttcaactgagcgtaacgtctggtcaaactatcatgttgaggcctggtcagatgaggaacagattaatctcccggacgcggcgatcgtacagtcagaacgagaaaccctgcaaacgctgctgatcgtagccgcccggaaagaatctgccggtgctcctgttcttaaacgaatgacggattggcgtattcccgaaggtgaacctgtttgccatgaagcggacagaaaaacctacacggccatcttccatcttgataaccagacttctgtcgagctggtggacgaagccggacaacattgcttaggtgtgttgctagaaatcaatcatggtgtccctgcactccacctaaaagcatccggtggcgatgtacttcttcatattcatgcagcccagggaggccttgtaattacgcctgacaacccagacgtaaaggttggacgggcagagttagatcggtatgcctatgaagacaaatcatcacttcttgtgaaaactgacggctactaa

SEQ ID NO: 190035 - DNA, 780 bp, Klebsiella oxytoca
atggatattaaagaattcccgcccggtgtcatcgagcatctcggatggtatgtataccgccttattgacccaagatacggcaatacgttctatgtcggaaagggaaaagataatcgtgtttttgcgcatatgcgcggagaggtggccgctgctgatgacgatgagctactgagtaacaagctcagacagttgcgtgaaatccgcatggcgggccttgaggttatccatatcattcatcgacatggtctgcctgatgagaaaaccgcttacgaggtggaggctgcccttatcgatgcctatccgggtctgactaacatcatgaatggcgctggtagtaatgaatatggctctgcccacattaaagaattaatcgcaacgtaccaaccagaaaccgttgctttcgaacataagacgctgatgatttccgttaaccggagttcaaaggatattgatctctatgatgccgtgcgttttagttggcgtgtcaatgtcgagcgggccagtaaggcagaagtcatactggcaacggtcagggggatcgtaaaaggcgtatatgtggcagataagtggctaaagtcgacccgcgagaatttcccggaaatggcagcatgggatatcgatgatgagtttgaagcaacgcaaaatgctcggtatggattcaggggtacgcaggcaccggttgatatagcaaaaatctatcttggcaagaggatccctgacgaactccgaaaaaaaggatcaatgtcacctgtcagatattcccctgactttgattcgtga

SEQ ID NO: 190036 - DNA, 186 bp, Klebsiella oxytoca
atgctaacatttaaccccatactcaaaatgcgtaagacaggatttcgatacatctccgtcagtaataccatgaaccttaccaccaccgttatcagcaaccacacgacctatattctgcataaaattctggtgtatatcacggctatccagttctcccagggtatggacgtgttgctggttacgtag

SEQ ID NO: 190037 - DNA, 435 bp, Klebsiella oxytoca
atgaacattggtgatgctgcccggttatccggagtttccgccaaaatgatccgctattacgaagaggcgggattaataccggaagttgcaagaactgcagccgggtatcggatgtacagcgatattgatgtgtacaaattgcattttatacgtcgatgtcgggagttaggtttctctctggcgcaaacaggagaacttctctgtctttggggtaaccattcgcgccaaagcgctgatgtgaaaaaattagtcgagtcacacatccgcgagttgactgtaaaaattcaagaatttcagcgtatggcatcaatacttacaacgctttctgattgctgtgcaggggatgataagcctgaatgccctattttgcgtgcactgtatcttgcagatgttaacggtttgcaggaatcagattctggccctgaaattacttag

SEQ ID NO: 190038 - DNA, 213 bp, Klebsiella oxytoca
atgagccgtcgcggcaactgctgggataatgcagtggcagaatcgttcttcagttcactcaaaaaagagcgcatcaggaagcggatatacaaaacccgggacatggcccgggcggatattttcgattatattgaagtgttctacaaccgggcccggcgccacagtcatctcggcggcgtcagcccggaggccttcgaaaaggcctcgcagtga

SEQ ID NO: 190039 - DNA, 576 bp, Klebsiella oxytoca
atgtctgatggtcaaaacagtaacaacgatagaacagaagtcgtcaaagcatctttaagcgctggcagcaccctcttagtcgcgataatcgcagccattggcggaataattggttcatacttcactggttcaaagctagtagaaagtacgagtgtgccagcattgataaatgccagaacaatttgtatcaacgcggttaatgaagatgagcaaaaatttcgcgaaagagcatctagcttattggctgccgtagctgcgtttgatgcggataaatctctcttatatcaacctaatcataatcaactttatcaaccagccaaatcagctattacgcaggcaatgtccatcagtacatattcttcagaacgtctttcagggcttgcgataaacattgcgacatctataaaaacacttgcaattgctgatatgaattatggtgcatcaggtgaagcttataaggtgctgtcatcctctatgggggaatggcctgaagcatatagtgaatttatgaaaacattcgatatcaaacgagcttcttgtaattttgatgagtcaatccataaatcagaaaaatga

SEQ ID NO: 190040 - DNA, 858 bp, Klebsiella oxytoca
gtgtttaaacttaaaagaccaatatttacttatggtaatgcattaactctatgttgtaatggaattactgggaataatgatttactagaaaaagttcataaagcttcaactgatttggagttacaagtaagttcttatgaaaattcagcattaactgaagagcttttcacaattcaacctatcaaaatggatggtgttgcagaccctgtaatattaaaaggtttgaaaaaatctgatttcataaaattatatacactttatttggtcggaatgacgaagccagcaagagaaatttatgatgtacttatggcttcagctaatgaaagatgtccgttttgtggtggaatagggcgtccaaggaacctagaccattacttaccaaaggcatattttccacagtttgccattgcaccgatgaatcttgttccatcctgtcgggattgtaatatggatggtaagggagaagattttgccacgtcagctggtgagcaaatacttcatccttatttagataatgatcgctattttaatgaacaatggatttttgcgcgatacttagcgggtgcccaaggtgaacctggggtaattgaatattttgtttctcctcctgttgaatgggccgcaaatcaaaaagagcgagtcataaagcattttaatgattttaatctgtcgttaagatattcgaaggaagcaagcgcaagacttggtactttattatctcaatatgatggattgcttaaaataacattggataaagaaacatcgaagcaaattatatttcagacagttatagacaatgcggcatttgtcaatcattgggaaagggttatgtgtttggcacttatgagagatctttag

SEQ ID NO: 190041 - DNA, 1518 bp, Klebsiella oxytoca
atgaacattttaatcatccctcgagagcaaagaatcccttattcaggggtaaacacagcttatctacatgttgatcgctgggatgattactctttcataacaatgttttatttgtctttacatgatgaatcaggaaatttgcatgaaattggaaatgtaaaaattggatttcaaggtcaagttattggaaagccaacacatacaaccctagggcatgcatttcaggctttaccaaatggatatttttcagttggtcaagacgtggaatattatcaaaaaatatttaatctttctgattctataaaaaataaaattcttgaatcattaaaggatatagcttattcatcagaggcaatggcattagctgagaccgaagctgtttttaaaacatctcttcttagagatgttagtttgtcagttattaaaggtcagtttactagggttattgaaggaaagaatccattaacaaactttaaatttaaattcatgaggcctgctacggaaaaaatgtcaggcattgagttaatgtttaaagttgaaatagatgaaaaacccagtacaaatattcatgcgataataggtaggaatggagtcggtaaaacaacccttctaaatggaatgattgaggcagttaccagcagaggacattcaaattcaaaattttatgatgttgagggtttttctgaaagtccaatcggaaaagattattttagtagtttagtttcagtctctttcagtgcttttgatcctttcgaacccccgactgaacaagatgatccttcaatgggaacatgttacttctatataggtttaaaaaaagcaggtgaagttcttaaggggcttaatgatattcatgaagattttattcaagcattaaagcaatgttttagccaaggccctaaaaaaaacaggtgggtgagcgctattgatacccttgaatctgatgagaattttgaaagtatggatcttaaagatcttgtgcggtttaccggtgcagatttagttaataatgctcgaaagctaataaagaaaatgagttcaggacatgctattgttctattaaccatcacacgattagttgctactgtagaggaaaaaacattagttctaatcgatgaacctgaaagccatctacaccctccattgctttcagcttttattcgagcgctatcagatttgttacttgaccgcaatggcgtagctctcatcgcaacacattcaccagtagtccttcaggaagtgcctagaagttgtgtttggaagctcaatcgttctcgattagtaacagtggtgcgtagaccagatatagaaacgtttggtgaaaatgttggggttttaacgagagaagtttttggtctagaagtagtgaagtcgggttttcatgatttattaacaaaatctgttgaatcaggtcaatcttatcaagatataattgatgaatataaaggtcagcttggggttgaagcaagggcactattaaaagctttagtgatccaccgggataggggggccaactag

SEQ ID NO: 190042 - DNA, 603 bp, Klebsiella oxytoca
atgaacacgtcaccgtggaacaaagaccgtatcatcggccaaaaaagaccacttcagatatctcatatctgggggatccgaatccggcttgaactagaaggtaaaacgcgcgatttggctctcttcaatatggccctggacagtaagctacgaggctgtgatctggtcaaactcaaagtatctgatgttgcatatggtagctctgtttcaagcagagctacggtgttgcaacagaaaaccggtagccctgtgcaatttgagataaccaaagggacaagagaagctgttgctgcattgataaagcatggcaatttgcatagtaaagacttcttgtttcggtctcgagtcggaactaaccagcccatatcaacccggcaatacaaccgaatttttcatgggtgggtagaaaagcttggtctcgatgattcgctttatagcacacattccatgagaagaacaaaaccttacctaatctacaagaaaaccaagaatctccgggtgatccaacttctgttgggccataagaaactggaaagcacagtccgttatctgggcattgaagtcgatgatgcattagagatctctgaatcgatcgaagtctaa

SEQ ID NO: 190043 - DNA, 3630 bp, Klebsiella oxytoca
atgaagacacggcagtatgcgcaaaaatcaatcttcgatctggaagcaatcttcgagcagtccagcaacaatgttagcgaacttgaacagttgttgagcgagctgacctttcgcaacactgccagggcgcggacgctgacggctaaaatcgagcaatctctatttgcacttagcggccacagcgtggtcgccatgtcggcttccagcccatcaacacgccatcccgattcggtgtccattcaatcttctcgagttgtgccccacaattcgcctgctgcggaagagcaactgcaactgaaggccatcccagactctgccatacgagagcaattcgacaaagaccaaatcgaccttggtccgatcccgtctttttctccatcaggtaaggcgaatgatgcgcgagcaatactggcagcatggacagccctcgaagcactgtcgcctcaaggttataaacgcccagaggatatggcaaccggcgaccgctctagggttgctctattggagcgaggtgttccatggggaccaaatgcccgcagcaagcccagttataagctttatttcgaggtcgtcctcggctccatcgctctcgacaaggcgacggacgagctggtcaaggtttttggcgaggatgaggagcgttcacgcccggacggtaagaaagcggccatcggctcgatcctgatcgacaaagaaggctatgtgcttgaggaaaaaggcgttgccgtgtccagttttgcctgggcactcaagccggctctcgatctgaagcttgggagtttagggaattggccgaatgttgagccgcgcattatcgagcatctggatcgaatgattcgccaccacaacaaagatggagaacccataccgatcgatctgaatgttgttcataacgcttataaatggcttgtatcgcagttcagtgtacccgagcatttggttgagccacccacattcgcgattaaggtgtttcatcatttcaaggctaaggcgccgcctgaaccttcgttactgaattccttctatcttgaagatctcggtgaagcaaccaaattgctcgagacgggcaaagccggaaccggtttgcgccgctacatgggaattggcagacctgaccagaaaatcgacgtgctatcgcccatttccgcagttgagccgttcgtcgcaccgtcgctcatgccgcaggctcgttggccttcgaaaggcggccatccactggtgttgcttcaacaggctgccgtgaatgcggcgcgtgctgagctgaatgatgctccaggtatcatcggcgtcaatgggcctccgggaaccggtaagaccactcttctccgggatatcgtcgttggatgcattctcgatcgggccacggcgatgtccggcttcaacaaaccgcaggatgccttttccacaacaggcgagaagctggcattcggttccaatgcattcctgcacttctataagttacatgcatccttgaggggccatgagatcgtcgtagcctcctccaataacaaagcggtcgaaaacgtcagtaaagagcttcctctcaaggaagccaatggtcgccatgaacagatcgcctacttccggtccatcagcgacctgattgcgaatcccaaacgcgccggctatttcgaagccgaggccgagggggacatcccctccgacactgtcgagacctgggggctgatcgccgctgctctcggcaagagcagcaaccgaggcgcgtttcagcaaggtttctggtggaatgaagacggtggtttccttacctacctgaaagcagctcgcggcataaatgtcatgcgtgagatcaaggacgagcgaactggcgaaaccatcgatcgagtgatgcccagcgtggttgtcaacgagcggcccagcaccaacgaagcggatgctgctgcggcctggctgaaagcgcgaaccgcctttcttaaacttaaggagacggtagacgccgaaatcgccagcatcgaagagatgcgacgggatatccaggcgctcaagggagcgatcaccgaacttcaaagggctgaacagcgtcgaccgagtctgaatgaagccgtcgaagaggcacacaagactgctgaatcctgccaacgagagcatgagaaggcaaaatcgcagatcgagcagaacaagatcatgctcgacagccatcttgcttgccgtccaggtttcttctcccgtttatttgcgactgcggcctggaagtcgtggagatcgacactgcagaagctctcgacgaccttgcagcaatcagtcatacgggcgcaggggacggacggtgccctagagcttgcaagggctgagtggagcaatactgagtcccagttacagcaactcgaccaggaaatttccagcaaatgtcaggctgtctcgaaattgaaggcaaccgaggcacaggcacgaaaccgtatgggagacagggtcgttgatgagaggttcttcgagcgcgagcacgaggctatccacctcactgcgccatggcttcccgatgaggttcatcgcctgcgggaggatcttttcgccgctgccctgactgtgcataaaacgttcatcgatgcttcggccagccgcttgcaacacaatcttgggttattgatgtcaggcatggtagctggtgccttccagtcttccgctcaccgtgaacttctccccgacctttggtcaagccttttcgtggttgtgccgaccgtgtccacgacattcgcctctgttcggacgatgttcggggatctgccaccagagagcattggttggcttctggtagatgaagcgggccaagccgttcctcaggcagcagttggagctatcatgcgggcaaagcgctccattgtggtaggtgacccgttgcaaatcccacctgtagtttcacttcctgaaaagctgaacgccgaaatctgcaagttctttgacattgaccaagtcgaatggtctgcccccgcagcatctacgcagacccttgctgatcaggcatcgcgcttcaaatccaccttcgtcatggacgtaggtgctcgagaagtcgggctgccattgctcgttcacaggcgttgccagaacccaatgtttgatgtttctaactccatcgcctatgccgggcagatggtccatgctgtcgggcctaaaaaacccggatctataggctcggctttggggagatctcactgggtggatatcaatggcgatgctgagacgaagtggtgtcccgacgagggcgaagcggttgtgcgaatgctcaaagagctggcagcatcgggcattacaaatccggacgtatttatcatcacaccattcaagatcgtagagcagaacatgcgtcggcgtctcgacagtgaaactgatctgctgcgaacgttcggcgtaaagctggatgaatggtgccgtgatcgtgtaggcacaatccacacgttccagggccgagaggcggacacggtaatcctgttgctgggtgcgccgaaagcgagtcagcaaagagcacgtcagtgggcggcaagcccaccaaacataatcaatgtagccgtctcacgcgccaagcaaaacctgtatgtggtcggctcggctgctgcatggacaggggcgggaactagccttcaggtcctgcatcggcaattggcgaaatcagcctaa

SEQ ID NO: 190044 - DNA, 1065 bp, Klebsiella oxytoca
atgctctctctcgagaataatggtaatgcagtcattatattacctaacagttttttttcagatgagcatcacgaagctatcactcttaagaagaaattgctgtcagatttcaatgtaactaaaataatatcattgcctgctggtgttttcttaccttacacagcagttaaaactagcatactatttttcagtaagaacggacccacaaaacaaattttagtgcatgatgctagcactcaatataaaataacaaaatcaaatccttttagtattagcaatactcaggaaataatatcatcattatcacaaaataataattctcaaagcacctggcttttaaatcatgacgaattacaatctaattataattttctagagcgtccagaattttacagagagagattaaattttaatacttcattagaagatattgattctcttgataataatttaagtaattttgatgatgtgctattttcattaaaaaatgacataaagcgattaaaagatgatctcgaccaaatcaggactagcaatacatcaataaaatataaccttgatgatatattgataataaaggctggtttattgctacagaaaaataatttttcagaaaaaggggaagtacccgtttttggtgggaatgggattattggttatactaatgaggcaaaagaatttggcgaaactattgttattggcaaagttggagcgctttgtggaaacgtgcgatattgcaacggagacatttgggttacaaacaactccatggttgttaagaatagaaaagacgatgtagtctacatgccctatcttgcgaagttattaaatgcaatggagttaagaaaactttcatcaggaactgcacagcaatatatcaccgtccgtcatataaaatcgatagatataaaattaccatcaatagaaattcaaattaaaatagataatttactgcatcaaatagagaataaaattaactcaatgattaaactcagagataaaataaactcttgcagtattcatataatgaatgatattacttgcaatttacagataataaaataa

SEQ ID NO: 190045 - DNA, 171 bp, Klebsiella oxytoca
atgtttatttttgtattcactcgcaggcgcggcggcaaagcgattttgctaccttcaaccggcggcgaattcagcggtaagcatccgacgccgcagataaacagactggcttttcttgagtcaatgatttcccggcgttgctgtgcgggttcttaccaacaaaggtggtga

SEQ ID NO: 190046 - DNA, 147 bp, Klebsiella oxytoca
atgaatcgtgaattcgaaatctgggtgcggctgcgctacggcggccgctatgacctgacgcgggacggacgcggctactactgccgggaagtggttaagcggatgtatgaagtgtggtgccactgtcgtggcctgaaagtggtgtga

SEQ ID NO: 190047 - DNA, 147 bp, Klebsiella oxytoca
atgagcatcacactcgaaaatggacgtatcaaccttgataccctggtgacaattgaagatcacttgcgcggactcgcgctggcaaacaggacgctggacagcattaaagaccaacttgctaagcattccgataaaaaatcggactag

SEQ ID NO: 190048 - DNA, 126 bp, Klebsiella oxytoca
atgaagagggtatctgaactggcgatgttcactctgtttttctccagcctttcggggctggggtttgcggcgggtgtctgctgtttcttcggcatcgcccgattactggcgaggactctggcatga

SEQ ID NO: 190049 - DNA, 567 bp, Klebsiella oxytoca
atgatcatcccatctaagttgatccgcgccgctctggtgtgcgctgcaaagaacgatgttcgctattacctttgcgggcttcacgttaccccgaagcacatcgaggcaactaacgggcatgtagcgttgcgcatggagcacggcatccggacgaagaaaaacatcattgttcagtttgaggggaacgtcccggccaaagccgaaacaacagagctgattttcaacaaagagccgatcgctattcatcgtgacatgtttcagagtcgcctgtccattaccggaatcaaattgcttgatggccgattcccggatttagatcgcgtcatcccgaagaaaatggacctcagtattcaacctctgatacaggcggaatatctcggctatccggaaaagatgtttggccgggagcgaacctttattcccgtgcaactgcggccttcaggtgacggcggtgcggttaaatttcagttcgattctgccattaacgccacttacggcaatccggaatttgtcgtgatgccctgccgagattccacttttaaggtggttgaggagcatcttggatga

SEQ ID NO: 190050 - DNA, 864 bp, Klebsiella oxytoca
atggcaatgaaaactgaattagcgccgttagcagctcgcgatctgcaaatcattgaatatctcggccagcgcgtcgtgaccactgagcagatggcgtccgggtatggcgcgaccgagaagatgatcagcaataacttttctcgtaatgagtctcgcttcgttgaaggaaaacactacttcaaggttgaaggcgatgagcttcgggggttaaagaacagaccctctttgagtgggttagttggtaagaatgcacgttctctgattttgtggactgaacgcggtgctgccaaccacgcgaagatgctggaaacagaccagtcgtgggactactacaacgacctgaccgagttctattttgcataccgtgaagttgatgctctgccagcgccaaccagcatttcacgcaaagaactggcgctgatggtcatagaggcggaagaacgcgcggaagctgccgcgctggaaaataaaacgctcagcgccaccgttcaaagtctggagaaacactttaccaaaggcatgaccatcccggcattctgcaaggcgctgaacggcgtcaatatcaacaaaatgatgtggtgggcctttgagcgtgactgggtattcaacgaacagcgtgatccagagaaagacccgcgctggcgtgttgcctcctatgcccgtgataagtacctgactgaagaccagacccagatcacgccacacgggaaggacgctttcacgaaatttacacccgtaatgctggagaagggttgtcaccgcctttaccagctgtacatgaaaggtgagctaccgatgaaaaagacatggaacggtgaatacagccacgataaagcgatttatacgccggaggataaatcatga

SEQ ID NO: 190051 - DNA, 246 bp, Klebsiella oxytoca
atggtgaagaaatacggccccagcagaaccagtcagggtgtacgcggcggactgaccttagctcaggcaaatcacgcttatgcacgaggtggcgatgacggaacggaggcatcgcaggttaacgattatctggcgagccgtcgtgaagggaagtatgtgggtaacggaaaagtgaagatgtcgctaagtcgcaaccagcgtcgcctggctaaaaaactcggaattgatcttatggaggctaactaa

SEQ ID NO: 190052 - DNA, 393 bp, Klebsiella oxytoca
atgattgacaacagaactgtcagcgccattgacctggcgttacaaaagcacccaacgcaggttggtgatctgttcgccgcgatccgccacggacgcatgaagcggtgcttcagccgaggtaccgccatcagctggctggcccactttctaacatcgcactctttcgcacgatctggctttaagcagcgccaccctgattttctggttgagcacgaaggggtcgagatgtggtgccgtggcgaaactaccgacgaatatcaccgcgcccaccagcgcaccgttcgccggctgcgtcgaatcctcgcccgcaagcgcgaaatgcagaagtggtgcgaaaagtgggatgcgctgcacgaccagcttacagaaatgaaagccagtaaaccgttttaa

SEQ ID NO: 190053 - DNA, 1659 bp, Klebsiella oxytoca
atgcttaacatcacaccgaactttgcacaggaacgtgggcttaacatgctgcggcgcacctggaaggcgcacgattccttcatggtctacgcaccgaccggaagcggcaaaacaggcctggctgcgtttatcgccgccggcctggttagtcgtggtatgcgtgttctgtttgtcgccccgtatacgatcctgattaaccagaccgcccagcgctttacagaatacgggttgccggaagaccagattagttttatctggcgtgatcacccgaactacgacccaaatctgctgatccagattgcgagcgctgacacgctcattaggcgtgaatttcccaaaaacatcgatctgcttattgtcgatgaggcgcacctgcgtaaacgccgtatcctgaaagaaatcgaacggatcacagcggagaaaaaagcgaaggttatcggtttatctggtaccccttttgcgccgttcctgggccattactatcaacacctgattaagccaacgacgattggcgaattgatccagcgtggtgacctcagtaagtacgaatttttcgccccaacaaaaccggatcttagcggggtagaaacgaagccatctatagagttcggtactgattacgacgagtcccagctggcggaaatcatgtgcggttctgacctggtgggcgatatcgtcgataactggcttcgtcatggtcgtgaccttcctacggtggcgttctgcgttaacaaggcccacgcaaactttgtaaccatgcagtttaacaaggcgggcattaacgctgaggtgatggtcgcagaaacaccccacgaagaacggcaggcgatgatccaccgcttcgagactggcgccacaaaaataatcgtcagtgtgggtgtgctggtggccggttttgatagtgatgttcgctgcattatctacgcccgtccgacaaaaagtgaaattcgctggctgcaggcgctgggccgcggactgcgaactgcacccgggaaagatgcctgcctgatttttgatcacagtggcactgtgcatcgcctcggcttccctgactccatcgaatacgacgatctgccatccacaaacgacggcatgaaagcggccgctgccggcgcaactaaggagcgcgaagaaaaacttccgaaagaatgccccgaatgtcatttcatgaagccatccggcgtttacgtctgcccaaagtgcggatttaaaccgctcgttggtcaggacgtcgagactgacggcacccgcaacatcaaaaaaatgagcaagcacgaaacggtttataccaaaagcgacaagcagtcctggtggagtcagatcaagttttaccagcgtcatcgtgcggcgcaggggaaacctgtcagcgatggctggtgtgctcatacctttcaggagaaattcggcgaatggcccaacggcttaagcgactttccaatggagatcacaccggaggtcagcaatcacatcaaacacaaacttatcaaatttgctaaacgccgcgaacgcctgcagcagatggggaagaaacctgaccaggatctatttccacctccgagcgccagtatcaactatgagcctcctgagggcagcgacgggcaattaattatcgaagcaaaacgaaaactccagaaaaacgtaaatagtgcgagtcagtga

SEQ ID NO: 190054 - DNA, 816 bp, Klebsiella oxytoca
atgaaactggaagcctccctcaaacactttagccctcagggcatgcatatcaccgacgacgcgaaaagcacatccccgaatcgcctgaatggcacagacattatgaccgggatcggggtgaccagcagccgggcacggttcgggctggcggcattctttggtaaggctggcatcagtaagaccgatgagcaactggcagttcaggcgctggcgcgacatgccattgatacagcccctaaaaacgtgcggaaggccgcaggtaaagcgctggggcgctgctgtctggtgctggcgcaatttgcctttgcagagtattcccgttcagctgaaacaaccgggatctgcaaggcatgcaatggctccgggaaggttcagacgactatcattgaacgaaaagtcacatacccgtggggcaaagcgccatactgggcgaaaaggtcccgcgctgttcgcccgtcggactgggagaagtggaccgaagtaacaaccatcgtcaacggtaagtgtgaagcctgtgacggcaaggggaaggtaaacgcccgctgtcgctgcggaggctccggccaggtactggaccgcaaagcgaccaaagagcagggagcgccggtatataaaacctgtgagcgctgttcggggaatggtttcaccagcgtcaagtcagcgaacgcacaccgggcgatccagatgtacatacctgatttacatcagtcctcatggtcacgcaactggaagccgttttatgaagggctggtggatatgcttcacaaaggcgagaggcaggctgctgcagaattcgagaaggctaccagttactga

SEQ ID NO: 190055 - DNA, 570 bp, Klebsiella oxytoca
atgacaaatctacccgacgactattttctggatgctgatgacgagcttgtggatttcctggaaaagcagggcgaagaatccattaaggaaacatgtcaatcaaacaccacgaatattgagaatggatataagttactcaacattcaaattgtagggattggatcttcattcctgcttttgacgcaaaagacaagttgggactatttgacagcaggcttggccgtttttatttttttgtggacgtggagtgctatttacctggttcacgcaggactttccgccaaaaatagggcccttattcactcccctcccgagtgtctgtatacaaaaacatataaaaatattaatgagctaaattatcaatatctgcgcagtaatggttataacggacctaaagaggctttacccgttatgcggaggtataggcttaaaaatttaacggatacagctgcggaattacgcgcattaaactcaatcatcaggacgagccttgatagggcgagaatggctacgatcctcgccccagtaatcgcattaattgcttctgctattactttttgtttctcctga

SEQ ID NO: 190056 - DNA, 765 bp, Klebsiella oxytoca
atggcaacaccggactgggaggccatcgaatcggcataccgggccggagtccttagcctccgtgatataggcgcacaatacggcgttactgaaggggctatcaggaagaaagccaaaaagcttgaatgggtacgcaaaggcggtacgcaggtacgcaaaaatggtacgcaaaaagataaagcgcgtaccaccggaaagagcgtgagtgctggcagtacacaaaaaagcacacaatccaaagccgaaactccggcagaaacgaaaccgattcgcggatcgcgtaccgctcctccatccaacccattcaagccaggcaaccagcaagcgttaaagcatggtggctatgcccgtcgccttcttctgaaagatgaggttatagaagatgccagagccctacagctggaggatgaattattccgtctcagggctaataacctgacggcagctgagaatataggccgctggataaccctgatggatgatgcggaaagcgatgaggcgcgggacaagcttcaggcgctgatagtggcggcagacaaagccatgatgcgcaataccgttcgtattgagtccatcgtcggcacgcttgcaacggttggcaaaatctttgctgatactgactaccgcaaagccgccacagagaaagtatctctggaagctgatcgcctgcgccgtgatgctggtattgatgatggtaacggagaacgcgatctcaatgacttctactctgacatccagaccgacgctgaatccgactctgcgtaa

SEQ ID NO: 190057 - DNA, 1401 bp, Klebsiella oxytoca
atgacttctactctgacatccagaccgacgctgaatccgactctgcgtaacttctggaccacccaggcccgtaacaaggtgcttttcggtggccggtcatcgtcaaaatcatgggatgctgctgggtttgctatattcctgtcgaacaaatacaacctacgtttttgttgcgcccgtcagatccagaacaaaattgaagagtcggtgtataccctgctcaaaattcagatagaccggtttggcttgcggcatcgtttccgcattctgaacaacaaaatcattaaccgggtgaccgggtctgaatttgtgttttatgggctctggcgcaacattgaagagattaagtctctggagggtatcagcgtgctgtggcttgaagaggcccacgcgctgacggagtaccagtggaagatactggagcctaccatccgtaaagagggctcagaatgttggttcatctttaaccctggactggttactgatttcgtgtggcgtaactttgtggtcgacccgccagaagatacgctgatacgcaaaatcaactacgatgaaaacccctttttgtccgacaccatgctgaaggttatcgaagccgctaagcgccgggatccggatgggtttaagcacgtctacgaaggcgtgccagagtcggatgatgatgcggccattatcaagctgtcatggattgaggcggccgttgatgcccacaaagtccttaatttcgagccaagcgggcgcaagcgtattggcttcgacgtcgccgatagcggcgccgataagtgcgctaacgtctatcgccacggctctgtcgtgtactgggcggatgagtggaaggcgaaagaagacgaattgctgaagagctgccagcgtacgtatcaggcagcactggagcgcgatgctgatatcgtctacgactcaatcggcgttggggcatctgctggcgctaaattctcagaaattaacgaggatcgtaagcgcgaaaacatgaatgcttcacgcattaactaccagcgattcaatgctggtgctggcgtgaacgagccggacaatgaatacattggcattccgaataaagactttttcgccaacctaaaagcgcaagcctggtggttggtggccgaccgcttccgtaacaccttcaacgccataaacaatggtgagcagtacccggtagatgagctgataagcatcgactcatcctgcccgctgctggaaaagctcaagctggaacttaccaccccacaccgtgactttgataaaaacggtcgcgtgatggtggagagcaaaaaggacctcgcaaagcgtgatgtgccatcgccgaacgtggccgatgccttcatcatggcgttcgctcctaccgatacggctatggatatctgggaagcgttgggaaacagctaa

SEQ ID NO: 190058 - DNA, 543 bp, Klebsiella oxytoca
atgagatttttccagtcttcaccgctgtatccgccaacttttttaacgtgctcatcccattctctaagcgctttttggtcatcggtttctggggttttgggcttgcttgatttaatgacctttctactgtcactaatgcgatgttttatcagcatgtatccgacaaagcacaccacgcctgtgaaaatcagtgctgtactttcagacaataagccaatgatggcgataagcccgagagtgatagcaaacggatcgtattttttagcaactcttttgtttaattgtcgccgtgccgccgctcgtcgccccgccgtgaccgataacaggcttctattcctgaatagcctacttcgagggaatattcgatatttagccattttaatctttcgtggttcgtttgattgcttgattctaatttgtagttgtcttaagatctatatcaggtgctcaaaacaccttacaagaagcggcattcaccccgtcagcgtgatttttttgtacccagaatttatgctctggtggctccggctacgcgagtgctga

SEQ ID NO: 190059 - DNA, 990 bp, Klebsiella oxytoca
atgaatctaccagcgatagctacgtgcacctatagttctggttctgaggcaattgtaaacctgccaatttcttcaaagatattatcagacaatacattacccgcaggttcagtgttagcagttaaaacggttggcggtaatgttagcagcatgcgaactttttcaaattgtggaactaacgatctttatgctgttattgcctcacctactgcaatagaggtagcgggggtcaatggcattcagggtggaaaagtttatgagaccggaattcctggcataggttatcaaatatctgatgcaatatcgggcacaaattatcgaccaaatcctgcaacaatgggagtggtctccgcatggaatctagttgcacatcctgtgtcacaagtaactgtttggcttataaaaaccaagcaagatattgatactagtgcaaaaaattcttttaaagtgagcgtatcctatatggctggctcggcacaacagatccaatcgaattcgtccagtgctcgtttgttaaaaattaacgttacccttggcccgtttacatatcgcgatacttcttgtaatgtcaccccgcgtaacggcagtactattactttatctaacattgaagccagtcagctcagacctctagctcaaggcgcagcaactggaaagcaaaaagacattcttttagatatcacatgccctgactcctcattgggaactaaatacacgtactggtttaacccaataacggagaactcaccaacaattgatggggtgttattaaataacattcctgaagcggcaggtggtgctaaagatgttggtttcattatcaaaaaagactcatcagcgatcaagttctatgactataaaagctacacaatatcaagtgtttcaaagagtcaatcaataaagcttacagctgattattataagctatctcaaaccataactccgggaggggttcaagcaatttttgaaatcattttacaagaagagtaa

SEQ ID NO: 190060 - DNA, 354 bp, Klebsiella oxytoca
atgaagtatctcgtaactgctgccgcgacgttaagccttgcggatggttctaaatttgaaattactaaaggcgttcatagcggcgctgacttcccggatagcgttaaatctcactgggcttttgaagcttatgcaaagcagattgacgacgctgaggcggagcagcttgaagcagctaacgctgacctcaaagcctatgtcgcctctctggaaagcactaatgcttcgctgttaacgcagattgcagaaaaggataaagaaatcgctgaccttaaggctgctaatgaaaatcctgttaccagcgatgaaaagcaggggaaaggcaatgccaaaaaacagcaggcttccgactaa

SEQ ID NO: 190061 - DNA, 411 bp, Klebsiella oxytoca
atgccaaaaaacagcaggcttccgactaaagaacagttccgcaccgacttccccgaattctccgacaccactcgctatcctgaccctgcagtggctttttatctggggcaggctgatgccatcctcaatcaggacgtgctgggcgaccagttcgtttatctggctgagcttttcgttgcgcactacaccgagctgcgcgggcgggctattgcgacggcggctttcggcggcggagtgaactcggctggtgggggcgtgctgacttccaaatctgtcgataaggtcagcgccagttacgacgtctcgggcattattaatcctgatgcggggttctggaacaataccggctacggccgtgagttcttctggtggtggtcgatgttcggcgccggcggcagacaactgctatga

SEQ ID NO: 190062 - DNA, 756 bp, Klebsiella oxytoca
atggccgtatccgataaaacccgtagtggtgcgctggcggaggttctggcgtctgagcgacagactattaacgaacaatttcgcgttgcgctgcctggcatcatccagtcattcgaccccgaagcggttacggctgttgttcagccggcgatccgctacatcgaacgtgacaacgatggtaacaaaagcacaaaggactatccgttgctggtggacgttcctgtcgtctttcctcgtggtggtggttgcacgctgactttcccggtcaaagaaggtgatgaatgcctggttatctttgctgatcgctgcattgatttctggtggcagagcggcggtattcaggagccggtagacgggcgtatgcacgatctgtctgatgcgttcgctattgttggcccacagtcgcaggcgaagaaaatcagcggactcagcactacagccgcgcagctgcgtaccgatgacggcgccgcatttattgagctggccgctgggcatgatgtcactgttaaaactccgggtaagttgacggccagcgccgatggcggaacggaaataacttcccctgaaattatccttaacggcaacgtgacgatcaacggcaacctgtcgcagggtatgggcgatagcggtggcacagcgacgatgcacggccctgttaccgtaaccaacgacgtgactgccggcggcaagagcctgatgacgcacacgcacggaggcgttgagcatggcaacgacagcacaggagagcccgagtaa

SEQ ID NO: 190063 - DNA, 354 bp, Klebsiella oxytoca
atgcgctaccgacgagaggatgatgacggtgattacaccttcggccagggcgatgatacctggctggtgaactctccggaggccgtcgcgcaggccattaaaacgcgcttcctgctctggtatggtcagtggtttctcgataccacagagggtacgccgtggattcagtccgtactcggaaagcagcgacccgaaacctataacctggctattcgccagcgcattcttgaaacacagggcgtcagctctatcaccgcattcaacactaccgttgacggacgtacacgccgtgtaacgttcacagcaacggtagaaaccatctacggaaccacgacagtaacctcggaggcgtaa

SEQ ID NO: 190064 - DNA, 1200 bp, Klebsiella oxytoca
atgtctttggacctcgacacactcggcttatcggcaacggtaaccgctgaggggataagtgcgcccgattatcaaacggtactggataccatcactggttattttcagcagatttatggtctggatgcttaccttgaaccggacagcaaagacggccagatggtggcgctggtggcactggccatccatgacgccaacaatacggccatttctgtttatcggtcgttctcgccggcgacggctctgggtgacgcactgacgagcaacgtcaaaatcaacggcattacccggcgtgcagcgacgaattcaactgtcgacctgctgctgaccggcaccgtcggtacgaccatcacgaacggctcggtacgcgataccaatagcgtgatctggaatctgccggctacggtggtgatcggtactgacggtaccgtggtcgctacggcaacgtgtgcgaatagcggggcggttgctgcggtagccgggtcagtaaacggcatcaatacgccgacgcgcgggtgggcctcagtaactaacccgctggcggccaccgttggtatcgccgcagagactgacgctgaactacgggtgaggcagtcgcaaagcgtcgcgctggcatctctcacgccgtttgatgctgtggatggtgcgattgccaacgttgaaggcgtgacccgtcacaagctgtttgagaacgatacagagactaccgatgctaacgggctaccggctcactccatttcggcaatcgtcgagggtggggatgcgacggaaatcgcaaacacgatacgaagcactaaagggcagggtgtatcaacgtatggcaccacggcggtgatagtcaccgacaaatacggcaacccctacaccatccgtttctcgcgcccggtcgacgtgccgatctatgtgtcgataacgattcaggctctgaccggttacagctcgcaggtaggagatgaaattaaggccgcggtggcggcgtacatcaattcgctggccattggtgacggcgttctgctgagccgcgtttattccccggctaaccttggcgtcgtcagtggcgggaacgcacgttattacgacattatggagctgctgattggacaagcttcagatgatgtcgccgcggctaatgtggtgcttgcgtacgacgagtcagcatcctgcagcgtggataacattgcactggtggtgacgccatga

SEQ ID NO: 190065 - DNA, 774 bp, Klebsiella oxytoca
atgagcaagtacaccgacctgattaccaattaccacgcaggaaagccgaagttcttcgctcacgtcgatttatcaacgcggccactgattgatgtttctgctgcgacagccggactaatcaccgctttcgacgtggataccgccgtcggcgaccagctggatatcctcggaaagtggatcggcgtatcacgcgcggtagcggcgcctattaccggcgtttttctccagtgggataaagagcgcgtcggctgggatcaggggatctggctggggccctatcagtccactgacgcgctgacgtatctcagtgatgatgtctatcgcgtggtgctgaaagcccggatagggattaacaactggaacggccagaacggcacactgccggatattctggaaaccgctctggaaggcactggtataaatatgatcatcctggataaccaggacatgacgatatcggttttaatcgtcgtggatgatgaatatatcattcccaatattgaccggttgatatttgactcagcaattaaccacggcccgtttattccgcttccggagggctacgagccatcccgctacgatataaacccgatagataaactgcccgctgaatttgtttttgtcatccgcgctggtctgttgacggtgaaagccgccggggtgcggattcgggaaaccattacaccatccaacggatataaattttttggatttgacgtcgataacgattacatcgccggctttgatactggcgcatggggagaaacattctga

SEQ ID NO: 190066 - DNA, 774 bp, Klebsiella oxytoca
atggctgaaaataattttaagccgtttgctgttggtgcaggtgcaaacgtgtctactcaggccgactgggaaagcctggttgcattgtctaccggttttaccgcggggattgcacgatctgaacaggtcaataaggcgttacggcagggtacggtcatggcgagtgtgctgggtcagataattgcagatcaaactgccgaagacgttttggatgacgggaatacggctgcgctaaaaactcagctgctggccgctcttacctcactacaaattgattccgtatatcctgttggagcggtgctcttcttcgctcagaacaaaaatccaaacacgcttttccctggaactacctggaattatatcggggaaaataaaacaattcgcttggggcttcagaacggaactgatgtattaacaactggcggtgctgacacggtaactatcgctaaaagcaatctacctgccgcgactctttcaattacaggtgctgccgctgccacagaccttggaacaaaaagcaccactacaaatggcgcccactcccatacgtgggggcatggtacgcagaaggctggtggctcagataatgaagttggtagcagtactgatgatggatttggcactacatcatccgctggggatcactcgcatacaatcgaactgggttcacacactcataacgttacaggtaataccgaaaacatgggtagtggttccgcattaaatattaccaacgcctacgtaaaactgatgggctggtatcgttctgcctga

SEQ ID NO: 190067 - DNA, 1200 bp, Klebsiella oxytoca
atgaaatatttctttaaaacgcgcctggggaatactcgtttccagctcgcagatggctcagtgctgttcaaggatgtgccgatcggccgtactggagagcaggagtacgacaaaaccgagcgcccagagcttacccctgatgcgcgggggaaaatcatcgtacggcgaacacctgaagaggttttcagtgagcgctcaatggcgtcctttgaaggaatggccgtaacgataggtcatccgcgagatttcaatggcgacattatctttgttgcccctgagaactggcgattgctggcgcacggacacattcagaatgtcaggcgcggggagggcaacaagtccgatcttctgcttgctgatgtcattgtcaaaagccctgaaggactccaggcaattgatgatggcgatgatgaggtgagttgtggctacgacgcagactacgaacaaatctcacccggcctcgcaattcaatctgcgataaccggtaaccatatggccctcgtccctaatgggcgtgctggctttcgttgcaaaataggggatgctatgccaagcacaactaaaaactggtttacccggcttctaaaggcccgaaaaaccaatgacgccgccgaaatggcgaatcttgtcgataacgcgccggaaagcattaccggtgatgacgacgtaagttcttcgattacgccgggtggtgtggtgattaatctctcacctcaaagcccgctgccgggtccagctctaccggggactggtgatgctgaagaagaaattcccgcgtggggtaaagcgctgatcgaggcggtcgctaaactcgccccggcatctgcaacaggtgatgcagacgacgatgacgaagagaaggacgaaaaggaaggggctgttaccggtgatgccgcgtatcgtgccgatctaattcagccaggcattcagttaccgtccactgcaaagcctaccgcgttcaagcgttcagttctggcaactgccgatcaggcgatggtgcgctctatcgtgggtgatgccgatatcagcaaactgaaaaaagcgaccgttgatatggcattcaatgctgtgtctgaagtggcgaaaaaccggaataccgcagccaaaaccgctgacagcttccgctctatcaactccaacaccaccaaatccatcgcggagattaacgctgccgcgaaggaactctgggctaaacgctaa

SEQ ID NO: 190068 - DNA, 942 bp, Klebsiella oxytoca
atgccaatgacatttgaccaggcaacagtcgacagttctggcgcctttctcattcacgagctggagcgcctcgatcaaacgctgaacctgccgctgacctcccagacgtggagccgtgatattcagctgcgtgaagacgtatctatcgctgacgaaatcagctccttcaccaacaccacctttgccgctgccggtacacctaacgccaacggtaaaaactggatcagcccgctggccactgcgattgcaggcgttaatgttgatatcgagaaaaagggcttcccgctggaattatggggtatggagcttggctggaccgttatcgaactgaatgctgcggcacaggtcgggcgtcctatcgatacccagaagtacgatggcatgcagcttaagtggaacatggataccgatgagcaggtttatatcggtgattcggcgaaaggcgctaaaggcctgcttaacttgtctcaggtaacgccgaccaacgctaccaagacgtgggcgacctccaccgccgacgaaatccgcgccagcattaaccaagtactgagcaatgcatgggctcgctccgcttactccaaagttccggaagatttgctgatcccgcctgagcagtattcgttcattgcgagcaccatcgtttccagcgccggtaaccaatctctgctgacctatctggagacgaacactatcgcctaccaccagaacggcaagccgctgaacattcgtccggttaaatggatgaaaggtcgcggtgtgggcggtactgatcgcatggtggcctacaccaacgataagaagtttgttcgcttcccgatggttccgctgcagagcgtcccgatccagtatcgcggcctgtatcagttggtgacctactacggcaagctgggcgcggttgagccggtttacccggaaaccctgaactacatggatggtatttaa

SEQ ID NO: 190069 - DNA, 420 bp, Klebsiella oxytoca
atggcaaaaaacaaaagcctgccgacgcctgagaaattccggaccgactttccacaattcgctgatgaagataaatacccgacaccgatgattcaggccagattgaatctggcggatgtcctcatgagtgaggcgcgatttggtgaggatattttcccctacgtagtagagctgtttgtcgcccattacatggcgttgtacgcggctgatatgcgaagcgcagctattggtgcttcaggtggggtgaatagtggcgttcagacatctaaatcagtggacaaggtctctgtgggctatgacgccagcatgacgcttaacccggatgcaggtttctggaataacacgcgctatggctcagagttttgggaatacctcatgatcttcggtgtcggggctattcagttaggtacgccctcatga

SEQ ID NO: 190070 - DNA, 507 bp, Klebsiella oxytoca
atgaaatccggattaacgattaccacagacaacgctaagtctgttctggagtctctacgccagctttcaggtatggatgtactggtgggtattccggatggcccaaagcgcgaagacgccccgctgacgaacgcagagctaggttatctgcaatcgacaggggcaaccattgaaattgacggtgcagcagtgacgctaccgcccagaccttttctggacatgggtattgaagactctttacccagaacaacggcacacctgaaggccgcagcagaggcaaccatggaaggcaaaacggatgcagccatgcgggaactcgaaagcgccggacagattgcccgtgatgcttctaaagcggtgatcggttctggtgatcgccttacccctctttctgataagacgattgctaaccgcagggcagcaaagccgccgatccctggcgataagccgctatatgctcgtgggttcctgctgcgttcgattacgtatgtcgtgaggaaaaaataa

SEQ ID NO: 190071 - DNA, 552 bp, Klebsiella oxytoca
ttgagtaatgacagcacagagcccggataccttacacccgttggaagcgagccggattacgacgaagagctggaacgacaactaagccgctgggtgaggggtgttacggggatgcctgcaaaaatggtttacccgcgctatacagatcctcagcaaaagatacctcctaatggcgaaacgtggtgcggctttaacttcaccacgctctcacgtccaggtatgcctgcaaatatccaggtcagcgaagagcagagtgagcaatggtcatgggaaagcgtccaggtgttgttctgcttctacggtcctgctggttctgcgatggctacgcgcttccgtgacggaatattcattgagcaaaactcagatacgtttcgacgaatatcaggtttgtcgctggtggatgccggagacatacggaacctcccagaattaatcaataaccagtgggtgcgccggtacgacgtgaccgtgacgctgtcccgcaaaaatacccgcacctacaatgttaaatctgtcgttgatccaaacgtcacgatagttaccggagactga

SEQ ID NO: 190072 - DNA, 441 bp, Klebsiella oxytoca
atgactgcttattcttttcttgatgtctccggcactctttctgggcctacaggctccatagagcttggttctggcgcggctaactctgaagaggggatcgtcgttgcgatgactgaggccaaaaacaccatgaccgtcggtgctgatggtgaggtgatgcacagcctacacggtggtaagagcgggaccattacgttaacgctgcttaagacctcaccggtcaataaaaagctctccctgatgtacaacgcacagagccaatcctcagcgacatgggggaacaacgtcattgttctacgcaataaggccagcggagatatcgtaacagcgcgtagtgtggcattccaaaagcaacctgactggaataacccgaaagtcgccggaacggtagcctgggtgtttgacggtgggaaaattgatgaactgcttggggagttttaa

SEQ ID NO: 190073 - DNA, 480 bp, Klebsiella oxytoca
atggaatgcactattaaaggcgtgaattaccgcgccaataaactcggcgttttcgatcaactgaaggtctcccgcaaactcctgccaattctggcaggactggtatcggattttggaagtatcaaaagccttctccctgctgaaggggttaaaggtctccttaatcagcaggagggaggtgaaaccgttaacctggaccgtcttgaaccgatttttaacacgctgcttccgcgcatcgctgatgagctgtccaagctctccgaagacgacacgaacgccatcattcacccttgcctcgctgtggtagtgcgtcaaaacggtaaagcgtggacgccgatattccggagcggtgagttgatgtttgacgaaatcgatctcttcagcatgctgcagctggtggcgcgggtggtcgctgatagcctgggaaattttttaccagaactccccgacaaagagacgccaacccagccagcggactga

SEQ ID NO: 190074 - DNA, 1917 bp, Klebsiella oxytoca
atgaacgctgagacgattaaagattttctcgtcagcctcggcttcaaggtcgacgaaagcggcgagcggaaatttaatgcggtgctggccggcgttacttccaatgccattaagaccggtcttgctgttgaggctgcagcgctttcagtcatcgccttcactgcaaagatagctcaggcgtccgataagctttactgggcttctcagcgcactggtgcgacggtgcaggggctaaaacaggtcggttatgccatttctcaggttagcggaagtgctgactctgcgatgagctcgctggagagcctggcgcggttcatcagaaccaaccccggcgccgagggcttcctgaacagacttggcgtccagacccgtgacgccagcggtaatatgcgcgatatggcgagcatattcaccggggtagggcagaagcttagcagcatgccgtattaccgggctaaccagtacgccagcatgctgggtattgatgaaaacaccctgatggcgatgcggcgcggtgtcggcgggttctccggcgaatattcctctatggcgaaagcgatcggctttaatgctgatcaggccgcagtaagttctaaccggttcatgacgtcgctccggtcattcggtgaaatggcagggatggcgcgggataaaatcggctctaacctggctggtggcctcgcaggttcactggataaattacgccgtcaaattctcgacaacttcccgaaaattgagcagacgctgaccgcggctatcaagggggtattgtggctgggtgatcttattgcccggttattctcccggctgatggaagggacttctgatctgctggactggtggaaatcactggataagcagacgcgggaactgatcacgctgtttggcgcactaacggtggcgctgcggatccttaacagcacgttctggatgtctcctatagggcttgttactgcgttcgctgccagtatcgctctgctatgggaagactataaaacctggaaagaaggcggcaaaagcctgattgactgggggaaatggaagccggaagtagacgccgctctgaagatggttaaagacctccggcagacagtcgtcgatctggggaaggcactggcaaaacttctgaatattgaccctaaatcctggtctctgaagtgggatttcagcaacttcatcagccagatgggcgaattcagtaagatgctgagcatgattggtgacctgctgagcgctatcaaggatgggcgctggtccgatgctgccagtattggtaagcaactactgaatcagggcaaccataagccggatgctttacccggtgtatctgatagcgccaatggcgcagctgactggattaaggataagtttggttttgaccctcgcagcgtcggacgatttttccgtggtgaaggtaacacgcttgcagaccgcaacaacaaccctggaaatatccgcccggttggtggtaacggcttccgttcttttggctctgcgctggaaggatggcaggcgatgaaaaaccaactgatgcgctatttcaccgggaaaacgacggggcgcatgctgcaaacggtccaggatatcgtgagtacctgggctccagttggcgataacaacgatccacagctttacgccaaacaggtggctggctggatgggcgtttcccctgatgccgtattgaatctgaataaccctaatacgatggcttccctgatgcagtctatggcccgtaaagaggggtacgccaactggcaaagtcctttagcgtatcaggcggcaggcgcatcaattcagcaaaacaacacctataacattcacggcggtaacgctatggaagttggtcaggaagtaggacgccgccagattgatgcaaatgccagggtaatgcgcaaaaaccagagcggggtaggttga

SEQ ID NO: 190075 - DNA, 588 bp, Klebsiella oxytoca
atggatatcctttctacgctgtttcagcagcagtcccggcgaattggtctgattgttcccagcgttgtggtatctgagaagcacagtgacacgcttgaaattactgagcatcccgtcgaaacggggtctcctgtttcagaccatgcctataaacggccctcagaggtcgttatggaggttggatttgctggtggtggttcgctactggatttcgttgatacgtcttctctggggctaacgcttggcctgagccctaaagaaacctatcagcaaatactcgacctgcagaccagccggatccctttcgatgtcgtcacagggaagaggctatacagcaacatgctgataagggcgattgaggtcacaactgaccgtacatcagaaaacgtactgatggcggttttaacgctccgcgaagtgatcatcacccagactcaacagatttcggtagccgataaagccgatatgaaagagggggccaatacgtcagctgttatcaactcaggcacaaaagcagcaaagcctcagaatgaatccttgcttagctctggctggcaggggatcaaatcaattattggaggcggctga

SEQ ID NO: 190076 - DNA, 303 bp, Klebsiella oxytoca
atgcacatatacgaaatccccctcactgctgataaccagcaattcagtaccattctggcaggtgttacgtaccagataagcatcacctggcgtgatccttgctgggttctggatatcgccaatgtcagcggtaaccaggtggtaaaaggtataccccttgtgactggagctgacttgctggctcagtattcctatctaggctttggtttcaaactcgccgtagtttgcgacgatgccaaccaggattatccaacccaaacagatctcggtaccgccagccacctgctggcaataacggagtaa

SEQ ID NO: 190077 - DNA, 1065 bp, Klebsiella oxytoca
atgtctcaaaactggatgcgtcattttgagctacagttgctcgatgagaatggcaaaggaattgaccttggcaattttaaagttactttcacgatagattggttcaacatcagcagcgctacacgaaccgggacgtttaagatttataacctgtctgcggatacagtaaaccggatcaccggtagtgaatttgccactattcgcgtaatcgctggttatgatggtattgccgccgatgttgacgtcagcgacgtaggccgcgttcgtgaggtcgatgcttctcaggtagggcaatctgacggtcgtaactggggattgttgtttacaggcgatattcggtacaccataacgggcaaagataacccggttgatacgttcgtgctaattcaggccgcagataccgatctggctttcacttcttccatcactgtgcagacgctggcggcaggttataccgttgccgatatgaaccgcgctttgatgaaggatttcgaggcgaaaggcgcaacggagggcgttaccccgccaatacctgctaccgtcttcccgcgtggtcgcgtactgtttggtatgacgcgagacctgatggataacgtcgcaaggcaatgcggcgcaacctggcaattcgttgatggtcagcgccagatggtggcaaaaaatgagtatgtgcacgaagctattgtgttgaacagcgccaccgggctaattggcatgcctcaacaaacgatcggcaacggagtgaacgtacgcgctctgattaacccgaacattcgcgttaatggcctgattgagctggatcaggcgtctgtctaccgtaccgcgctggcgaataatgatatcgctatggctggcggtcgcattactgaccaggacaataacgggaacatctcaataaccggaactacctcacagccagccagcattgctacggacggcgtttatattgtgcgcggcattatgtacactggcgatacaaggggccaggcgtggtacatggatatgatgtgtgaagcgcgtggtgcggcagatgtccgttcggcgtcgtctttacagcgggaagggtaa

SEQ ID NO: 190078 - DNA, 756 bp, Klebsiella oxytoca
atgccttcttctaatcaaacccgtagcggctcacttgatgaaactttcgagtcagaacgaaaagttttaaaggagcaaatccgcgtcgcgctacccggcattattcagtcctttgatcctgaatcagtaacggcagttgtgcagccagcgatccgctatgtagagcgtgataacgatggcgctactgaaacacaggattacccgctgcttaccgatgttccagtgattttccctcgtgggggcggctgtacgctgacatttcctgtcacagagggggatgaatgcctggtgatatttggagaccgctgtatcgatttctggtggcaaagcggcggtgtgcaggagccggtagacgacagaatgcacgatttatctgatgcgttctgcattgtcggcccacagtcacaggcaaagaaaatcagtggcatcagtaccagcgcgtctcaattgcgtaccgatgatggcgctgcattcattgagctgtccgcaggtcatgatgtcaccgttaaaacgccggggagattgacagccagtgctgatggcggaacggaaataacctctcctgaaattatccttaacggcaatgtgacgattaacggcaatctgtcgcagggaatgggcgacagcggcggcgcagcgacaatgcacggccctgtaaccgtgaccaacgatgtgaaggcgggcggcaagagcctgatgactcatacgcatggaggggttgagtacggcaacgacagcacaggagagcctgaataa

SEQ ID NO: 190079 - DNA, 354 bp, Klebsiella oxytoca
atgcgctaccgtcgagaagatgatgacggggattatacgtttggtcagggcgatgatacctggctggttaactctccggaggccgtcgcgcaggccattaaaacgcgcttcgtgctctggtacggtgaatggttccttgatacgacagaaggaacaccctggatacaatccgtcctgggtaagcacaagccagaaacctataacctcgccattcgaaaacgcattcttgaaacgcgcggggtgaaatccatcaccgactttaataccaccgttgacagccgcacacggcgtgtaacgttcacagcaacggtggaaaccatctacgggacaacgacagtaacctcggaggcgtaa

SEQ ID NO: 190080 - DNA, 1200 bp, Klebsiella oxytoca
atggccctggacctcgatacactcggcttatcggcaacggtaaccgctgaggggataagtgcgcctgactatcaaaccatcctgtctactgtgacaggatactttcagcagatttacggcagtgatgcttatatcgatccggatagcaaagatggtcagttaatcgcgctgatggcgctggcaatccacgacgctaataacacagctattcaggtatataacagtttctcgccatcaaccggaattggcgttggactgtccagcaacgtcaaaattaacggcattgaacgccgtgaggcgacgaattcgacggttgacctgctactaaccgggactgcagggaccacaatcaccaatggctcagtgaaggatgcgaacggggttgtatggaatcttcctgaaaccgtttctgtcggtattgatggggcgattgttgctaccgctacctgtgcaaaccccggcgctgtcgctgcacttgcaggaacggtgaacaaaatcaacacgcccacgcggggatggtcatcggctaataacccgcaggcggctactgttggtaccgctgtagaaaaagattcagaacttcgcataagacagtcacagagcgtcgccttaccgtctctcacgccgtttgaagctgtagatggcgcaatagcgaatattaatggcgtcacgcgtcacaagctgtatgagaacgaccaggacgtgcctgatgccaatggcctccctccacactcgatagcggccattgttgaaggtggtgatgccacagagattgcaaacacgattcggggcgtgaaagaccagggaacgaccccatacggtagtacggtaatctctgtgccggacaagtacggaagtcctcaccctgtcggattctcgcgaccagttgatgtgcctgtttttgtaaaaatcaccatcagtccactgacggggtacacgtcgcaggtaggtgacgagataaaagcggccgtggctgcttatatcaactcgctggcaattggtgccagtgtcctgctgagccgcatttactctccggcaaacctgggcgtagttagcggcggaaattccagatactacgacattaccgaattgctgattgggacatcttcggcaggagtggctgcgaccaacatcgtaatagctttcgatcactccgcatcctgcagggtagcggacattaatctggaagtgtctgtatga

SEQ ID NO: 190081 - DNA, 906 bp, Klebsiella oxytoca
atgcctaccaatgattttaaagcttttgcaactggaaacagcgcaaacgtaatttctcaggctgattatttagcccttactgcgttagtaagcggattttcatctggtaaagcttcttccgcgcaggtgaataaagctctcaggcaggccactgtaatggccaatgtccttgctcagtttatcgcggattcagcaaatatagatgtgctagatgacggtaatacagcagcaattctttctaaccttaaaaatagtatgcctggtcgcctaatgggtgtgcaagttgtcaccagtagcgcgctgattactaaatcagccggtgcaaaaaaatggcgcatcagagctctgggagcaggtgctggaagttctgctgctccggctaccgctgctgggcaggtttcgataagtaatggtggcggggctggcgcatatgccgagggtatctatgacgtatccgcattatcatcggccacggtgacgattggtagcggcggtgtggggggcacagcaatttcaccaaacggaggggatggtgggacaacatccgtaggtactcttatctcagcgcctggcggtaaggctggattgtcagcaggaccggctaaccctccattccagcctgtggcaaatacaaactcaaatagccccacagggtggaatatcataggtacttctggatctggttctgaggcagccgtagctgtatccaccagttacgctgccggatctcgaggtgcaaatagccagttaggggttggtggttctgtcccggcgattaatacgcctgcaaatactggtggcggttatggttctggtgcatctggctgttctaatggcgtatcacaatctttgaatcctggagcatcaggtcgtgatggggttgttattattgaggagtatgcataa

SEQ ID NO: 190082 - DNA, 240 bp, Klebsiella oxytoca
atgctcagacagtcagatatcaacaacgcttttcgggcgtctatccttcgcaattcaaagggctaccagtacatttacaccggtgatttcatctcctctcttgtgggccgtggcatccatctatcttattccgaggctaaccgctggatagagcgctatcagtcgtgcttcgctgacaaaacgccggagcacacagagaatcggctgtggattctccgcaatatggggagggtgatgtga

SEQ ID NO: 190083 - DNA, 321 bp, Klebsiella oxytoca
atgagcccatttccgtcgccagcggctgattatattgagacggcgatgacagtcacggccgcatgtgatatcagcgcgaactctcaggtagtccagactgaccgaggctatgtcgttttagacttatctttgaaagtggcgcagggaagtgtcattctgatacgtgtcgccggagaacttcaatttgccaaactcatggggcgttcttttatcactgtcgaaggtgaatcgatagaaggggaggccatggatgaggttgaagtgctcggagttgcaacccatgcgattaatgatttgaggcaggatgatagccctgtttga

SEQ ID NO: 190084 - DNA, 729 bp, Klebsiella oxytoca
atgcggaaaatgcagggcctgtccccctccaccatttctcaggatgtctcctatctaagtgtcgttttacagtctgcgcgtccgttatttggtgtcacgactgacttgaatgaactggttgatgcaaaggtatggataagaaatatggggctcgcttcaccttcacagagacgaagccggcggccagaatcatcagaagttgaaaagttatatgacgcactaaaaataaaagcggaaaccgcctacaccggcgccccactccatcagatttttatgttttcaatcctgacgtgcatgcgtataggtgaagtttgccgtattcagtggaatgatgtggatgaagagcaacattccgttattgtaagagaccgcaaggatcccaggaaaaaatcaggaaaccatatgtccgtccccttgcttggtgatgcctggcgaatactggagatgcaacctcatgttgacgatcgggtgtttccattcaacccgaaaagcataactgctatgtatcggcgcgttcgcgatgagctggggattgaggatttgagatatcacgacctacgccgcgagggggcgagtcggctgtttgaggcggggttcagcattgaggaggtagcgcaggtcaccggccatcggtcgctgaatatcctgtggcaggtctacactgagctatttccgaaaacgcttcacgataaatttgacaaattacagaaaaataaaggtattaagtaa

SEQ ID NO: 190085 - DNA, 264 bp, Klebsiella oxytoca
atggccttcttcaccatagagaaaagactgcgtagcgacggcacagcccgctatcgctgtacagtagcggttaagaaaaacggaaagtatgtgtatcgagaaaatcaaaccttctcgaaaaataccctggcgaaatcatggggtgccaaacgtgttgcacacattgaggagcatggcatccccggagagtccggcagcacctcgataagacaatcatcactgttggtgacctgctgtccagatatgagaatcatccaaacataa

SEQ ID NO: 190086 - DNA, 258 bp, Klebsiella oxytoca; identical to SEQ ID NO: 86715

SEQ ID NO: 190087 - DNA, 828 bp, Klebsiella oxytoca; identical to SEQ ID NO: 86713

SEQ ID NO: 190088 - DNA, 996 bp, Klebsiella oxytoca; identical to SEQ ID NO: 86712

SEQ ID NO: 190089 - DNA, 636 bp, Klebsiella oxytoca; identical to SEQ ID NO: 67329

SEQ ID NO: 190090 - DNA, 132 bp, Klebsiella oxytoca
atgaatccgcagctgcaatcctttgcgacctggctggcgggtagcgggcgctggcaacccctacgacttgggcgtttagtcggtaaactcgcgttgcccggcgccagcaatcaggcgctgggaagagattaa

SEQ ID NO: 190091 - DNA, 996 bp, Klebsiella oxytoca; identical to SEQ ID NO: 133371

SEQ ID NO: 190092 - DNA, 2262 bp, Klebsiella oxytoca; identical to SEQ ID NO: 127370

SEQ ID NO: 190093 - DNA, 129 bp, Klebsiella oxytoca
atgaaaagtcacgagtacattgtgatttgcggttttaaccgcagtaaagtcggccgatatattgccattgttgcctcagttatatcgttcgttctgattttactagggaaggtgcgaacaagtccctga

SEQ ID NO: 190094 - DNA, 183 bp, Klebsiella oxytoca; identical to SEQ ID NO: 145261

SEQ ID NO: 190095 - DNA, 270 bp, Klebsiella oxytoca
gtgacaaattataatgcgcaactcaaagcggcctggccgaataactactgtgaaatcggcggggtggatcttctgcaaaactttaaaaaccaccacaatcccggttatgcgcaggatgtaactgatatcggaaacggcataacaccttcctccctgcgttatgacaaccttcatccgtcgcgttatcgtcaggctaatgcattatggtcaggtgttcaggtcaacgcagattttgtagcgcgattcataaaatccaaaggttgggcgtaa

SEQ ID NO: 190096 - DNA, 843 bp, Klebsiella oxytoca
ttgaaaaataaaattttactggtgagtgcgctggtgttggcaatgggaatggacgccgcgcaggcggttgaaaaaagcccaaacgcgaaaacggttgaggttgtcgtcaatgctaacggttttccctttagctttgttgacgataacaacaatattaccggctacgatggcgacctgttaaaggtgctggaccagcggttaacggactatacgtttcattttaatgcggtctctcgcgatgcgatgatcgtcggcctatcgaccggcgcctataccctcgcggcggatcacttttatctcaccaaagagcgggcggaaaaatacgaccactccggcgagccgaccgggatcagcgatttacgcctgattgtacgtaacgatgagaacgatattcataaccttggcgatctcgccagcggtaagaaaaaactggtgccgattcatacctccgacgcccgttatacggtgattgaaaactacaataaaaaacatccaggccaacaaattaacctgcagcccaacggcgagcagtctgccgccgatatctttaaagcggtagcctccggggaatacgatgcggcgatttatcctattggcgcgctgctggcgttaaataaggcgctaaatcttaatctgaaagcttcggattccgtcggcctgtttcctaacgtctatttgtataaaaaaaataccgatccgcagctaatcaaagcgattgacgcgcagctggttgccctgaaaaaggacggcacgctcgctgacctctcgcggaaatggtacgccgaagatgtatatgccctgccgggcgccagcgacgtgaaagtaaataccgactgggaataa

SEQ ID NO: 190097 - DNA, 210 bp, Klebsiella oxytoca
atgaaatccatcaaaactttcgttgcagttgccgcactttctatgatctctttcggtacttttgcgcagagcattagcgccagcgcttccacactggaccgcgcagaagccaaaattgccgctcaggccgcagagcaaggcgcgtcttacaaaatcaccagcgctcagttcaataaccgcgtgcatatgaccgctgagctgacgaaataa

SEQ ID NO: 190098 - DNA, 243 bp, Klebsiella oxytoca
atgagcgaaaattatttaaatgaattttatattaacgaagaaaagcttgtcgaaaagatggggggcaccatcgaaactctcaggggttggcaggatgaaaagatatttccgaagccatcctatgttaccgagacagagacgactataagctcgttttttggtcaacatcggtacaggaaaataacaaaatggtaccctgacggggcttttttattaaaaatcatcatttttcgaaagacttga

SEQ ID NO: 190099 - DNA, 171 bp, Klebsiella oxytoca
atgagcgacatagtgatacgccatgccgaagccaaagattacgacgcaatccgtcagatccatgctcagccggaggtatatcgcaatacgctacaggttcctcatccttccagccatatgtggcacgagcgactaaccgaccgggcgtcaaacagctggtcgccagcatag

SEQ ID NO: 190100 - DNA, 180 bp, Klebsiella oxytoca
atgggtaataattcacttttgtttatgaaactattcaaggaaagtatagcgaagtcagttaagtgttgtatgaaagttgtggccggcacggataatatcagcggcctaaaccataaggtgcagaagagagataagcttacgcggatgacaacctctgcagagggtaaaatcgtaaattaa

SEQ ID NO: 190101 - DNA, 963 bp, Klebsiella oxytoca
atgcgcctcaacctttatgcgaaactgaccgaaatacaatcccgtaatcgcagacaaattgatagcttcctctttaacgcgcctaaccgatataaagtgtacagtatccccaagcgtaatggtggggagagaatcatcgcgcatccatcaagtgagctgaagtcttttcaacatagtctgattgatattttggaatccaatttcttaatccataagagcgccgtagcctataaaaaaggttggggaattaaacataatgcagccttgcattctaataatccatatatcctcaaattagattttacagatttcttcaacagtatcacaccagatctgctcttaatggcatgtgcatggaatgggtacactttatctattgccgaggaaagagtcctaacaaaaagtttattttggaataaagctaaaagccagtcaggtaggctttctttaagtgttggagctcctagttcgccactaatttctaatatcgtaatgtatctctttgacgaaacattcagcagcctttgtgagcaacgcgagattatttattctcgttatgcagatgatcttacattttccactcaacataaaaacattttgtttagtttacctgatgaagttagaacttttctcaataagaactatcaaaatagaataacattaaatgaacgtaagacagtatttacttctcgagcccataatcgccatataacaggaattacactgaccactaaaggcacactatcagtagggcgagagcgtaagagatttatttcctctctaattcataaatataaattaggcttacttgaacccgagatgacctattatcttcaaggcttgttatcatttgccatttacattgaacctgagttcagaacccgaatgtccaagaaatactctcaagaaatcatcttagaaataattaaactgaggaaggaagatggaacctataaaaaataa

SEQ ID NO: 190102 - DNA, 1587 bp, Klebsiella oxytoca
atggaacctataaaaaataaaaaatttatcaaactcatatctaactctcagaagggagatatcaatgcgtcctacgaattatataccaactataatagcggaaaatttttggaaaagaatagtaataaggcaaatgaatatcttgatttggcattaaagcagtttcgacagcaacacattgaattatctcacttatccattcttaattttagaattgtagatcgccttagcttaaacctcaccagcaataaaatccaagtattagttggtaataacggcgcaggtaaaactactgtgttggatgctatatctcaaagccttagttggcttatacaacggatagtacacaaaggtgggaaaggtaaggatattgataagtctgatataacccttgagaacaatgatggttatagctcaattattactgaaattaagctgagaaaaaattacagttcaaaactcgaattgtgcgaagttgaggatggaagtgttgtaaataaaaaaagttattacaatgattttactaaattaggtaatttatacaaactagcttgcgagaaagatgagcaattcgaactaccaatcttagcttactatggtgtaacacgtgcgactgatatacattcaaaagatgtggcggaatttgatgaaacatcttctatagagattcctaatcgtttcgatggttatactaatgctcttgcaggtaaagctgattttaaaggattcttccgctggtataaacgtctcgatgatttagttaagcacgaagataaaaacattactcatgctcatctgtcaatgcttgactctcttgaaaaactagcagaatcggatgaagatcctcgagatttattgaatgatttaattaccaaggctcgtcaaggaggaaaagaaagtagcagtgcaaaaaggacacaacaaataataaatgatgcagtgacaattttcatgggtgatttcagaaacttaagaattgagctaaaaccaacattacatatttcagttgaaaaaaatgatataaaaatcaatgtgcttcaactatctcagggtgaaaaatctttactcgcattggttcttgacatctgtagaagaatgataatacttaaccctttatcagaaaaccctttactttcttccgggatcatcttgattgatgaaatagatctacaccttcatccggaatggcaaagaagtatattgaataagttaagcaatgttttcccaaactgtcaatttattgtatcaacacactcacctcaaattattagtgaggttacatacgataaaatattcatgctcggcagagatgacaataataaattcaactgttcatcacctaagcagtcctatggtctgacatcaaaccaagttctcaatgaaataatgaaaactgggattactgatttagatcgctctccagaagtgcaggaaagaattgataaaatatttttgctaatagctaatggaaaatttgaagaagcgaaatcaaatatttctgaaatggaaatagagctcaatggagagatccctgaatttattggtgctaaactcgatatagaaattcaggggtgggatgaagaatga

SEQ ID NO: 190103 - DNA, 633 bp, Klebsiella oxytoca
atgagaggtataaataaaggaaatgagcctcgttcacttaccatgtatcgtgcagcaggtggagtatacgacgggcatgattttaccccggtaaagcatgcgataaaattatcccttttgaaggagcaggggcatctttgcgcttactgcatgagtcgaattgcaatagataatatgaaagttgaacattgggcatgccaatccgacaacccagcacttcagcttgattattcaaatttgctaggttgttgcaagggagatgaaggggagaaaggggttaatcagacctgcgatagccgtaaagggaatagccccctgaaatttaaccctagttgcccacaggatagaattaacacaataatacagtacggtgggcaaggaaaaatatattcaactgatgcagttttttcggtacaactaaatacagtactcaaccttaacaaggcccggcatgtaggcaatagattgcaagttataaagtggttgcgttcaaaactttcatgcaaatcaggaaggcgtcgtactaaggctgaaattagacgattattagatgaatatatgattgttaatgctcaagggcacttgagagcttattgtggtcttgttgaaaactatctttcacataggctatga

SEQ ID NO: 190104 - DNA, 681 bp, Klebsiella oxytoca
atgaaatcatcttatgaattaaccgaaaaagaatttgagtctttggtacatatagccgaaaagaaatatagatcccgaattgagaattatatacttcgtcgctcacttgcagtggtatatgatttcttggaaaaatataatcgtatattcgctttgtttgttgtcctgagatttgctcagtctcatgctcccggtgaacctgatttgccactgtgctttcagaaagatgacgagaaagctatcacccgtgccttagattccctgaaaagccagttgagagcagaacacaaacgctcaggtagggctggtgagcctgcacgatttgcttatgtctgggccagagaacgtgataccagtgaacatcaccactaccatcttgttttgctgttcgacagagatatctacggctatctgggggattatactaagggtggtgcagataatatgggaacccggatacagaaagcctggtgtagtgcgattgggcttgattattttgactatgcttatctcccgcactttccgaagaaccatagcgcttggttttcccgatctgatgccttggcattacgtcctgattatcataactttctgctgcgattggcatacttggcaaaagagtatagtaaagatttccatgatggtaatcgaaacttcggtacaagccagcatttagtttaa

SEQ ID NO: 190105 - DNA, 1503 bp, Klebsiella oxytoca
atgaaaaatgaaattatagaattgaaattagatttcacgaagtttcctgttttcttacagaccctcataaagtggattcagatgagaaccggggcagctgttgagatgatattatcgacggcattaggggtcatggccttagcttgtcaggacaggtttgatgtcaaacctgagggcagaccagggcatccaatatcactctttatcttggttctcgcaggttcgggaaaagggaaatcgacggtatttagattactaatgcgggcagttactcgcctggagacaaggctggaggaagaatatcgactactgctgatacagtacaaaaaggatatgaccagctggaaaattgaacataaaaatgctgaaaaaaggtacaggcaagtttgtgatctctctcctgagaaccctttacggcttgagaccttggaaatcttaaatgcatgtactggccgtgagccggaaaaacccataagaaagcgttttacaatcagtgatgcaacaagcgaagcactgaggaaagaacttggcctcgagtacccgaacctcgtgattgcttctgatgaagcaggggggcaatttgagagtaatttgtatcgccaaacaccgtggattaattccctctggagcggagatagaattgcagctatcagagcatccagtaagtgttatgccatcgaggatgcccgactgggtatcctggggatgattcagccccaattattcggaaattttatgatgcgacagggtaaaactgcccgactgtcgggatttttgccacgttgccagatgatggatttggatcttaatccatatccctgtgatatcagtagatatccggaaccccacagcgctgtgctggatgattttgaagcgattgtcaccgagcatttactggcaggtatcagtcgtcgggaaaaaaaagaacaacgcccatgtattacatttaccccggatgcgcagctggaatgggataaatgggatagcgcgataaaaaagctgatggagccaggcaatatcctcgaaatctacaatgatgccgctgcaagatttatggaacaggtaacacgaactgcagctgtactgcagatgttcatcacaccaaactcagccatcattacgagggatacgctgctctcggcgatacatatagcaaactggtatcttgatcatttcattgccaaggtggaccaattcagaacgccaacggatgctgaaaaaatagagcgttttatggaaaaacagcttattaaaaacgagtctttcacttttgttcgtcgtgaaattcgtataaatgggcctgtcagagattcagaacggctagaatctgcgcttgaggtgctcagctcacaaggaaaggttcagttacttaaaaaggacaacactaattatgtgaggtttattggctcaaagatgagtccgcaacaactgtgtacccggttaaaccttcccacagaattgtggggaagcgttgtactgagtaagttacctgagcctgaataa

SEQ ID NO: 190106 - DNA, 222 bp, Klebsiella oxytoca
atgtcaacgatatgtgaactaaaaaatcagccactgcgcatcctgcgcatgcctgaactgacgatgatactcggaatatctcgctcgagtatttacgaaaagctgaatcccaaatcccgatattacgatgctgacttccccagacccgtcaggcttggagctgcatccgtgggctggcagtcaacggccatagaagcgtggattacctctcgttccgcttga

SEQ ID NO: 190107 - DNA, 1788 bp, Klebsiella oxytoca
atggagcatgtatttgcgaatctgatgtatgacgcctgtcaggttttggggatattcagggaaggaggtaaagggcgggacatccgtgcacgcggaagctattggctgcatcaggagttttttaatcaacgttacaacgagatagcagaagtaattgataaagagagggttttcagtgaggagacacgacgcggtttcttctataaatacgaaatgttttataaccagcttatgtcatgcccggtgttcagttctctgagcaaggaacaggtttctgaacggtatctccagtttgccctgcattcattcgtggctctggatatgtataaaacgttcaggcctgataataagcacggattttactaccatctccaccattttttattgagtgaacattgctcgattccgggggacaacgagagagatattttttctggggttagagactacttgcgagaccgtattgatgaaattgaaattactaacaaaagaactctccaaccaattcgcgaacgtataagaggcatcaaggatagtagcaatcaaaaaaaatcatggatgcttttcgaaatagatgagtgcattggttattttaagaaaaatttaaaaagtgctgattttgataagatcaaagccaaattaaacaattttaaagcagcgtacatatcacttactattatgttggcatttgaacgaaaaactggtctggtcaaaaacatttctcgttcttaccgatatctccaactggatgaggggcaaactgacaactattatattgcattatgcaactatatctatgaatcggagaatttcgatgaaatgctgcttggtactctgattgatgaatttcaaaaaaaaaccatagcgcctttctctgtaactattggaaaagaagcctggcaggatgttctcgtgatatgggatattgtctttaactctcatggtggtgagatctttacggagttagatttagttgagctgatgaaaaaccttaagcgctctccagatgcggaggtacttaaaccatattttattttttctaaaattctttataacatttgcattgatgatttacaggaagcagagattcttttgaatgagatttcatcacctaagttaccttttggttatctccctgccgcttgcagcatgttaaaattggcacttaaaataaaatcaaaagggaaaaatataaaaaatggagaactaactgcagatgtaaatataatgttatcctgccagagtgtttttaccgatggggttatgaggcatactaagtcggagcgtcctaaactcttactaacggaatatgaaaataacttacaaatcatgcatgtgataaaacaatataacgacctggtacgcaggataagtgtttataacgaattcgatttttatgccgtacacccccaatctatagctggcgttctcgatgaggttgaacatgcattgggaaagattaataaacggcttgatatttccaaagaagacgtcggtagtgagatgctggcagaaataatgataaccgagaaaatactgactgttcgtgaacttagcaaagttctgatcagctacttacccggatctacgctttataactgtatactcaatctggataacatcctaccatacctgaaaattcccggcgagatattgattaatatttccaacttcagagcgcttgctgaaggaagtgagcgtaaacgtaaaataatcgcaaatgcaatcctaattgtaaatatcatgcaggggagaataaaaccgcagaaaacagtagtagaaggatga

SEQ ID NO: 190108 - DNA, 735 bp, Klebsiella oxytoca
atgaataatcaagaacgctactatcaggtatcacgcttcccaagcgattcaacaccaaaggaaattggctttaaaccaacatctgatggtaaagtgccagagaattatttattttttcggttagatgcggaaagaacaattcgaactattaatgcaatttttgaacggaatgaagaaaaacgtttggaattttatgagcaagtatatcaagctgcaagagtttgtttttctgggagagagggagatttttcatccgctgaacaagctttaaatgaaataaaaaagactatactgacttcatcatggcttacagtcaggaacggtataatgactgtttatggattatttgcgttagccgcaattgtattacttggtattgctcagctttgttatcatggaaaactatataatatccctttagtgctaattggtagttgcttaggatcgtggctttttgtgtctatgaagacaagtagcataacatttgatgatatttacgaaagtatcagtcagcatcgtagtttattaataaggcttatttatagctgtgtgttatcgttggttgcaactctatgtttgttagctgggtttattgaaatgaaaattggagagatatcaacagcaatgatatccgataatggatttatagccattgcaactggtgtgttttttgggttaggtgagtcatctttagcatcaaagctttcagataaagtaaaaggtactttttcttaa

SEQ ID NO: 190109 - DNA, 2535 bp, Klebsiella oxytoca
ttgctaaggaaagggtggtttatgaaaagaaataatccgattcaagtaatactcaagtctgggcagtataaatatacacccaaaccgaaagttggaggggggaataccgatttttatgctgatcgggatgatgccttcataaagcacaaacgagacctcctagatgaagtaaatgctgttcgaggccaattgcaccattcggggtttggtcttgggcttgtcaaagttgagctgaaccctcaggctcttgcgaaatcacatcgtccagtagattgtctgttcccgagtgagaaggctcctctcgttggtgcattaggtattggtgagttgctaattcaagttacggataaaaatctcgtacatctatataataaaatagatggtgcagaagagcataccactaaagttttcgatgaaaagcaacaaaagatagtaataaaacctagcgcagctaaaagtgaaacaggtgcaatagatcgtattagcttttatggaaatgaagagaaaatttctttctcgcaggaagagttaaatgcatggcgagaggatagtgatgaagggttttcaggataccaggtcgagtttgttaattttaggacggttgattccaaattcgtcactataacatcacatgatatttttttgatgcgaagtgatttgattgaaaaattaaaaatattaggttctggtgcgtatgttacaaagataagtaagcatcaagaagtccctgaaataataattgtacagttgctgaagccaactaaagggtatgattttaaggtaagttttaacgaaagacttgatgtcaaattttctttggatgatgtggacctttctgctgaaaggcatagattattactttcaatcctgtcgtcaagtcctttagtaaaaagagtatccttactaccaaaaatatctcgagttacatctttacttagttcaattgaaaataaaatcatcctgccaacgaggactgatggaatagattatcctagagtaggagtgatcgatagtggtattcataatccaaaactttctgactggtgtgtagcgaagtcaaatgggtttgatgctgatgactgtgatccaaatcatggttcacaggttgctagtctacttgtaggtggcggagcattaaatcctgaacttggatttattgatgatgacggatgccttctctacgatatttggattcccgtacataatggtaaatccaatactttcactagttactttgctgaccatggcgagttttttgactggcttgatatggaagttggtgatgctgttaggcaaggttttagaattttcaactttagcttaaatttcaaagatttcgtaagagacgactcatacagttttgcagcagctcagattgatagaatttccaaaaaatatgatgttatttttgtcgtctcatcaggtaacttgcgtagacttgatttcagacgctcatggtcggcatctcccccagccctgcatatctcagatgtggacagattgtctcagccaagtgagtcagtcagtgcagttactgtaggagccgttaatcctccggggtgtgaaattaacacgcatggtgcaccaacggtctatacgcgacgtggacctggagtagctatgggtgttaagcctgatgttattcattatggcggttttgcttctaaaacaggcaagagcggattattttgtatggatggtcaagggagtattgtagaagaagcaggtactagcttctcagcccctttagtctcgaaaatactcgccagtttgaatcagaggacagcaggaaagttatctcgtaactctttagtcgcgatgcttattcatcattcaaatttgaccgctcctctcatcgacaaaaatgttgatgtttctctcgcccgtcgttttgcaggattcggcatgccgcttgtttcacgtgatatgctgaatacagatgatagtagtattacgttagtattaacggggagtctaaagagaagtgaggttttggagtttgatttcaactggccccgtagccttacaagcgcagaaagtaaatgctctggcaaggctacattaacaattgcatacgagcctgtgattaatcagaattacggagcagaatattgccgggtgaatgtagatgcagttcttcagcaaaataaatatgataaaaaaaataatgaatggtcttatcggaaaaattgcacctccgtatgggaaaatcgtcttggtaaagaggttaattacgaaaaaagccaaattgaacatgggctgaaatggtggccagtgaagaagtatacttggagttcaactcgaggtgttggtacctctgatcaatggcgtttaaaaatcagctctatcgagaggagtcccggcgaatttccagatgaagagattaattttacggtgttactaacgattgaagacatccaaaacaaaactaatgatcttttcaacgaggttagacaagagcttggctcaattggtatcgaatttgaagatatcaccgttacacaacagctaaatgttaaagcaggtcaatcatga

SEQ ID NO: 190110 - DNA, 1176 bp, Klebsiella oxytoca
gtggaaaactttcgaatcgtatcagcactatgccgacaagttatcaaagatggggcatctccaggggcgttacagcaaatggagcgtctttatgaagcacttaaagaaggtcagcatactgccgaagcaaaaatgctgcgtggccttattaacaaagcagagataatccgagctgttgaaccagcaagagtagaattgtcacgagcatctttcttacggaaacaagagcttagaagtaatgtcaaagttccagttgataaagaaactggagcacctttagcccagcttattctccctgaagatctatatgacgctgaaatgccagtcatgcctgatgaactgtcttctgcagtcggtcaacttgttgaacagtggaacaacttggataagttggcacagtttggcgtaatgccatctttgagttgcctgctctttggggtaccaggaacgggtaagacgatgcttgcgttttatattgcaaaggaactgaatcttcctattgtaatggctaagttagatagtcttgtttcatcgctacttgggaccagtgcaagaaatattaataacttgtttgattttgctgctcaatacgattgcctacttctccttgatgagttcgatgctgtggctaaagcgcgaaatgataaacatgaagtcggtgaaatcaagcgcattgttaatacacttttacagtgtatagatgcgagagctaaaactggaatgacgcttgccataacaaatcacgaagttttacttgatccagcggtctggcgtagattcgagctgcgaattcttgtcccaagaccaaactatctcgcacggatgaagattatagaaaaatatatttcaccattgagtttttcacaagaaaaaataaagttcctgaccgttttaactgaagggttcaatggctctgatattttgttgatgctaaaaagtttcaagagaatggcagcaattagtcaagtggaaaatacatttattgaaatggtacagtcatttgctgtgattcatgcgggaatcgaagagaatgattttattcatttgctgtcaaaacgtgaagatgcagttttgatgagcttacttaacaagaagtatgatttcactcagaaagagatagctcaggtatttgacattacacagtcaaaagtttcgagaaacataaaagagtcctga

SEQ ID NO: 190111 - DNA, 237 bp, Klebsiella oxytoca
atgtttgaaaatagaacaaaatgcacacaggtgggctttcttgtgggtggcatcaagatgctcattgctaatgaagtattcgattttttcaaatttatcgcaaaaaaatgtgttttgatgcattttaatggattcaggtattggttttttcattttttattcaatacaatgaaggtgtggttgcatctgtcagtatctatcactataatctggttaactgaaatactgtataaataa

SEQ ID NO: 190112 - DNA, 231 bp, Klebsiella oxytoca; identical to SEQ ID NO: 77125

SEQ ID NO: 190113 - DNA, 3318 bp, Klebsiella oxytoca
atgacgagtccactgtgcgcgttgctttcagactctaggctatatgacttgttcggagatgatcaaaatctcactgtaagccaaatctgggtattggagatcgagtgggaagattcaagtgaactacgttttctgtatggtcggtcactattaggaaactaccaatcaaacagttggagcgggagcgctagttccaaaatgcgacttactgagaattgctcagtcagaactcacgccttgacacttcatacctctaccgagagattgagaactttccttgagcacttcatctgcggagagacgtttcagaaatcttgccaactctccgggctgaatatcagcgacaaattggctaaggcgataggaacaagcacattttgtgtgaatcccatcactcgccctgtaatgcatttgccgacacgcgattattatagatttcaaactaatcggctaagcccaaccagctattccagtgttgacagcggcgcaatttccctgagagaaaaatcaaatttattcaatgtgttggaaggatatgacacgaagattgccaaatttgcatgccaagtattgaatgcagatactggcttagatttctccacaattgactcttggagaattggagactttgagttcatctgtgctcctgggctcaatgctacagagcgcagcaagtatgacttatccttgaaggggcagcagtcatctctgactctattcgaaccactgacccgagaaccttccgatctgttggttattgtcaaggcgtacagtgacggtagcattcagtcctcttatatcgccaacctcagcaagaacgcttcataccctctccatcacacatttgaactcaaagtgtttcaggaccaagctagcacagcttatacaatggagatttatgcgcttggaataaatggtgagcaatcattcctcctgcttcaaaccggcgcagatttcatgcgcgaaatgaatttcaacatgcagctagtcgaacccattagggcaaactaccaattcgaatggttggcaaaaaaagtaccgaaaagggaaaaggccagactggagacagcagaacagattgggcgtgctattagtagtccctctcggtcaaaaatgggcgggtatgcggatgatccatgggttccactcaaccggctcatccataacaaaatcaaacagttatgcccaaaaaaatccgacgggcggttctttcctactctcaacgacagcagcggtatgagccgtctcgagttgaaagattggctcaaggacattttcgaacggcaccacgacgcgaaaattgcttggatcgacccatatatggaggatgtagggattgagcttctcaaccgactgggcactgctactgctgattaccttgtcatcacgacggaaaaaatgtcgaatgatgacagcataaaagaggctggtcagcccaaccgcgttgaaaatcttctagcgagatgttcaggttggaataatggctactttggaagtgtttgcctcaaaatactcgcagtaccagagaacaaactccacgaccgcatgatcctcattcgctcagccaatggtcagccgttagctgggtaccatctttccaattcagttcagagggccagcgagaaccatcctctattggcaacccctattcctctggacgtgattccgcatgtatttgagtacgttgatcagattatccaaagcacactctatggagagggtaatccccaccttcctgcaagaataattttcaattctgccgacattagcccatgtgaggaggtgaagcctaaagggctaaatcacaattcctcatttgctgagctaccatgcgctggtagcgtgctagcctggtggcttgatgatgagcagctttcaaacttgtcaggagctgtactcatggagcagatgagtgccaaaggatacattaaagatgggaaacttgacgaagatcgctttgacgctcttcccggcaaattttggactgaagggttgccaatagcagatttctactcagcttgggatgtccttggttatgtcatagccaactccccggctagtcgctatgcaggcagcctctacaataaggagcaatcagtattatccgaacctgtgaaggttgcactgttggagcacatctctccctccagagcaaaagcactgcaaccacgtctcacaaaaaaacaacttgacattgaacactaccgttcacaggaacttacagcactactgctttcaaaaaatgatccgttcagtacattcacatattcacccgtagatacctcatggagcgactactactccatacaactcctatggtcacaagctccaaagcagttggtatcttggttaaacacaatattctctgaaccaatcaagtctcctcgtacccacgcgcttgtggttgaagctcttaagcatatttgtttgtgcgtcagctttgacaagcatcatgagcaaattgatgcgcttttgcagagcaatgtgagtgtaataatctggatagggcttcatgctcttgaaaacgcccttaataggggagtctggggaattgaagccctttcaaaaatcgaccatatcgaatcagccactgttcgacgtaccattttgtgctggctgatcaacgaagccaactaccttaattcggagattaaaccacaactcatcgcttgtttaatccaatcgttaaaggctcctctcgcagacgatgagctcaaggatattcttcaacctgttcggggtcgcctcggcaggctacaccatttcacgccttggattcttgaatccatgctcgtacccatgctggaaaaaagaacaatcgacatctctcaagttgcccatcagtggttgacagagctgactacccaatggcgtacagcactcaagaatgagagtctctattttactctagatgcggacggtgcgttcaccgatgagctggctattgcgaccaaatacctaagctcagcagatcgagtggagattgtcagagaatttaggaaagtctttgatgcactggctcggaccatcaggcggccgatgagcgcgcagataagctggaaatcctacaacaatgcgcaccaagtaaacctctggctctatgcgctcgctcgtaggattacaacattggtgcctgatgagttaccactgttgaatgaacttctacttgaaagcgaagaaattatagaacgaatcaacccctcaactcggcgctggagttcaagcaaagacctgctcacttatttaaatggcgatcccgaacagattggatcacatggtctacatcaaattattcagagagcaatcgagccacggtga

SEQ ID NO: 190114 - DNA, 348 bp, Klebsiella oxytoca
atgaaaacgctctcaagacactcagagctggcgaagacgttcgcgtacgccctgtaccagtggctggcactgacgtactatccagagggtggctgcgctgaagcacataacaacatcgctgaaaatgccctgcggacggtcagtctgggtcgcaagaacttcatgttcttcggctccgaccacggcggtgagcacggagcgctgttgtacagcctgatcggtacatgcaaattgaacggcgtggatccagagaggtacccccgtcatgtgctcaacgtcatagctgactggccagtcaatcaggtccacgagctgttaccatggcgcgtaagcctgccagctgaataa

SEQ ID NO: 190115 - DNA, 1422 bp, Klebsiella oxytoca
atggctatttttcatctggattttaaaattgtgaaacgaagtgagggcagatcttccgttgcgaaggctgcttatcatgctcgctgcagaatcacagatgaaagaacaggtgatacctatgattatagccgccgtactgatttatacggacatttcatattagcacctgttaatgctccagaacatattgttaaagattctacagcattgtggaatgaagttgaaagggtcgagcgccagcaaaatggtcaaacagcccgttatttcgatgtcgccattcctgccgagttaaataatgatgaaaagaaaaaacttgtccttgagtattgtcagaaaaatttcgttgataaaggtatgattgctgatatcgctttccatgatctcgatagcgacaacccacatgctcacgttatgttgacgttaaaaaccattggcccggaagggtttggtaaaaaagaaagaagctggaatgacagaaaaatgtctgtgttgtggcgtgaatcatgggcatctatggcaaacagctaccttgctgctgctggttcgtcagaacgtattgatcatcgttcccttcaggcccagcatgaagaggcattagaaaaagcagcggttgctctggataatgaagaaaaagcgctatggcttgctaaagccgccgaaacaaaccgccctgcaatgaaacgtatccacagtgccaaatggcgtaataaggcagctcaggaacaaagagctgcagaacaagctgttcgttatgctgccaaacaagaagcggttgaagtctataagacattcagggaacttgatcttgaaatcgttgttgatgtcagaagctttactgcctccgttcttgctgaaccagaagaaatcatgttacctgaaatacaacctcgaacagagttgtctgaaactctctctagttatggtcagaagccggtattggttgcccctgcgcctcgtacccgcactaaattgaaaactccatcctcttcggcaactgctggagcgattaaacgcgctcctgttaagagtaaaaggaagcagattaaaccgcgtcaggataatatctttaagcgtttcaccgctctggtagtggatttcttcaaagaaaaatttgtgtgtgccaagaagaaacccgataccactgacattgatcatgataaacgtgtagcagaaaactacgtcttcgatgaggtgttaggtcgtcatgtatctcgtgctgaatatgagaaacgcgctcacttcaattgtgagggctacaaaccgacatctgatgagataactcgtttcccaagtcgtcctgagcaaggtcagactgaacgtaatcactgcatggatcccactccatctattccacccgaacaggcaagaaggagtcgctatccaaggttgaggccaccgagttttcataataataacgagtaa

SEQ ID NO: 190116 - DNA, 588 bp, Klebsiella oxytoca
atgaactatgactatgataaattagaaagaaaaaaagatgagataatcagtattgttcatgaactatttactgagaatgataagacagctatttccctagtagattcattctgtagattaacaccgcctgaaaaagaaaagtttgtaatggagtatattacagtcaactcgtcaggtcgacgtggcggaaaatcaagaaaattgggtaattttgttcttaattggagaaaattattcaatgatcttcccgatttagtgttaacagcggcaggtgttgcagctgaaccaaaattagtattttttgcggcattaagcatttggaataagatttggagtcattcgtctatagaactcacgccagaacatgctactgttttgttcgccttatggcaaggaagagatgagtctaataaaataaagcgagatgatgcgtttgcaaagagtggcataaaattcaatttttacggaatgcaagagttagtggatatgtcattcgacgacattattgatgacctaattaaaatgcgatgtatagaagttaatgataatattatatggctgcgtgaatgggtccggggaacatattga

SEQ ID NO: 190117 - DNA, 1098 bp, Klebsiella oxytoca
atggccacagcattctcttccgcactttattatccacacattgatataaaaaatgagcgttggctacggagtgctattttattttgggattcaatacgaacaattgttccaatctctcacagagagccttatgcaaatgattttactcgttctcttagtgatgaaggaatactactgcctgttcgtgtctctccagacatggaggaaatagaagacgtagcagagaaagctctcaactttatcacggatcctgcttcggccaatgttatctacgatattgataattccccaagaaccctgattcataatgacaagataccaagagaactacttcgattagcaagaatacaccctgaaaaatttgcatatagtattatgaatgaccttcagcaagggcttggcgatgatggatggcttcacgttgaacccgtctttgccaaattttatatgacgttgcttgcaactcagttatcagaacgattaggcctaagcttaataactgaatcttcttctgcagatcaactagcgatctcggtacgcaaaggtaaaccaaccagtaatcccaccagacagaggggacgccacttcgatgcatctggtccaagacgagtattaccacaagaacttactcaaagcttgctagttgacctcatgcttcaaggtatatctctgcctgaaaatttaacagttcaggagataataaagtttaaaaatgaccatatagaagaattagctatttttcgtcgtgaagttgctagtcttacctctgatattccacatgacttaccgatagaagcattgcggcaagcggtatcagatcaatatcaatctaatgtcttacctgcgatgaatagcctcaaacaatcgttaaaagcccaatgttggggtgatggactcagtggatttctgaaagtgtcttgcttcactgcagcgccaacttctgcagcagttcttgctggaatcccaagcacaatagcattagtagctggagccgggatatcattaacagcaactgctattcagtcaattcagcagcgaagaaaaatcaaagccgagagtccatattcgtatctattatcaattgatagtcgttggtaa

SEQ ID NO: 190118 - DNA, 660 bp, Klebsiella oxytoca
atgattcagttaataatagtggttttcttggggcttctgttaaacataccatcacttacaccggtgctttttctcaaaaagacacagaagagcgtgaaggtatcgatggcgatcagactttttctgcttaacgccttcttggtgctgtcattagtgacggtatcgcagaacaccacgcaaaaatacggactgtttccaatatggctggtgttagctgcaatagtgctgtttgcggtcacgctagtaccaacggtaaaattcgtgcgtaagcatttgactgttgggaaaagtcgggctgttataatctcatcattcctgattgtctatgctgtcaggtttcatggcgtgttttcagagttgaatggaagtggatatacaattaacggttataatacaatatggacactcttcttcctgtttgcgtgtcttctggcttatctcggttgtgctggacgtaaaacgtattctggttcttctgaatcgtcatctgcaccacaatcagattattttaagccgaacaaagaatatgaaacacaatctcaaattgactacgatattgcggtaaaggggcggagtgttctgtcagatcccaatctgagtattgttgagcagcagcgttatcgagacagtattgatagaaataatgaaaatggaatttaa

SEQ ID NO: 190119 - DNA, 1269 bp, Klebsiella oxytoca
atgcgtaagttaatagtactggtcctaggattttctgttgttctgactggttgtgataaggctgtagaaaataaaaatatttctgaacttacaagtgaagaagcagatagtatttgcaaaagaccagatgttattacacagatagaaaatagcttcagaaaggggagtgttgaattcttaaatcgtaatccattaaactactccccgtttattgacagatataactctgtagaacaagtatctgacaatagaagagcgtcaaggattgatgttagctataaatatagtgcggatgatttttcaaaaggatacggaactaccgataaagttaaagtaagtaatgcaacgctaactggcacaggtaaagacgatttatcatgtagtgctaaaatagagttcacatctgataaaatctatgggatttcattttcagataatttcacttacaatataaaaaaagaaaacgataaatttgttactgacattaaactttctcttgaaggactaacacgtagtaaaagtgaacctacagtatctcaaaaggaatggcgtgaaaagtatgaagagagacttaatgcagatgatgatgtgttgaggaatattcctgattctgattataaagtcatctcacagaatgatatatattacatttactttgcgcaagcaccacgtaagttcagtgatgatgaattgatgggattctttagctctaagtggaacaatacgactgatgtttttgccaaagaagatattaaaaaagaagaacttcctaaaataaaagaaaaaattgagcaatataaaaatctgaaaaacatattgtcttactcaacttttaatttgagtcagcaattggccgataaaaatgctctcaaaacagaaagtggtgaaaaatctatagaaacttctactagttggttttctacacgtgatagctatgacatgaccaagaagggttatagctatgaagcgccttcatgtaatatgaacggcggtttaacaatcgaacgacgtggaatccgcttcactacagatgattctttacgtgggtgtgtagttggcgtaccggatgacaaagctcgcgaagtatctgctaagcttgctgccataggtagacaaggaggtaatgctggcttctttgttaaatcttatcttcatatctctaaggtcgatggtagtgataataccattcatacgactgtgattaaggatgaagttaacgtttacgatcctgaaaccaatgagcttattcttgataccgtagttagatag

SEQ ID NO: 190120 - DNA, 381 bp, Klebsiella oxytoca
atggaaatcttcgaaaaagatcaaaaaatcgcttttgttgattcgttcagcaatgctgctttgtcttacgaatacgaacaggcgggcttcaccattaatttaatgcaacgctcggttcttctctttaaacataatataaagaaaaacgtaatgtcttcgacattgcgtaaaaatatgtacagcacatttatttatccatatagcaacatcagggaaatcaactactcactgcccgattacggatctaatgatgccgagatctgtattatgactgatgatgtattaaatccagtttggacgttcagggttccatctcatgcacattatatttgcgagcaatgggtggaagtatttaataaccatattttctttggcccataa

SEQ ID NO: 190121 - DNA, 471 bp, Klebsiella oxytoca
atgtctggaaaaaatccattttggaattatgattacaatgcggcacaacgtaatagagaaattgtagattcttaccaacaagcaaatgaggcgaggctggattctcagcaggctcagtttgaagcatctatggctaatgacagggttagtagaatacagatgcagttgaataacacaatcaatagccataagaaggttgtcgctgattacgagcaacgtctggaagggttcaggcttaacttctttaaaataacgatgcagtcgaatattttctatagaacgctaaacagattgcaagaagaatggcctgaccaaaaagaccatattcttgatgaaattcaacggcagcgagaccactgcaatcatccagaatatctcgaaaaatggtggaatgccgtatctaaaaacaatataggtgaaagtgttttggcgtttccttatccgcaacgcgagctaaaaaagaaaccataa

SEQ ID NO: 190122 - DNA, 279 bp, Klebsiella oxytoca
atgacaactattttgcatccaaattacgttgttgtatcaaagctaatatctaagtttgacattacacatgacagtagagatgaaaatatcaacatcttgatttcagtcatttatgacttggataacggcattacaatcgaacactacattaataatcaggaagaggccgagaaaaaatgcattgagaaaaatagattttcaaggaagtttaaaaatcgcattgataatatatcatctgaagaaacccgcccagctaaaaataatcccaaacccaaataa

SEQ ID NO: 190123 - DNA, 1635 bp, Klebsiella oxytoca
atgagcctgtttgataaagaagaaagactattgcttcctgaatggacgaagtcaatcgactccctaaagtctcctgaaattaaaccttttaatggtggagatttttcctcattgtctgataatacagatgacttatatgaaaattttgttcttaataaaaatttaggctcagcaatagagttgttaaatgttgcttatatagaaaaccgagaagcagaatcgagagttgcggcaagatttattgtgcagggatttgatttaccaccacaaatcctacaatttgctaaattcattttaagaggtggtaagcatgatagtgaaccaactgaaactcaaaaaccaatcatctcaatattaagaggatggttgcataataatcccaaagatgcattagcatggcttgatttagcaagggcttacgtatcaattggtaagctggattcagctgagaaagctgttacagtcggtacaaatctattacctaatcatcgttggatcattagagttgcttcaagattttatgttaataataatcaaagtgataaagcccattatctattgtctaagcatccaatgttaaaagaagatccatggttactatcagccgagatcgcggtggcggaaagttataatcgccctttgaaaatggtatctcaagcgagaaaacttattgagtctgaaagattttctcctttgcatcttacggaattggagagttcaatagcgacaatagaattgtctaatggagcattaaagaaagcaaaaaaattatatgtaagttcattacgaaaacctaatgacaattccttagcacaagcaaagtgggcagaaaggaatgcgaatctttcgaatttagttaatagtgaacttttgtttagtcaacaaggtgcatacgaagcgaaaatgtgggagaaatactataattatgatctttcttctgctatagattttggaattaaatggtttgaagatgagtcctattctgttcaacctgcaataatggttacctatttgtcgtcagttttagacaactatgcattatgctatgaatatgctgtcaaaggtttgggaatagacaagcacgatgaaacgttaattttgaacaaactattttctgagatatgtctcttggatagagtggagcaatgtattaactgggaaagggtaaaagaatgggagggggctctcaaaagtcttgctgctgttgataacgagaatacggctgcccatgctaatgctaacttgggccttttgcattataaaacaaacagatttgaattaggtaaagagtattatgcaattgcctgtgatcttttctcaaaaagtaaaaatgcgtcaggcattgtagcaaatatgaatcactatcgtgagtgcgttcttgctgatgtttcatggaaagacgaagtgttctatgaaatggaacaggcttataaaaacagtctagccagaaaagaacctgctttagtttattatttcataaaaatgaatatgttaaaagaaaatccactgaaatgggatgaaataaaatcgacgagtttagatttaagcaatcttattgcgaaagaagaaaaaaaagataagattgtaactttcgatttcgatcctaaatcaccgaagataataatatccaaataa

SEQ ID NO: 190124 - DNA, 1080 bp, Klebsiella oxytoca
atgactaccacaactccagctaataaaatggtcggcttagaattaaacaacgaatggcttgttgaaagaattataccagtaggaacaaaaacgggcatcggaacgggggggaacttttcggtgtcttatgaagtgaaaaataaaaatacaggaaagatggcatttctcaaagcctttgattttgaaaagacaatgcaggaagctttgtctaaaggccacgattttatgaagataatgtcagtgcttacgtctgattatcagtttgaggataaactaaatgaaatttgcattgaaaaaagaatgcgaaatgttattaaagttcttaacaaaggacaatcggtaattgatggtagaatagtaccatatttaattatggagctggccgaatccggagatataaggatgtatgtcgaaagaacaaaggatgtcagccttgcaatgaaattaggatacctgaaagatgttacaatgggtattagacaattacactctgcaaatatttcacatcaagatttgaaaccttcaaatgtaatggtgttcgattctttaaatgctaaagttggtgatttaggcagagcaagtttacaaggtgtaccacatcgttttgataactttccgattactggagatcaaaattatgcgcctcctgaacaactctatgggctgatagcccctgaatggataaatagaaggcagcgttgtgatatttatcagttaggttcaatagttgcttttttatttactggcagaaccgttaatagtttgatgagagagtttgttcctacagaaatagcaccgccacgttgggggggaagtgggaatcaatacgatctcgctttaccttatttagagaaggctttttttcaaagcttagaggtatttgatggggttcatccagattggttaggtttaggtttgaaaaacatagtgttgcagtgtagtcatccaagttatgaaaacagaggaatgcttaaaggaggcgggatagcaaagatagaattaggtttggatcgacttataactcaattcgaccttttaattcaaaaattgaaggtttttggtctcagcaataaaatataa

SEQ ID NO: 190125 - DNA, 882 bp, Klebsiella oxytoca
atgacgctttatacgctggaaaacggaacgctgcggcttgagattgcagatcagggcggcgctatcgaaggactatggtggcggaaccagggggaaacggttcccgtgctgcgcccgggacggaaaagtggaattgcggtggaatctgcttgtttcccgctcgtgccgtttggtaaccgggtctgtgggaatcggttttgttcgccgacgggagagtatcagttacggcctaacgttgagtgggatagccattaccttcacggcgatggctggctgaatgcctggcgctgccttgagcaatccccgacgcagcttaaattagagtatatccatccgcagggcgtttatcgctatacggcgcagcagttatttactctgaacgagaacggtattgaggtagagctggttgtcactaatgatggcgattcgttgccgtttggccttggctggcacccctatttcccgttgtcgccagaaacccgcgtgcaggcgcataccaacggctactggcttgaaaaagagcactggctaaccggtgagcatcaggaaagcttgccgtcggagctggatttcaatcagccatccccgctgcctacgcactgggtgaacaatggtttttccggctgggatggcgctgtggcaatccagcagccggatttggggtatcagctttcgatgaccaccgagccgcctgcgccatgctatttcgtctttgtttccgacccggcgtttgataaggggtatgcgtttgatttcttctgttttgaacccatgagccatgcgcctgacgatcatcatcgtccggactttggtcagttgaatacgctgttatgcggtgagagcatgcggcaaaaaatgacgctgaaaattcattcctgttaa

SEQ ID NO: 190126 - DNA, 1062 bp, Klebsiella oxytoca
atgaaaacaatgctggctgcttttttacccggaaactccacagttgagcttagagaagtccctgtgccgaccccaggaattaaccaagtcctgattaaaatgaaatcctcaggaatttgcggtagcgatgtgcactatatttatcatcagcaccgtggtaccgctgcggcaccggataagcccctgtatcaggggtttattaatggccatgagccgtgtgggcaaattattgaaacaggcgcaggatgccgccactttaaagcgggcgatcgggtgttggtttaccatatttccggctgcgggttctgctctaactgccgccgcggcttccctatttcctgtaccggggagggcaaagcggcctacggctggcagcgcgatggcggtcatgcggaatatttattagcggaagaaaaagacttgattcatcttccggatgccctgagctacgaagatggggcgtttattagctgcggcgttgggactgcctatgagggcattttgcgcggcgaagtatccggtagcgacaacgttctggtggttggtctggggccggtcggcatgatggctatgatgctggcgaagggacgtggcgcgaagcgcgttatcggcgtcgatatgcttccggatcgcctggcgacggcaaagcagcttggcgtgatggacaacggattcctggcgacgacggaaaaccttccggcgctgattgccgaactgacgcacggtggtgcagacgttgcgctcgattgttctggtaatgctgccggacgcctgctggcgctacaatcgaccgcggactgggggcgggtggtctatatcggtgaaaccgggaaagttgaatttgaggtgagcgccgacctgatgcatcaccagcggcgtattatcggctcctgggtgaccagcctgttccatatggaaaaatgcgcccgcgatctgaccgactggaagctttggccacatagcgccattacgcatcgtttttctcttgagcaggcgggagacgcttatgcgctgatggcgagcggtaagtgcggcaaagtggtgattaattttcccgattaa

SEQ ID NO: 190127 - DNA, 999 bp, Klebsiella oxytoca
atgtccgcctcatcattaacgctgccgcaaggcaaaagagctacaccgaagcagtttatcagccgtcatattaatgaaattggcctgctggtggtcattactattttgtatctggttttttcatttaacgcgccgggatttatttctttaagcaatcaaatgaacgtgctgcgcgatgccgcaacgatcgggattgccgcatgggcgatgacgctgattattatttccggcgagatagatgtcagcgtcggacctatggtggcgtttatctccgtctgtctggcttacctgctgcagtttcaagtaccgcttagcgtagcctgcctgctggttttattacttggagccgctcttgggacgctagccggagtacttcggggagtattcagcgttcccagttttgttgccactttaggtttgtggagcgcattacgtggtatgggattgtttatgaccaacgcgcttccggtacctattgatgaaagtgagattctggactggctgggtgggcagttttttggtattcccgtatcggcattaattatgctgattctgttcgccatctttgtttttatcagccgtaagaccgcgtttggccgttccgtttttgctaccggtggtaatgctgcagcggcccaactttgcgggattaacgtcaaacgcgtacggattttgatttttacgctttccggcttgctggccgcgatcacgggaattcttttggctgccagactggggtcaggtaatgcgggggcggcaaatggtctggagtttgacgttattgccgcagtggtggttggaggtaccgcgctgtcgggcggccgcggttcgctgtttggcaccttattaggggtgctggtgataacccttattggcaatggactggtgctgctggggattaattcattcttccagcaggttgttcgcggattaattattgtggtggcggtgctggcgaatattttgctgacccaacgcaataataaaatcaaacattaa

SEQ ID NO: 190128 - DNA, 1515 bp, Klebsiella oxytoca
atgacggtaatagaaaatggttcggcggcggtcgcgaaaatcatcgggggcaataaacgttatcccggcgtcgttgcgcttgataacgtcgattttactctctcaaagggggaggttcgcgcgctattgggaaaaaatggcgcgggaaagtcgacgcttattcgcatgctaaccggcagtgaaagtcctgatagcggcgaaatctggttgggaggaattcgtcttgagggtaacgatgccacgctgacgcgacgtgcggcggagctgggggtcagagctgtataccaggagttgagcctggtggaaggattaacggtggcggagaatctctgtctgggagagtggccgcggcgtagcggcatgattgaccagtctcttatggcccatcatgccactgaagcactggccgctctcggggtggacgttccgcctgatgccctggtcgatacgctcagtccggcacaaaagcaactagtggagattgcccgcgtgatgaaaggccagccgcaggtggtcattcttgatgaaccgaccagctcgctggcgaatgcggaagttgagctggtgatcaacgcggtaaaaaggatgtcggcgctgggcattgcggtgatttatgttagccatcgtatggaagaaatccgccgaattgcatcctgcgcgaccatcatgcgcgacggtcaggtggcgggggacgtcactctggatagtacgacaacccaggaaatcgtctcgctgatgttgggcaaagagcatgttgatctcccgctggtgaagtctgataccttgcttacgatgccggttctgcatgtcactcagttatgccatccgcctaagttgcacaatattagctttacgttacaccgcggcgaagtgttgggcattgccgggctgctggggtctggacgtagcgagttacttaaggcgatcgttggattagaacctttctccagcggggaaattacgctcaatggcgtaagaattatgcggccggaatacgctaccatgctgaaaagcggcgtaggttataccccggaaaaccgtaaggaggcggggattattccactactgggtgtggatgaaaatacggtgatgactaaccggcataaggtgagtcaacgcggcgtcctgaactggcaacggatcgaggaattgacggcggcagtgatgcgccgaatgacggttaaagcggcaactacgcaaacggcaattgggaccttatcgggtggcaatcagcaaaaggtggtgattgggcgctgggtttacgccggtagcgaaatattacttcttgatgaaccgacgcgtggagtcgatatcgaagccaagcagcagatatatcgcattgtgcgggagctggctgctgaaggtaaaagtatcatattcatttccagcgaaatagaagagctgccgttagtgtgcgatcgtattttgctactgcaaaacggcgagtttagccgcgagcttttagcccctgtcaacgtcgatgaattaatgtcggcaattttatccacgcattag

SEQ ID NO: 190129 - DNA, 984 bp, Klebsiella oxytoca
atgcctaaaaataaagcagtctcatttttttcatgtttactgttaacgttgttgagtatttcattcccgggttttagtgcagagaaagaggttaccgtcggtgctatctatcttgatactcagggttattatgccggtgttcgtcagggcgtgcaggatgcagccaaagagagccaggcaaaaattcagttgattgaaaccaacgctcagggagacatttctaaagagagttcgtttattgatacgctggttgcgcgtaacgttgatgccatcattctttctgccgtttcagaaaatggcagcagtcgcgcggttcgccgggccagtgatgcgggtattccggttatttgttacaacacctgtattaatgagaaaggcgtggataagtatgtatctgcttatctggttggcgatccgcttgaatttggtaaaaagctgggtgacgctgccgccgattattttattgccaacaatatcggcgcgccaaaaattgcggtcattaactgtgaagcgttcgaagtatgcgttcagcggcgaaaaggctttgaagctgcgctaaaagctcgcgttccgggtatgcagattgtcgctaatcaggaagggaccgttctcgataaagctatttctgtgggcgagaagttgattatctcctcacttgacctggacgccattatgggagagtcgggcggcgcgacgttgggcgcggttaaagcggtacgtaaccagggcaaagtgggaaaaatagccgtatttggctctgatatgacaacggaaatcgcgcaggaattacagaattatcaggtgctgaaggcggttgtggatatttccggtaagaaaatgggcaacgccgtttttgcgcaaaccatgaacgtaattaataaaactcccgcggaaaataaaattattcctgtcgatatcgatatctacgttaaatctgaagatggaaagcagtggctggctacccatgtcgatggtctgccttga

SEQ ID NO: 190130 - DNA, 3282 bp, Klebsiella oxytoca
atgagttcagtaaacgtttggcaggaaacggtacatatcccgacctatgaaacgggggcacaggatattcatcccatgtttctggaaaatcgggtttatcaagggtcctctggagccgtgtatccctatggtgtgacggatacgctgagtgaggataaaacgctaaaggcctggcaggcagtatggttagaaaacgattatatcaagattatgatcctgccccagctaggggggcgcgtgcaccgcgcgtgggataaggttagacaacgcgatttcgtttatcacaatgatgtcatcaaacctgccctggtggggctactgggcccatggatctccgggggaatagagttcaactggccccaacaccatcgccccaccacctatatgccagtggattttaccattagtgaaaatgaggatggctcaaaaactgtgtgggttggtgagactgagccgatgcatgggcttcaggtgatgactggatttactctgcgtcctgagcgtgctgcgctggagattggaagcagggtctataacagcaacgttacgccgcgccattttttatggtgggcaaatcctgcggtcaaaggcggcgagggacatcaaagcgtattcccgccggatgttaacgcggtattcgatcacggcaaacgcgcggtgtcagcctttccgatagccacaggtacctattacaaagtggattactcggcgggcgtcgatatctctcgctataagaacgttccggtcccgacctcctacatggctgaaaaatcagaatacgattttgtcggcgcctggtgccatgatgaaaatggcgggttactacacgttgcggatcatcatattgctccgggtaaaaagcagtggagctggggctatagcgaatttggccaggcatgggataaaagtctgaccgatgagaacgggccgtatatcgaactgatgaccggtatttttgccgataaccagccggattttacctggctcgatccgtttgaagaaaaacgctttcagcaatacttcctgccttaccactcgctaggcatggtacagaacgcctcgcgcgatgcggttattaagctgcagcgcgatgacgacggtatcgtctggggcatatatgccatctctcctctgaccgcgcatcgtcttaccgtttgtgaagagggcaacccgcagccactgttggatgaaatgattgagcttacgccgtgctcggttgcgcaaggagcgcttgcggatatagagcccgcgcgtctcacgatggagctgtttgatagccagggcaggtgcgttttacgctatcaggaacatcaaccgcaggaaattccgctaccagaagtggcgaaagctccgttaagcgcggaaaagattttcagcgtggatgaagcatggtttatcggccagcatctggagcagtatcaccacgccagccgttcccctttcgactattaccttcgcggcattgaactggatccgcaggattaccgctgcaatctggcactggcgatgctggagtataatcgtgctgattatactcgggcgatcgtttatgcgactcaggcgctggcgcgtgcccatcgcctgaataaaaacccacagtgcggccagtcgagcctgatccgcgccagcgccagagagcggctacagcagtggcacgaagcgcaggaggatttctggcgtgcggtgtggagcggcaacagcaaagcgggaggatattacggacttgcccggctggctgcgcgaaaccagcgctatgacgatgcactgaatttctgccagcaaagcctgttggcatgccagaccaaccaggatgtgctgtctctggaaacgttgttactacatcttgctggtcgtcgcggcgaggcgcaggagcagattgcaaaactgctgcgcgactatcctctaaatcctaccctctggtggatcaaggcgacgctatcagaagcggagtcggattacgcgcaatgggttggcgtatgccagtcgcgggatattaacgctttgcaaaccgctggcttattgttgagctggggaatggccgatcgggctaaagccgtactggctacgcttaactgccagaaaacgctgccgctctacctacaagctagcctgagcaaaggaagtgaacgtaccgctctgataaaccgcgcccgcgaagtatttcctgatttcgtgcgtttccccaatctgctggtagaagtagcggctctggagagggtgagcgagtgctatttcgctcagcatctgctcgcctgtttccactacagccggcgtaactatgagaaagcgactctcctgtggcagcgttgcgttgaaatggcgcctgattttgctgacgcatggcgagggctggcgattcatgcatggaataaacacgctaacgcggagctggcggccacatgcctcgataaagcctgcgaacagcagcctgaagatgcgcggctgctgtttgaacgcgatctgctggataagctcactgccgcagagccagcaaaacgccttgcccggctggaggctaatcttgctacggcgttgaagcgtgatgatttaacagcggagctactgcatctttggcatctggccgggaagactgagcaagcggctggtgttctttcatcacgtaaatttcatccgtgggaaggcggtgaaggtaaaataaccagtcagtttattatcaatcacctacttcgtgcctggcagcatatccatcagcagcgaccgcagcaggctgaggaactattgatttccgcactgcactatccggataaccttagcgaagggcgactgccggggcaaaccgataacgatatctggttttggctgggaatatgcgccaggcaacagggcagggaagaacgtgccgttgaatgcttccagaaagccgcgttgggcgatcgaacgatcaatattcacaactactacaacgaccagccggtggactatctcttctggcaaggcatcgccttgcggatgattggcgaacactcggccagcaaccagcttttcatcgacatgttgcagtgggcgcagcatatggaggtggaacaggtggaagctgacttcttcgcggtatcacagccggatctgcttgcgctttatgccgatattcaaaagcagcatcaggagaaatgtttgttcgtgcgcactctggcgacagcgggtctgggcggaggagtacgatatgagcaggcgctttccgggctggaagcactgaacccggcatgggcgaaggctgcgctgttccgacaaacaatgccgtttgtgatgcatctcattaactaa

SEQ ID NO: 190131 - DNA, 1194 bp, Klebsiella oxytoca
atgaaagcctgcattaataaccagcaaattcgccattacaacaagggtgtgctgctggagtatctgtatcgtaagaaacgagccagtaaatcgactcttgcacgactggcgcagatctctattcccgcagtcagcaatattcttcaagagctggaggaagaaggacgcgtcgtaaatgtacaggatgaccacctttcacgcggtcacagcagcggagcatggcttatcgcacccgacggcgattggactttatgcatgaatatcacgccaaccagcattgagtgccagcttgggaacgcctgcctgagcccgaaaggagaggtggaataccatgcgattgatgcccctaccccccagtcattacttaccgccattgaaaagtgctggcatcagtaccgtaagaattggcccaatcgcaaaatcaacttggcactggcggttcatgggcaggttgatgcaggcaccggcgtatctcagaccatgccgcaagccccctggaaacagccggtagagatgaaatatctgctggaagaaaagctcaatgtccgcgttatggtcgataacgactgcgtgatgctggcgctagcggaaaagtggcaaaatgatggtcagtatcgggatttttgcgtgatcaatgtcgattacggcatcggttcttcattcgttatcaacgatcaggtatggcgcggcagcctctatggtagcggacaaatcggccatacgatcattaatcctgacggtgtggcctgcgattgcggccgatacggctgtctggaaacagtagcctccctcagcgcattgaaaaagcaggcaaggatgtggctaaaaacacgtcccgacctcgccaataatcctgaaacacttaccatcgatgccttaatagataaatggcaacagggagattcacgcctccaggcttgggttgaagaatcggcaaatgccatcggtcttagcctttataattttcttaatatattgaatattaataatattcttttatacggtcgcagctgtggttttggggaaaagtggttgaatatcattatcagacaaacggggttcaacccatttgatcatcgtgacacgacacgcatcagagccacccaaatcggttttggcacactgacccgcgctcagcagctgatggggatcggttatctgtatgttgaggagcaactgcagacgctgcgttaa

SEQ ID NO: 190132 - DNA, 3765 bp, Klebsiella oxytoca
atgaaaacgtttatttatcaggatgaaaaatcacataagttctgggcggttgagcagcaggataacgaactgcatctgagctgggggaaggtgggtaccagcggccagaagcagattaaaaccttcgccgacgcggcagcggccagtaaggccgggcagaagctgattaatgagaaggctaaaaaaggtaacgtcgaaaatagcgcggcggaggccagcatgccggctccgcagcaaactgctgccagcgctggcagcccgccgtggctaaaggatgacgaaccgattattctcgatccagattacgagaccaatgcctacagtaatcgccgttttactgatgaaccgctcaaaccggttaatgaagactgcacgctgtgggaaatgcttaaagaaagtgagcactggacccctttctttctcacctgtctgcaacatttcgatgcgagcgcttgccgtcgggaatggcagcaggcactacaggaagtaatgcgacgaatcaaacagcagcagtcagaaggatcgctactctccgataccattctgactctcgcaagatttgtcctccattatcctatccgtattgatgtctggctggacggtatcgttcaacaacggggggtggaatacgcagtcgacttagtcattgccttacagcaagttcagatgaccgatcaaacaaacagcgatcccgtcacaaacaaggcgattgaggatggttatgagcgactcttaatgattctgcgaaatggccagtcagcgcaaacgtcgccgttatttgctattaccctgagtcacaatattaccgacctgcgttttgagcatggttttagcaaaatcgacttgcatttgcgtaaacacctgtcgcaagccgatgcgaccacctggcagcgctgtgccgataaactgatcgccgccctgccatcgattgccccacgtcgccgcccgcttgtcgcctttctgctgccggaaaagccagaaatcgccaatcggctggcgctcgaactggcgcctgataacgacttccccgagctggagtggttgaatatcgtcgccaccgatccgcaggcggtgcaacaactggcaagattccggcaactaaatctattcacccactaccgtacgagcgagcgttgcattgagacgttgctgcgggaacagggccttgcggggctatcacgactaacgcctctggtacatgaataccggattaagcgcgcgttagttgaagttaatcaccctcaggccatgacgctgcttatgatggataaaaatgccagcgacgctgaccatctggactcttttacaaagaaatacccggaagccgccctttacgcgctgactcaggggctggtcaatggtaaaaacgcgatacatttacgcctgctggaacagatcgttctgggcaacccgcaggcgctggaaagcgcggggccctggctgacggcggagcaacaacagctcctgttcaaccactttccgcagctggtcgccacggaggaaatcgcctccccggacgaccagcccccggttctgcgctccccaccgtggctggcgaaaaagaaaaaaactgccgctgtggcgttgacgcttcaagtgctgccgctcgaatcaatggggcctgagcctgagcctgagccgctgcaggaagaggaagtccctacaacggcggaagtcctacgctatcttggtttcgagagtttctcttttgaccgggataaccccgatccggaaagatttgactgcaaatggggcgtcagcaaaacggccatctctctgctggaaaaagaggattacgaatcgttacttaacacccggcaaaagtacgattacgaaagctacattacgctacatatgtcaatcctggccagactaccagaagagaaagcgctctctatctggaacgcgatgacgcacctgcatcttaccgggattgatgaagtggttcaccgctttggcctgccgacgctgccaggcctgctgcgttacgctcgcatagtcccaaaagaggccgttcctctggcggcaatgttcgccgctagcgaagcggctccgctgatggcccgcgctttctgccagctcaaatccctacgcgatatcgccgaacgctggctgctcacttacccggagcacgctattaccggcctgctacccgcggcgctgggcaaatcgagtaaagagcagggagatgcgcggatgacgctgcgctttcttgtcagttccggccatctgccgctgatggaacaggtcgcgcgacgctatgaccaaccggaagtgatgacagcactgggcgaaatgctggccgccgacccgctcgataactatccgctgaaaatcgctaaactccccgaatggtgtactccagaggtctggcatcgcccgatactgcacaacggaaaagcgcttagcgatgatgccatccgccatctctgcactatgcttgccttcccgcgcgaggagacgctctaccccggcatcgttcaggtgcaggaagcctgtacgccacggtcgttggccgattttgcctgggatctgtttcagagctgggaaatcgtcagcggttccgccaaagataactggggttttaccgcgctgggtattttcggcaacgatgacaccgtacgccgccttacgccgctcatccgcgcctggccgggggaatctcagcataaacgcgccaccgtcgggctggacattcttgccgccatcggcagcgatatcgccctgatgcagctgaacggcattgcactgaagataaaatttaaggcgcttcaggaagccgcgcgggaaaaaatcaaacagattgccgacaagcgcgaactgaccattgccgaactggaagaccgtctcgccccggatttaggtctggatgacagcggtaccctcaccctcgacttcggcccccgccgctttaccctcggcttcgatgaagccctgaaaccctttgtgcgcgatgaaagcggtcgccgcctgaaagatttgccgaagcccggcaaaagcgacaatgaaccgcgggcagcggaggccgtcagtcgttacaggcagttgaaaaaagacgtccgcacggtagccagccagcagatcatgcggcttgaatcagcgatgtgcctgcgccgccgctggaccgccgaacagttccgcctgttcctcgtcgaccatccgctggtgcgccatctcacccgccgcctggtctggggagtctatagccaggaaaacgtcctgctggcctgcttccgcgtcgccgaagataacagctacagtgacgcgcaagataacccaatcaacctgcatgaggggcaaatcggccttccgcacgtcctggaaatctccgcgaaagacgccgctgctttcggccagctgtttgccgactatgaactgctgccgccgttccgccagctcgatcgcaacgcctaccgttttagccaggcagaatccgaaactttcgacctccagcgctggacggggcgtaaagccctcagcggacgagtggccgggctggtcagtaaaggctggcaacggggtgaagttcgcgatgctggcggggtctataccttctataaacccgttgatggtggctacgttgaactcgaagtgtttccgggatttacggtaggtttatcggtggatatggtcagcaagactcagggaataagccatattcggctttataaagccgggcaaagaaaaatgatatatcccttctcttcactcgataagatagccgccagcgaactgattaacgatatcgaatcgctattcgattaa

SEQ ID NO: 190133 - DNA, 1779 bp, Klebsiella oxytoca
atgtttaaattcaaggtttcatatgttgcgctggcggcagcgctaagctcatccgttgtttatgccgacccgtcaagctatacgcataggtcaggggcaaatgttattgatattgaagcgcctaatgccgcaggcgtctcgcataacttatatcgcgaattcaacgtcggccctaacggcactattttaaacaatagcgccagcgacgtgaaccacagcactcacggtaatatcgcaaagaataataatctgaccaacggcagcgcttccgttattttgaatgaagtcacctccaataaaatgagtaacctacagggctttatcgaagttaacgggcaaaaagccgatgtcgtgatcgccaaccccaacggcatcacctgctccgggtgcagttttatcaacaccaacaaagcggtactcaccacgggccaggtcaacctgagcgataccggggcgattgatagctatacggtcacacaagggaaaatcaccatcggtgataaaggtatggatacctctactaactatgccgccctgcttgcggatgccattgcgattaacggcagcgtaactgccgccaatgctacattgggtgcgggtaacttcacgtttgacaataagaccgggaaaatagctacccttgggaaaacagcaacggttatgcaaatgatctttccggaatacagcatcgatatcagtaacctgggtggaatcaaggccaatagtattagcatggtgggtaataccttaggtcttggcgtgcgtaataaaggcactattaccgcaaatgccgcgctcgccatgaccagctatggttctctggttaatgaaggggccatcaacgggaatggtcttatgacaaatattgtttcagcattggatatgaaaaatacgggtacgattagtagtaccgcttacgctacacaactcagtagcatggatgccctgaccaatgaagggaaaattaccagcagccaggcgcttgccattagcgcgacgggtaatcttgtaaatacaggtaccattcgcggaacaaaagctttatccgtagccagcaatggcgatatcactactcgctatggctcaaatatcatttccgatggtcggattgacatgtcagcccgtaatatcaaccacggaggttcaatgcgaggtgatatcactgatattaaatttagtggtgacaagtttaacgtcaccggtaatatctcaggtaactccagcctgaccgtgaaatcagtgcaagatgaaaacattggttctggtaaaatatataacacaggccgtatttcgggtaacgatgtgacattggttactaacggcaatctggatcaggaaggtaatattattggctacaattcactgtcaattaaaagcaactcattagataatgtttactatatctatggggcttcgctgaacatagagagtaattatgtccgcaacagggccacaatcgatggcaataccaccagcatcactgcgggaaatggtatttttaacgaaggccaaatttctgcgaatggtgatatgaatctgaatacgaaatatagtgcaaatataaccaactacaacactattaaagctggtggtacactgacgatgactgccagaaacgttaagaacggaggctaccgctgcggtttcatgggtctcgcatcttgtggtgttggttctatttcaactaataaactggtactcaattcttatcatgactatagttatgaaatgggtggacgcctgcagtttaaatatgcagaagtaaactccatgcgttaa

SEQ ID NO: 190134 - DNA, 282 bp, Klebsiella oxytoca
atgaccaaaaaagactggcaccccgccgacatcatcgccgccctgcacaaacgcggcaccagcatggcgaagctctcgcggcaagcagggctggcgtcctccacgctgtcgaacgtgctgtcgcgtccgtggccgaaaggcgagtggctgatcgccagcgtgcttaacgtgcatccggccacgatctggccgagccgttacgccaacagcgccggtccacgcctgccaagaaaaccgttgcccgacatggcgcttacggctaccgactcatgcaaggcctga

SEQ ID NO: 190135 - DNA, 741 bp, Klebsiella oxytoca
atgcaaggcctgacgcagcccggcggcaaaacatccgacgcttttccacggcgctttactaacagctgccggacgccgggctgcgacctgccttttctgccgcatcccccggctaccaatatcgtcttcagcccgcgccatttctccggccacgccatgctgcgcgacatcacactgcccggcggagcgctactctaccggcaggcgcagccttacggcgggttctggtatctgcgcagcggcatggtcgggctgtatcatgcactgaaaaacggcaaggaggtgctggtgcgcacctgtcagcgccatgagtggttcggcttcgccgggttgccgggcaatgcgccctatcactgtaccgccagagtgttgcatgacgccctgctgtgccacgtcacgccgcaggatccggctaagtttctgctccacttcccggcatttcgccagtttatactgaagcagatggcgggcgcgctggccgatgccgagcaccgcatggcgtggattgcccgttaccgtacccggcaccgggtgctgagtagcctgtggtatctgacacactattttcccgactatgcgtggacgtggcgcgaggtggcggagttcgccggatgtgaaacggagacggccctgcgtttcagcagggagttaagggagatgcggatccttgacggcacgcagcgacgcctgcatgtgtgctccccggaacaactggaaatattaatggctgaacagagttaa

SEQ ID NO: 190136 - DNA, 930 bp, Klebsiella oxytoca
atgatctctgtggacaaacgagaaagagattatactataatagatttccagttcccaaccaccaaacatttagaagagtatattgtcaacatagataaatacaccgaagatgaagtaaaagatttaatttataagttcattattcccaccgcatttttaggtggtgatgacattcttagatattcggtattcaacaatgctgaccttgatataaagaaaatatttgagcatgaatcctttctgaagagattaatttctatgaatgaaaagaatccaccatggcaatctatttcctggattcttgatttattaccagagtacccttataaggcgatcaacgtagtacgcgcttacgtgacagcacactgccttttcctgtctgacaacggcttttatcgatgtgaggacatcatttcattaattaaagcaaaattcattaatcatcctcttccaacaagggaggttataagagaaattacctcgcgtgaatttgaatttctttgcgcttatttatataagagaaaaggatatcaaattaatattactaagaaaacgagagacggaggatatgacatcattgcggaaaagggaagtggaagagcacatgaagtactttatattgagtgtaaacaaaaagaaaataaagttggcgtagatatagcaagaggagttctaggattattaaatattaaaaatgctacaaaatccgtaattataaccagtaactatttcacgaaagatgcacaggaagtatcaagagaatcaaaacgacttgagcttattagcatagatgattttgataacgatatgcgagagtatgttgatgccaggtgggtttatcgcatcgacggatatattagagaaatggaaaatagtttaaaaaaagaacattctcatacaccaacgcattcaaataaaagcattatttaa

SEQ ID NO: 190137 - DNA, 282 bp, Klebsiella oxytoca
atgatcaaaaaagactggcaccccgccgacatcatcgccgccctgcacaagcgcggcaccagcatggcgaagctctcgcggcaagcagggctggcgtcctccacgctgtcgaacgtgctgtcgcgtccatggccgaaaggggaatggctgatcgccagcgagcttaacgtgcatccggccacgatctggccgagccgttacgccaacagcgccggtccacgcctgccaagaaaaccgttgcccgacatggcgcttacggctaccgactcatgcaaggcctga

SEQ ID NO: 190138 - DNA, 732 bp, Klebsiella oxytoca
atgcaaggcctgacgcagcccggcggcaaaacatccgacgcttttccacggcgctttactaacagctgccggacgccggactgcgacctgccttttctgccgcatcccccggccaccaacatcgtcttcagcccgcgccatttctccggccacgccatgctgcgcgacgtcacactgcccggcggggggctactctaccggcaggcgcagccttatagcgggttctggtatctgcgcagcgggatggtcgggctgtatcatgcgctgaaaaacggcaaggaggtgctggtgcgcacctgtcagcgccatgagtggttcggtttcgccgggctgccgggcaatgcgccctatcactgcactgccagagtgttgcatgacgccctgctgtgccacgtcacgccgcaggatccggctaagtttctgctccacttcccggcatttcgccagtttatactgaagcagatggcaggcgcgctggccgatgccgagcaccgcatggcgtggattgcgcgctaccgcacccggcaccgggtgctgagcagcctgtggtatctgacgcactattttcccgactatgcgtggacgtggcgcgaggtggcggagttcgccggatgtgaaacggagacggccctgcgcttcagcagggagttaagggagatgcggatccttgacggcacgcagcgccgcctgcatgtgcgttatccggatcggctggcggcgttgctggactga

SEQ ID NO: 190139 - DNA, 1167 bp, Klebsiella oxytoca
atgaagcatcccttccatctgatggcgaaacccaccggctggcgctgcaatctggcctgtgattattgcttctatctggcgaaggggcagggcgtactgcgcgacgccggcgggcagcgccatatgtcggacaaggtgctggaggcctacatccgccagtacatcgccgctgcgcccggtccggaggtggaatttacctggcagggcggagagccgacgctggccgggctggatttttaccgccgggcgctgacgctccagcagcgctacgccggcggcaagcgcatccgcaacagcatgcagaccaatggggtgctgattaatgacgagtgggcggcgtttctggcgcagcaccattttctggtaggtctgtcgctggatggcccggcgcatctgcacaatcactaccggaaaaccggcgccggcaaaccggcgtttgcgctgacgcacctgaaacaccatcgcgtcgctttcaatatcctgacggtggtgaacaacgtaaccgctcaggcgccgcgggagatttaccgcttcctgaccgaagaaatcggggcggaatttctccagtttatcccggtggtggagcaggatgcacaggccggcatgttgccgtggtcggtgacgggagaagcctacggtgagtttatcaacgccgtctttgaccagtgggtgagccacgacgtcgggcgggtatttatccagctgttcgacaatgcgctggcggcctggctcggcgaacgcccgacgctatgcgtgatgcagcccacctgcgggcgcggtctggtggtggagcagaacggcgatatctacagctgcgatcactatgtcgatgcgcatcaccgcctcggtaatctgctgcgacagccgctggaaacgctggttaacggcagggcgcagcgccgttttggagggcaaaaggcgcaactgccggaggcctgccaccgttgccgctggcgcttcgcctgtcagggcggttgcccgaaacaccgcctgcgccatcggctgaattatttatgcgccgggtaccgggcaatcttcggtcatatcgatccctatatgcgctttatggcgcggcagatccagctgcgccagtctccggcgcgggtgatggcggtggcggatgacatcgccgctcagtccagcaacgccgccagccgatccggataa

SEQ ID NO: 190140 - DNA, 801 bp, Klebsiella oxytoca
atggaaagtggactgattatcgcgctgtgcggctgtggcgtggcgacctgcctgctttcggcgctgtttggtgtcggcggcagcatcctgctggtgccagtgctgcatctgctgttcccgcagtgcgcggtgcaggtgctggcggccacctcgctgacggtggtgatgctgagcgcgttaataaacgtcggcgccttctggcggcagggcattcgcctcaacgccagactgctggcgctgtggtcgctgggcatggcggcgggcatgcagctcggggtatacgccagctttatgctgccggatcgggcgatcctgctgctgtttgcgctggtgttggtagggctggcactgcgcggtgtttgtcagcatgatgcggcgacggaaacggcgcgcccggacgtcaggacgcgcaacgccgggatgctgctgtgcgccgcaggcggcgcggtggcgggcctgaccggtctgggcggcggttcggtgctggcgccgctgatgtcacagcttgccggcattccgcgcaaacatatcgccgtgtactgcaactggatgatgctgttcggcagcgccggaacggtgctcggctacctgcatcgggcaacgccccgcgtcgcgcctttgccgcaggcgacccagtacggttatgtcaacctgctcattgtgttgacggtgttcctcagcgcgctgctgtttcagccggtcagcatgaaactgcgcgactggctgccggaacagcatctgcgccgcatgttcgccggggtattgctggcgatcgccgtcctgattgtggcaacgctatga

SEQ ID NO: 190141 - DNA, 1293 bp, Klebsiella oxytoca
atgaaacccaatattctggtatttttcaccgaccagcagcgctgggacacggttgggtgctacaaccccgccgtcaataccacgccggtgctggatcagcttgcccgcgaaggggtgacgtttgagcacgcctttaccgttcagccggtttgcggcccggcgcgctcctgcctgcaaaccggacgctacccgacgcagaacggttgttaccgtaataatatcgccatgcggcaggatgaggtgacgctggcgaaactgttcaatcaggcgggctacgatacggcctatatcggcaaatggcatctggcggatcgggatgaaaaaccggtgccggaggcgctgcgcggcggctggcgctactggctggcggcggatgcgctggagcacacttcccacccttacggcggccagttctttgacggcgacaatcagccggtgcgttttgacggctaccgggtggatgaccagactacgtttgccctcgattacctgaaaaaccgcgcgcgggacaatccgttcctgctgttcctctcctatctggagccgcattttcagaacgatatggcgcgcttcgtcgccccggatggctacgccgaacgcttccatgatgcgccggtgccgccggatctggcgaaccgccccggcgactggccgcagaatctggcggactactacggcatgtgtcatagccttgatgagaatctcggacggctggtcgaatacctgaaaagcagcggcgagtatgacaacaccatcatcctgttctttagcgaccatggctgccacttccgcactcgcaacgacgaatacaagcgttcctgccacgaagccagcatccgcattccctgcgtggcgcgcggcggaccgttcagcggcggcaaaacggtggcacatctggtcacgctgctggatatcccggtcaccatgctggggctggcgggcattccggcgccggttgcgatggtggggcgcgatctgcgtgcggcgctgcacaccgacaactgggatcaggaggtgctgattcagatcagcgaatcggaggtaggccgcgcgctgcgcacgccacgctggaaatacgaaattatcgcgccgggcagcgatccgtggcatgaaccggcggcaaagatgtacgtcgagagccagctttacgatctgcaaagcgatccgtgggagcgcaaaaacctgatcgccgatcctgagtacgccccggtgcgcgcgcagttgcgtgaggcgatcgcccgcaaaatggtcagcatcggcgaagcgcggccggcgatcgtggcagtggagtga

SEQ ID NO: 190142 - DNA, 1266 bp, Klebsiella oxytoca
atggctaaaacgcatgatacccggtggaacgtgatcctctggggattctttttcctgttttattattacaactggtcttcttgctttctgtttctccccgtctggctcacccgtatggtggggctggataaaacccatatcggcatggtgttttcctcttttgcttttgcggcaatttgtctgcagccgttgttgggctggataaccgataagctggggcctaagaagcatctgctatggctgatcgtcatgctgatggtgtttttcgcgccgttctttatttacgtctacaccccgttgcttcaacgccattttgccgccgggttggtggcgggcgggctgtatctggggtttattttccatgccgggtacggcgcggtggaagcctttgtcgaaaaggtcagccgcaaccggggttttgaatatggccgcccgcgactgttcggctgctttggctcggcggcctgcgccactatctccggtatcctgtatggcgtcgatccggcatggatttactggatcggctcggcgctggcgttgttgctggtggcgatcctgctgatcgcccgttccgaaccgctgccgggcatcgagccggagcagatccgccagcaaaaagtcagcgtggcggagttacttagaatccgtcagttctggtatttcacgctctacgtgctgggcgtggcctgtatttatgatgtctttgaccagcagtttattaatttctttacccgcttctttgccgaacaggatcaggcggcgcgcgcgttcggctatatcaccactgccggaaatctgggcgatgcggcggttatgttttttattccgctgctgattaataaatatatcggtagtaagaatgcgctgttaattaccggcacgattatgaccatccgcattattggctcgtcgttcgccaccggtccgctgcaagtgctgtttttacgcatgctgcacaattttgaggtgccgttcttattaattggcgtcttcaaatatatcgccgacgtgttcgatacccggctgtccggcacgatttatctggtgggcgtgatgtttatcaaacagtccgccgccattgtgctctccaccgtggcgggccatctgtacgacaccatcggtttccataacacctatctcattctcggcagcgtcaccgccgggttcaccctgctgtccgccttcctgttgacctcaaccccacgccagaaaacggcggacgcctgttcgcccgccagccacgccataacggaggaaacgtcatga

SEQ ID NO: 190143 - DNA, 1593 bp, Klebsiella oxytoca
atgacaaatattctccctgtaataagcaggaagaatacggggaataatctgtgttcacggttattcttcgcgattcttttgctgttaattactgttccagtctgcgcacagacgctttatatcgactgctccgccgccagcgatggcgacggctccatcggcagtcccatcaacgctatcgccacgctgaaccagcgtacgctgcatcccggcgacagcgtgctgttccgccgtggcgtgacctgcaacggcgaggtggtcgccgcctcatccggcacagaaaacgcgcccatcttttacgatgcctggggcgaaggcgcggcgctgcccgcgatcgccgccagtggtaatgaagcagcttttcacctgacggacgccagttgggtgacggtgcagaacctcacgctttccgccagcggcgacggcaaatcgccgcggcgcggcatgtgggtaaccgcttccgacagcggcgaacaccggggcatccggttgctgcatctgaatattcatgacgtgcgcggcgagatgcccgccagcaagaacccgtccgacagcagcatcggcaaatatgcgcatgcctcgggcggcatcgtggtggaggcgctcggcaacgccgttcctacctggttcagcgatatgaccatcagcgacaacgttatccacgccgtggatcgggaagggatctacacctggtcgaactggtgccaacgcccggatctggtggagttctggtatagcctgtgcagtgcgcggtggcagccgttcagcaatctgctcatcagccataatatcctgtctgatatcggcggcgacggcattgcgccaatgaccaccatcaacagcaccgtcgagtacaacacgctgaacggttttaacatgcgctccggctcgcccaacgccggcatgtggtcggccaacagcgacaacgtggtgtatcagtacaatttcgccgccggcggccacaccacgcaggacggcatgtcctatgacgttgaccactccactaacggtattgtgtaccagtacaatatttcggcggacaacgagggcggctttttcctgctctgcccttacggcgacgatgtgcccggcaaatcgcgcaactttattatccgctataacctgtcggtggcggacagaacccgcacctttcaggtatgcaacggcggcgtaattaacggacagatctataacaacaccattctgctgccgccggacagcgccagcccgcatctgatcctgacggaggcggccacccacgacggctcggttgggctgacgctgaccaacaatatcctgatgagcgacggttccggcgctaaacctgtctgggattacaacgattcctccattaccggcgatcacaatctgtacgatcatgtgccggtgatgccgtctgacagctatgcgttaattaatgatccgctgctggcgaatcctggccctaaccacgttctttggcgcgattatctgccgcagcctggctcaccggcgataggcgcgggcgtaagcgttaccggcgcgccggcgcacgatgcgctgaaccatgccgttggcgcgccaccgacgattggggcgctggagccggaataa

SEQ ID NO: 190144 - DNA, 786 bp, Klebsiella oxytoca
atgaaaaaacacactactgttttcttacttttaatcactatttctgcatcatcattggcacaagaaatctcttgttcttcatcaatggtgcttaaagccgttaatgatagcctccataaatacgcagtaataaggaatagtgaattaagagaaggaagtattttagacgttcctgttaacttttctgacttttcagattctgttattggtaaagacaggagtctttcatgttgggcatcggcctcattgaaactcgatagaggtgtcgcacaactgttatctaacgaagatttgaaatattcaaaaatagcttaccagatagcgactgactatcttccatcctatgatacaaatctcgcagaccaaaattatgatcatatatcgttcaaagggtttcattacaatgtttatatcaacaatgatgatactttaaaaactgttgaattagatgcaaacgatcggatttcatatgcaatatatggcattgcttggtttaatgaaaattctaaagacattaaatctgaaattgaaaaaaatgcttatactgaagcaaaaagagacttcaaaatagcagacgataacataaataatatttataacagcttccccacgcttattcgtgataatttaaggggcgagatgaggaattggataaaagaaaaaaatggaaaatgtgggaaaattgaatctctggcagattcagaaatatcattcaccgaaaaaacaaaaggttatcgatgccaaacagaaatgacaaaaaaacaaaccgaacgtcttactgaataa

SEQ ID NO: 190145 - DNA, 1053 bp, Klebsiella oxytoca
atgacgcaatactggtggaaagatttattggatcggaacaatcgctggcaggggctggagctgagggtgcgggcagagcaacatcccggtcatgcgatggagatgctcagcggccaccatggacgcatggcattacagtttcagggcgagacgctgttctgggccaccatgctgaaagatcattccggcgtctggctggtatttaacgccgatcaccccggtcagcaggagctattgccgtcagtgacctcggcggatgtggagtcggttaaggcgcagggggcgcaggcatggacaagcgaatggtgtcgctacttcgcccggcggttgatggagacgcccgcgccattgttgcccgcgcgccgttggttgttaaggcctatggcgccggtaagccgcagcgcgccatattcctgccaacaatctgcaccggtggcaaactggcgttttgattcccctgccagcgccggaaacatgggctgcgactgggtgctctatggcgaggatttccctgatttagcggatccacaaaaagtcaggctggtggactggtggtggggcggcaatttgctgctgggacgttacccaataaacaccgatgcggggcggctgaaatggtggcgtaaaaaatgccgtgaaggcgcattgccgccagtgttggtctggtacattgccgggctggcgtcgtttgtgatccttgatggtcattatcgcttgcaggcggcaatcgcagaggggatcccacctcattttctggtgctcagtgaactgtatgagagagaatttccctccgatccgcagcatcaggcgcgtattgtccgggcgctggagcaacagcagcgtaaaaaccccgcatgcagcgttgaggggataaatcaaacgctgattaatctctatgacacccgctatctgtatgcttcaacccatagtcgcgccctgcttggcgacggggaaagctgggcgcgcgaggttaaggcttatttgcataaacatcagcttgaggaatatctgggaaggatcctggagcgggtggatggggagtttgagccataa

SEQ ID NO: 190146 - DNA, 933 bp, Klebsiella oxytoca
atgacttaccgtcgacaacgattactgctgctgccgctgctgattgctttcccctgtcaggcaatcactaccgcccagatagccgcctccgccctgtcgccggagtgcgtgaaataccgggtcgtcggcatgtgctactggctgcaatgctcgccttttggctgccgggtgcgcacctcggtgaaagtgcgccacttccgccccgatttggtggtatcggcctacggcgtgaccggaaagaatccgtgggttgaaatgtcgccgctcagcccgccgttgcccggcatcgccgaaggcggcggagacaccaatccgcgcgccgccagtcagcacagcaaggtgcggtttaaaaacgccgacgccatcggttttccggcgggcgacgagctggcgaaatttttcacccagtttggctatgtctgcgcgccgtcggcgcagccctttctgccctacttcctcagcaccctcgatgctctcgcctggcgcggcggcgtaccggaaatgacctggccggaagccctcacgccggggttgcgcaaggtcggtaaggagggcgatatgtggggcaatatcttcccgcgcgccggcgccatcagccagacccatgactacaaggccgccgcggttatcgcccagcgcgccgctgatctggtgacgcgcgccgctcagccgcacgtttatcaactgctgacggcagcgtcccatgacggctactggccgccggaaccggtgaaggaaggtgacgacgacaatcatcagtggcaaatgctggcgccgaaaatgagcgcctcctgcgccatctttcccgatggctccgccaccgatacctatgccgataagttggcggaggatggcgcttacgtctggacgctgtggcgaccttacagctgctgcccacgtcgcggacaaacctttctcggcagcagcggataa

SEQ ID NO: 190147 - DNA, 1359 bp, Klebsiella oxytoca
atgagagtgatttgcctgattctggcgttgatcgcctggcacagccgggccgcggaggactacagcttccgtaaacagggctcggtggatgacctgctctattaccagatcggcggcggcgaagcggtgatgccgccgctggtgaagcacagcgccaccccgttaagcgcgggcgtaagctggaatgccgatatgatgtgcggcaatttcgatatcgacaccacggtgcgcaatcagcttaacggcatcaccgacggcttccagcaactgatgggggaagtgatccagagcgccaccggcgcggtcgccagcctgcccgcgatgattattcagcgcgccaacccgcagctttacgatctgctgaccaacggtgtgttgcaggggcggctggacttcgataagtcgctgctgagctgccagaagacggcggaaaagatgaccgacctcgcctacgattcggcgtggtttgccagcgcgaaggccgagaactaccagtccatcgccgccggcgatcaggacgccatccgcgccgaccagaaagccgcgcagcaagccgccgataacggtaaacgctgggtgggcggcgaaaagcgcggaggcaagggccagccgccaattaaggtggttcgcgacaccacgacggcgggctggaacatcctcaaccatcagtccgccaccagcaccgcctcgcttaccccggcggagtgcgacggtgaactctgcgccgtctggtcctcgccacaggaggccgccgactggatgaccagggtggtgggcgagcagaccattagcatggcgcagagcgatacgccggatgcgcgtcccggcgcgcaggccgggatcggcctgcatccgctgattgaagaggagcaggagaagattaagcctgtgctggtcgatctggttaacggcagcctgaaacctaccttcgacaacctggcgcaggcctccggcggcagtatgcagcttacccgtggcgtggtggaagcgctgcgcgacgatcccgactctgtggtccttaccgaacggctggcgggcgaactggcgctggcccgtgtcacggaacaggcgctgatggcgcgccgcaccctgctcgccggcatgcgcgaacccaatatcgccaatgagaaggaggcgcaggaagcgctgggcaagactaccgcgcagctggatgaggagctggatcagcttaaactggagctggatttccgccatgcgttgacccgcaacgccaccagccagatcctgcaacgcaagcatcagcgcgatctgttgcagggccaggcggtggcagtgccggacgacagcgaccgccgcgtgcgcgaccttaaccatccccagccggacagccagccatga

SEQ ID NO: 190148 - DNA, 1488 bp, Klebsiella oxytoca
atgaccgccaacagctatctggagtatgtgctcactttgctgggctggctggtgaacaatggcgtgtggcatacgctgaccgccaccgggctgtttgccctgccgctgctggcaaagctggtctcgttgtggctgaaagcgcgcggccaaggggcggatgaaggcaatcacgcccgcctgctggtcatctggctggaacatgcactctacagcgccctgctggtgatcctgtttgccggcgtgccgttcctgaatgtggatatcagtaccatcacgtatgacagccagcgcacccggcagtgcggctactcggtggttcagccgggcgattccggttatgcgccgctgattaacgaactcggcggccagacggcggcggtaccggtgtggtggtacttcacccatgcgctgagcaaaggcatcaccagcgccgccgtcacggtgttgccctgcaagccggatctgcgccagctgcgctttgacgtgcagcactcgcgcatcgctgacccggcgctggcgcaggagttacaggatttcgtcaacgactgctacggtccgtcgcgcgccaggctcaagcgtcagggcagcgacatcagcgaagagcagagccgggaggtggactggcccggttcgtcgtttttcctcaccagctcaggctattatgacagtgaccactcacattcgccgcgcgccgcatggccttacgacgccagtcgcgacgacgggctggtcgacaccggcgacagcggctatcccacctgtaaacagtggtggtccgatggcgaaacgggcctgaaagatcggctgctgaaacaggcccaaacctccatctggcagcagttgcaaaaactcgggcagccgaaagaggagtatgaagaagcggtgctgcgcgcgctggtcagtccgcgcaatatgcagtcgtcacagggcgggctggtgtataacggcttcggcggcaacgccggggataatctcaatgcatcgcaggcgttaagccggctggggagtctcaccgggatgtcgatttccagcctcgcgctgttccccgccttcgacagcgtgcgtcaggcgttgccgatggtgcaggctttcctcgaaatggcgctggtgatttgcctgccggtgatcctgctgttttcagcgtgggaattgaagacggtgattacgctgagctttgtccagttcgccctgttcttcctctccttctggtgggaactggcgcgctggctggatagctggctgatggagatgatctacagcgaagtcggttattcgcatttcaacctgtacgggctgcagaacgcttctgatgatgtgatcgtcaacgtggtgatggggacgatgtttgtggtattgccagtgttctggctcgcggcgctggcttgggcgggcgtgcgggttggcggcgccgtggccggggtagtgtctgcggggagtggggatgttaagggaggtggcggagttgtggggaggatgatggtgaaataa

SEQ ID NO: 190149 - DNA, 240 bp, Klebsiella oxytoca
atgaacgaaaacgagatttatcgccgtatccggcaggcgctcgcagatgcgccgcgtaaccattacaccgtcgagctgcatctgcaaatgatcaaatatgccgatgagctggagcacattacggcaaaagccttttgtgaaggcaccggtttgaaccagagccttggcaccgaattcagcaaaatgcgtaacttaacccgacgactgaaagccgccggtctgaacaccgatctgctgtaa

SEQ ID NO: 190150 - DNA, 2445 bp, Klebsiella oxytoca
atggctatcaagaaaaccgaactctactcctccctatgggcaagctgcgacgagctgcgcggcgggatggacgccagccagtacaaagactatgtgctgaccctactgtttatgaagtacgtttccgacaaatataaaggcgatccagacggtattatcctaatcccgaaaggtgccagctttgacgatatggttgcgttgaagaacgataaagaaatcggcgataaaattaataaaatcatccgcaagctggcggaagagaacgatttgaaaggcgtcattgacgaagccgactttaacgacgaagacaaactcggtaaaggcaaagagatgattgaccgcttgtcaaagctggtcggtatctttgaaggattggacctgtccggcaaccgggccgatggcgacgatctgctgggcgatgcctatgaatacctgatgcgccacttcgccaccgaatccggtaaaagtaagggacaattttatacgccggcggaggtgtcgcgtgtgctggcgaaggtgatcggcattacccccgacacgccgcaggataccacggtgtacgaccccacctgtggctctggctcgctgctgctgaaagtcagcgatgaagcccggcgcgggctgtcgatctatgggcaggagatggacaacgccaccagcgcgctggcgcggatgaacatgatcctgcataacaatgccactgccgtaaccactatctggcagggcaataccctgagcgatccgcagtggaaagaagccaacggtaggctgaaagcctttgatttcgccgtggccaacccgccattttccaataaaaactggaccagcgggctggatccgaagaaagatccctttgaacgctttgtgtggggcgtaccgccggagaagaacggtgactatgcctttctgctacatatcatcaagagtctgaaaagcaccggtaaaggggcggtgatcctgccgcacggcgtgctgttccgcggtaacgccgaggcgaatatccgtgaaaacctgattaagcagggctatatcaagggcattatcggcctaccggccaacctgttttacggcaccggcatcccggcgtgcattatcgtgattgataaggagcacgcccacagccgtaaaggcatttttatgatcgacgccagccggggatttatcaaggacggcaacaaaaaccgcctgcgcagccgggatattcaccgcatcgtggacgtgtttaaccaccagcacacggtgcccggctatagccggatggtgccgttaagcgaaatcgccaggaatgagtacaacctgaatattccccgctatatcgacggcggcgaaccggaagatttgcacgatctgaacgcccatttacagggcggtataccagcgcgcgatgttgatgccttacaggactactggcgtgtattccctgccctgcgcgacgtgctgtttgccgacgatcgccccggctactgtcgggcgcaggtagaagcccaacagataaagccgaccattctggcacatcaggaatttaagaatttcgccacccgcagcctgctaccgtttaaagcgtggataaaagaagctgctcttgcggagattggcaaaggcgataaacccaaggcgctgatccacgatatcggcgagatgctgctggcgcagtatgccaacagcgagttgctgaataaatacagcgtgtaccagatcctgatggactactgggccgacgttatgcaggacgatgtctacgtgatcatgcaggagggctggaaagccgccgcgcaaattcgcgaactccagccggtaaaaggcaaagatggaaaaaacgtctggaaagaagcgcacgattttgaatttgacaagcggcgctacaaggccgacgtgctgccacgttcactggtggaagttcgctgtttcccggaactactggacgcgctgaaccgcgcacaggagtgcagtgaagaagccagccgtcagttaggcgagtttgtcgaagagcaggccggggaagacgatctgctggccgaggcgaagaacgataaagataaggtgacgcaaaagttggtcaatgcccgcctgactcaactgaagaagaccaccgccgacccggatgagctggcggcgctgacccgctgtctggcgttgattaaagctgaggcgaatgcgaaaaaagcgctgaaagccgcgcaggaagcgctggatcgcgcggtttttaaacattatcccacactggatgaagcggcgatcaaagcgctggtggtgcaggacaaatggctggcgacgttgcaggctgggattaaggcggagattgagcgcatcacccagcaactggcggagcgcgtgaaggagctggaagagcgctatgccgagccgttaccggcgctggaagcgtccgttaaggcattgagcgagaaggtggccgggcatttgcgggcaatggggctggtgtggtga

SEQ ID NO: 190151 - DNA, 1227 bp, Klebsiella oxytoca
atggtggatttaatggtgagtgagcagcagtcggggacggcggggaaaggcgtgcctgcgggctggattcagtgtaaattgggcgacgtattgaccttacaacgtggttttgatttgcctcaacgtttaagaaaagaaggcaatatccccattatttcttcgtctggagaaagcggctggcatgataatgccatcgtttcgccaccgggtgtcgtaacaggacgatacggtactattggcgaagtatttttcattgatagacctttttggccgcttaacacaacgctttatgttcgggagttcaacggaattacacccttctatgcctacttcttacttaagacggttgattttcaatctcatagtggaaaaagtggtgttccgggtgttaaccgtaatgatgttcatcaagaaaatattcttttacctccgataaaagaacaaattgctatcaccactacgctgtcaaatattgacgagttaattagtgctttagaaagattactatccaaaaaacaagccatcaaaacagccaccatgcagcaacttttgacgggtaaaacccgtttgcctcagtttgctatgtgggaagatgggacgacgaagggatataaaaagagtgaattaggggatattcctgaggattgggaaatatcaaaaattggagagctatctcatgttgaccctgaaaatataccatcgtcaacgtcaccaacctatgagttcgattatatatcgctggagcaaattgaccgcggcgttttacttgaaacaactagattatttttttctgatgcaccttcaagagcccgaagattattgagatgtaacgatgtcatggtttccaccgtgcgtcctaatttaaagtctcattatcttgttgctcatgaggtatcagaccttatttgttccacgggttttagtgtcattagatgtgatatggaccaactccaccccaacttcttgtatcaacatctctttgccgcctcaattaatgagcaaatagatatgttgatttctggttcaaattaccctgcaatcaatagtgataatgtaaaaggcttaatggtacctatctgctcagtgcctgaacaaaccgccatcgccaccatcctctccgatatggacaaggacattcagactctgcaacagcgtctggacaaaacccgccagcttaaacaggggatgatgcaggaactgttgaccgggaaaacccgcttaatatag

SEQ ID NO: 190152 - DNA, 657 bp, Klebsiella oxytoca
atggcttatgattacagcgccaaccttaacccggaaaaagctctgatttggcgtattgtccatcgggacaatatcccgtggatactggacaacggcctgcactgcggcaacagcccggtacaggctgcaaactggatcaatatcggcaacccggagcttatcgacaaacgcgccgggcatccggtgcctgccgggacgggcgggacgctgcatgactatgtgccgttttactttacccccttctcgccaatgctgatgaatatccgcagcgggcgcggcggcattaaacagcgtcctaatgaagaaatcgtcattctggtcagcagtctacgacacgtggcagcacaaaaggtctccttcgtgtttaccgacagccacgcctattataatctggctaattattataccgatctggacaacctgaaccggatcgactggcccattttacaagcgcgggatttccgtcgcgatcaggacgacctggccaaatttgaacgctatcaggccgaagcgttaatctggaagcactgcccaatcacactgctgggtgggatggtttgttacaataacgacgtcaaggtacaattagaagactggctgtcgcaacgcaatctgacaatgcccgtttacgcacgggccgggtggtacttctcatga

SEQ ID NO: 190153 - DNA, 1068 bp, Klebsiella oxytoca
atgatcacatttacacaaggcaatttgctggatgcacccgtggaagcactggtgaatacggttaataccgtcggtgtcatgggtaaaggcatcgcgctgatgttcaaagagcgcttccccgacaatatgaaagcctatgcccttgcctgcaaacaaaagcaggtaatgaccggcaaaatgtttattaccgaaaccggcgaactaatagggccgcgctggattgtcaactttcccaccaagcagcactggcgcgccgactcccgcatggagtggattgaagacggcttgcaggacctgcgccgctttttggttgaagagaaagtgcagtctatcgccattcctccgctgggtgcaggcaacggtggcctgaactggtcggacgtccgggtgcggattgaatctgtgctgggagaccttcaggacactgaaatcctgatttatgagcctaccgaaaaataccagaacgtcgccaagagcaccggtgtaaaaaagctcacgcccgccagagcgatgatcgctgaactggtgcgccgctactgggtgctggggatggagtgtagcctgctggaaatccagaagctggcatggcttttacaacgcgctattgaactgcaccagcaggaagatgtgctcaaactgcagtttgaagcgcactattacggtccttacgcccccaacctgaaccatctgctaaatgcgctggacggcacgtatctgaaagcagagaaacgtatcccggacagtaaaccgctggacgtgatctggtttaacgatcgggaaaaagagcacgtcaacctctggctgaacaacgaagccaaagagtggttaccggcgcttgagcaggtcagtcagttgattgacggctttgaatccccgtttggtctggagctgctggcaaccgttgactggctgctgacccgaggagagtgccagcccactctggattccgtaaaagagggtctgcaccagtggcctgcgggtgaacgctgggccagccgtaagataaagttatttgacgataagaacctgcaattcgctataaaccgcgtcattgattttcattgctga

SEQ ID NO: 190154 - DNA, 3096 bp, Klebsiella oxytoca
ttgagcactatcggccagcgcgaacgcgccacacagcagcgtctgattcagttttttgttaaggatttaggataccgctatctgggccggagcgccgggtatgccggggacagcaatatcgacacggacatactgatcgcgtggctgaaacggcgcggcatcagcgataccctgattacccgcgtgcttcggcaactggattccgccgccgcgctgggcgaaggcaaaaaactgtattacgccaataaagaggtctatcgcctgctgcgttacggcgtaaaggaaaaagaaggcgctggcgaacagaatcagaccgtttggctgattgactgggcgcatcctgaagccaatgatttcgccatcgccgacgaggtgacggtaaaaggtgaatatcgtaaacgcccggatctggtgctttacgttaatggcatcgcgctaggcgtgcttgagcttaaacgctcgtcagtccacgtcagtgaaggcatccggcaaaatctcgataatcagaagaaaacctttatccgcaacttctttactaccatgcagctggtgatggcgggtaacgatacgcaggggctgcgctatggcaccatcgaaacgccggaaaaatattatctggaatggaaagaagacaataccagcatatatacgcacaagctcgactttcatttaagccgcctttgcagcaagtcaaggctgctggatatcgtccataactacattgcctttgacgccggggtgaaaaagctgtgccgccataatcagttctttggcgtcgaggcggctaagcaacatattgcccgtcgtgaaggcggaatcatctggcatacgcagggatcgggtaaaagcctgacgatggtctggctggcgaagtggatccgtgaaaacgtgccgaattcgcgcgtgctgattgtgaccgaccgcaccgaactggatgaacagatcgagagcgtgtttatgggcgtggatgaagagatttatcgcacctccagcggtaacgatcttatcgcgacgctcaatcatcctaacccgtggctcatctgctcgctggtgcataagtttggtcgtcgtagtgaagcagaagacaatgcggcaaccgacgctttcatcaccgagctgcagcaatccctgacgaaaacgttccgcgccaaaggcgatttgttcgtctttgtggatgaatgccaccgcacgcagtccggcaagttacataacgcgatgaccactattctgccggaagccctgtttatcggttttaccggcacgccgttgatgaagaaagataagaagaaatcggtggaggtgttcggcccttatatccatacctacaagtttgatgaggcagtggccgacggtgtggtgctggatctgcgctatgaggcccgcgatattgaccagtatctgacgtctgagaaaaaggtcgatgactggtttgaagccaaaacgcgcggcctgtcgaatttagccaaaacccagcttaagcagaaatggggctcaatgcagaaactgttatccagcaagtcgcggctggagcagatcgttaacgatattctgctggatatggacactcgtccgcgcctgatggatggacgcggtaacgccatgctggtatgcagtagcgtgtatcaagcctgtaaggtttacgagatgttcagccagaccgatctggcgggaaaagtggcgattgtaaccagcttccgtcccgatccagccaatatcaaaggtgaagaaaccggcgcgggcctgaccgagaagctgtttaaattttcgacctatcgcaaaatgttggccgactattttgaacaaagcgaagagaaggtcgctggacgtatcgccgagttcgagcgggacgtcaagcgacgctttatcaacgaaccggggcaaatgcgcttgcttatcgtggtggataagctgctgactggttttgacgcgccgtccgctacctatctctatatcgataaaaccatgactgaccatacactgtttcaggcaatttgtcgggtaaatcggctggatggggaagataaagagtacggctatattatcgattataaggatctgttccgctcgctggataaagcaataagtgattacaccacgggcgcctttgacgattacgatcgggatgatgtggatggcctgctgaaaaatcgtctggagcaggcgaagctggatctcgacagcgcgctggaggtggttcgtagcctatgcgaacccgtcagagcaccgcgtagtttacaggactatcagcactatttctgcggtcagtcgggggaaaaccaggcgatattaggcgaaaaagaggcgctacgcctgtcattctaccagaatgtcgcccgcctgatgcgcgcttacgccagcctggcaaatgaaatgcaggaagcgggttataccgatgaggaagtggaaagcatacgcgccgaagtctctcgctttgagaaactgcgctacgagattaagctgaccagcggcgatctgctggacatgaaacgctttgaacccgccatgcgtcacctgctggatatgtacgttcgcgccgatggtagcgaagttctgatggatttcgaagagctaagcctgattgagctgattgttgaaaaaggcgcagcagcaaccgcggctctgccggacgagatccgcaacaatcaggatgcgatggcggaaaccatcgaaaacaacgtgcgtaaaactatcgtggatgaaaacccggttaacccgaaatactacggacgcatgtcgctgttgctggatgagctgataacccttcgtcgccagaatgcgcttgattaccagcagtatcttgaacgtatccgggatttgtgcaaacaggttattcacccggaacaaaccgctggagcatcctaccctgatacgatggacacacaggcgaaacgcgcattctatgataactttggccacgacgaggtcctggcaacccgcattgatacgacgatccgctataccaaaaaagcagagtggattggcgatcgttttaaggagcgggaactcgcccgtgcactgcgcgaagaaaccgccagctatgatgttaacattgatgacatcattgagcttgccaggcagcagaaggaatatcactga

SEQ ID NO: 190155 - DNA, 717 bp, Klebsiella oxytoca
atgccagtcatgcaaataggcgcgctgcgtttacagcttaatcgtaaagcgattaagaacctgcatatcagcgtcctgccacccgacggtaaagtccgcgtttcagccccggaacacatgacggaaacggcgatacgaatggcggtcgcttcccgctttcgttggatcagaaggcagcagcaggatttcgccagacagccccgccaatccgagcgggagatggtcagcggagagtgccattatctttggggccgtaaatatcgcctgtttgtgattgaacgccagggacgccatgaagtgaaagttgcggggagtaataaacttcagctttatgtccagccgggaaccagcaatgaaaataaggaactggttttaaccgacttttatcggcatgaactaaagcgacaggttgccaaattactacctgaatggcaggtcagaaccggcgtgcctccaacattctggggcatcaaaaaaatgaaaaccttttggggcacctgtaataccacgacaaagcggatctggctcaatctggagctggtcaagaagccgccagagtgtctggagtatattctggtgcatgaactggttcatcttctggagcgtcatcataatgaacgtttccgtctgcatatggaccggtttatccctaactggcgcgaacgccgggatttgctcaataagatgccgctggcttttgaggcgtgggaatactag

SEQ ID NO: 190156 - DNA, 921 bp, Klebsiella oxytoca
atggccagtcgtccccagatgataatcaacgtgttacaggctaatcctgaccagcagttcactgcccgccaactggcgcagaaaattatcgatcactacagcgcagaactggctgaaaagcgcaaaaatccgcgttttgctagcgacgaagattttttaagtcagataaccgcagaggtgggcggtagccggactgttaaagcgaaggcgatgtgtccgcaggtgatgactcgtgataagccaaggccgcgcctgttttactggggggaatctgtggttgaaaagacagattccaatgtggcacccgagccaacagttgaaactgtcagccttaccgagcactcgttatatccgatcctgattgattacctttcacaggaagaagggctgttgtgtcgtcgtattgacgaaaagcgctccagcaacaacaaaggactgggtggcaaccattggctttatcccgatattgtcgcactagagcctctggataaagaatgggacgatgtggtgcaaaactgcgttcgccatagtgaaggtcgtttaacgcggctgtggtcctttgaggtgaaaaagcagctcaatcgcagcaacgtgcgtgaatgtttcttccaggcagtcagcaactccagttgggcgcatttcggctatctggtagcaactgagattaacgaagataaacagcgtagcgtggagcgtgaacttcagatgctctgtgcgctgcatggtattggcgtgatcctcctcgatcctcatgacttcagtaacagccagacgctgatcccggcgcgggaacgcaccagcgttgactggcaatcagtgaatcgtctggtagaagagaatcgggattttaaagattttgttaaattggtaggggagtatcatcagactggaagcatccataagtcgttgtggaataaatag

SEQ ID NO: 190157 - DNA, 132 bp, Klebsiella oxytoca
atgccttttgaaacgaacattgaaatggcagccgcgcgtttaatgtatatgatgctttcaggaacaggccccttttcggggctgctcctgatgacgctaataaatttagtttgccagcacgacatgatgtga

SEQ ID NO: 190158 - DNA, 291 bp, Klebsiella oxytoca
atgacagctagtaaagaattaaaagttcgttacacccgaggcggtaaaccgctcgaaaaatcaattaaatgggatggctgtgatcctgttggaagtacattaggttgtatagttgaagaacataatctagcgaatttaatcttaggtgaggaaagggctgaattcggtgggattagaaaccttcgtaaaccaataaatcttctcgaacacggtattgatgatgtgttcttctttgacgatgaaataaacgactggcaagaaatctcccctgattggcttacggatgcttaa

SEQ ID NO: 190159 - DNA, 702 bp, Klebsiella oxytoca
atgagtatatctgatggagtaaaggttcttattataacagtgtgtggctatactttcacatatgcttattatttggggtattattccgctaaagaaattcctattgagtttattgatgtttcgttattaagcatgatgaaaatcggctttggtacatgtgctatattatcttttgtattgtattggtttgatctttttaaagaggaaatagaagatcctgttggtataagtgtaaatacaaaaagatttctaattcgacattcgttaggaattattacaatgctattgtttactgttaacatgacattgtcagggaagtggttttctcttatccctccatttatgatttggtattttagtttaaagcaagatattaccatttcgtttaaagattcagagatgaagtgctttagatttaaaattgcaataaaacctttgaagaaattaggtagcactatagttgcagaaaaactaaatatccattcatattatgtgtattttagttggtatttggctttgttattccttctgtttaatataggaggggtgctttcgcatattaacaaagagactctcgtttgcaatgataatatttatgtgattaatgttagtagttctgatgtcttagtaacaaaaaatcataaaatgttcgagtttatggataagaaagactgtaagtttagtattccagaagtaaaataa

SEQ ID NO: 190160 - DNA, 1098 bp, Klebsiella oxytoca
atggatgatataaaggattcaataattcaaactattcgtgaacgttttggcaatcccatgtgggggtatatagcactttcttggtttggttttaactggaaaaacattgcgatactattttttagtaagtcaacaattgaagaaagaattaaaattgtcactagccaagactatctttacctacattacctaataataccagtagttgttggttgtgtgctcgcggctagcgcaccatatatcaaatgggctttttctaaagctcatgagtacggcgaatcaatgcttaatgaagttgacaagcgccggattaatgctgcatatcaaaaggatatagataccgcgaacaaaaaagttgaacgtgattttgctgctagaattgctgaggcagacaagcaaaaagaattagttgaaattgaagaaactaaaaaacaacttccatacaatactgaaaatttaataaaagaacatggtgtactgactgagcaatgttcaagtcttgagcatgacatttcgatttataaccaacagaaagatcaattagacaaagaaattgactcattacagcttaaggttaagaacattgtagaaatattcaatagatacaactctcctagcaatcatgaaagtattcagcgatttttagatgagatatctacaatcttcaataatgtaatatcaaaccctaaacaagatccttctgaaaaagaagcagctagtgtgttaagaaacataaataaagcgtatcgagccgcacttttaccacaaaccgaagactctaagaaagaatataagtcagccttagagaacattcgaaaaccgctatcacaaaaccctaatattgtggaattgatatctagcacaaacgatgctttcaatagtccaaactataagaagctccataaattagtacagagcattaactctattcagaatcaatatccacaactgcactcattatcaactcagacaaaagagatgataaacacagtaagtagtgatgatttaaagaagatttcccaatattcgaatcttatgaaacctcagtacacagatatatcagaattgttaaaaaacaataacctatcattggagtaa

SEQ ID NO: 190161 - DNA, 444 bp, Klebsiella oxytoca; identical to SEQ ID NO: 103089

SEQ ID NO: 190162 - DNA, 165 bp, Klebsiella oxytoca
atgatgaatattcgattcgaaccagagttataccaacagctattggcagaggccaaacgaaccgggacgagtattccagcgctggtctgccaacttctaaaaaccatcctaaacaacgaggaattaaatggaaaaaacagaacaaccaccatttctggcaattga

SEQ ID NO: 190163 - DNA, 426 bp, Klebsiella oxytoca
atggaaaaaacagaacaaccaccatttctggcaattgattaccgtatcctggcatttgatattaaaacagccatcaacgaaaaaaccatcgatagcagcaccgttctcaaactcaaattagtctattgttacctactcgggttatcaaaaaaatgcagtgaagtttatccagaacaaacaaaaatgggtaaaacattgggtattggttcccgacaggttgttggaagatgtatatcgctgctggagtctcttggatggatttcaaaaacatccagaactggaacatccaatctatacacggtgaaaaccgtcgagcaaattttagaaggtattccgcgcgagactaaagaagaacaaccaacacctacaatacagcactctgttgtatcagatgatgatggtgatatcccatcgttttcaaaataa

SEQ ID NO: 190164 - DNA, 411 bp, Klebsiella oxytoca
ttgacaaagaaaaaaacttttgaagtaagcattaacaacttaccagcagcattaaagcgtttagatttaccagccgaacaagtaaaagttattgaagattataaaaagcaatttccattcttgattgaagatgaagaaaatgttcttgtaagcttagatcaactttgggaagcactggatacaccttattatacaccacccggaaagccgtccgaaaatccggacgggttagagaagcctcgccaacggtataccggatttaaattcaatagagagccgctcaaatttgaatatctctttgataatataaatgagtacgagggctggctggagtttaaccgattagaaaatgaaaacttcacaggaaatgatcttgggcttgattttgatgcaccaggcatctctgattaa

SEQ ID NO: 190165 - DNA, 291 bp, Klebsiella oxytoca
atgaaatacgattacgaacagattaaacatatttatgaagcatttattgaagaaaattttgatagtgttaacagattggtaactgcaacatatatcagcactgactattttgttgatgaatttgaaactgtcataactgctctagagaaactaccagaaacagattcagactttagcgaatggttgatttgtgatgatccccatctcgcaatcctattaacacattttaaatctacgctaggcggcattaatgcagcgttcaaccaaatccaggttgaggaggtgtgttga

SEQ ID NO: 190166 - DNA, 351 bp, Klebsiella oxytoca
atggcactaattaaattcccacaacctaaccttagcgtctgcgacgttttgagtcgtgaattaaacggctatagccgaaaagtgaaagtttttccaaagattcctgattgcgtccctggcactgtgattgatgatagtggcgaaattgtcggttcggcttctacctctgcaaacgttgtgcttgaatataaagctgctgacaatacgcctgtcgctgttctggtagcaaatacgaacatccatattaaggatttcagtttggtttgtgatgatgtagcaaaagctaaagaacttctttctgctgatcccgctgtttatttcagcactggcaatgatctgccgactacctga

SEQ ID NO: 190167 - DNA, 1818 bp, Klebsiella oxytoca
atgagtggaaataaagtaaccgccgcgactttggtcaacagggttgtctataagacagatttaaacagtcttaaaaaggttagaaacgatatgaagaaacttcaaaaagagttttctaaatcaaacaaccaggtagctaaagcgaaacaggcagcagataaacaagtacatcaacagcaattaaaacaacagcgtgatattgataaacaacagaaacaagcagctaaacaagcggcagcagacgctaaatcaaaagcaaacgaacagaaaaaactggcagcagcgcaagctcgtgccttaaaaattcaacaacagcagcaagccaaaaccgccaaaatcagcgagaatgcacgattggcagagcgcaatgcattatttcatatcggcagattgcaggggttaaatggtgctgaacgattccaggccatcaaacatgctcaggggttaattgattcttataaaaatcaaaccattactttgagagacctcaatcaacagttatctcaacatctggtaactcagagagctatcgctcgaaataattcaaaacaagctaaacaatcaggtaaaaaatcaaaggctggtcggtctggtagttctggctggttatcccaaaacgttaacgcaattgtcccacagcaattattatcaggggcagcaggtgtatatctgggacaacaaatgtacgctatatcatcacaggcaatctctgattcactcgccagaaatcagggacgaaaaatgatttcaagtatgggtttaaacccattagaagctgatgcagccatccaggaaactcttaaacgaactggttttaatatgagctatgagaaaatctctgacatctctaaagacgtacaggataaaattggtcagttaagtcttggtgagtggaaaactgataagaaaacagggcaatccacatattcaggcggtggagagatgggagattggctccagatgatggttaatcgtggggggtataccaaacagggagcattaaacactcttcaaaatgtgaaaggtccagtggaactagcaaccctcttaaaatcattgcagaaaagcgcgaaattaaccgactctgaattcaccgcgctggctgagaccataaatgatttttcctatctggcaaaatctgtagattcaaatggtcagaatgtcatcgatacaatgaacatgatggtcaataatggacttgcattaaatagtgctcaacagaaaaccattgatggattaaatcaaatggggattgtgtggggcgctattaaggattccggcgctgatcactttacactaggatttgctgaggcgatgaaagaggccaatttaaattctgataatctggctaaatcattctcgggtttaaaccctcttatggaaaatctaggtcaatctgctggcgaactttccagagtatttctggattttgcaaacaaaattggtttaaacgttgggaagggtcaaacgttgccagatgctgtttataataccgtggttgatagtagtgcgaatagtgccgctgactggatacaaaatatgattggttttgatcctcgtgatgtagggcgcttttttggttctgaatcctcagtcgcaacacaggtgcaaaatggtggttggtataatcaaattatgcctgctacgccatctatgcaatatcaacccgtcatcccggatttaaaagccgatttcaaccttacagtgaatcctagccctgaatttggaatgatggtagaggcggtagccgataaacgcattgaatgggcatttgatgatcagaacttccagattaaccaaagcattcttggtcagtga

SEQ ID NO: 190168 - DNA, 621 bp, Klebsiella oxytoca
atggatttacaagcatgggataatgtcatctctattacctcgaatgctgtaacaggtttaagcgtgtttggtggtgtcatcttcagtgggtttaaacttcaagagatggtgaaaaacaagaaaatggagcaagctttcgcatctgcaatagcgcttaaagatgagatcgatgctacgaggggtcgttataatcgtatgcgtttcgacctgacgcgcataatgacttttatcgacacgctcgcacagacaggccaaagagtcgatcaagagagctactatcagattcaaggttccttaagaaatatggcggaaagcactttccttattggtagctgtttcgtcaaagttagccactataacgttgccattaaacaaccagcttgggaaccattcaacgctcttttacactctgctggtgaaacacaaaaagctataacgaaattagtaaacctcatcacgcaagccttgcttaaagagcaaataacagcggaggaattcgagacaattcgtaacctttacgatgaacatggtgaatggatgaaaggtgtcaataacgcgattgccggaatagatattattaagtttgacgatttctttgacttcagcaaagttaataaataa

SEQ ID NO: 190169 - DNA, 249 bp, Klebsiella oxytoca
atgcgcctgtccgggctacatgactggccttgccctccttttggagggcttttttatgcctgggcgttttccccggatcgcggtacctgtcccggaggcggcgcaatgcgcctgtccgggctacatgactggccttgccctccttttggagggcttttttatgcctgggcgttttccccggatcgcggtacctgtcccggaggcggcgcaatgcgcctgtccgggctacatgatgtgcatatggggtag

SEQ ID NO: 190170 - DNA, 2337 bp, Klebsiella oxytoca
atggaccagccatttacgctacatatggcgcgtttttgcctgatgctggccgatcatttttattccgccagcaatccgcagcccggatggcaggatccggagtatcgccagtgggccaacagcgatcgcagcagcggggcgctgaaacagcgagtggatgaacatctctgcggcgtagcgcatcatgcgctgcttttgggccgacagctgatgcgcgttcgttcatcgctaccggcgattgcgcgacataaagggtttcgtgagcgggccgcaaacccgatttttcactggcaaaataaagcatgggacgtaacttccgcactacgtgaacggagccgggaaaacggtttttttggcgtcaatatggcttcaaccggctgtggtaaaacctttgccaatgcgcgaatgatgtacgcgcttgcagatcaacaggaaggctgtcgctttaccattgcccttggcttgcggacgttgacattgcagacgggagacgcgttgcgcagccgtctgaagctggatgacgatgacctggcggtgctcgttggttcgagggcggtgaaggaattatggcaatcgacgaagagagaggagcctgatcgcggcagtacctctgaggggagtttatctgaggagctgcgctatgttcattatgcgggcagtacccaggcagggattctggaaaaatggttacgcggggatgcaaagctttctgctctggtcagctcgcccgtgctggttgccaccattgaccatctgatcccggccacggagggtgtacgtggtggaaagcagctaccggccatgctgcgtctgcttaccagcgatctggtgctggatgagccggacgactttgatatcaacgatcttcatgcggtatgccgcctggtgaactgggccgggatgctgggaagccgcgttctgctctcatccgcgacgcttccgcccgatcttatccaggcgctatttgccgcttatctggccgggcgaaaaatatggcaggcgtcatgtggggtcagcgacaggcccgtcaatatttgttgcgcctggtttgatgagaaagacgcccgcgcagaacagattgctgacggtctctctttccgtcaggcgcataatctgtttattgagcggcgagcaaaaatgctgacggagaaacccaggctgcattttggccgtatcgcttccctatcttcggagcctgttacagtagaagatgttattagccgggttgcgcaaaccgttcatacgcaaatgctgtcattgcatcaggcgcataacgaaccgcacagcaacggtaaaaccgtgtcgctggggttggtgagatttgccaatatcgatccgctggtcgccgtagcgaaagcgctattcgcgatatcctctccgcaagacgtctgcattcattactgcgtttatcacagtcgacatccgctgatggttcggtcagccattgaagcgagactggatcaagcatttatgcgtcatcagcccgccaggctctggcagcatccggatattgaaaaagcgttgcgcagtcgtccggaaaagcatcatcttttcgtcgtgctcggtacctccgtcatggaagtcggacgtgactgggatgccagctggggcattattgaacccagctcaatgcgctccatcattcagtttgcaggccgtatccagcgccatcgtcggcagcttcccgagagcgagaacctggcgatcctcagccataatattcgggcgttacgaaaactatccccggtcttttgcaaacccggctttgaagatcgcgacaatcttttatccgactacgacttgcttaatctactgccgctgcaggattaccagaccatcaatgcgctaccgcggattttgccggctaagggcgacaataagctggctgcgctggagcatgcgcggcttcataaggaattacttagcagtaagagcaagcggttgattgctgcggactggtggcggcgctcgcttagctggagcggctggatgcagcgtaaaacgccgttccgccagtcgcagcctgagaaatcctatttccttcatatgaatgatgaagatagcgagccctgctttgctttttatgctgagaacggaagcgtcaaaccctcaggcaattttaagttgcagttgctgaagtttgccgacggtgtcacctgctgggggacagtggattaccagcaagcgatgctggcgcaggcagaggcgcagggaattgaaatcgactgcgttggcgcattgtttggcgaaattcgggtgccggaaaatagtcaggaggatgcaaccagcgactggagttatcacccgtggctgggtgtttacagggagattcattaa

SEQ ID NO: 190171 - DNA, 624 bp, Klebsiella oxytoca
atgtctgaaacaacaatgcccaaatatactgccgcccggatcaccagacccatactggcgagctacctttaccagtcgctggagcaggtctgcgaactggcctccggcttaaaaatactccagctgccggtcaacgacaccgctagaaccgcgacggtgctgacagagcccgtctacgcggccgccgggttacgccttgcccgtcagcaacctctggcacaaaacccgctctgcgatgatgttctgcggcgttttcgtcatgcgccagccctgacggcgaatctgcccgacctgattgagaccgtgcgcagcgtagcgctgccggtctggtcacgcctgcgccgcgacggacacagtgacgatatcgccgttcgccagacgctactgcacattctcgcctggagaagcaagtcgccatggctgcaggatcaggcgcagagaatactctggcagggtggtgtgctgggtgaaaggggggaccgcgtgctagcctctctcgacgatgaagcggcccaccgatgcatcgggttctgcgggctgagtgaactactgaccaccaccggttttttagtccactttccggcagggcctctgttttctgatgaaaatagtgagagtcattaa

SEQ ID NO: 190172 - DNA, 543 bp, Klebsiella oxytoca
atgaagttaatcagttttagcgtaagcaatattccccgatacggttttctgcgggaggaaggcgttgtcgatttaacccgccatttcctgcaatatccgtcgctaaaatcctttctggcggccatggataacattccggcagaaatgctttcgcatatggagatcgactacgccatggaggagatcgaatttttgccgctgatccctgacccgcagaagatcctttgcgtcgggatgaactaccaggcgaaacggctggagtttgatgaacaggatcccgatccgacgctgtttattcgcttccccgattctcaatgcggccatctgggcgacatcattaagccggccgccagccacgagtttgattatgaaggcgagctggcgctggttatcggcaaacgcggacgcaatattcctgttgcgcgggcgctggaacatgttgccggctacagctgctatatggacggctctgctcgtgactggcagcacgcgtggtttaccgccgggaaaaactggccgtcgactggcggcttcggcccctag

SEQ ID NO: 190173 - DNA, 303 bp, Klebsiella oxytoca
gtgacgcgggatgaaattaccgatccgaacgcgctggccatccaaacccggctcaacggcgtggaggtacagaatgacaataccgccagcatgatccatcgcgtccccgagctgattgcctatatcagcaccttctgcctgctgacgccgggcgacgtgattctgaccggctcgccgggcggcgtaggcaaaaagcgcactccgccgttgtttttgcaggatggcgatatgattgaagtggaaattgaaaagatcggttgtcttcgcaaccgcatcgttaatgaggtgccggaagccgtttga

SEQ ID NO: 190174 - DNA, 909 bp, Klebsiella oxytoca
atgaaaaatgatatcagaaccctcgaccttaaccttcttaaggcccttgatgcattactggatgagggaagcgtgactcgggctgcacagcgcctctccctgacgcagcctgccgtcagtggtatgcttattcgcttgcgtgattactttgaggatccactctttgttcgcaccagccacggtatggtccccacaatgcgggccaacgaactttctacgccggtaaaacaaatcctcaccgatatcgctatcctgctgaaaccaaagaaatttgatcccgtgacggtggaactgacttataccatcgtcgcaacggactatgcccttaaggctgttgtcgttccgttgatggctgagttaaaacaacgtgcaccgtatattaaaatcgccgtgcggcccgtggacaatgagcgaatgtatcagcagttgtctcggggtgaagtcgatctggctttgataacaccgcaaacaacccccgaagacctgcatggaagagcgctctatgaagaagattatgtctgcgtagcacgacgtcatcatcctctggcagcgagttcagacatgacgctcgaacaattttgcagacaggaacatattctggtgtcttcagaaggtaacttcaccggtgttacagatgaagcactggctaagctcagtctgacacgacgagtaggcatgtcagttaatagttttcaggtgatacctgatatattgcgagtgactgatatgattgcagttgtacctcaccgcatggtcttgactaacaacgatctcatcattctccctttgcccctgaaagtacccggctttaccaagagcatggcctggcatgagcgaacccatcgtgacccaagccatcagtggattcgtgctttatgcgcagaagtaagccaacatcccgcgccctga

SEQ ID NO: 190175 - DNA, 507 bp, Klebsiella oxytoca
atgaacgcgattaactggcctgaaggctttattccgggttttaccgataactttgtttctaatgaaatgatcatctcaggtctgaacgtcaatgatgtctggccgctcctgagtcagccattgctatggccggaatactataaaaattccgccgatgtgcgcttttatgacaacaaaggtccagaattggaaaatggggttcgcttctacttcagcacgtttggtttcccagttgaagctcaggttgtggagtttgttccacctgctgaaggtaaacctgctcgcctggcatggcacggatgggccggtgaaaaagataccgctcagcgactcgatgtccatcatgcgtggctactggaggatctttccggtcacagggtccgtatcctaacgcaggaaacacagaacggagtcccggcaaaagatctggcaaatacccgcccgaacccaatgcttaatggtcatcaggaatggcttgacggcctgattcgagcagcaaagaaataa

SEQ ID NO: 190176 - DNA, 1380 bp, Klebsiella oxytoca; identical to SEQ ID NO: 172801

SEQ ID NO: 190177 - DNA, 546 bp, Klebsiella oxytoca
atgagagatcatcacgaagaaggccgtgggccacgcggacgccacggcgaacatggcgaacacggtcgcagaggcggcggacgccggcagcgcttctttgggcacggcgagctgcgcctggtcattctggacatcctcacccgtaatgccagccacggttacgaactgattaaagagatcgaaaccatgacccagggcaactacagtcccagccccggcgtcatctacccgacgctcgatttactccaggatcagggattaatcagcgtggctgacgaaaacggtcgcaaaaaaatcgccatcaccgccgaaggcagccagctgcacgcggaaaaccagcagccgctggagcagattcaggccagactgcaggcgcgaatggtgggttgtgagctacgtaaaaacccgcagatgaagcgcgcgctggagaattttaaggcggtactggatttaaaagttaaccagcaggaaataaccgaagcgcagctaaagcagattgtcggcgtgattgaccgcgcggcgatggagatctcccagctcgactaa

SEQ ID NO: 190178 - DNA, 774 bp, Klebsiella oxytoca
atgacaacgagcaggaatcctaaatacccgcagcgcgtgcgtaatgagctgcgtttccgtgagttaaccgtattgcgcgtcgagcgtatcggcagcgcattccagcgtatcgtgctgggcggagaggcgctggaaggctttgtctcccagggtttcgacgaccataccaagctttttttccccactgcgggtgctgcgtttacgccgccggaggtgacggatgaaggcattaactggggcgaaggcgtacgtccggcgacccgcgattatacgccgctttacgacgccgaccgtcatgagctggcgtacgacttctttattcacgatggcggtatagccagcagctgggcgctggcggcgaaaccgggcgataagctggtcatcggcggcccgcgcggttcgctggtggtgccggaagattacgcctggcagctgtatgtgactgatgagtcaggtatgcccgcgctgcgccgccgtctgctgggattgcggcagcttccgacgcgcccgcaggtcacggcgatcgtcaccattggcgatgagtcttatcaagattacctggccgatctcgatggttttcatatcgagtgggtggtgggacatcactcctctgccgtggccgagcgtctggcgcaggttgtggttccaaccgaagattattttatctgggtgaccggggaaggcgcggtggtgaaatcactgctggcgcattttgaaggtccggagattgacccgcagctggtgcgttcgcaggcctactggcacagcaagtaa

SEQ ID NO: 190179 - DNA, 660 bp, Klebsiella oxytoca
atgagccgttttcgccatgcgctggccgagcgcgacgcccatatcctgacgctcagggcggtgatcgccctgctgtgcctgtgtctggccggcgtcggctacggctggtactccgcgccgcaaaagctgacgctgtggttcccgccggatctgcgcagcggcagcacccgcccatggtgggaagtgccgcccgccagcgtctacgccttcaccttttatattttccaacagctgaaccgctggccggacaacggcgaagcggattacgcccgcaatatccgcgccctgcgcgcctacctgacgcccgcctgccagggctggctgaaccacgattttcaggtgcggcgcgacggcggcgaactgcgcgaccggacgcggggcatttatgaactgcccggtcacggttacggcagcccggtgcgggaggataacgccgcgtcgcacccgcgcgtggaggtgctgagccgcgacagctggcgggtgacgctggacgtggcggtggaggagtattaccagaacgaaccggtgaaaaaggcgctggtgcgctacccgctgcaggtggtgcgctacgccatcgacggcgaaaagaatccatggggactggcgattgactgcctgagcagcgcgccgcaacgcctggtggcggaggacaagccatga

SEQ ID NO: 190180 - DNA, 354 bp, Klebsiella oxytoca
atggcgacccttcctttccttcccgaccggctgaaccgcgaacccatcgtctggcgcggtttgaccaccagcgaactggtgctggcgctgctgggcggactcggcggcggcgcggccctcggcggcgcgctggccctgttttttcacagctggccgccgatccccgccgcagcgctggcgggcgcggcgctgttgattcagggcggcgggcgcattctggcgcgccttaaacgcggcaagcccgacagctggctgttacaggcgctgttcgcctggctggagcgccgtcacctgcgcggcgcgcagctcgttcagcacagcgcggtatggaccttacgcaggagcccgcgatga

SEQ ID NO: 190181 - DNA, 318 bp, Klebsiella oxytoca
atgcgcggactactgttactgctgctcccggccttcaacgccctcgccgacctgccggagatggaagatccttcgcgcggtcagggcgacggcattatggaaacgctgcaaaactacggctacgacatggtgatcctgctgacgctggcgatctgcgccgtcggctttctggtggtcgccaacaactgtatcgccacctattcggagatccagaacgggcgcaagcagtggaaagatctgggcgccatggcgggcgtcggggcgatcctgctggtgatcaccatctggctgcttaaccaggcttcggacattttatga

SEQ ID NO: 190182 - DNA, 234 bp, Klebsiella oxytoca
atgactgaagcacagatcgccgcattccaggccgccagccagagcaaaccggaagccgtcaatctgctgatgctcggcctgtttgccagcgccatgttgctgtggtgcgcctggtcgctgctcaccgcctggcagggcgtctgccgtcagcgtttaagctggcaaagcttcggcgcagtggcggcccgctcgctgctgctgttactggtcagcttctggctggcgttgagctaa

SEQ ID NO: 190183 - DNA, 309 bp, Klebsiella oxytoca
atgcagctacagaccgcattattactaacaattctgccattcccggccctggcctccgcctccccggaatccacccaactcgccctcgcgctaaaacagctctacggcgtaaaagcctcgctggatcgcgccagaacctgcgctaacaccgatccccaggcgcgttactacttcgactacccgcaggcgcagcgcgaccttgccgccgttgaacagggcattcagcgctaccttaccccgtcacgggcgcagccgcgcgccgttcagcccctgagcgccagctatcaacgggagcacaccaatgactga

SEQ ID NO: 190184 - DNA, 1242 bp, Klebsiella oxytoca
atgaatcaacctttcataaggctattaaataaaaaattcattatttcagtaataacttcatctacatttattactggatgcacaatggctgtcatatggttctatctgtcaaacattgataggttagacattttctttgatgctgttagcctcagttcagccttaggtatcatattcttctttatattattctcgatttcaggatttagcttagtaattttcatatcatcttttattttaatactcacttacacaggatacgaaaataaatttaaagattactcaagcataccccatcgaatttctactgtttgttatcaaaatagtttatttatatgttgcgggatgattattggctactacatttattatctttctggattgaatggttatgtcataaccatcatcggcttggtattgatgcttatacatagttatacggtctcttttcttcggttatttagaatacagaggtttcgtttacatcaatctgataactacgagaaattgcccaacaaaaaaggattattattcttattacccttgcagcttatggcgcccggcatcgtacaaatattacccatgatatttctgctaactcaacttgattttagtgaggggacaagtgattgggttgaaatgctaatgctccttgccttaacagcggctattgttaccattggtattctgccgggcgccatacatcttaatgagcgcagaaatggcgatagaatcaccagcattatagtcgttttaatatgtatacctgtcgcaatcgctgtatttagtgtctggtatcgccctatccccaatatgatcattaatatgacgatgaatctctccgggattagtgactggagaacacatcagtattatattgaaagcaaaactcatcctcatagtatgtttaacggtctaacctggaacactcgatattatcagaatatcccagagagatttttcatcaccggcgttagtacattcactttagggagtataaagctgatatgccccactgaaataactgaagcaagaaaagaaagcttgaaatttaccgttaatgatatcaatgagtatgagcaaaaaggaaaacaattaaaggcgatagccatgaaatgcatcccttttgataagaaggatattcatacctgggattcgccattacctgagccgatttattacaagaaagtcaaacagaccatagataactctatgctaaaaattctccataccctgaaatga

SEQ ID NO: 190185 - DNA, 285 bp, Klebsiella oxytoca
atggaaattaagtggctacgcaaagccgccgccaatctggaagctgaatatcaatatattgctgaagaaaatccacaagccgccgttcagtttatcaacgaagtctggcggcttacccaactgctgaaagaacagccggccatggggcgcactggtcgagttgcggaaacgcgcgaattagttcttcacaactatccttatattattccttatcgcgtgcgaaataatacaattcagattttgcgcgtgtttcatacgcatcggcgtttacctgcgaattggtaa

SEQ ID NO: 190186 - DNA, 246 bp, Klebsiella oxytoca
atgggcgtaatgtcagtccgtttaagcgacaatctgtccgcacagctggaagcgctggcgaaagcaaccggacgtacaaaatccttcctggccgggcaggcgattgaagattacatcgcccgcgaagcctggcaggtagcggaaatcgagcaggctctgcatgaggctgacgcaggcgattttgtcccggcggaagaaatggataatctgtttcagcgtctgggagtaaagcgacatggaaattaa

SEQ ID NO: 190187 - DNA, 672 bp, Klebsiella oxytoca
atgagccagcagcgcgcgccatctgtccgtccgccacagggagcggttggctgcttgctgtcgctggcaggacgggttatggggctggtgcttggggcgctgctattgcgggtggtgcttgaactgttggggttatatttctggtggccgcaagagggaagcaggcatgtttttcaggtgatggtgcatgaattcgcggacttaactcgggatctgcgcagacatcctctgaaaaatgaagccctgacatgcctggaatatgggcgcaccaggctggtgaacaatacagaatggatgatttcgttgttacgttcaatgcttccagctaaaacgctgccagacatcatatatacgttaacctggacgcagttaagctttgtcgctcgcttgctcaggctgatcatcacgattccgctgtttttactatgtgcgattgcagggctaacggaaggcctggtgcagcgcaacttaaggcgctttggtgtcggaaatgaatcaatttttatccaccgctctgcccgggtactgggaacgtccaccctctccatttattggttattttacctggtacaaccaatgttatggtcatccgaactgtatctgctgccagccgccttatggaccgggatagcattatgcgtaggggtagacagctttaaacgctggttataa

SEQ ID NO: 190188 - DNA, 2019 bp, Klebsiella oxytoca
atgagccgttatccgctggaagcgctgctgcgcccgcccgttgagttttacagcgccgtcaccgccctgtgcgccgcgctcatctgcctgcgctgcgcgccgttactgatgctcaccgcctggcagagccggctgatggtctgcgccctgatactgctggcgctgcggcgcggctggcagggatggcgaatcgtgcgctaccagcgcaatctgctgcgcctgccgcgctacgcgctgaccagccagcaaattccggtcagccgcgcccgtctgcttctcggcaaaggcttccgctggcagccgctccatacccagcggctgtatgactgtctgcaaccggaagcagcgcgctggctgcgtcccggcagatgttatcgcctggcgcgggccgtggaaaaacgcggcgaacaccgcttgccgcgcctcgtcaggctgctgagcgccgaccactggctgaatccggttcgccctctgccgcccgtcggcggcacgccctggctgcatggcgtggagctcaaggagagcgacgtcaccctgccgctcggcgagcgcgtcggccacaccctggtgctcggcaccacccgggtgggcaaaacccggctggcggaactgctcgccacccaggatatccagcgcggcgacgtggtgatcgtcttcgatcccaagggcgacgccgatctgctgaaacgtctgtgggtggaagcaaagcgcgccgggcgcgacgatcgctttatcctgttccatctggcgtacccggaaatcagcgcccgctacaacgccatcgggcgctttggccgcatctctgaagtggcgtcgcgcctggccgggcaactttccggcgagggcaacagcgccgccttccgggaattcgcctggcgcttcgtcaatatcatcgctcgcgcgctggtggcgctcggccagcgcccggactatcagttgatcgcccgtcatgtggtcaacatcgacgctctgtttatcgactacgcccgcatgacgctgccgcgccataaccaacgggcgtgggaggtcgtcgcacaactggcggagcggattaacgataagaacacgccgcgtaacctgcaggggcgcgaccgctacgtggtggcgctggagcagtatctgagcgcggagaaactttacgatccgatcctcgacggcctgcgctccgcggtgcgttacgataaaacctacttcgataaaatcgtcgcctccctgctgccgctgctggaaaaactcaccactggcacgctggccgccctgctcgcgccggattaccacgatctggacgacgcgcgtccgatccttgactggcagcaggcgatccgccagcgcgcgattgtctatatcgggctggatgcgctttccgatgcggtggtcgcctccgccgtcggcaatgcgatgttcgccgatctggcgagcgtcgccgggcatctgtataagttcggcctcaatgacgggctgccgggcggcgatgaaaaaccgccgccgataaacctgcactgcgacgagtttaacgaactgatgggtccggaatttatcccgctgatcaacaagggcggcggcgcgggcattcaggtcaccgcctacacccagacgctgagcgatattcaggcgcgcatcggcagtgcgccgaaagcgggccaggtggtgggtaacttcaacaacctgattatgctgcgggtgcgcgaaaccgccaccgccgagctgctgaccaaacagctaccgcaggtggaaatccgcagccgccaggtgagttctggcatcaccgacaccccaggcggcgtcaacagcttcaccagcagtacccgcgaacaggtcgttagccgtagcgtgccgttgctcgacaccgccgcgctgatccagcttcccaaaggccaggccttcgccctgctggaaggcgggcaactgtggaaaatccgcctgccgctaccggtggcggataaatgctggccactgccggaatccatcgaacggctggcagagtggatgcgcacgcgccagcaggagcaagcggaatga

SEQ ID NO: 190189 - DNA, 522 bp, Klebsiella oxytoca
atggcgcgaagtgttgccctgatcctactgctgccctggctcacgctggctcaagcgttgccggcggcgtaccagcaggcggcggaacgctaccgggtgccgcccgaactgctgtgggcagtggcgcagaccgaaagcggcgcgcgactgaacgcgcagcgccaaccgtggccgtggacgctgaatatcaaagggaccggctaccgctacgccagccgggagcaggcgtgccgggcgctgctcgccgccgcccgcagcaccaggctgaagcgcatcgacgtggggttaggacagatcaacctcggctggcagcgcgactacttcgcctccccctgcgacgtgctgcatccttaccgcaacctggcgctcaccgcccgcctgctgcgccagcgctacgacgaacgccccggaagctggctcaacgccgccgcccgctaccaccgtcccgccggcggcgcgcccgcgacgcgttaccgccgacaggtcagccaggcgctgcaacagctggcgcgaacgccatga

SEQ ID NO: 190190 - DNA, 675 bp, Klebsiella oxytoca
atgaagcgtcttgtcccgctgctgctgtttagcgccggtttgcaggcccagccgctgccggtgcagaacagccagaacagcgccaccgccctgcaaccgctgaccacgcaacagcaggccgcggtatggggcatcacgccgcaggagtggcagcgttacctgacgctgaaacagcaggcgcgcggcgtctggtcgccggggctcgatccgctgaccacgctgggcgttgaggcggaaaacgatcaggaacgccagcgcttcgccgaactactggtgaaacaggaatatcagcggctggaaaaagagctggcctttcagcgggcgtatgacgccgcctggcgacgcctgtatccgggactcaccccgctgaagaccgcctcttccggcgcttcccgcgtctcgctgttcgtcaaagaacgctgcccggcctgcgacagcctgttgcggacattgctggcgcaacgccgtccgctggatatctggctggtgggcagcaacggcgacgacgagcgggtgcgccgctgggcgcaggaccacggcatcgacgcaaaacgggtagatgaacacaacatcacgctcaaccacgacgcgggccgctggctgcggatcggccagggcaaaatgccggtggcgctggagcggcagggggaacaatggcgcgaagtgttgccctga

SEQ ID NO: 190191 - DNA, 681 bp, Klebsiella oxytoca
atgaaactgctgttggctattatgctggtgctgatgctcatcgccgccgatggcatcgccaacgcgtcagaatcggcccgcgccgtggtgcgctacgatcgttacctgctggtcaacaccgcaccgacacagccgccgctggagcagctcaccaccctgacggtgccgcccggctttcatcccgatcttggcgaagcgttgcagtacctgctgcgcgacagcggatattccctgtgcctgcccgacagccagcgcgcccggctgtacgccttcccgctgccgctcagtcagtaccacgttggcccgctgcggctcaaggccgcgctgcagatgctggcgggaacggcctggcggctggatatcaacgacgcccggcgcgaggcgtgctttacgccgcaaagccaggcaaccccttccatccccctgaaggtcaccgaccgtcgtcccacgtcccgccacgttttggggccggcaacggccccgttttttctggccgggacgatacaacgcggcgaggtgcgcctggcggtgatcgtgccgccggatgcgcgctacctcaatcagacggtgtggctgcgtccgggcgaacagtggcgcggctggcggctggagcggctcggcacgcagcaggccgtgttccgtcacggcaaacgccgcctgacgctgaagataacggagtaa

SEQ ID NO: 190192 - DNA, 381 bp, Klebsiella oxytoca
atgaataccgaatctgactcgcgcgcagaaaccctgaaccggggcgacctgtttaatctcaatgacgcggcgctggccgccgggctgccgctggagctggccatcacccttccggcccgcaaagtatgtctggaaggccgggacgagaacgccacaaaagaattactgcaaggcgttgaaatggcggcggtggtggcgtttatcgcccagacgcctccgcagcgcaccctccgcgccgattaccaaaccgcactgacgctgaacaccaacggcagcgttcggcagcaaaccgtcaaactgacattacgcgttcatttcaccgaacgcgatactccctgctccgccacgctggggttgctgggggaaaaatggccttactga

SEQ ID NO: 190193 - DNA, 2307 bp, Klebsiella oxytoca
atgaaattcagcctcaacctgtacatcctcatcctgttcatccccctcgcccgggctgactaccacccgactatcagcgcaggcgtcacggttgccggcgatgtggtggacggttcgcagggcgatcagcatgtctatggcgtgcttaccgactcgacgatcgtcggccagagtgcctggagcgacatcgccagcggcgggcaaaccgacaacatcctggtgacccagcagggaacgctgtttctggaacccggcagccaggcggaccacacccaggtgaccgacggcggcatgctgcaaatcaacggcgtctcccgcaatgcttacgtggaaaacggcggggaaatttatatcaacgctgggaaaaacggggtggagaacgcgctgcagggcggccaggccatcgacaccaccgttggcgccggcggagtgatgatcaaccgctacggcgtggatgccaatacccgcgtcgaagcgggcggcgagctggataccggctgggattatccgtatgaaatacgcaacaccgccctctcccgcaatgcgatcatcgaaagcggcggcgtccaacgggtaaccaacggcggcaccagcgcaggcagcctggtgaacgccggcggcagcttaattgtcagcggcacgtggcattacgacgtggtgacggacgaacagccttccgcatggtatcggggaacggccctcaacagcaccgtttacggcgccatgcagaatctgggcggctttgatcaaaacactaccgtcgcagccggcggtcaatatctgctggacggcggcgggatcgcccataagctgaccgtggatcagggcggcagcgcacaaatccatcacgggcagcttgaagacttctggctttacggcctgatgaacgttggccctgaggcgacgctaagcggcaacggtgaagtcggcgacggcggcgaactgacgctgaacgagggcgcacaaacgaatacccttgaccttacgttggcaggtacgctgaccctgcagaaccgcggcgataatgcgccgcacgattatcaactggataatgtcgccctgaacgagggcgcggtctggtttgatcccgcctcgttcagcacgctgacgatggccaccctctcgggctgcggagatttcattatgcataccgatatcgccgaccagcagggcgactttctgaacgtcaccggtacggcgagcggcgatttcggcgtctggatcaaggataccggcgaatcccccgccgacgcccggtcgctgcaaattatccataccggcggcggtgatgcgcagttcactctgttgaatcccgatcagcaggtggatatcggtacctgggaatacgccttaaccccggacggccagggcaactgggcgctgacgccggagtccacgctgacgccctccaccgaagcagtgctggcgatggcgaacgtcacgcccaccatcttccacagcgaaatccgcccgctgcaaaatcgccttgatgccgtccgctcacggccacacgacggcgagatctggagcgccgcactcagcaaccgcgttgacgtcaagcgcacaggcaacgccgcttatcgccagcggctcggcgggctggttatcggttacgacgccagccggacgctgaacggcggcgtgataacctggggcgtggcgggcagctacagccgttccagtctggatctcaccaacaacggcgacggcagcgtcgacagctacagcgccgcgctgtacgccagctattacgccacaaaccgcttctggctggacgggctgctgaaaagcaacctgttcaaccagcacctcaacgctcgcatgaactccggcggccacgccgacggcagttacaccacgcccggcgtcggcggcagcctgagcgcgggatatgacctcaggctggcgaacctcaccctgtcgccgtttatcggcttcagcgctttcatcacgcaaagcgacgactaccggctctccaacggcatgcaggcgcagcccggcgtcgccaaatccgcgctggcgcagggcggccttcggctcagccagcaattccagacccaccagggctggcggttgacgccctggctgaaggtggcgctggagcaggaattcgcccacagcaacccagtcagggtgaatgacgatcgcttcaacaatgacattgccggtacgcgaggcagctatcaggcgggtattagcgcggcgttgacgcggcacatgcgcctgtccgccactgtccagtaccagaaaggcgaagggatggagtcgccgtggacgggggaattggggttcagttacaccttctaa

SEQ ID NO: 190194 - DNA, 210 bp, Klebsiella oxytoca
atggctaaacaaatcctgaccatcaccctggaagatatcgttcaccgtgaacatatcgaactgaactgctcgctgaagatcgacgccatgcacgaacccggctccgtatcggaaatcgtggcgacggcgtttaaacatcactacccgcagatcctcaagctgtgcatggacacggctgatgacattgcccgtctgaacgctcgtcattga

SEQ ID NO: 190195 - DNA, 1827 bp, Klebsiella oxytoca
atgcagctctatctgtgcgaaaagccctctcaggcacgcgatatcgcccgcgtgctgaacgccactgcccgccgcgacggctacctgtccggcgcagacctcgccatcacctggtgtttcggccacctgctggagatggccgcgccagaagactatgacccgacgctgaaacagtggcgggcggagcgtctgccgattatcccgcagcagtggcggttgaacatcaggccagaggcccgcaagcagctgcgcattatcgacgcgctgctgaaacaggctaacgccgtggtgatcgccaccgacgccgaccgcgaaggggaaaccatcgcgcgcgaagtgctggcgctgtgccgctggcgtggaccgatccagcgtctgtggctctccgcgctggatgaaaccagcatccgccaggcgctgacgcagctgcgccccggcgacagcagcgcgccgctgtatctggcgggcgtgggccgcgcccgcgccgactggctggtcggcatcaatatgacccgcgcctgcacgctaatgagccagcggcataaaggcgtgctctccgtgggccgggtgcaaacgccgactctgcgcctggtggtggaccgcgatcggcacatcagccagttcgttccccgtcccttctggcgcgtggaggtacggctgcgcagcaacgacgccgcgtttctggcgcgctggcagcccgacgacgcctgctgcgacgccgaaggccgttgcatccgcgagtccgctgtgcgtgacgccgccaggcggctgcagcaggcgcaaacggcgttggtgcaaaacatcgccacccgcagagtgcaagaggcgccgccgctggcgttcaccctcagcgccctgcaacaaagcggctcaaaacagtggggaatgggcacgcagcaggtgctggatatcgcccaacgcctgtatgaaacccacaaagcgaccacctacccgcgcaccgactgcggctggctgcccgtctccatgcaccctgaagccccacaggttttagctgcgctggcggcaagcgacgcctcgctgagcgccatcacgagccagcttgacctgcaacgccgctcacgcatctggaacgacgacaagatcaccgcccaccacggcatcattcctacccggcaggcggtggatctggcgcgcatgagcgacgatgaacgcaaggtatacggactgatccgcagccgcttcctggcccagttcctgcctgatttcgaggccgacgataccgaactgcgcctcaactgcgccggtgaaaccctgatcgcccggggaagcacaaccgtcgtcaacggctggcgacagctatttacacgccagctggaccgcgacaggccagaggaagcgcaacgcatcccaccgctccggcagggacaaacctgtcaggtggagcaggtcgacgtgcgcgcccgccagacgcaaccgccggaacactacacggaaggcacgctgattgcggcgatgaaaaacgccgcccgctttgtcaccgacccgcacctgcaacaacggctgaaagagagcgccggcatcggcaccgaagctacccgcgccggcattatccagacgctgcttaagcgcggttatctgataaagcgcggacgctttctgctggcgaccgacaccgccagaacgctgatggaggccctgccggaaacactgaaagatcccggcaccaccgcgctgtgggagcagatgctggatgaggtggcgacgggcaacatgacgctggaggatttcctggcgcagcagcaacgcgccgttaccgcactgaccgcacaactactcggaaaccgcaggagcaaccaccatggctaa

SEQ ID NO: 190196 - DNA, 444 bp, Klebsiella oxytoca
atgctgagtgatcacgactaccaaccctgcgcccgcaaaagctcgctaaagggccttttaaaggcctttaagggtaagggagaacttcaggcgttgttacaggaactgcgggagacgcaggcgcagctgctgcaactccagccgatgctgaaacaggcggtttatgccctgccggtacgctatctgccgctggtgctgtgcagcaacccggcgcgctccggcgtcagctatctgcgctggcgcaatctggataacaaccgttccggcagcgcggcgctagaggatattctgacccagcccgacacctcgccagcgttgaggaaagcgctgctggcgatcgagcgccagcgccaggtgctgaatatgcagcttgcggtggtgacgtttatgcggcggcggatagggcaactcaccgacgcgggtttagatttttcgccaaagtga

SEQ ID NO: 190197 - DNA, 612 bp, Klebsiella oxytoca
atgcccggcgtcaccctgctaagcgatatccgcatcacgctgcacacccgcatcgccgccggattatggcaggcgcagcccaccagcctgccgctgtgcctagcgctgctcaaccgtctgctgcgcgccgaacagcatgacgatccgtgggccgcgcactggctgacccatatccggctgcggctcgatgtactgaactatctgctgcagcaaaaacatggcctgctcgaccgccgcttcgccgggctgccggaggccatcgacacgccgctcggccacaaccccgcccctatgcaattcacgctgccgctggcgctgctaaccccgccgggctcgcgcctgatgcagatcgtggccgggtacgatcgactggtatgccgcgccctgctcgcctggcggctggatctgatctcgcaggaggaaaaaagcgacatcctcagcaccttcccgcgcatggtacgccagctgtacagttacgtgaatcgctttcgcaccaccggcgttacccgcgacgatgtgcgtcacaacacgccgctggcgcagggcgttgcccgacgcctcggccagttgccgaaacgcctgctggcggatattcatcgcgatgctgagtga

SEQ ID NO: 190198 - DNA, 879 bp, Klebsiella oxytoca
atgacgagtaacccccaggaccggctgttgttcctcggcaaccgccacgaaacggtgccgcgccgtctgctgctggcgcgcgatctctcgccgcgcgacaaattcgcctggcaacttctgcgccttaacgcccatgacgtcagcagcggcctgttccccacttacgccgagctacaatgctggctcgccgaccggccagagcgcgaaaaagcctcgcgcagcaccgtcagccacgcgctgaccatgctgcgcctgacgcgctggctgagcctgtgtcaacggctgcgggacgccagaaccggccagataaccggcaacctctatgccctgcacgatgagccgctcaccttcgccgacgcctgccaaatggatgcggaatacgccgcgctgctgaccgcctgcgcccaccatcgtaacctgcgtatccgcgctaccgccatcgcgctgctgctggctcagcctgtggacagtggacgaatctgcactgagtcctcattcgggaccgggccaggtactcaatcagtacccggcgtcaacagcccgggtcctgcaagaagacccggcgatgcagcaagggctggcgagcgctcccgggccgcctgcgtacttactgctacagatctaaaaactaacaataaaaggcgtacgctaaacctgcgctggcctgtggataaccccttcagcgccagcgagcgccgggcggcggaacgcgccatgggcgggctggacgccgaactctgccaacaggtgctagacgactgcctgctgcggctggcgcacagcgatatccgccgtccgctggcctatctgcttgccatgctggagcgggcgcgtcggggagagttcaaccggctgcgcagacgccgccgcttgccataa

SEQ ID NO: 190199 - DNA, 558 bp, Klebsiella oxytoca
atgccgccatcgattaaccaggcggtgcttacgcatgtggtgcaggcgctgaaggaaggccatatccgctactgcgaatcgctcggcttcagcccacaggaactctgcgaattgacgcgcctttccgccgacgacattctgtttctcagcaatagcccggtacagtttatgcgccttagtgtcgaccacgacatgctgagcaaaatgctggcccgcaccgagcaggaacgccagtttcagcaacggcttgaggaggcgctgacgctcggcgcttccattgagttcatcaaccactacttcggcctctccaccctggaggtctgcgcccgacggcgcttgattggcctgttcgtgcgccagggccgcaatctggcagcggacgaagaaaccgaagcacggatctggaaggcgtggaaaacggcacaggtgacaaagctggactccccgcaggcgctggaagccatgatgaccatcgcccgcgcccacgatctgtcgctgacggtgatctggaacctgctcaggcaatggcgacaggaggcgttgctgcatgacgagtaa

SEQ ID NO: 190200 - DNA, 1341 bp, Klebsiella oxytoca
atgagcgcctcacatcttctcaatcgctggctgcacggtgccgccactgcggaacccgaaatggttcaggtcacgctggaacagatccagccgttcaccctcaacccgcgcgtgacgcgcaacccgggctatgacgcgctaaaaacgtcgattcgcgcgcgcgggctggataacccgccggtgctcacccatcgtcccggcgacgaaaaatatatgctggcgagcggcggcaatacccgcctcgctatcctgaatgaactgtggcaagagacgcaggaaacgcgcttttaccagttttgctggccttaccgcccatggccgcaggacgtgtcgttgcaacagggggagcttcaatgcctgattggtcatctggcggaaaacgatctgcataatggcctcacttttatcgaacgcgccgaaggatgcctgcgcctgcgcgatctttaccgcaccgccggtataccctgcccgacgcagcaggcgctggcggagcagctcacccgcgacggctaccccatcacccagtccaaaatcagccgcatggtgcagaccgtcgactggctgctgccctgcattcccgacgccctgtacgccgggctgacgcgcactatcatcgaacgcctgctggcgctgcgcagcgcggcggaacaggtatggggccgactggccccgccggaacaagagcaggacttcacgctgttgctcaacaacgcgctccgcgcgttcaacggcgaaccggcgggcgtgatcccacaattggtgcaggatgaactgctgggcgcaatgagcgctcacggcgggatcccttacaacacgctgctggcggaactgagcgacgggcagagcaaacgtcaggcgctgctcggcccgcccgccgaaaagatcctctggccgccaccgcccgcaccggaaaaactgcccagagaaagcgctacgctggttgacgatgacgttctcactccgccggatgaagctgacggtgaagcggaaactaccgtcgagcgtcctgtcgaccatcagacgccgccgctgcacacgcaaatcgcccaggccgcgcaggagatcggcattatctgggggctgggcccctgcatcaggcaggatagcggggccgcgagcggattcagcgtcgcctcctgccaggctttccaccatccggcggcgcaaaaaggctggcaggtgctggcgacgctgagcgggaaatacgtcgcgccgatgcctctgctggagctgctgctgtcgccggcgtgcgacgatgaacagatcccgcgcatcctgcggctgatcggcctgtgtcgtcagcaacggctccgggaggcgcacgatgccgccatcgattaa

SEQ ID NO: 190201 - DNA, 195 bp, Klebsiella oxytoca
atgcacagcgacagattgttacgcatccatcaagtggaagagaaaatcggccttggcaaatcctggatctatcaacaaatccgcctgcaacagtttccgccctctattcgcattaacagccgccacgtggcctggctggaaagcgaggtcgatgcctggatccgtcagcgcatccgtctcacccgggacgcctga

SEQ ID NO: 190202 - DNA, 879 bp, Klebsiella oxytoca
atgaaaacctaccctatccggcaagagtggctgacgttagaggaagccgccgacgtgctgaaacaacacaacattgccctgctgcctgcagatctgttccgccacgcattgcacaaaaatctgacgctttccgtctggttccagtctccggcgctgctcaggccgttaacccccacctgccagttcgcctgtataaacaacgaaggcgagttctgccacccgtcgcgcaggcaaaaaatcatgccgttttcccgcccggaacgccccggtccgcaaatacgggaaacctgctgcaccctgtgggatctgccgcttatcggcctggagcgtctgctgattcaacaaaagatggcgcattccctggtctgcccctgcccgcagcgcggccattgctgccgcgaagccggcatcgtcgtgcacaatccggaggggcgttactaccagctttgcgagcgcaaaccgctgcgcgaaatcgctcttgagctcatcgaacagcgcggtaagctgcccacgccgttccatcagttcatggcccgcctgtatcgccgtcatccagcatccctgcccgcccgcttacggatgccgttctgctacccctccgcctcgctccctgaggatacgctgctggtaatacgcaaaacgcaactggaggcatttttgaaacaacatctgccggagggcaaaccacgcgtcaccaccgccctttcgcgcctgctgtggctggcctgcaagaaaaacccgcagttggacgatgagctgctggcccatccctacaagctgctgaacattttcgaaagctgggcgcaggaggaaggtttgcgcgtttcgctcaacggcgacacgctgaagagcgccctcagccgtggcgcgccagactga

SEQ ID NO: 190203 - DNA, 960 bp, Klebsiella oxytoca
gtgtgtgatggtgaacatcgattaataaaagaagcgaggctttattttaaatctggaaggaaaaactatgagggctactataagccaagtaaaagaaagttgatagatttgatcgtgagcgagaccggatttgataaatcattgttatttgcttctaccttttttaatgaatgcctgaacataggatatgatattgggtttgacgatcatggcacagcgaatcgtcctaaaattgacgtgcgtgagcttgaccataaaaataataatcagtggtcaaatctctggaaaccttgctcttcgacaatacttctaattgataatattaaaattggtttgacaattattgaaatgacagaaaatgttccagcaaaatgggtgagtggagaatacgtaagagtcaaacctggcgcgaaatccaggcgaacagaacagtacggatggatttcaaatcacgacttaccaagtggaaggttatgtttatttgcatactccccttattatggaactgattggcaaaaaaaatggaaggaaacagaaacgaaatctttgaatgatagtattcaatctattatacgtgacttgacaaaatcagtttctgagattgctgtgcaaataaaaaaggcagagtatgagcaagagcaggagaaacttcgatggcaagctatggaggagaaatggcgcaaagaaaaaatgctaaaaaagcaaagtgaagcttattataaaagtaagaatgatttacttttgattatggaacaatgggctgagaaaaaacgtacagagcaattttttaaagatttagagacggaagttgttaactcgaacattaaaaatccagaagatgtattcgaacgtatggcattggccaggcagtttctgtccaaagctacactgatagaaagtttaattaactggaaatctccagaggaaattcttgatgctgatgaagaatacggaaagtaa

SEQ ID NO: 190204 - DNA, 621 bp, Klebsiella oxytoca
atgtctgttatagcactggtccgtcagcggattaaccgcatgagacgaggtataccgttctctatcagtgggttctacccgctgggaagtcgcgcatctgtacagcaggctatgagtcgtcttgcaaaagaaggcatgattgttcgcgtagatcgaggattttacgcgcgaccgaaaccactcaagaatattccttccatcaagatcgtaaccagtgctgaaaaggtagtagctgcatgggctaaagagcgtggctataaaattaccatccaggggctggaggctgcttatcggctgggtatgcagacgcaagctccggttaagcgtatttactggtcgaatggtccaaccagagagtttaaggttggcaacgagactgtgattgttcagcacaagtcagaaagtaaactgaagtggctgaatcggcctgaaggggagttgttacgtgggttgctgagcctgagtggaaaatatgcccgtctggaagcaatcaaaaatgcttttaaccgtcttaatatctcttcccgggaagctcgctcagccattgctaagaaattagtgagtgaacccgctcttcagggatggcgtactcagcttgaactctttcggcaggctatctga

SEQ ID NO: 190205 - DNA, 1062 bp, Klebsiella oxytoca
atgagcagcatctttgaactctataaaactgaagaagggcggggccaacttcaggaaatattcagttatgctgcacagaagcacccattgagtctgggggcgagctttctggaaaaggatctctgggttacagagatcctacgtcttctgtttgatgaaggttttcttcatccatacacagtcgcttttaaaggtggaacctcattaagcaagtgctggaatgtgattgagcgcttttctgaagatatcgatttatcgattcactgggcggaacttgctggtcattcagaagaacaggaacaagaagcctggaaagcaagtacccgtagtcgaagtcagaatcaacgctttcgtgaacaacagcaaacaagactcgaagaatggaccgctgagttagtggaaaaacttaatcagcgtttccagtcttatggtatttccggcctggaggctcgtttagaggcggaaagtaggggagaaaaggtcgatatattctttcctcgtgttcacgctgattctgcggcttaccagcgagatcatatcttattggagttcggtggtcgtaaccgagggaaaccgacggatacaataacggtaagcagttatttatccggaataaaagagctgggtgaactggagttgccatctgcaacagtccaggcttataaccctggctatattctctgggaaaaaattaccgcactgcatcagttttgtacccaggaaaaagagctaaatgcagaacgtttatcccgtcactggtacgatgttgattgcctgttacagcatcagtttgccgatcattatgatacaaaagaagcaatgcataacgtgattgaaatgaagcagcagcgctggacctttcctggtgtggattatacgttggttgctaaaggtgagttacgtctggtccctgaagatgctgggcgccttgctgctatcgctgaagatcatcgcattgctattgagggtggcatgttttttaaggagcctgacgggtttgataaaattattgaacgtctccagcaagttcaggatgaatttaattgtgctatgaaaaggtaa

SEQ ID NO: 190206 - DNA, 927 bp, Klebsiella oxytoca
gtgatgttcacgatgcctctcgctccacagggcgcccacattgcgcgccaggaaaagctaccgcaggcttatcgtagccgttattacgccaggcttgcctaccgggcaatgcagacggaagcccggctgacacctaaacccggtctggttgacggacgaaatagcggcgctcaccaggatatggcgctgcctgattttctgcgcagcgccagcgcaattgctcgcgatctccccctgttcgttgaagagggggccgccagcgcggcgcgggatcccgactctgtactggatcgcctgaagcctatcgggctgcgttgcgaaacggccatgctgcgcgcgacgggaggcgtcaacacgcataaaggcgccatctttatactcggactgttttgcgccgcgatcggtcgtcacgaggcgacgggacaagcgatctcacctgccgcgctggccgccaccgtgggcgcgttttgtcaaggtatcgtcgaacgcgagttggttgaactccgcggtctgaccccactcaccgccgggcagcggctgtttattactctgggtttcaccggcgcgcgcggcgaagcgcaggccggatacccgttagtcatcgacaccgctctcccccgctatcgtcagctgcgaggtgaaggcctgagcgaggagctggcactgctcaataccctgctgctcattatgtcgcgcaacgatgatacctgcgtcgcctcgcgcggcggcattaaagggctgcgctggctacagcgtcaggcgcagctattgctcaacgtcggcgagatccgctcgccggccaacctctctctgctgcagcaattcgatgagctctgtatttcccgcaatctcagtcccggcggcagcgccgatctgctgatgctgacctggtttctttcacactttcacgacgaggagagtcaatga

SEQ ID NO: 190207 - DNA, 1494 bp, Klebsiella oxytoca
atgaaccacactcaagatttatcccgcatcatcggtgaactgacgccgtttaccgatactgacaaacagatgcagcgccagcagcgtcgggccaaaacctgcgcttcactggaagaagccgtacgccgcagcgggctgcgcgacggcatgaccgtctctttccatcacgcctttcgcggcggcgacctgacgctgaacctggtgatggaccagctggcagcgatgggctttaaaaatatgaccctggcctccagctccctgagcgcctgccatgcgccgctgatcgatcatatccgcaacggcgtggtcactcggatttacacttccggcctgcgtggtccgctggcggaagagatttcccgtggattgatggaacatccggtccacattcactcgcacggcggccgcgcccacctggtgaaaagcggcgagttgcatatcgacgtggcgttcctcggcgttccggcctgcgatgatatgggcaatgccaatggctacaccggcagcgccacctgcggttcgttaggctacgctatggtcgatgcgcagcacgccgctcaggttgtactgctaacggaagatattctgccttacccgcatcacccggccagcatcaggcaggatcaggttgacctggtggtacaggtaagctgcgtgggcgatgcggaaaagatcggcgccgatgctacccgcatgacctccaacccgcgcgagctgcaaattgcgcagaacgcagcgcaggtcattgaagcctcaggttatttccgcgaaggcttctccctgcaaaccggtaccggcggcgcttctctggcggtaacccgcttcctcggcgagaaaatgcgccgtaaaaacatccgcgccgatttcgcactcggcggcattaccgccaccatcgttggcctgcatgaagagggctacattcgtcgtctgcttgacgttcagggttttgacagcgttgccgcccgctcgcttgcgcgtaatcccgaccatattgaaattagcgccaacgaatatgccaacttcagcgccaaaggcgcgtcggtcaataagctggacgtcgttgtgctaagcgcgctggaaatcgacaccggctttaacgttaacgtgctgaccggttccgacggcgtgctgcgcggtgcgtccggagggcactgcgacacggcggtcggctccgcgctgtcaattatcgtcgctccgctggtgcgcggacgcattccgaccgttgtcgataaggtgctgacccgtatcactcccggatccagcgtcgatgtgctggtgaccgaccacggcgtggcggtcaaccctgcgcgcccggaactcgcacagcgcctccaggctgcgggtctcaagaccgtcaccgtggaatggctgcgcgaccgcgcacgccagctgacggacgaaccgcagcccatcgcctttaccgataaacctgtcgctatcgtgcgctatcgggatggttcggtgatagatatcgtttatcaggttcgcgattag

SEQ ID NO: 190208 - DNA, 897 bp, Klebsiella oxytoca
atgacgccagaacgtaaaaaccgcctgcgccgcagcatgctgttcgtccctggcgctaacgccgccatgctgagcaacgcgtttatctatcctgccgatgcgctgatgttcgatctcgaagacgccgtggccgtgcgcgaaaaagacgccgcccgtcgcctggtctaccacacgcttcaacacccgctttatcgcgatattgaaaccattgttcgcgtgaacgccctggattctcagtggggcatcgatgatctggaagccgtggtacgcgccggagtcgatatcgtccgactaccaaaaactgatactgcagaagatgttatcgcgatggaaaaagagattgctcgcatagaacgagactgcgggcgccagcccggcagcaccggcatgctggcggccattgagtcagctaaaggtattctgcaggctccggccatcgcccaggcttctccgcgtttaatcggtatcgcgctaggcgcggaagattacgtgcgcgatatccgtaccgaacgctccgctgacggtattgagctactgtttgctcgctgcaccattctgcaagcggcgcgcgcggcggggattcaggccttcgacacggtctacagcgatgctaacaacgaggcgggtttcctgcaggaagccgagcatatcaaacagctgggtttcgacggcaaatcgctggtcaacccgcggcaaattaccctgctgcataacctctacgcaccgacgcagaaagatgtcgatcatgccagacgcgtggttgaagcagcgaaagccgctgaacgcgagggcctgggcgtcgtctctctcaacggcaaaatgatcgatagcccgattatcgctcgcgcccatctggtgctatcccgcgctgaactatccggcgtccgtgaggagtaa

SEQ ID NO: 190209 - DNA, 297 bp, Klebsiella oxytoca
atgaaacagattgtccccgccgtagccgggactctggagtccagcgatgcattaatccgcatcgaaccgctggctcccgagctaccgccggaaattgaaatcaccagctcggtccaaaaacagtttggcgatgctatccgcgccacgctggctgccgtactacaacaacacgagattcgcggcgtcgccgtcatcgtggatgacaaaggcgcgctggactgcatactgcgcgcgcgtctggaaaccgctctgatgcgtgcgggcgcactgacgcagggctggggagaaaaatcatga

SEQ ID NO: 190210 - DNA, 1059 bp, Klebsiella oxytoca
atggacaccaccacgattatcagcagagtgacccgaaaaaatgcggcaaaaattgctgaaataatccgttttcttcaggctaataatctggatatcgaccctcacgttaccgattttgtggtgatttaccaacaagatgaaattgttgcatgcggtggcgttgacggcgacattattaaatgcatcgctgtttcccggcacctccgtggccagggagtattacttaagctggtcactgagcttattaatatcgccatggagaatggcaacagtacattattcgtgtacacccgcagccataacgaacgtctatttatcgactgcggtttcaccaccctggtttcgattccgggctgcatggtattaatggaaaatagcggttctcgcctgacgcgctatctgcaaaagctggcacagctgcgtaaaccaggcaaccgcattgccgccatcgtgatgaatgccaatccgtttaccaacgggcatctgcatcttatccgctatgcttcagaccattttgactggttgcatctgtttctggttaacgaagatgccgtccagtttcctttcacggaccgcctcgcgctggttcaggatgcgacgcagagaatgacgaagctgacggtgcatcctggttcacaatatatgatctcacgcgccacctttccggcttactttctgaaagaacagccgctcgtcgagcgctgctacacgcaaatcgatatcacgctttttcgtcaatatatcgccccggtgctcggcatcacgcaccgtattgtcgggaacgagcccttctgcccgataaccgcgcgctataaccaggacatgcgccattggctcagcacgccggcgcttcccttcgccccagtggaactcgtcgagatttcacggctgcagtggcaaggcacgcccgtttccgcttccagagtccgtcgtctgttgcagcaaaatcgccttagcgaggtcgcccccctggtacctgacaccaccctacgttatctgaagcgccaccagaaaactgacctggcgagcatgaccacaacccctacaggagcattatga

SEQ ID NO: 190211 - DNA, 1302 bp, Klebsiella oxytoca
atgaacatcagcatgatagtaatactctctattgtcatctcgattgcgttaggttaccggacaaaaataaataccggtctgttcgccattgtatttgcctactttataggttgcttcctgttggatatgaaggccggagaagttatcaaaacatggccgatcggtattttctttgttatttttgccgtttcgcttttttataactttgcattaatcaatggcaccttagaaaagctggctatgcatttgctctacttatgccgccactttccgaaatttttaccgctggtgatttatttcgccgccacctttgtggcgagcctgggggcgggtttctttaccgttctcgccttcttcgcgccgttaacgttgctgttgtgccgcaaaacaggaatgaataagctggttgccgccgtcgctgttaactatggcgcgctgggcggtgctaattttatgaccagcgccagcggtgttgtatttcgcgggcttattgataatgcaggctacagcgcaaactcttttatctacacgtcatctatttttctggtttctttcatcctaccgatagtggttattcttttattaatctttctcaccacccgtgggaataatgcggtcagcggcgctttgcaggttgaaaaacccgcgccattcgatagtaagcagaaattaaatctgctgctgattttcgcgatgctgctggtggttctggcattccccgtcatgcatctcattatgcctgacgctaaggacatcaagtttatcaacgccagagtcgatgtcggcctggtctctatcgtattcgccgttatctcactgtttctcaagctcggcgatgagaaaaaagccatcgctctggtgccgtggaatacgctgatcatgatttgcggcgtcgggatgctgattcaggtcgcgattaaagcaggcaccattgatatgctggcaagctgggtgggttcgagcctccctgccgccatcgtccccttcgctctggcgattattggcggcatgatgtcgttcttcagcagtactcttggcgtcgtctgtccggccctgttcccgataattccgtcaatagcctccgccaccggtattaacgccatgatcctgtttaccgctacggtaattggcgcgcaggcaacggcaatatccccgttctcttccggcggcagcctgctgctcggctcctgctccgaagacaaagaacgtaatgaactatttcccaccctgttgtttaaagcggtgccgatgtgcgtgttcttcgcgctattaagcgtagccatcatgatgttgtttttttaa

SEQ ID NO: 190212 - DNA, 795 bp, Klebsiella oxytoca
atgcattttgatactcatgctcatgtttttaccaccggtttgccgctggcagagcattgccgctacgtaccagagtatgatgctactccggcccaatatctggctcaactggatcggcaccatatcgacaaagcgatactgatccagccgagttttctgggtaccgataatagctatatgctggaagcaattcgtcagtcgccggaccgtttttacggcgtggcggtcatcgatccagatacgccgctttgtgcgatggaaacccttaaacagcagggaatcatcggcgtgcgcctgaatcttatcggacaagagctgccagatttaactatgccggtgtggcagcagcatctgcgccatattaacgcgcttggctggcatattgaacttcatcgcccagcggcggacctggcaccgctccttggcgtactgctcgccgccgatgtaaaaatagttattgaccactttggcctgcctgcgggaaaagacaacgacccgggttttatctatcttctcaaatatgcagaaaccggtaaaatatgggtgaaaatttccgccagctatcgcaacggcagcgcacaaaagccaactgataacacggaaatgctcatgcccttattattaaagcactttggtgccgagcgcctgctatggggcagcgattggccgcatacgcgttacgaagatcgcatgacttacacaaaagccatcgatgagatttatcattgggaattaacaaatactcaacgtaataatatccttagccaaagcgttatagagcttattaatcgttga

SEQ ID NO: 190213 - DNA, 726 bp, Klebsiella oxytoca
atggctcacgttttaccgatctatgtgcagatccaggaacaacttcgcagcggcattaagcggggcgattatccacctggccacaaactgccgtctgaaaatgaactggcactacagttttccactacccgtgccacggtagttcatgcgatgcacggcttgttaagcgaagggctcattgaacgcatacgtggcaaaggcacattcgtcaaagccgcgccgatagtgactcgcgtcagaaagcaagagcttggtttttttgagaaagatttacaggaaagcaatctttctattcagtaccaggtattcttctttggcgaagtgcccgcaacgccggcattattgacacatttacaactcaatgccggagcgaaaatataccgtcttgttcgtttacgccttattgacggcaggcctctggcggttgaatttcgctatcttgatgctgaaatcgccgcccatattactgtagcctctctggagacgttggccttacaaacgctatttgaacagcagctgggcattattattcataccattcataaccaggttcgcgtcgcgctgccggggcaggatgtggcaaaatttctcgatatcaaacgcagccgaccggtgatggtgcgtcaacatacttgcctggcaggagatgacaagcttatcctgtggggcgaaacctggtatcgcgaagaatatgaattccagtacagcacatatcgggataaataa

SEQ ID NO: 190214 - DNA, 2589 bp, Klebsiella oxytoca
gtgctggaagaataccgccaacatcaggccgctcgcgccgcagaggggcttgtcgccaaaccgctgaatgccggacaggcccaaaaactcaccgaactgctgcaacaccctcccgtcggcgaagaggcatttttatacgatcttttcgttaaccgtgtcccgcccggcgtcgacgatgccgccagggtgaaggccgattatctggcagcgctagccgcaggagatctcgtctcaccgctgatcgacaaaactcgggcgatagcgctactcggcaccatgctcggcggctacaatattcccgccttaatcgccgcgttagataaccccgaattagccccagcagccgcggacgcactttcatacaccctattaatatttgataattttcagctcgtggaagctaaagctgcagcgggaaacctatcagctcagcaggttctacgggcatgggctgatgctgaatggttcttaaaacgccccgccgttggcgaaaaaatcacggtcagcgtatttaaagtaccgggcgaaaccaatactgatgacctctctccggcgcaggatgtctggtcgcgcccggatattccgctgcacgcactcactatgctgaagaacccgcatgatggcattgaagcggaccagcctggcgtcattggcccgcttagtaaaatcgcgcagcttaaggagcagggattcccgctggtttttgtcggcgagacggtcggcaccggttcatcgcgtaaatctgccgccaactcgctgctgtggcacatgggcgaagatatccccttcgtgcccaataaacgcggcggcggaatggttatcggcggaaaaatcgcaccaatttttttcaacactctggaggactccggcgcgctgccgattgaagcggatgtaagccagctgaatatgggcgacgttattgacgtatatccctataaaggcgagatacgccgtcacgacgataataaattattaacgaacttcacgctgaaaaccgacatgctgctcgacgaagttcgtgccggggggcgaattccgctgatgatcggccgcgccttagtggccagggcccggcaggcactcagtctgccaccagacactatttttcgtcaggccaatgcacccgcagagagcagccgcggcttctcactggcgcagaaaatcgttggccgcgcctgcggcgtagcaggcatccgccccggaacctactgcgaaccgaaaattacctccatcggttcacccgataccagtgggccgatgacccgcgacgaactcaaagatctggcatgcctgcgcttttccgccgatctggtgatgcagtctttctgtcacaccgccgcttatccaaagcagatagatgtccagacacatcagacgctggcggactttatgcgcgaacgcggcggcatatcgctacgcccgggagatggcgttatccattcatggctcaaccgcatggtattaccggataccgttggcaccggcggcgactcccatacgcgcttcccgatcggcttatccctgcctgcaggctccgggctggtagccttcgccgccgccaccggtatcatgccgctggatatgccggagtcggtgcgcgtccgtttccatggcacaatgcgtcccggcatcaccctgcgcgatctggtacacgctattccgtattacgccagcaagcagggcctactgaccgtcggcaagaaagacaagatgaacatcttctccggtcgtatcctggaaattgaagggctggaggcgctcaccgtcgaacaggcgtttgaactcaccgccgccaccgccgagcgttcggcggcaggatgcaccattaagctgaacagcgcgtcgatcatagacagtatcaaaggcaatgttgtactgctgaagtcgctgatcgccgaaggctatggcgatcgcgacgcgctggagcgccgtattctggcaatggaagagtggctggtcgatccacagctgctcgaagctgacgccgatgccgactataccgccacgattgatatctatcttaacgatatcaacgagccgttgctgtgcgcgccgaacgacccggatgatgtcagaccgctatccgccgtcgcgaatcatcctgtaaatgaagtgtttatcggttcctgcatgaccaatatcggtcattttcgcgccgtcggtgaagtactcaacgctcacgagggccagctcccggtacgcttgtggctggcgccgcccaccaggatggacgccagtaagctcaaggatgaggggtggttcagcattttcggccagcgtggcgcgcgtattgaaattcccggctgttccctgtgtatgggtaaccaggcgcgggtagcggatggaacgacggtggttgccacctctacacgtaactttcccaatcgtctcggcgcaggcgcccgggtttacctggcttcggctgaacttgctgcggtcgcggctcgactcggcaagctccccacaccagaaacgtaccttagcctggtcgaacagattgacgagcgcgtttatcattatctgcaattcgatcggcttgataactatatggaaaaagccgctgaggtgatttttcaaacccgttgttaa

SEQ ID NO: 190215 - DNA, 1164 bp, Klebsiella oxytoca
atgacgtttatcgaagaagctcaggcaaagttcgccgagttaatcacctcagaactggcgcgcattgaagcgatgaagcaggcgggggaagcgaaagatttttcgcagcaggagcgtatcgtcgtcgggatcctgcccggcgacggcatcggtccaatcataatgaaacaggctttgcgggtactgcaatttctggcaaaagatgaaatcgccaccggtaaactggagctgcgtccggtcagcggcatgaccatcgaagagcgcgcgcgtctggggcagagtctgcctgataatgtactggaacaagttaagcagtgcgacgtgctgctgaaaggcccgatggtgacgccacgtccgggcgagaagtggccgaacatggtcagcgcaaatagcctgctgcgccgctcgctggatctgtttgccgctgtacgtccggtctctattccggaaaagaatatcgactggacgttctttcgcgaaaatatcgaaggcgagtatatctggggcaataaaggcattcagattaccgatgacctggccgtagacttcaaagttcagaccgcgcagggcaccgagcgtatcgctcgtcaggcgtttgaattcgcgagaaagaatggcaaaaccaacgtcactgtgatcaccaagtccaacatcgtcaagctagcggacggtaacttcctgcaaggcgtacgcaaggtcggcgcagagcattaccctgacattgaagtgcaggatcgtctggtcgatgccatgtgcgcgcgtatgggcgatgagaccttctgtaaggggcttcaggttttcgtcctgccaaatctgtacggcgacattgtgaccgacatcgccgccgagcttcagggcggactgggtacggcctcatcagccaacatcggtagccgttacgcgatgttcgaagcgatccacggtaccgcgccgggattggtgagcgaagggcgcggcgagtatgccgatccgtgcagcctgatccgcgccgtcggtatgctgctggcgcacatcggctacggcgagaagagtcgccggctcagcaaagcgctgctccagtgtaccgtcagcgaacgcaaaaaagtcgtcacgacctacaccaaagacgccagcgcggcggaattcaccgattacctgctggaaaccttagctcatcaggcttaa

SEQ ID NO: 190216 - DNA, 2265 bp, Klebsiella oxytoca
atgatcaagctttccgatggcggggtttacctgctgaatggcaccgaagtggttgaagagaaaaacgccccggcatctctgaacaaaaccgaagcgcaaaaaggcaccatttcatggtcaatcctcaatgcgcacaacacttccggcgatatgtcgcagctcaagttgaagtttgatgccctcacctctcacgacatcacctttgtcggtattgtacagacggcaaaagcttccggcatgacctacttcccgatcccttatgtgctgaccaactgtcataactcactgtgcgcggtcggcggtaccattaacagcgatgaccatatgttcggcctgtcggcggccaaaaaatatggcggcacctacgttcctccgcatctggcagttatccaccagtacatgcgcgagatgatggccggcggcggcaaaatgatcctcggatctgacagtcatacccgctacggtgcgctggggacgatggccatcggcgaaggcggaggcgaactggttaaacagctgcttaacgacacctatgacgtggcttatccaggcgtcgtcgcgatttatctgacaggcaaaccgcagccgggcatcggcccgcacgacgtcgcgctggcgatcatcggcgcagtcttcgagaaagggtatgtgaaaaacaaagtgatggaattcgtcgggccaggcgtctccaccatggacaccgattatcgcaacggcatcgacgtgatgaccacggaaaccacctgcctgagttccatctggcgtaccgacgccgacacgcactgtttcctggcgaagcacggtcgtccggaggcctaccagcgcctggaaccggccgatatcgcatactatgatggctgtgtacacgtcgatttaagcgccatcaaaccgatgatcgccctgccgttccatccgagcaacgtctacaccatcgatgcgctaaacgacaacctgaccgatattttgcacagcgtcgatcaagaagccaaacatattgccggagagcagatcccgttctcgctgttaaatcatgtggaaaacggcagactgcgggttcagcagggcattattgccggctgtgcgggcggtaactactccaacgtttacgcagcggcacagatgctgcgtggtaaaagctgcggcaatgacgccttctcgctggcggtctacccgtcttctcaaccggtctttatggacctggtgaagaaaggcgcgattgccgatctgatggcggccggcgcgattatccgtactgccttctgcggcccttgctttggcgcgggcgacaccccctgccatgatgggctgagtattcgccacaccacgcgtaacttcccgaaccgtgaaggctctaagccgggtgtgggccagatgtccgccgtcgcgttgatggacgcgcgttcaatcgccgcaacggcggcgaacggcggcctgctcacgccatccacagctttaccgcctgttgacgtcccggaatatgacttcgatccgaccccctaccacagccgcgtctacatcggaacccaccagaagatcaacgatgccgagctggtttatggcccgaatatcaaagactggccggaaatggagccgctgcatgacaacattctgctaaaagttgtctcgcgcatcatggatccggtaaccaccaccgatgagctgatcccatccggcgaaacctcctcctaccgctctaatccgctgggcctcgccgagttcacgttgtcccgccgcgatccgcaatatgtcagccgcagcaaggcagtacacgcgctggagaggtcccgcgcgcagggcgaaatcggcgaagaactacagtcagtatttacccaaatccaggccatcccggggttcgctgagattaaaccgctggatgtagagatcggcagcgtgatttacgccgtgaagcccggcgacggctccgcccgcgagcaggcggcaagctgccagcgcgtactaggtggactggcgaatattgccgaggaatatgccaccaaacgctaccgctcaaacgtcattaactggggaatgctgccgttccagatggtgggcaaaccgacctttaacgtgggggattctattttcgttcccggcattcgcgccgctctggacgccgactcgcgcacgttccgggcctttgtcatcagccccggaggtcaggtacaggagattgagctaacgatggcgccggtcaccaaagatgaacgggaaatcatcaaggctggctgcctgattaactacaacaaggcccgcaacaataagtaa

SEQ ID NO: 190217 - DNA, 1134 bp, Klebsiella oxytoca
atgagaaaattcagaacggtctttatgcgcggcggcaccagcaaaggctgcatgtttttaaaagatgacctgcctgccgatcgcaatcaatgggatcgcatcttcctgcaggtgatgggcgacccggatccgaagcaaatcgacggtatgggcggaacggtttcctctaacaacaaaatcgtgatcgtctggaaaagcgaactacctgacgttgatgtcgagtaccttgtcggccaggttatcgtcggcaaaagccaggtcgattataaatctaactgcggcaacatgaccgctgcggtaggcccctacgcgattgaagaaggtctgatcccggccgttgagccaatcgccacggtcagaatgctcaaccacaataccggcaaacgcattgatatcaccgtgccgtgcgaaaacggaacctttgcacaggaaggcgactgccagattgccggggtggacggtacctgcgcggagctgaaagttaacttcctcaatccagcgggttctaaaaccggttcgttgctgccaaccggcaatacgcttgacctcctgcatatccccggccacggcgacatagaggcgactattctcgacatcagcaacccgatggtgctggtacgcgcggaagatatcggcctgacgggcaccgagctacccgacgcgcttaaccagaatcagatcgtcagtgacctgctggaaaaaattcgcggcgctgccgcctgcctgatgggattcgcgaaagatctcgatgacgcacgcgacaatagcccggcggtgccgaaagtcggcatggtcactacgccgaaaagctatacggatatctccggtcagctgacacagcagcaggaaatggatttatgcgcccgcgttatttccgttttcaaatgccataaagcttgtcctctgacctccgccagcgccatcagcgtagcggcgtttctccccggcagcctggtacagcacatcgccaccctcaacgactggcgcgagggcatacgtatcgggcaccccagcggcgtcatgaaaatgtatccctcactggtgcagaacggcgatagcacggaggtgcccggcgtcgccgtgcagaggacggcccgacggattatggatggcacagtgtacatccgcgactaa

SEQ ID NO: 190218 - DNA, 1938 bp, Klebsiella oxytoca
atgaaacagaacattacccaaaaaattattgcccaacatttactaagcggcagcatggttgccggtgaagaaattagtatccgtatcgatcatacattaacccatgatgtcaccggcaccccggcctatctggccttcgaaacattgggcattccacaggtaaaaacggagcgttcggtcagctatatcgaccacaatatgctttataccgataataaaaatccggacgaccatatctatttacagaccgtcgccagcaaacatggaatttatttatctaaagccggaaacggtatttgccacacggtccatttcgaacgcttcagccgtccggggatcactctattgggttccgatagccacacacctaccggcggtgctgtcggcgccatggcgctgggcgcgggcggcctggatgtcgctctggcaatggcgggtgagccgacctggctgaaaatgccgcgagtgattaacgtacgcctgcatggccgtatgcagccgggcgtttcggcaaaagatattattctggaaatgctgcgccgtgaaacggtcaaaggcggactgggtaaagtctacgaatataccggcgaaggcgtagcgcatatcagcatccgcgatcgttcaaccatcaccaatatgggcgccgaaatgggcgcaaccacctccattttccccagcgatgaagtaacccgcgagttctttattaaagagcatcgcgagcaggactggatttcattgcagccggacgaaggctgcaaatatgacggctatatcgatatcgatctcaacacgctggagccgttggtggcgatgccggatatgccggacaacgtgactgaagcgcgcaactgtcgcgatgtgaaaatcaaccaggtgttcctcggcagctgtaccaacgcctcgtataccgacttcgccaaagccgcggcgattatggaaggccgcttcactcacccggaggtcagctttgtcgttgctcctggcagccgccagctttatcaaatgctgttacgcgacggcatcatcggcaaactcatcgctacgggcgcacgcgtcatcgactgcggctgcggcgcctgctgcggtatcggccaggccccttccaccgatggtgtttcgctgcgcacctctaatcgtaattttaaaggccgcggcggccatttgaatgcgaaactatatctctccagcccggaggtcgctgccgcatcggccattaccggctacatttccgacccgcgcgatgtggttgatgtcgccgtcctcaacgacattgtcgagcctcacaactatattatcgacgatcggttgattctggccccggcgaaaaacggtgcagaagtcgacgtgattcgcgggccaaacatcaaaccaatgccgatcaacgaaccgctgccgaatacgctggccgtacaggtttccgcagtgcgtgacgataatatcaccaccgatgatattaccccagccaacgcccagttttccgccctgcgctccaatatcccggaaatcagcaaatactgttatggccgcatcgatccgggattccacgatcgctgcaaagagctgggcaaaagcatcatcatcggcggtgaaaattatggccagggttcaagccgcgaacatgcggccatcgcaccgatgtacctgggcgtcaaagcggtgattgccaaatcgatggcgcgcattcacaaaaataacctcgttaaccacggcgtagtaccgctgattttcgctaacccggaagactatgcctgtttcgagacatttgacgaactgcgtatcgaaaacttccacgaaggactacgtcagcgccgagtgctacttaaaaatatgagcaaaaaccgcgaagttgcgctcaacgtcgacctcacgccgcgagaaatcgaaatcgtgatcgagggcggccagctgcgccacgtggccagcaaaaacgcgcggtaa

SEQ ID NO: 190219 - DNA, 1272 bp, Klebsiella oxytoca
atgcctaatcttgcaatcatttcactattggcgatattcatcgccattattattggtttttataaaaagaccaacgtgggaataattatggtggccttcgcttttattttaagcctgacctatcatatccctacagccaaactatttaagggatttagcgtttctttatttttaacgatgctcggtgtaacctatttattcagcatcctgcataataataagacgctagaaatcttatcaaaaaagatcgtcggttcggtgcataaacgcaatcttctgccggtggctatttatattgttggctttgcgctgtgttctgtagggccgggcgcgattccggttctggcgatagtcccggttattgccatcccaattgctttccaggcgcggcttaacccgatcatgatggcgattattggccagtgcggcgtgtttggcggacgcatgacgcaaatcacaccggaaggcgtgcttgtcatggaattaatggaaaaacagaaacttacacctgatctattcccggtgtggctctgcttgtttctgacgtcggttgtgatggccatcgtttgctacgtctggtatcggggctggcgctttgacgatctcaatatcggtaacgtggatggcatgaaccctgtcgcgccgaaattcactaccgtccactggtgctctttggcagggctggtcgcgttaatcctgtgcgccgtggttttctccctcaacgtaggattaaccgcatttgccattggcgccttactctctgcgctgggcgctggcgatgaaacctcggcaattaaaggcataccatggtcagtattaattctggtatgtggcgtaggcctgttaatgaacgtggtgatggagtccggcggtattactctgctggcgaaaaccttaactacggtaatgaatgaaaccacggcatcatccgtgatggtcacaaccgccgcaattatgtctttctttagttcaggtattggcgtcgtctttccgacattaatcccaacctgccagggcatcgttgaacatttaggcgcaaatatttccgcgattgaactggtcgccatggtcgtcgttggcggtaccgtctccggcgtcagcccggtatccaccaccggcgcgctgattatgtccggcgtcgccaccaataaagaagcagagcagaaatatacccccagcaaaatgtttatcgaactcttcggctgggcttttgccgccatgcttctcagctttgccatggctattgtcggtatctacgctctattttgttaa

SEQ ID NO: 190220 - DNA, 1059 bp, Klebsiella oxytoca
atgtctgtatcttatgttggaagccgtactacggcgctgcgtaacgccagaggccagggattaagcgtctggaatattgatgacaacaccggtaactggacgaaaattcagaccttaaaagaacaggaaaatccatcctggctgactttcgataatagcaaaaacttcctctactcagtccatggtgattttaccgaagtcaccagctacgcgattaaccctacagacggtaccctcacctggattaacaaaataacgctggagggcggtaaaaatccggtatttattactgctgataaaactaatcgttacctgttagtagcgaccttacagggcggcgctgtctatgttatccgccggcaggaaaatggcgcgctgggggaagtcgtatttgtctggcgttttgcaggcaaaacagatgacactatttcccatgcgcatcaatgcatctgggatcaagaaaaaaactatcttttcgtgccgcagcaggggcgcgttgtcggctacgcgggcgtcagcgtactaaagtttgacccggaaaaaggcactctaaccgaaaccgactatttccgtgccagagagtactctgagccgcgccatatggcgatccatcctaataatcaatattgctatctggttaatgaaaaagacaataccgtgacctggttctttttcgatcaaagcagcggcaagattgaaccccagcagattattccggtcctgccggaatcctataccggtgaagggcaatccagcgccatactcgttgataactctggaaaatggataattgaatccacccgtattcacgaatcactctctatctttcgcattaatccactaaccggttatcttacccgcattgaaaccatgaagataccgggtcgtacgccgcgtttcattacctttaacgataccaacgatcgtttatttgtcgctaacgaagatagcgacacgatcattcaatacgcattcgataatattaccggcagcctgacacagttatccccagtcattgcaacagaaagcccggtttgcattctgtttaaatcgctataa

SEQ ID NO: 190221 - DNA, 936 bp, Klebsiella oxytoca
atgaaaagcgagctgttagggacaaaagcatttgtaactattgcagattttggctgttttactcgggcggcggatgagctcaatttatcgcaaccggcattaacgcgcagagtaaaaaaattagaagaaaacctcaaagtttctttattcgaacgtactacgcgtaaggtgacgctgacctatgccggaaaagcgcttctgccgcacgctcgggcgctgctggactatatggataacgccattcttagcgtgcaggagctggcggctcatcagaaaggcgtcattaagttatcctgtattcccacggcaaccttctattttctccctaaggtgctggaaaaatttaatgcgctctatcccaacattcgcgtgcatattcacgagcaggcaacgatggatagtttagattcgttaatgagtggtgagacggatttcggtattaatatgaaccgtgtcacacatcctcaaatcatcttcactcccctggttgatgagccttatattttggtttgccgtcgcgaccatccgctggcgacaaagaagctggtggagtggaatgaactggctccccatcgcttaattggcgtcagacgcatcagcggtaaccggatgctgatcgaacaggagattgccgaaactgccggaacactggagtggttttatgaagtgcgccactattcaacggcgataggactggttgaggccggcctgggaattgccgcgttgccttgtatggcgatgtcgcatcatcagcatgattcactggtaagcattcctcttgtcgaaccggttatccggcgcagtattggcctgataaggcgcaacgatgtgccattatccccaatggccgagaggttagtgaatttgttcctggaaatgtggtttgaacggaaacctgaagagtgggcaacgtcttttgatttattttcgcgataa

SEQ ID NO: 190222 - DNA, 672 bp, Klebsiella oxytoca
atgccatcatcatctttgcgctttgcgattaatttaggcaatgctctgcttgcagagcagtccgctaccggtgaacttcaggggctgacggtcgacctggcgcgaagaatcgcgcgctcctgccagcagacggaacggctaaaaccctattcagcggcgaaacgcatcgttgaagatgccccaaataatcaatgggatatcgcttttctggcggttgatccggcccgtgagaatgaactgtgttttaccacaccttatctgacgattgactgtaccctcctggtgcgttgctgtagcgaagtctcgtccgtgaaggagatggatcgtgagggcgttacgattaatgtcggcaaaggttctgcctattcactgccgctcatgcgcacactaaaacatgcccgtcttaacgaatatccgaccactcagcaggcgctgagcgcttttctggccggtgagggggatatggtggcgaatattcgtcaactgctggaggcagctgctttacaaaacggggcggttcgcctgctgcctgacaactatagccagattcaacaagcaatctgcgtgccgcgcacggctccgcagtatttcgagcaggtagaggcgttggtagctcagtggcagcaggacggcacgctggcggcgctggttgcccgctatatttatgcctga

SEQ ID NO: 190223 - DNA, 1029 bp, Klebsiella oxytoca
atgaaaaagatacttatatttattagcctattttttatctgcaagcctctaatggcgaattgtaaatatagtgattcaggtaatggtacagccgttggtgtgacatttagttcaaagattatgtctgataccacgctgcctgcaggtagcgtacttgctgtgaaaacggtcggtggtaatgttgcaaatatgaagacatttaatagttgcggtgctggagatgtttatactatatccacatcacctgcagtaactgaggttgtcggagtgaagggggtgcggggggggccagtatatgagactgggattccagggattggttttgaaatatccgatgctcgaatcggttcaaacagtcagccaataccagcaacattaggctctatctctgcatatggtttaagtgacccaggtgtccaacaaatcactgtctggttaataaaaaccaaagataacattgatacaagcataacaaaaaaacgccaagtgtcagtgtcttatctagcagggacaacttcgcaggtctctgcaaactcaacaattgccaggttacttcgtgtagatattaatattgggcctttaacctttagagaaacatcctgtagtatctcgccaaacggtgggggcactatatatttatcaaacattgaagcttcacaacttaagtcaatgcctcagggcggaacaacctcaaaacaaaaagaattcacgcttaatatagattgccctacatcttccatgggagcaaagtatatttattggtttaaccccataactgaaaactcatcatcaaaagatggagttttattaaattcaattccaacctcccttggcggagccaaggatgttgcctttgtaattaaacaacaaaatacccccataaaatttttcgattatacaagttactctattgcaaaggttactaaaaaccagtcaattaactttactgctgactactacaaactttcaaactccatacaaccaggaagtgttagagccatgtttgagattattcttcaagaagaataa

SEQ ID NO: 190224 - DNA, 369 bp, Klebsiella oxytoca
atgaaagaattaacaatattcgaaatggattcggtatctggtggatactcttgggatttttcatccatttcttccacaatcacatcttttgccggtaatgctgtagaagcagtaggttctgctgttttaggtgcagttgtgggaggggcaattggtactttaattggcggaacacaatcgggtgcaaatggcggactgcttggttttggcttaattggtaacggtgttggaatgttctgggggctgttatggggcgctattggtgcaggtgtaggtgcagttgctgtaggctgggatgcaagtgttgagaccatgatgcaaatggttacaaacgcaattgaagggaagtttgttccctggtctcattaa

SEQ ID NO: 190225 - DNA, 366 bp, Klebsiella oxytoca
atgaaacaattaactacatttgaaatggaagcgatatctggtggatattcgtgggatttttcatccatttcttccacaatcacatcttttgccggtaatgctgtagaagcagtaggttctgctgttttaggtgcagttgtgggaggggcaatcggtactttaattggcggaacacaatcgggtgcaaatggcggactgcttggttttggcttaattggtaacggtgttggaatgttctgggggctgttatggggcgctattggagcaggtgtaggtgcagttgctgtaggctgggatgcaagtgttgagaccatgatgcaaatggttacaaacgcaattgaagggaaatttgttccctggtcttaa

SEQ ID NO: 190226 - DNA, 291 bp, Klebsiella oxytoca
atgaaaatagaacttaatacgacagagcagtttacgagtgaagcagcggattcgtataaccgttatatgaataaacgactacgaaaccagtctgtgcatttctaccacctactgaaaaataaggaggatatgaacgaagtgattgaaaatattatcgagaaaacaaagagcagtttgtatgggactgaaggtgaacaaaaagcgggacggatctccgggagtgttaactatgtgaaagtaaaacagcatcttcgtcggctttggattatctataagtatgtataccgctga

SEQ ID NO: 190227 - DNA, 237 bp, Klebsiella oxytoca
atgattgatgaatttcatgtgatgtatatgtataaaaaaatccaagcagaagccgcaactaccgacatcaaaacattggaacagcttttgaagaagttccgtcaagttgttgctgagcgccgggaagaatactatcaggaggttggtgagaaaaaatcacgtaagttgaaaatcaaaagattacaaaagttgattacgaaaatggcgtgtgaccgggttttaccagaagacctctga

SEQ ID NO: 190228 - DNA, 807 bp, Klebsiella oxytoca
atggataagttactctttgatgacatagtctctgataccttacttattcctttatggatgagagcagaagaaagtcgtcgatcagaccgtctcttcgaagataaggaagctgaagagctggtgagattattgtcagttgatttttctaaatttgagaataagaaactgaccagagtagggacggcgatccgtgtaagtttgtttgaccattgggcgcaaagaaccttgcgcaggaaaaacccagttctggttcatttaggatgtggtctggataaccggtttagccgtgttgataatggtgaagggatacatatcaatattgatttgccagaagtaatttcatttagaaataaattaaatattaataataatgaacgtaatatatttatggtcggatctattctggaaacagagtggatggattccttactagacaaataccctgaaggttcattttctttctttatagaaggtgttcttgtctattttaccgagcaacaggttaagcagttattcattgaactgatcaagcgtttccggggagcaagcatttgcttcgatggttactcgaatcgactggtgaaaaaatcagattcacacgaaaccgttggacagatgaaggcgcgttttaaatggggtattgatgatataaaacagctggaaaactggagtccccatttaaagcatgtctcgacagattatatgatgaaacttcatccgagaaagtggggaaggtattcgctggttcgcttgattccgggcatggcgaaatgtgcttttgtctctgttttccgtataacgccctga

SEQ ID NO: 190229 - DNA, 351 bp, Klebsiella oxytoca
atgaattttgatgagaaaaagaaacgcgccattaccatcatggaaagcaagaagatgtggcgcagtaagtatgccccgcctttgctacgcctcgcatggaaagctggcctcaagatcccaccattaccttttgcctcgttctggcaaattaccctgttgatgggggtatggtttggcccggcatgggggatttgtatgtggttttcttcatggaaggacagtggtatgcaaccgggcgttgcatttgtctcaagcatagtcgcaggtatttgctttggtgttcttatggctgcgtatcattggtggcgaaaggtagttaacaatctgcctgactgggatagtctggagtaa

SEQ ID NO: 190230 - DNA, 1137 bp, Klebsiella oxytoca
atgggaaaaatgaaatattggttaatagcgggatttattatccttcttgcgattgtttatgctgctatcagtgacagggattctacgctttctaggttgaaatcagcaggtgaaaacggagatgtagaagctcagtatgcgttgggtctcatgtatttatatggagaaatactggatgtcgattatcagcaggcaaagatttggtatgaaaaagccgctgcccaaaatgatccgcgtgcgcaggttaaactcggtttaatgtatgcaaatggtctcggggtaaatcaggattatcagcaatcaaaatcatggtatgaaaaagcggctgcgcaaaatgatgttgatgcgcaatttttgcttggagagatgtatgacgatggtctcggggtaagccaagactaccaacaggcaaaggtatggtatgaaaaagctgctgctcaaaatgatgagcgtgctcaggtcaatctcgctgttctatacgcaaagggtaacggggtagaacaagattatcgtcaggccaaaagctggtatgaaaaggctgcagctcaaaatagctctgatgcgcagttcgcccttggaattctgtatgccaatgctaatggtgtagagcaggactatcagcaggcaaaagactggtatgagaaagcagcagaacaaaatttcgccaatgctcagtttaatcttggtatgctctattacaaaggtgagggagttagtcaaaactttcagcaagccagagaatggtttgaaaaagccgcgtcgcaaaatcagctgaatgctcaatataatttaggtcagatctattactacggtcagggcgtaactcagagctatcgaaaggcgaaggaatggttcgaaaaagcagctggggaaggtcatgtcgatgctcagtataaccttggcgtaatatacgaaaatggtgaaggggttgggcaggactttcatcaggcgagggcttggtatgaaaaggctgctgctcgaaacgatgcgcaggcacagttcgatcttggcgttatgaatgagcttggtcaagggggaagtataaatctgaaacaagcaagaacttggtttgggctggcatgtaagaatgggcataaggaaggatgtgaacgatttaacgttttatcagacaaatag

SEQ ID NO: 190231 - DNA, 543 bp, Klebsiella oxytoca
atggcaatccctgaacgtatgagaccagtaaaagtcaccagcaaaaaaataagagaattagcacagaaagctaaagagatacttgcagccattgatggtggtgcaagtgaaaaagatgcttttttaaaggagatgatcgatgaatggaacagtcaggtagtatgtccatatgagttctcagattttagagatttttcctcttggacaaatgcaaatgaatttacccgaatagcttttaatttggaaaagttctacgcggatttcacttgggaagaactggttcaaacgataaactgtgtatgtgctccaaaatcaaaagaatcggagcaaaattttgctctttcgttgcttgaaaggaattttcatggaaatccatcagatcttatattctggcccgatgaatggtttcaggatccagatatgttagatgtagaaatgagtgctgaagagattgcatgttatttgatggtccgatctggcagacaactggttgatgcacctgaaatcgacctgaaatatcaaatgcccaagtctgatgaataa

SEQ ID NO: 190232 - DNA, 483 bp, Klebsiella oxytoca
atgagcaaacacaggaaaaacaagtttgaaaaaaaattatatcgaactgtaaatacaactacttataatgtaccacacttgcatggtggtgaatatcgctgggatcggagtaagaataaaatagttcactctgagcttccacgctttttacctatgtcaggtaaaacaaatcgcgggcttgattatacgccattattcatgtttctactaagcaaaactggtgaaaaatgggatcaagtttatagtgaagctattcgacgacttgataagcctgatccagtcttctggcttgttgcattacacgagaaagatcgaatgaattttgttcgatgtggcgaatccagttattacaatgggctgtatgttgatgaagatggttacttgaaaaaggtttccccagatttaaaagcatcggacataccagttttatgtaattgctgcacttacactctaaacggaaaaactattaaaaggataaattga

SEQ ID NO: 190233 - DNA, 306 bp, Klebsiella oxytoca
atgtatgctatcagacatggttttacatatatttggggagtatatgttagtggaactagccagcgctcaggtataggccgcaccatgatagaatttattgcaaatgaaagtgaacaaaaccgaattttacaggtaatagtattagaggttagtaagggggcaattgatttttatacatcaatggggtttaccacaaaaggtaaaatggattatgaaatagttaagggtgcaaaataccctgcattaataatggtgatcaattctgatgatttgaaaaaacctcggttcaaggaaggtgaaacataa

SEQ ID NO: 190234 - DNA, 636 bp, Klebsiella oxytoca
atgtctcaaatgactctccattttcttaatgcccagaagaaactcactgctcactatgaatggcttcaaatcaacctgactgatacctacgaacaagctaaaaggttaatgccgattccttcactggacgtggtggttaaagcagggaaacttgtcatcccggagaaagggcatcttggtttttgccctgaagctggaattgtctatataactgtagaccctgaaaatccaacattttgcaaaaatgatgcgcactccattgaacgaatgtttgcacatgaactgcaccatgctgttagatgggccgggccgggatacggctcaactttaggagaagtcatagtctctgaagggcttgccgggcatttttctcttgaactttttggtggtgaacctgaactctgggaaaggctcaaatcagaacttattaagccccacagtccacaattgtttcaaaactggtataatactgattacgatcataatgcttggtttttcggaaccggggacttaccaagatggctgggatataccgcaggtttcaaactgatttccagatacctcgcagcattcccgcatttaaaggcttcaatgctggcgaatataaatgctgaggagctaaagacatttatttga

SEQ ID NO: 190235 - DNA, 183 bp, Klebsiella oxytoca
atggataacacgatcaaatttttctgcaacgaaaagttgttccatcctgactcgatcagcaagatcgattttatggaaactgaacaggggggattgcagcaaatccagccgggcctgcttcagattgacatcataataatcgttgagattatcaatccctgtcacctgatgaccgtcttttaa

SEQ ID NO: 190236 - DNA, 363 bp, Klebsiella oxytoca
gtgcgctacgccgcgcagaacctgtatgccccgctgcgcaccgtcgaggcgctgcccggcgtcacgccgacgcccactggcctgaataaacagataaccaccctgctaccgcaacagcccgtcgccgccacgccgctggcggcatggaaagcggataacgccaccgttaccgccattcgtctgcaaaaccgcagcgggcaacgcatcgacctcgatccgcgcgaattgcaggggcagtttatcgccgccgccttccagcatgactggcttgggccgcacggcgcggcggaagacaccacggtggtttatctggtcacccagggcagcgccgcccgcgccctgttgccggagccgaaaccatga

SEQ ID NO: 190237 - DNA, 1293 bp, Klebsiella oxytoca
atgatgccgcgccagagcctgttgctgaaaatcctgctgccgctggtggtgctagcgacgatctggctgctactgcgcccggcggggaaaagcgcgccggataaatccccggcgcgcagcgtggccgccttaacgccgcaggagctgcgcgatctgggcattgatggcgacacgcccgccgataccgtcgctacgctggtcggccagatgaaacagtaccgtcgcgaactgcaggtgatacagaacgacagcgaaaaccagcagacgcgggagaagcggctgaaagcacaacaggcaacgctggccgcgcagttacgcgaggatatgcgccgccagcaggatcagctgcgcagcgagttgttgaaaagccagcgcagcctgctggataagctcgaccagcttaatctgccgaccgtcggcgataccccgcccgggctggggctgacgcccggcgcgcttcccgccgacgtgcaaccggaaatgcgctggctggagccgctcgacgcgccccctgccgaagataagccgctgccggtagcgctgaaagccacgcagcaggcacagccgaaaccggcgatcaaaacatacaccctgccgcagaacgccaccctgaccggatcggtggcgatgacggcgctgattggccgtgtgccgctcaacgggacggtcagcgatccctacccgtttaagctgctgatcggcgaagagaacctcaccgccaacggtatcgaactgccggacgtggcgggcgcagtggcctccggcattgcgtccggcgactggacgctctcctgcgtgcgcgggcaaatcacctcgctgaccttcgtttttcacgacggcactatccgcaccgttccgcagagcgacaaatccggcagccagcaacaggcgatcggctggctctctgacgcgcgcggcctgccctgcattcccggcgagcgcaaaagcaacgctaaagagtacctgacctcgcagttcctgctggcgggatccggcgcggcggcacaggccttcgccaacggcgaaagcaccaccgtggtagaggacggcagcatcaccagcgcggtgaccggcgataacggtcagtacgtgctcggtcaggccctcggcggcgggctgaaggaaaccgccgactggatgaaacagcattacggccagatgttcgacgcggtgtatgtgccgccgggccacagggtgacggtgcatctcagcgaagcgctggcgatcgactacgagccggaaggccggcgggtgaagtatcagcaaaccgcgaggtcgggagatctggaatga

SEQ ID NO: 190238 - DNA, 360 bp, Klebsiella oxytoca
atgatgcactacctcttcatacttctttttttactgaccggctgcagcacctcgcaggaagaactgatgccggtggatcctgacaccaccatggtgagcctgtggcagcagcaaagcggcggtaacgcggccctgttggatgcccgcgcacagttgcgccgcccgccggatggtccggtcgagcaccctgcgacaaaccccatccacagccaattcccgcgcctgcccaacccggatatggtgctatacgtcttcccgcaccttaacggcaacacgccggtgcccggctacagcaccgtgttccccttctacacccgcccgcagtacgcgctgccgggcgaacgcctgacgccgccatga

SEQ ID NO: 190239 - DNA, 1809 bp, Klebsiella oxytoca
atgttagttcagactttgaattacttcaatgaacactgtaataaaaagccattattccatttatttgggcaagagataaatatcagaacggcagtaataagtagaattaatttattcatgcatggtattagccagtttacaattaaatgtggcgatagcctattagaaccaaaataccttattggaagtgcaggcccattttggagccaatatgacaaacaacttagaaaatttgatgttgtattaggcaatcctccattctctcagagaaattggggcagggaagatatatgccaggatccatttagacgattcatttacggtatcccaccacaacataatggagactatgcatttttatcacacatgattgctagtgcaaatgaaaacggtcgagttggtattatattaccgcaatcagctcttattcgaggcaatgcagaaaaggaaataagagagaaattaattacaaaagacttaatcgatgccataatagctttacctccaggtttgctttatggcacgggagttcctgtatgtatccttattattaacaagaaaaagccaaaatctcatataggtaaggtattgtttattgatgcatcaaataactttgaatcatctcgtaagatgaatattcttagagattctgatgcagagaaaattgtatatgcctatgaggcattttcaaataatggtacgttctgtaaattagttgatgtcgccactctcgtaaaaaataattctaatttaaatgttcgtagttatgtagatgactcagaggtgtcaaagcgaattaaagatcttttacgtcatcactcggatttcaaaaggtattcgttttctgaccctagtttaatattatcaatcacgataccaaaggaaatagatcatatggatgttaacgcgatttacatccataggagctcaatcgctcagcgtttacaatacaagctgccctctgatgtaaaaaatacaagaaattattttagggtggaaataaattctgaattgttgatgaaagaatatgcaagcctttattttcaatcggagcttggacgattgatgttgtcccatttacctatgggtactagcttgcctattttatctatggactatgtaaggaatttggaaattcctgttccacccattgaaatacaggaggaagtagttaggatagctaataaattagaaatagctcgagacagcattagttcttttttctcccagctcacaactgagccaaagcaatatgaattcattgaaaacattacagatgagatgatttactcattatctagtttaagtgatgaaacacacttgaaacatattatagaggggggtgaaacacggcgcgtagaatttaaacagtctttttttgccaatgttgataaaattatgggtgaagaaagaaacatagaaaaagactcaaaggttcagtatgaaataataaaagatattgcttcctttatgaatacagatggcggtacattgcttataggtataaatgataaaggtaaggtaattggtattgagcgtgaaatggcaagatttaaatttaagaagattgataattacttccaagagttaggtgcccaactaggaagtcggctgtttcaagattatcaacagtattgcaaattaatagaggtaaaaattgatggggtcattgtcgtgaaaatagattgtcgacctacatccttccctgtttttttggataatgaaaagttccatgtgaggacggatacttcatctccatgcttaactggtattgaaatgttaagatatatacaaaatagatttaaatga

SEQ ID NO: 190240 - DNA, 3498 bp, Klebsiella oxytoca
ttggtatccgcgttggcttgcgggatatccgagtcgctatccgaatccgaatcgctgtcagagtcggaatcactgtcagagtcagaatcgctgtcggagtcggaatcgctgtcggagtccgaatcgctgtcggagtccgaatcgctgtcggaatccgagtcactgtcagagtccgaatcgctgtccgaatccgagtcgctgtcggaatccgaatcgctgtcagaatccgagtcgctgtcagagtcagaatcgctgtcggagtccgaatcgctgtcggagtccgagtcactgtctgaatccgaatcgctgtcggagtcggagtcgctgtcagagtccgagtcgctgtccgaatccgagtcactgtcagagtcagaatcgctgtcagagtcagaatcgctgtcgctatccgagtcactgtcggaatcggagtcgctgtcggagtcggaatcgctgtccgaatccgagtcgctgtcagaatcggaatcgctgtccgaatcggaatcgctgtcagagtcagaatcgctgtcagagtcagaatcgctgtccgaatcggaatcgctgtcagagtcagaatcgctgtcagaatccgagtcactgtcagaatccgagtcactgtcagaatccgagtcactgtcagaatcggaatcgctgtcagagtcagaatcgctgtcagagtcagaatcgctgtcagagtcagaatcgctgtccgaatcagaatcgctgtcagcatccgagtcgctgtcagagtcggaatcgctgtcggaatcggagtcgctgtcggaatcggaatcgctgtcagagtccgagtcgctgtcagaatccgaatcactgtcagagtccgaatcgctgtcagagtccgaatcgctgtcggagtcggagtcgctgtcagagtcggaatcactgtcgctgtcggagtcagagtcgctgtcagaatccgagtcactgtcagagtccgagtcgctgtccgaatccgagtcactgtcagagtccgaatcactgtccgaatccgagtcgctgtcagagtccgagtcgctgtcagagtccgagtcgctgtcggaatcggaatcactgtcagaatccgaatcgctgtcggagtcggaatcactgtcggaatcggaatcgctgtcggaatccgagtcactgtcagagtccgagtcgctgtccgaatccgagtcgctgtccgagtccgaatcgctgtccgaatccgagtcgctgtcggagtcagagtcgctgtcggagtcagagtcgctgtcggaatccgagtcgctgtcggaatccgagtcgctgtcggaatccgagtcgctgtcggaatccgagtcgctgtcggaatccgagtcactgtcagaatcggaatcgctgtcggagtccgagtcactgtcagagtcggaatcgctgtcggaatcggagtcgctgtccgaatccgagtcactgtcagaatcggcatcgctgtcagagtcagaatcactgtcagaatccgagtcgctgtcagagtccgaatcgctgtccgaatccgagtcgctgtcagagtccgaatcgctgtccgaatccgagtcactgtcggagtcagaatcgctgtcggaatcggagtcactgtcggaatcggagtcgctgtcgctgtcgctatccgagtcgctgtccgaatcggcatcgctgtcagagtcagaatcgctgtcgctatccgaatcgctgtcagagtccgagtcgctgtcgctatccgagtcactgtcggaatcggaatcgctgtcggagtcagagtcagagtcagaatcggaatcgctgtcggaatccgagtcgctgtctgaatccgaatcgctgtccgaatccgagtcgctgtcagagtccgaatcgctgtcggaatccgagtcgctgtcggaatccgagtcactgtcagaatcggaatcgctgtcagagtccgagtcgctgtcggagtcggaatcgctgtcagagtccgagtcactatcagaatcggaatcgctgtcagaatccgagtcactgtcagaatcggaatcgctgtcagagtcagaatcactgtccgaatccgagtcgctgtcagagtccgagtcgctgtcggaatcggagtcgctgtcggagtcagagtcgctgtcagaatcggaatcgctgtcggagtccgaatcgctgtcggagtccgagtcgctgtcagagtcagaatcactgtcagagtcagaatcgctgtcggagtccgaatcactgtcggaatcggagtcgctgtcagagtccgaatcactgtcagagtcagaatcactgtcagagtcagaatcgctgtcggagtcactgtcggaatcggagtcgctgtcagagtccgaatcactgtcagagtcagaatcactgtcagagtcagaatcgctgtcggagtcactgtcggaatcggagtcgctgtcagagtccgaatcactgtcagagtcagaatcactgtcagagtcagaatcgctgtcggagtcactgtcggaatcggagtcgctgtcagagtccgaatcactgtcagagtcagaatcgctgtcggagtccgagtcgctgtcagcatccgagtcactgtcggaatcggagtcgctgtcggagtcagagtcgctgtcggagtccgagtcgctgtccgaatccgagtcactgtctgaatccgagtcgctgtcggaatcggagtcactgtcggaatcggagtcgctgtcgctgtcgctatccgagtcgctgtccgaatcggcatcgctgtcagagtccgaatcgctgtcagagtcagaatcgctgtcagaatccgagtcactgtcagaatccgagtcactgtcagaatcagaatcgctgtcagagtccgagtcgctgtcagaatcggaatcgctgtcagaatcggaatcgctgtcagagtccgagtcgctgtcggagtcggaatcgctgtcagagtccgaatcgctgtcagagtccgaatcgctgtcagaatcggaatcactgtcagagtccgaatcgctgtcagagtcggaatcgctgtcagaatcggaatcgctgtcagagtcggaatcgctgtcagagtcagaatcgctgtccgaatcggaatcgctgtcagaatccgagtcactgtcagaatccgagtcactgtcagaatcggaatcgctgtcagagtccgaatcgctgtcagaatccgagtcgctgtcagagtccgagtcactgtcagaatccgagtcactgtcagaatcggaatcgctgtcgctatccgagtcgctgtcggagtccgaatcgctgtcagagtcggagtcactgtcgctatccgagtcactgtcagagtccgaatcactgtcactatccgagtcgctgtcggtgtcgtcgctgagatcgacagttaactcaaaagtcggggagcgttcgctgacgttcccggccagatcggtcaccgtggtgctcaggctgtggctgccttcgtccagcgcatcaggtgtgaagctccagcgtccgtcctccccggcaactaccgtacccagtaccgtgtcgccgtcatag

SEQ ID NO: 190241 - DNA, 717 bp, Klebsiella oxytoca
gtgaaactgtatgaaaacgtggtgattggtaatttcctttatggattgggcgtttccataggaggacggctcaaatccggatatcttccgggggctgtcagtttgttgcagcagactccggaagataaggcgctaggtgatgtcctgctcgattttccaggtacattgcgtcttatcgagttcaaggcacaggcgaaccgttctaaaaaggaactcactcggtacagaaaactattaccgactatacaagagcagcaggaaatgctgagtatttctcgcagagtccactggtacgtggaaacggcgccatttcctttgaaaggggttgaagcattcttttctccttatcttgatgcattcgacacacaaaaacctgcgaaaaagccatttgctttggagaggttcattgaatccgtggcggatgacgttatttcgtcgagaaacgatgaacgggatacacaggagaaggattatctgaagcttgtgcgctggtgccagggtacgggagaaacaggttctggcgcactgatcgtggttgtggattctgggggcggcatggaatttgttgcgctggaggatctgatggcgctgaacatgtcccatcaaaaatggatgacgtacagacaagaaagggaattgaaaatggaaagagcactggagctggagcttgagaaaaaggagctgcgaatggagcgaggatggaactatgggagataa

SEQ ID NO: 190242 - DNA, 588 bp, Klebsiella oxytoca
atgggagataacgtggacaaaagcctaactgaccgtgatgttcagttgttctttgacgcagccgaaaaactgcgcgaggcagcagagcgtgatggtgagaaagctagagaagcaacagtggctttggcttcttttgttaacaagatgaatgtcaatctacagaagctggaagatggtgttcgccacaacataaatagttcagcggaaacaaccgccaacagggcggcggagctgctgagtgtcaaatttcaacaggcaaatgatgcagccaaaacagcaacagagcagtatcagaaagcggcaaaaaacctcaattttaggagctggtgttatattctcggcacacagtttatattgatgctggtttttatcgcatccattttatatctgatcccttcactggacgaggttcagcaacgtcgggcggaactgtcatctctgaatgagcagatccataattcccgtctaaaatgggtcttctgcgaggaaggtaaaaaatgtttccggacagatgaacgtgagaatggcggtgagccgtacagaggcaagaaagatggcagtacctggcgggttccctggaaagagtaa

SEQ ID NO: 190243 - DNA, 504 bp, Klebsiella oxytoca
atgacaaaacaacaatctattaactcttacaaagctaaaggttatacagcaatttctaataatttatcgggaatatacacagatgttttagttaaaggttcgaccgttgttcgtattggagatgatcctggttatccgcacttcgccaggcttattctatctgctagctctggcctaaaaaatgtagttaaaatatttcttcatagtgagccattaggaattgttaatgatttaaactttaacggagagtattcaatcacagaaaccgaactactaactgcaatgtctcagcaagaaagtgaaaattatcaaacatgggctttaacagctttaaatgaaataagacaagggaaaaaacctgcaactgatccttttggtttggttaatgacatagacatactgtttgtatatgccaggaataacaatctacatattgatttggtttgccccaaaaatgtaatgaagcggggtaacgattttataatactagatccatttttttga

SEQ ID NO: 190244 - DNA, 1041 bp, Klebsiella oxytoca
atgtcagatttagaaaaattcctgccaaccttgaaacgtttatctaaattagataagctctctgagaatgaaatttcaaatcaattcatgaggaatcatggcgtagaaccagtgatttcaaaaagtgaactttgttatgcttctttcgcagttaaaattgatgatttaaacttcttgcttaccgaaaggccaatatcgtacttaaatagacattggggacgatgttcgaatattcagtcgcatgcaaattcacttggtatagcattacccctatatattggagaaggtactctttcttctgcaatccatgaaattaaaagatgtgaaaatccacttgataattcaaataaatggttgttcgaaaacttctcattagaaattgcaattgcttatttcaacaaatattttataaagagcgaatcactaaaaaactataaaacaattatttttgaagctatagaggctttttatttgggatatgatcatatatctataatgtcgctcttccctgtctttgaaggtgggttgaggaacttacttgtaaaattttgtgatggtgataacacaaatacaagtgcagacagatttgaaaaggaaataagaaaactcattattacatggggaagacggcagctcccaaattttgactggcatcccggcaaaggttatgacattgaaactgaggtggattttttcacacatttaaacccccagtgtgatgtgattaattcaaccagatctttttttaaaaacgtcatatataaaccaactggaggtgttaatgaaggtagtttcaatagacatttgacactacatttgctgaatcaggatttcaatgagccatctaatttcgttaggattttcttggcgttaacacatttaacctttgcagaaagtctgatgaacaataatgtccctttcttctgggaaggtgtagatgacaatgaccgacgcattgcttcattcatttctagaagtggtgatgttatttttggaatgcgtagaaaagaaattagtaagcttgggttaaatttatactga

SEQ ID NO: 190245 - DNA, 1287 bp, Klebsiella oxytoca
atgtcagagattaatccacacgatgccgcaccgactttaccccaggatcgggaaacgctgtaccacttggtctggagcgagcccgcggaacgtataactgtgctgtatggcatcagtgctgagttactggcaaaacgatgcagcgaaatgcgcatacccaggccgcttgctggttattggaaagcgctggcgaaagggactgcgcctgcaattcccgctctgaaaaagggtaaggtggtaaaggtaggtgagaatgacaatccatcaatacaatcttctgccattacggcatcaaaagcagcatcttcactagtccaaaaccaagcttctgttacgagtaatggctatggattgataaatgatcttaaaatgtatctgccagtctcctcggttactgaagatggctattataaacctgcgaaaaagaaattactggatctcaacgtctctgattcgggatttgataaagcaattgagttcctgagtcggttcattgaagctctgggaaaaaagggttatcgggtaacgctgggtgctccgggagaaaggctacatcgtacggatattgatattaaggaagatctaaaagtgggaggatatcgctgggacaatttatggcggccttatacgccaagtattatttgtgtcggtgatatgtactttgggtttaatcttgctgaaatgacggagtatgttccggcgaaaaaagtcaaaaatcgctatgttcgtgacgaacagatgggacggtggatacgggggaaaaatattgagtatttgatacacgtatcgaaacataccctacctaccgggcgatttttgttgcaactttattcgccttattcttccgcaaaatggctggttcagttccggcagacaaaacagtgtgggttgattagccagatccctaatatgatttctgcgatgcagaaggctgttccgctaatttcaaagctgctagaagaggccagaatcaaagctgaggagtggtgtgtccagcgtgatcgggaattcgccatatatcttgaaaaggagcggataggtcgggaagaggaagcttaccgtgccagccgtaccgagctgaaatctattatggttcagtgggctgaagacaaacggctggagcagttttttcacgaagcagaatcagatacggcaacgcttgatgtacagcagaagttgcaggttatggaacggctgcaactggctcgccagttcttgtcagaggattcggcgattgaaaggttgctgaagtggaaaacgccgcaagagcgcttaaacaaagaatga

SEQ ID NO: 190246 - DNA, 3627 bp, Klebsiella oxytoca
gtggaaggatttgaagaagtccccccgttagacggaatgtttgcaccgttagatgttcgcagcgagcttaaacaggcgttcgtacgatggctgcccagaccctactacacccgcgtcgctcttggatcaggagaaaaggtgaatgagctggatctgcttagcctgtgcgaacattggcgcctggagtatcccggagaagcgaaagacctggcaaaaagctgggacgaatcagaagaacggaaggctgatgatggtccgtttttcaacgaactcgtccgcttgggctgggttttctttgatggtggccgctggatcatgcagggaaccccgctgggaactctttctctcatcaactacccgagcccgagtacaaaaatctttcttgagggtctcagcaagccccgacttattgcaaagactgaccagcaaccgacggcagttcttgctctcgcaaagaaaattctggctgagttttggcttgagcagtacgttccgattgaaaatccggagtggttcctgagtcgattatgggagcgactttgccctgccgagcctattaatactgaaaataatgtgacttcattgcaggcgcccgtgtctgaaaatagggcttcatttaaagctgccaatactgacgctgtagactgtgctttcctcgagtgggcagcttggtgccatgtcattagaggttatggtaaatgggaacgtcaatggtcgctctcacagcagcgattctgtcgtgaggcggcgcaccgcgccctggctcgtcaaacgctgtggaacgggtgggactgtgatcttgctcgttatgtaaaggtactgcaggaaacatatgcgatccctctgaaccaactgcgattcgcaagcagtgcgggaaaggcgccaccgcgtaccatagttgcaagggccggctggcttgcaagtcgcgaagtcgaacacctcatgatggagcggctcatgatgcaacggcacggtccgaatacggtcaactttgcgtttggtctgctatgttccgaacttgaaaagaccgatattggaccaggcatcatggctgcagctgaggcaattctgtcttacgcggtgaatcatcctatggctttgttgcagctccgattccgtgtcgattccaatcctgggctgctggtcgatatgcttttataccggccaactgcatgcctagcggccaaatggactattgagtggcagccaaaatcgggtcgcaacaatgatcttaacagaggccgtgaagctcaaaccaaaacatttgcggtgcaggattccctgtcggtcattgcttaccatttaaacgcaagttcgataagtcttgaggagtgcgcgtctttgattacctggtgctataccagtagcactggcatgggacgggccattgcagatccccgtcggcccgttgggcgccagcttctggggatattcgccaagcaaaatgaacaagttcaatctgaagtgttacgacacctcgtggaccaagctgcctatgagaacaatataccccgcgcgtgtttttccggtgtactggatgggatgaatagcctcccactggttacggaggctgcaataaggccagttattgcactctactcagtgtttgcgcgcaagcagcgcctagattggacagacgttgcagggttatcgtcagacatggccgggcgcctcgttgcagccgcgtttgcgcaagccacttctgaccgtgatacatttctgattccatttgacggcatggagcttattcatgaggcttcgcgcgatgaggaacccactgtccgctcctctgttgcccggacgatgagaatacacatacgactgctcgcacgtgctgtatcgggctggccttacgaaaccttaccttcggtgctctgcgaagtccttaaaaagcttatttcacgcagtgttattgagcatgatgaaaaagggagaattggcgcccttacggacaggtatagccccacacactctcagagtcgggaaacggggtcacctgcacaggatcttgcatccgcgtggagtaaactggacaaaagcaatcagggagacttgttgcaggtattcggacaatctgacgatcccgtttttctcgccgagctttgtcagttcctgcccactacagcaaagcccggtatcaaagcaagattgcggcaactcaaaccagctgaagcatcggtattctggacctggcccgagctacaccatcgtattgaaaccttattgattgctggggaatatgagcttgcccgggaacatctggaggatgtcaggcaggacgtaggtaaggcaccccagcagtactggcttgcactttttgctctggagttacaactgtttttaaaagaggagaaatggactgcactggatagcacgacgatcccctcgaagctggatgcggcgacagcacggcaagcaaatgatcagcttgacttctacagagcgacctcgcagcttttgcgccctggtggcgatcttgcaagtgcccggactgagctgcagcgtctttcatcacaaccgggtgcaagttcgacatatagagataactattttgctgtcgctattcaacagattattggacccacttctcacccgctgagtggggcggacaagttgaccggagaacgtctgcttggagaaattaacaacgctgttgctgctgataacaagcttgcaagtaattcattacttgccaatcgtgcatatctcttattcgccctacaaaggcctgcagcagccctagaaagcgtagctaaacgtcgcagtgaagtgcgaagctcagagttagaaatggtcgtcgtacttgcaaaatacgagatggggcatcaggacgaggcgatggcaattcttgatacggccattaaagaattcgagacggacaagcgtcttgtcttgttgaaggaggacctacaggcgggtactcctgcatccagtgtcacttctgcaacggttgctgtcgactctgtttcatctatacgtgccgccttgcagcagttgtctcagctcccaatttccctggtcggagacgttctcggtccacctgggcttggtttccgtggatatcttatacgagaagtctccaaagccgtggcatcacttcaacgtatagcagggatgctccgcaacaggaaaaactcagcggatgaagcaaggatcgagaatgaccttaacagtgcagtgcgagagattctaagtgcctccctcgcattagctaaatgggatgttgctgaccagtctctcggtggaataacggcaaacggaaatcccggcgagagagacgcggtcattcgggtgtcgggacaagaaatatctgtttatgaagcactcgtttgtaaagggttagacaggacaaacatcaagaagcatttcgacaagctgctggcatacggaacttgcgatatctattttcacgttatttactcgtatgcacaggatgtaaaacccctccttgattatgtcaggagaatgcttgagcatgaaattttaccatcgctctcataccgtggttgcgaggcattgacgcctcctgattttgagacaagcggctatttagcgacctataacgtcgaccatcgggaaatagctgtagtgttcctgattgctgaccttaaaatccgaaccgcctga

SEQ ID NO: 190247 - DNA, 4329 bp, Klebsiella oxytoca
atggaatttaatgatgccaagtcacaattggctaaggccttgcgttcattagaccctgctggttcgcttggttttgaaggattgcttcgcgacatattggtcgaagtgactaaacttaattttggacttgctaagtctgggccgcaaggcggatcggatgttcgctcgcttggtttaaacctcttcgaagttgctcttgaagcaaaacgttacggagaaaacacaaccctaaaagtggatgctctaaaggccaagctttttgaaacaagtcgtagcgagaatggaacggatctttggatacttgcagcaacaagagcaatcagtgctaccgataacgaagagctaacgctagtagggaaggggcttggtatcaccgtactgatactcgactggcccgccgaaccggggcaacttcccgaccttgctgtcctgtgtatccaggccaaaactgcgctcaaccgacaccttaacggtattgataacatcaatgaaataaccgcggctatccgatcccacccagaatttcttgctgcagcagatcgcctccagtgccggctaactgctcctgatatcggctatgcagctgcgactgaggcaatgaagcaatggatgcttactggtctgagcaatgaccgtaatgccgccagcagactcggggggaagttcaatgatgtactcgatccaggtcgcgctagaattcctcgtcctagatatgaagtgcaacttgatcaatgggttacatcaggtaggccctcagtgctgcttggggatgaagggctgggcaagacttggctatttttgtcatggtggcacgcacggatcaacgccgcggctgatcttcccttgactctttttgtacctgcaaaggaggttgggcagggttcgctcagtgaattaattgcacagtttcttgaaaagcgtcttagccatggcagcgttcagttctggcaacgtcgaatagcgcaatgggtaaagcttagaacggacgggccacagatcttgctgatgattgatggattaaatcagtactggcaaaaaaaagattgggcagacctcattcagcctgctttcgatgacaagtggaaccatcgcatctctattctgatgagttgttggcccgaccactggaatgatttgcaaaaactcgggtccttgatcccaagaccaagcgaaattcgggtagaccgttttgacgacagtgaacttgatgcgttgctcaaggaacatgatttaagcagagagaactttagcaccgccatgctttcgttgatgaaggttccgcgcttgtcagctttggcgattgagctacagcaggaattgattgcgagtggtgacatcacgccggaacggcttgcattcgaagactggaaacatcgtattgagttgcgtggcgcacagttggcgataagcgatgccgagtttcaaatgtttattacggaactcggcatgcagttgcgtagctcaatcgataatacaagccttacccggcatagtgttattgaacagttggggcgagacagcggtaaagatcgagcagatctgctatcaacggttgctgaactgatttctggacaatggcttgttcccactggacaagccaaccggttccaagtcaatcccacactgataccattcgcgttggggatggctttggtccaccatctgaaaccaactgatgggaatgccacagccaacgatattatcgctgaacatatcgacccctttagtgggcagagccttggcgtgaaaatactcagagcagctgtcactacagccttgctcgacaatactgtctcacgtcaggttcgacgggcactgcttagccgatggatatccgagcagaatttctcgagtctcgattttgaagctttttggcgaatcatcgggcttgatgttgaactagtcctgcaaatcgtagaggagatttggctcggggagagctctggttcaatcgtaaaagatgaaattatgatcaagggactggctaacgcttatcagttcgaggctgtcgcaccgttgatcgaggctaaaatcacatattggcttggtttgctctggagtgacccgctacaaggtaccgtcttgggacgtattgatcagacgtcgccaaattcgctgcgacggcaagaaaagacagccgcaaacctagatgcatggcagcaatttgaggggcgcgaagcttttccggcgatagaactttgcggtcccggtaacccgagttggctcagtcatcgtgtcttcggcatcatctcattattgccgcgggctcgcttcatcgaagcaatcgctgcctggggtatttcgcgggcggtgatgggcagtaacagtcattttgatgagctggcctggatgttgcggcttaatcgtatggattcggtggaaacacgtaataagatgttagaccttgtcgacagactgcacgagaccgggcatcagctagcgcttgacgctgcgcgctggcttcttgaagctctcgccgatccacaatctgaaaacaagcgccggcaactaaatacatcagtagggcccattagcaatacgtcgggtcgacgccctataatgccagaagatgacattcttaaccctagggttgatgttgatcccgataagatcaaagacaccgagcacattcgtcctgctgattttgatgttgatgttacctcaagtcgcaaattgctgattctggcgagaaccaatccgaaccggctacgcgaggttgttggtgagagggttactggcgctgaaagaatgacagctgtacctcttcgacagcttttgaggcaaatgcgcggtttcctgacaatattgaacgatgatgaacgcaatgtacttgaagcagggatcgattttgtcctaaaggaaaattctcctgaaatacataaggagctcaactggtggcacgccagacgtctggatctgcaacttgctagccgtaatggattggcgcaactggagtttttactaaaggaagcgtgcgatcggaggctaatgggtagcatcaatattgatctgttaaattttactcaagatgacattaggtcgatccttgggcgatttgagattgaaagtaaccgcgagacggtactgagttggctcatgttgttcgaagagtttgccgatagtagctcgatcgatgggtggtcggagctccctgcattgctttgtcatgtagatgaggaaattgcagagttggctattgggctttccgcttactccactaatcccgttgtctacaatattattgcaaacagcaattggacggctaacaacgttaccgacagaaagcaacgctacaatcgatctgttgccttgttgaatgcaagcatggctcttaagcgccctgagctgttggagcgggccgataaggaaattatggcgttttggttgcaacgtgagccagataatccaggtgctattcgaagctatgagaattatatccgaggtgcaattgacgggcttcactcacccggaagaagtataaatattgaccctctgattaatcataagcctgcagttgccacgttgcttgaccgtgtagatgaggacttctggtgttggttggagcagaagattaagaatgagattagagtatccagcgtcgacttaatggctgcgtttccattgcttgtgatggcggaagcattgatgagccgacgccccgaattgggattgatactttgggacaacttcaaaaaggcaatgaaagatgactctttcaaaataacgggcatggcttgcctgccgtttatagctttgaacgatatagctgatgtggctcgcaataaagcccttatggatgttgttaacgatcaggatattgccgatcttttgaatcagattgaagatcatgggcaaacggcatggttggtagacaaggtacttgagcttgtgagttctggagatacagagtcactggcaatgtccgctacactactgggttttgccaacgaaagtcaaagagtggagcttgcttggggggaggtcgaaaagcgaataccatgtggtggttggctggaagacgtatacataaccagccgccaaaatttcgagcgaaatcgctgggcccgacactggttcaactgttatatccaggcgactaccgatagtgaggcaatcgctgcacacttgctattgggggcaactatggataaaagagcgagattgtggctaaagcgatgccgcttgaaagtacttaaattatctttacgcaaatactgggatctgaatatggatctgcttaactcagcgagcaagaagcgacgaacaaagctaaaagattcacttttttggactaaaaccatgaagcaaactcaatggccgtggctctga

SEQ ID NO: 190248 - DNA, 4341 bp, Klebsiella oxytoca
atggccaagaataatcgagatgatttctctgagagaaccaaactccagatcgcgaagcgtgttggatggttatgctcattccctatgtgccgtaagtggacagtaggcgcaacgtcagatggggaaagtgaaatcaacatcggtacagcagcacatatatgtgctgctgctccgggtgggcctcgctatgacgggaatatgtcaccggaggagcgatcttctgccaagaacggtatgtggatgtgccgcgatcacggtaaagcaatagattcaagcgatccagagtttaccgtagagaaactgctcaagtggaaacgagaggcagaaatagaagcttggaagagggtactgcatagcgatgtggttcgtggtactggagggtgtgcagatacagaggtagtgatgcgggctcgggttgctgccgtaaatgatctcgaggtattccgtcgaacccataaatggcctggttcgtctgtggctctcatgttagatattcaaggtttagatgagccagtaataaccagtgcgatcgcagggatggctataaggctggatgatttaattcttgtcgccgggccaggaatgggtaaaaccacaacgcttttccagatagcggaaagtatgttggctacaaaccttggtacgcctcttgtcgtgtcgctgggggattgggctaccgaaaatacgacgatcctcgactctattcttaaacgacccgctttccgagatgtttcagaggatgacttgcgtaaggtcgctaatcaccctggtgttgtgttactactcgatggttggaacgaattggatgctagcgcacgtacccgtgctcgaactcaaatcaccagactcaaagcagagctgcctgaacttagctttatcatctcgacgcgtaagcaatctcgggacattccttttgaaggaacacatgtaacacttttaccgcttaatcaggatcagcaaatccagatcgcagttgccttacgcgggaattatggcaaaaggatcttggatcaagcctggcgtaccgctggcctacgtgaacttgtaacaatacctctctatctgatggcgttgacctcacttccagaaaacgccccggttccgacaacaaaagaacaaatacttcggcattttgttgaggcgcatgaaaaggaagcaagtcatgccgaagcgttgtattccggtacttatggatttcagcaagactacatgaaagggctagctgaagtcgccacgcggttagttaactcaactattgttgactttagtgcacggaaatcgatatccgacacggcaactttgctggtggacagcgggcagatagcaatcaaaccccaaccagaaattgtactagatgtgctcgtcagcaatcatgtactgatgcgtacagggaatactcctggttattcgtttcagcatcagcaatttcaggaatggtatgcctctcacttggttgaacgccggttgattgcggacatcaatgcccgggaaacacgagaagcacttaaagcagaggtatttaactatcccagatgggaagaagccatactttttgccatagagcgtatggcatacagtgatgcgaaacagcaggttatttgtagcaaggcgataattgctgcatttgaggtcgacccaattctcgctgcagagatgatttttcgatcaacagacgatgtatggtcgcaaatatcgactgttattcagaatctcgtggctcattggcatgtgccaggaacagtggatcgcgctgtccgtttcatgattacatctggccgtcctgaattccttgattatgtctggccgttgatctctgatgaagatgagcagatcagccttcatgctttacgcaattgcagaatattcaggacttcgattttcggggaggtggcaggagaaataatcaataccctgtctcccagaatgcgttcattacttttatccgagatagcatctcgcagtggtatcgatggcctcgatcttgctgtctccattgcgaagaatgaccctgattcgcaggtccaagtctctgtcattgatgctttggtatttcggcgagcagatctccatgtggctgaaatgttgcgagaggtgaatagcacaatcttagatctgattgtgagcaaaggcgttgccgatgagatacaggatgaaaacgttagagaaatactcgcgacagcacataagcggcaagaaatgcaggccgtatcaccctctaatcggcttcgcgcgctgatcgctacagagaatactgaggacgattacgctgaattagttggcatcatcagcacaatggagattgaatcaaatgaagaacagctgatcgataagctacaccgcagttatcctcaaactgttgcagagggattattagagcgtgtaagggctggacgatcactttgtactagtgtgggcgctattctggcatcagccagatttactttagaagatgaaatgctggtgaatctggtgctggttaaccctgaagactatgacgctcgtgctaacgccgcggcctcagtacttgggccaggggctgttggtcatcttattgatgtattggccgatcttgagttatgtaatcaggccgaaggtaaatacgaagaggccaaatggaaacgctatcaagggctgagaactcgtattggctctgcccaaggttcaagccttgttgacgctattctcaagcgagctgtaccggccgaagacaggctaattgaattgtttactgacctgcttttatcccatcccaacggtgaggaatcttatagcagatctttcgatgcagacactattctggtgatacaacggttatttgaagagtgggctaatcgtatgcttgcttcgaaaaaagcaaagcgtagggtaaaagcaagagttgcaatgcttgcgagtcttgccccatcagtgaaacagttacctcttttgaaacaactgctggacgataacctccagcgttacagagagtttcgaaaagaagcggagacagccgggtggagaccatgcgaagcggttaatgaggctagaaccccgatgctcaacgaatatcagagcgcctttcaggcaattcaatctccagaaacaactgcaattatgcagacgtatctgtgtgacaaatattttggtgcgctagcggcacgagtccttgccgaacaatggcgaacgttaaacgctccatcaagtggaaaacgatttttaagtggtgttgatttctcaaatgtgaaggcgaaacatatggctctaacccactcccctgatgaaacatctcttgaagcagaagctatatttaacgcaattgaccaactgattacgcaagacgcgacgagcgaacaaaaacagcttgctgtcgaactgggtattattgcatcgcagttgccccatgggcggcgtgatgatgttatcaaaactctcattgcagttgcaccgaggcaaatacgagcagatttgcttaccagcatcgtgctatcgggagaaggtatagatacaaaggtcgttgttgaaagtaccgttgagcttatagaggcagcaatcgctgaaccgtggatattaagcgaggggcaagggtatcaattaaaagcgtggttacggcttttaccgtttatgaaggagcctgaagaagccttgagcgtcattcgtagtctgcctgcctcatatcgggatccctattttttggaagagatggtcagaggattttgccattcaccttctccatatgcagaagatgcccttttcaagttagccgaagaaaacacaagcctctatgcgaactaccactggagaaccaccgctttacgtcttgaaacactatcttcggtgcgccgtatcatcgacttaactgctcagggtgtatttgaaagccgatccagtgataactggcattttgagaaaatacttgggaacctgcttgagattcattctggtttgcgtgcgtacatatacggtttgttgatagatggaccaatctcaccgggccttgaggcgctcacccgtattattgcgcagagcccagacgaagagggagtactattactgctcaattttgagaggagcttgaatcgtagatttatggattggcgaacaataaataaaatgatcacccaagatattccgtcagaaacgtggcaaggtacgtttgaaattgtacccgttccggcaggcagtttacggatgaaattgtttgaattggtgacggacggaggccccgatgacgtagctgcctactggatgcgtaagatagactgcagcagggatgaatacggaactccagaagatgagccgcgccatccggacatcgcatccggtaggccgtggcctgtctccctagcgctgttagatgtgtag

SEQ ID NO: 190249 - DNA, 894 bp, Klebsiella oxytoca
atgaaaattaaaaacaaagcagcaataacctattctctgataattctattttttgctgcagtatactattttacttggttagtttatccagactcattcataaaaaataactccctgaattccactcccattcataatgctataaacttagcgttttcgtataatggtgaaattcatgaagattatgataatatttcaaacgaggacttttccaaagagacattgaaagcaaaaaaagaatttgacataataattagtcaaaacattaaacttgaaagtatactatcccagcaagaatcaaaactaaaactaataaacgtaaatttgtcaaaagcatgggctaggaatacacaggcgtatgtggatgaagcgtctctaaaacatcacaaggagctgaatgttaaagaaagtgagcttaaggctatattgtcacagaagaataaaattcaagaaagccagtttaatattatattggctgataaaaacatcgaaatatcggaagttaaactcaggatagcaacttcagaactcgatgctttagagtatgttttgtcacatgttggtgacttcaatgatccaaagctcgcttctgaattaagtgccgccaataaaataatagatgacacaagatctaaattaattataaacaacaaagaaatgatcaaaataagaaataatgtgcaagatttgttgagtaaacgtcaaaaggaagatctaaacctttgggatttcgctttttacagcattggaatatcaacaacgactacatttggtgatttagtagctaactcaagattaatcagaatgctagtttgcatacaactgttgttatcaattttggtgctagccaacgtaactcaaagtttcttgtcaaaaaataaaaattcacgatga

SEQ ID NO: 190250 - DNA, 234 bp, Klebsiella oxytoca
gtgacgcaaaaacccaaccccacaacgcatattcagttgagccagataagtaaagcctaccccaacggcgtgcaggcgctgcgggatattaatctgcagatagctcagggagaaatcttcggcattattggccgcagcggcgccggaaaatcaaccctgctgcgcctgttcaaccgtctggaaaacgccgacagcggtgagattaccattcacggcgaacatacgcggcactaa

SEQ ID NO: 190251 - DNA, 1224 bp, Klebsiella oxytoca
atgcccgacgataaaccaatcattcactacacccgccagcttccaaaggcgcacgttattcgcagcgatgacgaagctatcgctatcgcccatgagattgccgcggtgttgcagcccgacgctgcacaacgcgatcgcagcggcatcgtaccggcggaaattatcgacacctattccaacagcggcctgtggggtatcaccgtcccgcgacaatggggcggagccgaggtatccgccgccacgctggcccaggtgatagcgattatttccgccgctgacccgtcgctggggcaaattccccagaaccattactgtcttctcgaggatatccgtctccagggaagcgaagagcagcaggcatttttcttcgatcaggtgctgcaaggctatcgctttgccaatgccctttctgaaaccggcggcaagacggtactcgatatccgcactcgcctggaggccagcgaacgcggtctgcgcattaccggtcgaaaaggctactgcaccggttcgctctacgcccactgggtcggcattctggcgctcgatgcagagaataacgcgcagctggcgtttgtgccgcgcgaatcggctgggctgacggtcatcgacgactgggcctgcctcggccagcgcaccaccgccagcggaacggtcctggcggagaatcttgtcgtcgagcctttccacctgttcccgacgtggaaatcctacgcgacgccaacccttgccgggccgtttgcccagctcaccaccgccgctatcgacctgggaattgcccgcgcggcgcttaacgacacggtgaactttgtcagccagttcgcccgcccgtggatcgatgccggcgtggagcgggccagcgaagacccgctgactatctaccatattggccagcttgacagccggctggccgccgccgatgcgctgctggatcgggccggtaaagtgctcgatcgctataaatacgaactgagcgaggataacgttgctcaggcgtctatcgccgtggcgcgcgccaaggtctttaccaccgaagcggcgctggaagccgccagccgcctgtttgagcttagcggcacccgctcaaccagcatcgccctcaatctcgatcgccactggcgcaacggccgcgtccacaccctgcacgatccggtgcgctggaaatatcagctgctgggcaactgggtgctgaacggcattcctccacaacgccatgactggaactga

SEQ ID NO: 190252 - DNA, 321 bp, Klebsiella oxytoca
gtggctatcgtggtagagaagggcaaggccagcagtcccgcgcggatcgcgggcagattaggcaatcccaaagatattctcttttttgccgctttttttccgcagcttattcatctcaccaacagtttcggctgcagtctggggatattgacggcggtgtgggtgccgatcgatctgagcgtgctttcgcttttcattctggcggttcgtcgttggttaacggcgcgttgcgccaaacgcttgacgagggtctcggcgctttttctgctgcttctggcgatctatgggttgggatataacgtgtggcagctacatctttag

SEQ ID NO: 190253 - DNA, 168 bp, Klebsiella oxytoca
atgctgatttataacgtattcgggcgtcatattggcgtccagcgtcagggcgaacgctggcagcttttccgcgtcgatcttacggaggcggaaattcccggctggctgggggatatttttcacgaagcggcaagcccgcgccatcctgacgtccgtcttgtggtttag

SEQ ID NO: 190254 - DNA, 1599 bp, Klebsiella oxytoca
atgtctacagggaaaacgctgcttgcgctggcgttgagcgcactctttccggcggccagcgcctgggcggcgggaaacgatacgctggtctactgctccgaagcttcgccggaatctttcaacccgcagattgccagttcgggcccatcgttcgttgccagttctcaggtgctttataaccgcctgataaacttcgatccggtgaaaaacacgccaattccttcgctggcgaccgaatggagcgtctcgccggacggcaaaacctggactttcaccctgcgtaagggcgtgcagttcaacagcaacaaattctttaagccgacccgcgatttcaacgccgatgacgtgctgttctcggtgctgaggcagaaagatgccaaccatccgtaccataatgtttctcaggggcattacgaatactttcatgacgttgggctggataagctgatcaaagaggttaaaaagctcgatgattaccacgtccagtttgtactgagcgaacccaacgcggcgttcctcgccgactggggcatggattttgcgtcgatactctcctctgaatatgctgatgcgatgctgaaaaaagggacgccggagtatgtcgatacctggcctgtcggcaccggaccttacgcgctgcagcaatataaagcggattcgcagatccgctatatcgccaatccgcactactgggacggtgaagtgccgaccaaacacctgatcttctcgatcacgccgaacgttgagacgcggctggcgaagctgcaaaccaatgagtgccagattattcccgcgccgtcgccggtacagttcccggtgattaagggcaataaagatctggcgttgcattcggtagaagcgctcaacgttggttatctggcctttaataccgagaaaaagccgtttgataatgtcctggtgcgtcaggcgctgaactacgcgaccgacaagcaggcgatcgtgaaagcggtgttcctcgactccggcagcgtcgcgaaatcaccgatccccgccaatatgctcggctataagaaagatctaccggactacgactacgatccgcaaaaagcgaaagacctgcttaagcaggccggactggagaagggggccgaagtgaccctgtggtcgatgccggtgcagcgtccctataaccccaattcgcgccgtattgccgagatgatccagaatgactggagcaaggtcgggattaaagccaaaatcgtcacctatgagtggggggaatatctcgctggaatgcgtaaaggcgagcacgacagcgcgctgtttggctggatgtccgataacggcgatccggataacttcgccggcaccctgctaagctgcgataacatcaaaaccggttctaacgttgcccgctggtgcgataagtcctacgatgcgctggtgaaaaaggctatcctggtcagcgatccgcaggcgcgggctaagctatacggcgaggcgcagacgatttttcagcagcaggccccctggatcaccctggcgaccgggaagaccttctacgcgacgcgcagcaacgtcagcggctacagcgtgagcctgatgggcagcgatttttccaaagtaaaactcaactaa

SEQ ID NO: 190255 - DNA, 150 bp, Klebsiella oxytoca
atgaaaagcatcagcaaagcaaaagcaacctgtaaattttcgctcgatgggaccagtccggagttccacttcccgtgcttaagggaatgggcggatgggaaagcatcgaaatggtacaccggtatgcccagctggcaccgaaccatttga

SEQ ID NO: 190256 - DNA, 141 bp, Klebsiella oxytoca
atgctcagcgcggcagggaataaaatttttgttgaagccgcctgcgaatacaagaaacatgatgccgccataatgatgagcgccaacataatgggcgaatccaataaatgtgacgagaccgcgctttgcagccactgttga

SEQ ID NO: 190257 - DNA, 165 bp, Klebsiella oxytoca
atgtactataagggcttccccggcgtgtcaacgccggtgtttatggtttctgtctgctcttcagtaaaaataaaggggagagactgcggtactataaacggccatgatgaatcgtcatcgattcggaccctgatgaaagacgcgcgtgaggttcttgttcgttaa

SEQ ID NO: 190258 - DNA, 1023 bp, Klebsiella oxytoca; identical to SEQ ID NO: 129977

SEQ ID NO: 190259 - DNA, 213 bp, Klebsiella oxytoca
atgatcatgaggcaaccggactggcattccgccgacgtcatcgcggcgctgaaaaagcagtggacgtcgctgtctggcgtttcccgtaaatcagggctggcgtcttccacgctggcaaatgcgcttaaccgccactggcccaaaggggaaaggctgatcgccgaagcactgggcgttgcgccagagaaaatctggccttcccgttataactag

SEQ ID NO: 190260 - DNA, 318 bp, Klebsiella oxytoca
atgccagcaattcaagttatcgcggcaattttgttattctgtatatttatatttaattccaaacaggaaatgactgacaagagaacgtttcataaaatagaaaaagatatagaaaaggatattgatagtaactttacaggagacaccaagaaagccagattatatgacttgggattagttgaggaatatagaaaatcaattataccagttttaaaaacatcaccaatatttattgtatgttatattttctattctattagccttttggtgtttttttctaacctatttcctcgaatgaaattcattttcaacttttga

SEQ ID NO: 190261 - DNA, 657 bp, Klebsiella oxytoca
atgcctctgcgcactctgctcccgggggcggcgcttgacgcgccttgcccgggctacgggcgcaccgccgtctgcaaaacagtagcccggacagatgcccagcatcgcctccgggaaatgatgcctctgcgcactctgctcccgggggcggcgcttgacgcgccttgcccgggctacgggcgcaccgccgtctgcaaaacagtagcccggacagatgcccagcatcgcctccgggaaatgatgcctctgcgcactctgctcccgggggcggcgcttgacgcgccttgcctgggctacgggttcaccgccgtctgtggagcggtagcccggacagatgcgcagcatcgcctccgggaaatgatacctctgcgcactctgctcccgggggcggcgcttgacgcgccttgcccgggctacgggcgcaccgccgtctgcaaaacggtagcccggacagatgcgcagcatcgcctgcgggaaaatcaccgcgcagttctctttcgtagcccgggtaaggcgtcagccgcaacccgggttttctccgcgcttacttgctgtgccagtaggcctgcgaacgcaccagctgcgggtcaatctcttcgccttcaaagcgcgccagcagcgacttcaccgccgcgccttcaccggtcagccagataa

SEQ ID NO: 190262 - DNA, 144 bp, Klebsiella oxytoca
atggtgaaaaaggggggcgtgagcgcagaaaagagagtgaccgaccgggtacatcccgagatgttctgcgcccacgaaagagtcagttattcgaccgcttccgccgctgcggtgagggtttccagcagctcaggtaaagcctga

SEQ ID NO: 190263 - DNA, 1464 bp, Klebsiella oxytoca
atgtatctgggtatcgatctcggcacatcggaagtcaaagcgctggtcattgatgagaacaatgaggttatcgccagccatagcgcgccgctgagtattcagcgtccccatccgcactggtcagaacagtcgccgcagtcatggtgggaggcgacggagtatttgatggccacgctgcgggaaaaatgcgcccagcactggccggccattaaagcgatcggcctttccgggcagatgcacggcgcggtcctgctggatgccgagggggaggtgattcgcccggccattctgtggaacgacacccgctgcgccgcggagtgcgcggagctggaagagatggcgccggagctgcatcaggtggcgggaaacctggcgatgccgggctttaccgcgccgaagctgctgtgggtgcgtcgccatgagccggaaaactttcagcgcaccgccacggtgctgctgccgaaagactatctgcgctaccggatgaccggtaagaaagtctccgatatgtcggacgccgccgggacgctgtggctggacgtggcgaagcgcgactggtccgacgctctgctggataaatgcggcctggcgcgcagccagatgccgaccctggttgaaggctgcgaggtttccgccacccttgacccgcaggtggccgaacgctgggggctgaacccctcggtagcggttgccggaggcggcggcgataacgcggtcagcgccatcggcgtcggcgcggtttcgccgggagacgcgtttatttcgctcggcacctccggggtgctgtttgtggtgaccgacgcctatcgtccggcgccgcagtcggcggtacacgccttttgtcacgttctgccgaatctgtggcatcagatgagcgtcatgctcagcgccgccagctgtttgcagtggttctgccgcctgaccggcaccacggaggtggcgctgctggaggagattgcccaacttagcgaggaggagaaggcccatgcgccgttcttcttaccctatctctccggcgaacgtactccgcacaacgatcctgacgcgcgcggcatgttctggggcatgacccactccagcctgcgcgcccagctcggctatgcggtgctggaaggcgtgagcttcggcatcaacgacggcctgcgggtgctgaaagagagcgggacgcggatcgaacaatgttcactggttggcggcggcgcccgcagcccgttctgggcgcagctgttggccgatattctcgatatgccggtggtgacccacaaagggggagaaaccggcggcgcgttgggcgcggcgcggctggcctgcctggcggcgggcaaaccgcttgccgccgtgtgtgaaaaaccggaggtctggcagacctggcgcgctgacccggtacgccatcagaccctgatgcgccgctacgcgcagtttaacgccttgtatttaaacgatctgaactatcggcagcactaa

SEQ ID NO: 190264 - DNA, 729 bp, Klebsiella oxytoca
atgaacagaaagcaattcatccagtcacacggagctacttgcagtaactggacgtggagttggtcatttgttaaccatgaaaagaagatggtcatctttgggtcatgggatgttgagagtgaacaagagcggtctgtaatactccgggagaaatgggaatacaactcaaacaacaaaaaacaaccgggatacacccaggcactggaacacatccgtttagcccatgaaggctacgaactttacaccttcaatatggttttcgcagaacaccctgagaatcctgaaattgcagtaatcaaggattttgagcgtaaattaaacaagcgatatcttcgtaaagaaggtgttgtttggtatgcagacttcttacctaatccattccctgatgaaattccttcaggagagagttttgttgaaggtgcaaagactcaagtaacagtgaactactacgaacgcgatccaaaggccagacaagcctgcatccagcatcacggtactgcctgtaaatgctgtggcttcgattttgagaaggtctatggtacacatggccgtgggttcattcatgtacatcacatcaagccgcttcatacgattggggaaaactatgtggtcaatcccgtaacagatatgatcccattatgtccaaactgccatgcaatggtacatcacggaagcgaagtacttccaattgcagatttgaaaaagaaaatgacattctggagcgagtaa

SEQ ID NO: 190265 - DNA, 525 bp, Klebsiella oxytoca
atgacaaaaaagaaagagccgcatgaaataaagaaacgtggacgaaaaccaaaaaaacacgataatgcagaattacaagatcatctaaggggagtacgccatctcaatcaacttacagatgaagcacgtagagtaatatcaaactctgttaaaagttactttgaaaagaacaagaaacgtaagactttctcaaacaagaatatgctacttctggttacatcgactcgatacatcacagatgaagcgataaagaacaatatcgagtactttgctgcctttacactcaatgagtacggcgattcctcagtacgagattataagatggtcacgattgctatatgtgaaggcctgaatgcgattctaagtagtggtaagccggtaagaagtgatacaccagagggagcacagtacttaactggtgaagaagcatatcaactacgtatggctttagatggtggctgtactaaggcagatctactaaaggttatagctacaatttatcccgaattaagacattctaagtag

SEQ ID NO: 190266 - DNA, 501 bp, Klebsiella oxytoca
atgaaaaaggaaaaaagaaatgacctaaagggtcaggaattaccacatgtaaaacaagcactacgagtatggaataattttcactcaagagtacgtaataacatcaattacagtactgttaccatctgcgatgactggtatcggtttagtgatttttattattggtatgtcgaaaatattgttgatggttggcatttagataaagatatattaggaggtaatgagtacagcccaagtaactgcatctttgtaccgagagaagtaaatcaattgttccgtaaagtaccaacatcattatcaaccggtgttgtcgttaatcataagggctatcaagcacaagcaacatttgataagaaaggacataagtttgggacatacccaacgatagaagaagctcatgctgcttatgttgttgggcgtaaatcatatatctataaaatatcgcagcagtataaatcatttccaaaacttagtgcgatactattacaaaaatcaaaataa

SEQ ID NO: 190267 - DNA, 153 bp, Klebsiella oxytoca
atgaaagaaaagaaaactattagtgttggggtgagattaagtcctacacaagaagaaatactaaaatcacttatagtgtgtggtaaggctacaacgatgagttcagccattcagtatctgatacagcaatatgggattttagatagtaagtaa

SEQ ID NO: 190268 - DNA, 174 bp, Klebsiella oxytoca
atgaattggatatacaaaataatctttgaaatcattgctacggcaatctatatgttcgtactatttccatgttggatagtactgtgcatcttttttatgttactaacagtattggcactacctttgaaaattccaaccataaataaaatggttatcaggtttttggaacgataa

SEQ ID NO: 190269 - DNA, 357 bp, Klebsiella oxytoca
atgacactcaaacataatgaaacacatatttattattccaatgattgtgccgtagaacaacaagataaagaaatctggatcgaccagaatttagtatatagctgctgtaaaggcgatgaagtagagtatacagaaggtaataagtcggactctccattctatggtcaagaggctttacaaactatgtattatactgaccgtggaaatgttcagtataataatgaagatgggagtttttactttcgccttgatgatgggaatatgaatacatacatagatggacaactccagattgatgatcctaacggtgactatgtagaattcattgagttcgcaaatagtgtaatgtctaagtaa

SEQ ID NO: 190270 - DNA, 1935 bp, Klebsiella oxytoca
atgctccgtcctatatgttatgagcgagtatcaagcattcagcaaatcgaagggggcggtggtctggatgaccagcgttcagcactggagggatatttagataaaaatgctggattgttcgaaaatgataggctattcattcaggatagaggggttagtgcgtttaaaaattccaatatatcatcggagtcacaacttgggatatttttgcaagatgtgcaaaaccgcaagtacggcgaaggtgacgcactcattgtaatgtcgcttgaccgcattagtcgccgttccagttgggcagaggacactatcaggttcatcgtgaacagtggaatcgaggttcacgatatttctgccagtactgtgttacggaaagatgacccgcactcaaaacttatcatggagctgattcagatgcgttctcacaacgagtcgctaatgaagtcagtacgtgcaaaggcagcatgggataggaaaatcattgaagcagtacagaacggcacagtgatatcgaacaaaatgcctatgtggttgaagaacgttgataacaggtatcaagtaattcaagagaaggcggatctgatcatcagatgcttcgagtggtatagggatggattcagtactggagagatagtcaaacgtattgccgatccaaaatggcaaatggttacagtttcaaggctagtaagggatcgtcggttgttgggtgaacataaacgttacaatgacgaggttattcataatgtctatccgaaagtcatagatgatgatttgtttctcacagctaatcgcatgatggatcgtgtgatgttggagaagaataaaccagcagaagacctgttacttgaatctgatgtggtgcaagagatctttcagctatatgaaagtgggcttggctcaggtgctatcgttaagcgtttgccgaaagggtggagtactgtaaatgtactaagggttttacgtgacaaaaatgtagtaacgcagaagattatcgataacttaacttttgagcgtgtgaatcaaaagttgtcaatgaatggtgtagccaatcgcattcggaaggatataactattgcacaagatgattacataactaacttattcccgaagatccttaagtgcggttattgtggtggtaatgttgcgattcactataatcatgttagaacgaaatatgtgatttgtcgaaatcgagaagaaaggaagatctgtgatgcaaaatccatacagtatattagaattgaaaaaaacatactcaaatgcgtgaagaatgtagattttcaaaaattaatgatagaaagtactggcagtgaaacttcagtgctggatggtctgcatgaagagctatcatcattacgcagagaagaaaatagttatagcgataaaataaatgaaagaaaattagcaggtaaaagagtaggtatacatctcaatgatgggttaacggaggtgcaggacaggattgaagaaatagaaaaagaaattatcaatgctcaaactgtaagagagatacctaaatttgattttgatatggatgaagtacttgatccaatgaacatagagctacgagcgaaagtgcgaaaacagcttaggttagtacttaaagcagtgaaatactggatgttcgataagcgtatttttattcaattggaatacttcaatgatgtactttcacacatgcttgtaattgataataaacgtggcggtggagatgtaatatatgaaatgtctattgaagaaagaaagggtgaacgaatctatacagttcatgaaaatggtcatgcagttttcattgcatcagtaactatcggcacagatatatggtcattagctttaagccgcacacgtacaattgatagcattggcaattacctaagcctccttgctcgtgaaggttttgagatctttgtgaacgaagatcaaattgattggttttag

SEQ ID NO: 190271 - DNA, 294 bp, Klebsiella oxytoca
atgccgtctgctgatacccccattaactggaaacgcaatcttaccgtcacctggctcggctgttttttaaccggcgccgcctttagcctggtgatgccgtttctcccgctttacgtcgaacaactcggcgtaaccggccatagcgccctcaatatgtggtcaggtctggttttcagcgtcactttttattttcagccgtcgcctcccccttctggggcggccttgccgatcgtaaagggcgtaaaattatgctattgcgctcggcccttggtatggcaatcgtcatgctgctaa

SEQ ID NO: 190272 - DNA, 954 bp, Klebsiella oxytoca
atgaaaactgaacaattgatccccctgtgccagcgctacaaggcattgctgctcgatagcgatgaacacaccattgccatcgccgtagtcgatgcccctgcaccggaactcatggaagccctgcgcttcgcgactcagaaaaggattgatatcgaatgctggagccaggaccggatggacaaacggctgcagacgccgggaatatcaacgctcgccccacctgttgaagcctcagccagcgtcgttgaacaggtgaataaccttctcgaacaagccctgcgccagcgcgcgtccgatattcatatcgaacccggcgacgatcgcctgagaattcgcctgcgggtagacggcgtactccattctcttgcgccgctagccgcggagctcgccgccccaatcaccgcccgacttaaggtgctcggtaatctggatatcgccgaacatcgggtaccgcaggacggtcagttcaccctcacgctctccgagcgtccgatctcgtttcggatcgccacgcttccctgccgcggaggggagaaaatcgttctgcgtttactacatcaggttgaacaagcgctgaacctggaggcgctggggctctcctcccagcagcttgccgccttccgatcggcgctaaaccaaccccagggcctgatgctggttaccggtccgacgggaagtgggaaaaccgtcactttatacagcgcgctacaggcgcggaatcgcgacgaggtaaatatatgcagcgttgaagatccgctagagatccccattgtggggatgaatcagacgcagattaacccccgggcgggtttaacctttcacagtgtactgcgcgccctgctccgtcaggatcctgatatcgtaatggtgggagaaatacgcgatgcggaaaccgctgaaatcgcgataaaagcagcgcagaccgggcacctggtgctaattacaactctctaa

SEQ ID NO: 190273 - DNA, 261 bp, Klebsiella oxytoca
atgagtgtcccaatgaaagggctgtccaaacgtggcagctataatcatctgactgactcaatgcaattcaagtattttgacgggcaaatagaaatcagtgaagcaacttataaatcactctcttcaggcagtaagcctaaaccaactgtgaaaccatcgaaagcaatcaccacttacaaggttaagccaaagccaacaattgaacagcaaagagatacagccctgaaagaggcaattaggaaaatgacaggagggcggtaa

SEQ ID NO: 190274 - DNA, 576 bp, Klebsiella oxytoca
atgacaaccttgaataaagccgtatcaattaaccaacccatcgcaagtattaaccatctgctaccttttgaacaacgtcagcatattgagaagctctatttcccgaaggttcaacaggtcactgacaagatgtctaaagcagaatctgaatatcaggatgcagtagaatcgcgccagcaattgattaatcagaaagctgccgaatatcaggctaatccttcagaacgtcacggattcattgtgaagcaggtttacccaacgaaccaacagcagattattgagtcaatggctgattctggctacatggttcaccgcatgggtatcggtgtaattagtttcattcgtgtgccaaagaacgctaaagataatcctcttcaggaaatcactgataaggctacagcagaggctgagtcaactattgataagatgattgaacgtctgaaggtaaaagcctctgaagctgtccaccagcgtaataagattgtgattgaggcccgtaaggctttagattctgtaaaagactttaccgattacctgaacctgattgtaactgatactgaagaggtaaacgaataa

SEQ ID NO: 190275 - DNA, 618 bp, Klebsiella oxytoca
atgagcaccctacctttcgatttacctgctaaggtcattcaaccatcaccgtctaatcaattcctctttctgactggtacagaagacttcacgattcctaaacatgctgctgctaaagctgctggcgaaaaatcctttatacacatatgtaaagttcatggtgcgggtaagcactatgcgagtaattctttctgtgttgaatgtaataatgacaactccaatcgttgggctggtgataatcgggaaaggcgtcttgagcacaataaacggtatcgtcaaacgaatagggataaatgccttgaacgcctgaagcggtatcgggataagaacagctatttatgcctggctatgaccacatgcaatcgcatggggctaccatacaaaggtctcagaaaacgcctgttgtataccgaaaaggagttcaaactccatattgaaagtctttggacatatggcatgtgttgggctaactacggaattggcaaaggctgctggaacatcgaccataaaatccctgtttcacattttctcaagatgggtgaaaaagatatttccgttatcaatgctttgagtaacctccaaccgttatggcaggaagacaacgtgaagaaggggtaa

SEQ ID NO: 190276 - DNA, 930 bp, Klebsiella oxytoca
atgaacgaagttatcttcaatctattttatttttgtgaggatggaaaacacataaaggatgttggcatctcgtgccatgagtgcgagggaacggatgctgaaaaattagaatttttaaaaaataatattatatctgatgcacagctatgcactcattaccctatacatccgtttacattggatgaaaaaggtatgctaacaattgataggtttattgcaaatgcaaggataggaaattctttacaaccgtttgagattgcacttgaagccgttaatgctccgcaaagccctttgcacgtttttacagcaatagtaaacggaataccaagagtagatgcaacagtacccgctaatgaacaatttaggcgcaagcacaaccctaacgctgaagtggagggtgttaaagttatgcctgactatctggaacaatacagtgatgggaatagttttaaaataaaaaaactgttaattgatgaccacgtcaccccgattcacttgctatttaataacaagcattatctttcaagcttcaaattactcgtatcattcatcgacacaatggcttttattgaattaggaaacccaccaagaagtgctgtatttgtccaatggatggataaatattcagagttacccaagctaggtattacatccaaagacctttacgaactaaggaactcattacttcacatgaccaacctcaactcacataaggtaatcaggggtgaggcacaaaggattagttactcgatagcaccaaaaggcactcccactcgcgagcatgagggaattacgttttttaattacactgatttaattgatattatcgaagatgcaatggatagatggcttaacacttatacagataattatgaaaaaatagttacatttattgagcgatacgataccatagttagagataattattga

SEQ ID NO: 190277 - DNA, 276 bp, Klebsiella oxytoca
atgacctcatacttatggtgtaaaggtaaagagttaaacaagttggggtgggtgcttgccatctgtaacgttgcagcctttttatatctgaatcacatattgcttattgacctgattcaacgtgtggctgatacgtctgatggctatataagcatctttgatgatgactttgtgtcggatgtttcccgcaataccattcagattatgattacctatgtagcggcctcaactgctggcagttactttggagcaaagaagaaatttaaacaggattaa

SEQ ID NO: 190278 - DNA, 909 bp, Klebsiella oxytoca
atgagtaactcaccagttttagaattgcaagctttggctggagacccatcttcagatattgtcgcggttttattaaaagctaagatgatagctgttaaattaaatttgaatgaccttagtgaatggcttgaatatgaaattgaaggttatccaacaggtaatgatattccaaagtatcgagtaggtcgagggatagtcaaggcgttcaatccttatcatggttggtttcctgttgatttcagtaatgtaccgccagatttcattgagagtgcttctgagtttaggattaccgaatcaatatcgtcaatgaaaaaaggcgaatcaaaagatggtatgctgcgtattacaatgcctcctaaaatggtaaatctcttattcggctcgcacgatattccccctgaagtttgttggttttttagtgcaaacaaactcaatcatatagtgacaaccgtaagaaacaagattctcacatggtctctggaattagaaaaacaagggattatgggggatggtttattattcacccaaaaagaaaaggatgcagcaccaatgacaatcacaaataacaatacgaataattttcacgctcctgtaaacaatgctggcgcaattggggcgggcaacactggtgacattaatcagcaaaactctatctcagtaggtgacattgcatcccttgagcgtgaactaaagagtcacgggcttgatgataatgatgttgctgaattaaaactgcttgttgagcaatcacctaaaccagcttcaaaagaagaggttgaaaaaggttttggggcgtggattggtaagatgactggtaaggcttttacaggtgcgttaaaggttgctggtgcggcggctcctgccgttcttactaacgcaatctgctgctacttcgggatccctgtttaa

SEQ ID NO: 190279 - DNA, 912 bp, Klebsiella oxytoca
atgagtaattcacctgtattgaatttgcaggaaatggctagttcaagttcagttgatatagaaaccttgttatcaagggctaaaatgatttctgtaaaattagggttgcaggatatatcagattggctcgattacgaaatgaaaggttatccatcacatgaccttcttccagaatatagaattattctcgatgctcaagtgatggcattcaacccttattctggttgggttccttatctgattgccaacactacgggggaaaacaaagaggtttatgattcattgactactatcaacatcaacaaccctatatcaatgcttgtagaacacgcaaaaagtgagtctgtccttcattctgacctcccaggatttatgacagaattacttcaagaaatggctggctgtaggtatcgtatggcgtggtgcatttatcctgcgcagcttataaatatcatctcaagtgtgagagttaaaatcctggattggtcactgctccttgaatccaaggggattttaggtgaggggcttcttttctccaaagaagagaaaagtgaagcttatgggatgacaattaacaatattaataatttcaatgctagtgttaacaactctggtgctataggtgcaggtaataatggtgatataactcaaactaacacggttaatactttgaattttgatagtctgtcaaatcaattaaaggtgttaggtgttgcgactgacgacgtagtggcattaaaaaaattaatagtaagtgcatctcatccaaaggcatcgggaagttttgacccagtaattggtaattggatggggaatgtaatgggaaaagcctattcaggtgagcttaatgtctctggcactgaagcatctgtattaattgtaaaggctctatcctcttactatggtttttaa

SEQ ID NO: 190280 - DNA, 963 bp, Klebsiella oxytoca
atgcattttaaattttacacaacattgagattcatgcatgttacgggcgataactttgatgattttgatcttcttcccggtgtaacactgataagagatcgaaagaaaataagaaaaatacttaataaagaaattaaatcctttacaggcattattgaatacgagcatttatataatgcaaaccacataatttatgccgaccttcaagatgattttttttccccatcaacatcaagtggtgatgcagtgatgagttggcttttatggatagacatgcttgttagtacctcttggctgattaaagataatggtatgctttgcgagatagcatactgcaataaaactgatcgtaaaacattctctgaatggtctaataatagtttattaagcctgtttacgttagctgggggaaatagacatactgatattgagtttagcagagatgatttaattaaatgggaagatacaaatcacaaaattcaaactcatctatacaaaaataattctactgtgtttaattcctttgtggactcaaaatattctcgatatggtagagctttcagtttcattaagtcagcaaaacgagaatttgatcctgcaatgaaaatatcgcattactgcagtgcactagagagtttattttcaacagataactctgagctctcacacaaattatctgagcgcgtttctattttcttgaaaccatatgattatgatcccatcaagacatttgatgatattaaatcattctataatattcgctctaaagttacccatggtgatagtttgaagtctgatagagtagggaaattaccagaagaaagcattaaactagataattatcttagagtaatcatgaatataatattagattccgatgaacttatgacaatatttaacggtaacaaagatagctttgaaaaatatttcaaggaaaaattattacttggcgttcaagtatag

SEQ ID NO: 190281 - DNA, 1062 bp, Klebsiella oxytoca
atgcgtaataatgaatacccccatggtatagtgattgcagttcatccatatccgaggtatttgaatagtgattggattctgcatacgtatataagtgaacataaagagccttttagatggaaaaaaaaggtggatttttttgagccatttgactatgggttaatttttagtacttatcaagaagcattaagtgcagccgataaaataaataaagtgattcgagatgcaattaaccaactagacgttcctcaagaaattaaggactcatattttttaagggctgaaaaggcaataatgtctagggggagactcaaaaatgaagaagatctaatgcttaatgaagcgttaagaattacttcttcgttgccgcgacctaaagatagtgaagtcattattaaaattaatgcatataggcgagcagatatttccataaaagatgaattgctaaaagagattaaaattaaccccttaattgaaattgctcatttgaaagaaaacaggatggttattggaaaaaatgaaaaaggtgagtgggggcgttatctctattacaacgaacggaccactcaagtagcatttagagaaaagatttcaaggtctttcggtttttcaggccgtgagcactgggggaaagttaagtctgagattagactgaaactattaccacgagcaaatgagcttttacaacttgcgagtgtaaaaagaatgcttgcagaggcatattctcatgggcataaagttttaatggcagggggatatgtattttggtacgaggaaaatggtgatattggatggacagtaaaaactactaatagcaatgaatcgatcaaaaatggtgaaagcatttggcatgatgggacaattatatcaaaaaaccatggaaggatcgtagttttcccatacattaaagaaaatggagaaaaagttcagggacatactaaaaatgcccctcatgatggaaaagctaaacctcgacatcctagcgagtatgttgagttgccgtttcacattcttgaggatgacttgatggtcggtctttttggtgaacttaaatatgagtga

SEQ ID NO: 190282 - DNA, 567 bp, Klebsiella oxytoca
atgaccacccttacgctacagcaggcctttgaagcctgtcagaagaacgaaaccgactggctgaaccgtaaagccgaactcgcggccgcagagcaggaataccgcgagcaggtgctggccggggatgaccgtataccgggcagaatgcagacgctgcgcgacattatcgacgtcaaaaaatgggagataaatcaggccgccggacgctatatccgctcccatgaagcggtgcagcgcatcagtatccgcaaccggctgaatgacttcatgcaggcacacgggaaagagctggccgccacgcttgccccggagctgatgggactcagccagcagcccccactcctgaccggccatgcgctcgaccgttcggcgcattacctgcgcgaagcgctgtccgtgtggctgagtaccggtgaagaaattaattattcggcagaagacagcgatattttaacggccatcggattcaggcctgacgcggcttcgcgggtggataatcaggaaaaatacacccccgcacagagcctgatttattcccgccggcgcacggaactggccagtaagtag

SEQ ID NO: 190283 - DNA, 1032 bp, Klebsiella oxytoca
atgcctattactaaagagataatacaactaatggatactctggctgagtctattgctcataccattaaagattatgtaaacaacgacttttgtgatgaaaatgataaggatcatgtgttaaagtgggtatcccaatttgatgaagatgatcgcttatttgttttaaaacaaactgatcttcttttgaaaaagcagtattttaccaaagataattttgaaatacttttagataaagccataaaggatacggcaagtaaaacattgcatgatacttctttcttagatgtgcaacttgacggtaaaagtcaaagtgacatgttggaaatacttaataatagctgtttaaatactcacaacttcccaattaatatcaataattatacaaaggataggttcgtttatcaggatgatgttgttttcactggtgatagagtttgtcgagatctcgaagagtggataattcattcagcgccacatcaatgttcattgcttattgcatctctgtacacccatacttcggccctgtataatatagaaaaaaatcttatccaaacaataaatatatcaggaaagagtatcagtctatcccttgtttgcttcggaaaaatatatgaaaacaaattcataatgaggaatcagtctgatgtattctggcctaaagaagaaaatgttaacattccaaataatctcgatccaataaggtttataagtactgcacctcaaggccaggcacctggacgcacagggttcgctgcgagttatgttttcgaaaatggaaatgacagagacagatttgaaaagattttatgtgaaaaaggattttatataatatcactctgtaataatcctgcagcctcaatgaaaccactaggttataaaacatatagaggcctcggttttggtggcaccatatttacctacagaaactgtcctaacaacacccctcttgttttttggtggggcaatccaaatatggaagattggaatccgttaagcaaatggtatccattgatgatgagaaaaacatactaa

SEQ ID NO: 190284 - DNA, 606 bp, Klebsiella oxytoca
atgtctgatttgagagaatataattacaataactctgtagttttcaggaaaaccacagagaaatggggcgggttgtctaatatggcccgaggttaccctattgttgttaatgatataaaaattcagtcgagtgaaaccctatatcaagctatgaggtttactgcatacccagaagtacagaaagaaatcctttctcaaaataatcctatgtatggaaaaaggatctcaagaaaataccattcattaacccgcacatgctgggatcaagaacgagtggcaattatgaagtgggcggtttgcgttaaactttgtcaaaattgggaaaaattctcaactcttcttctttctaccggtgataaaccaatcgttgagtattctgaaaaagatcagttttggggggctaaaagtattggtaaccatacatattccggaatgaacgttttggggcgcattttgatgcttctgcgcgatagatgtgaacatcgaggacagcaagccttcaccgtgatcccaccaccaaacttagctgatttcaatatgattggagagcctatacagaatgtgactgcgccagatatgaaagaggatcaaattctccttctttga

SEQ ID NO: 190285 - DNA, 144 bp, Klebsiella oxytoca
atgaatcgaacgtacctgagcactaaagcctgcgggttatcaaatctggtcgcccactcgcagaagcagattcatcacagcggcaggataatcgttgttgggcctgttcatctagcctgtcaggagggctgctatgtctgctaa

SEQ ID NO: 190286 - DNA, 1047 bp, Klebsiella oxytoca
atgactgcacaatcctggcgctcccattacgaacagaaatatcagtattccttacggctatttttactgcttaatttagtttcatctttcttatcccttgtcagcccgctcttcaccgtcatcacgtttactctgccctgttttctgattgttgcctgcagcacggtcctgctgctgtggcactgtaagttcgctcagcacaaaataaatattccggttatttctctgatatttggcctgctttgggcatggcacgttgcgctaaaagcaatgatgatgggtccgccgcattttaactacctggtgatcgccttattaagcgtgttatttattggcactattgctttttccagcaatatcattggctttactttgcactctttaccaacctaccttacctgcctgattctgggcggcggagaacaatggttgcgcatgtcctggtgcttcttgttgcctattgcgggtatcaccctgcaaagcttaattcagaaacgcagcgatatattcacccagggactaatggataagctgctgaaggaacgtaatacccttaacgatctcagtatgttggatccgcttaccggcttgtataaccgtcggggtttacaaaatcgtctggataccgttctctctctggacagcgccggacattacgtcctgctgctggatattgaccatttcaaagcctacaacgaccactatgggcatatgatgggcgaccaggcattaattcaggtttccgccgccattcgtaacgccgtacgctcacgcgatatcgtagcccgctttggcggcgaagagttcatggtgctgttgaccagcagcagcgcggagaacgcccttcaggccgcagagcgcatccgtcagcgggtctacgatctgaaaatcccgcatatgtttaacgaaagcgtcgcgaccaatgtgaccattagtatcggtatgacgccgctggtggatgctgatatcgacagcgccctgaaacgggcggataacgcgctctacgaagccaaaaacatgggaagaaacatcattctcgccagctaa

SEQ ID NO: 190287 - DNA, 267 bp, Klebsiella oxytoca
atgcgtatttttaaaacaaaatggtttaccagggaagcccgggctcatgcgattgatgacgacgaactttgcaaagcgattgaagccactctccagggaaaagtagataaccttggtggcggcgtttacaaaaaacgcctcaataaaaatcgcgatcgcgcaatcatcctggcaaagggttctgagcattggttttacacattttatacgccaaacaggatatcgccaatatcgataaccgagaactcgcggcgttccgtgagttag

SEQ ID NO: 190288 - DNA, 576 bp, Klebsiella oxytoca
atggacaaattcggcgcagagcagcttttgcaacggatgctggcaaatcctgctgcaagctttcgcgaagggcaatgggaagctattgatactttagttaattatgggcgaaagttgctggttgtgcagcgtactgggtgggggaaaagcgcagtctactttattagtacgaagattttccgcgatcgcggtagggggccaacaataatagtttcacccctgctggctttgatgcgaaaccaggtgctggctgcggaacggctgggcattcgggctgaaacgctgaattcaacgaacagggatgagtggctgcttatcacccgacagcttgtcgccggcgaactcgattgcttattaatttcacctgagcggctggcgaatcaggatttcattcaatcggttttagcgcccgtaggggatcgcatttcgatgttggttgtggatgaagcccactgtatttctgactggggcatgatttccgccctgattatcgacgtattctggatatcctgcgtcagctacccgctaatacacctgttctgggtaccacggctacggcgaatcagcgagtcgtga

SEQ ID NO: 190289 - DNA, 288 bp, Klebsiella oxytoca
atgctccatacgctaagcacttccccctggcacgctgatatggcgacgatgcgccgtttgataaaagagggagacgatcttctgctgctctcggacggtgttgtcgcggctgtctccgaaagctattttcttgaaattctgctatccgcccccataactctttacgctctgcaagaagatatcgaagcccgcgggctgactggtcaaattgcggacagcgtcgtcagggttagctatactgagttcgtcagactgaccgtcaaacatgcgggtcagttggcctggtaa

SEQ ID NO: 190290 - DNA, 1653 bp, Klebsiella oxytoca
atggatttatctttttctcccaggctacttgctgtagccattgccgcagcgctgccagctattgtcagcgccgcagatatgccatccgtcgccaccgcacgcaacggattcgccggttacgatcaccccaatcaatatctggtcacaccagcaactaacattgccgataatatgatgccggtaatgctacatcctaatcaggataaagagactcagcagaaactggcagacttacagaaaaaaacaggtaagaaacctaacgtcattatttttattctggatgacgttggctggatggatgtcggttttaacggcggcggtgttgcggtaggtaaccccacgccggatatcgacgccgttgccagccaggggcttattctcacttcagcctattcccagcccagctcctcccccacccgcgctaccattatgaccggccaatattccgttcatcatgggatcctgatgccgccaatgtacggtatgcccggcgggctggaaggattgacgactttaccgcagctgctgcacgatcaaggctatgtaacccaggccatcggtaaatggcatatgggcgagaacaaaggttcacagccgcagaatgtcggcttcgatgatttccgcggctttaactccgtttccgatatgtataccgaatggcgcgatgttaacgtcaatccggaagtggcgctcagcccatcccgttccgaatacatcaaaaatctgccgttcagcaaggatgatgtgcacgcggtacgcggcggcgagcaggaagctatcgctgatattacgccgaaatatatggaagatctggatcagcgctggatgcagtacggcgttgagttcctgaacaagatgacgaaaagcgataagccgttcttcctctactacggcacccgcggctgtcacttcgataactacccgaacgcgaaatacgcagggcgctcacccgcgcggacctcttacagcgattgcatggtagaaatgaatgatgtgttcgccaacctgtataaaacgctggagaaaaacggccagctcgataacacgctgatcgtctttacttccgataatggcccggaagcagaagttccgccgcatggccgcacgccgttccgcggcgcgaaaggctccacctgggaaggcggcgttcgcgtgccgacgttcgtctactggaaaggcatgatccagtcgcgtaaatccgacggtattgtcgatctcgccgatctgttccccacagcgctggccctggcgggtaaaccaggagccgaagtcgctaaactggtgcccaaaaatacgtttattgatggcattgaccagtcatccttcttcatcgccgccaacgggcagtctaaccgtaaggctgagcactacttccttaacggccagctttccgcggtacgtattgatgagttcaagtatcacctgatcatccaacagccatacgcctttacccagagcggctatcagggcggtttctccggagcagttatgcagacggcaggaacggcggtatttaatctgtataccgacccgcaggaaagcgatgccatcggcgttcgtcatatcccgatgggcgtgccgctacagactgaaattcatgattacatggaaattttgaaaaaatatccgccaaaagtgcaaatcaagctgtaa

SEQ ID NO: 190291 - DNA, 1236 bp, Klebsiella oxytoca
atgccgcagcaggttccgacgcgtgcttttcacgcgatggcaaaaccgagcggttcggattgtaatctgaactgcgcttactgtttttatctcgaaaaacaggccctttatactcagcagcccgctttacgcatggatgatgcgacgctggagacttatgtccgtgactatattgccgccattgaaccgcaagatgaggtcgccttcacctggcaggggggagagccaaccctgatggggctggatttttatcgtcgggcggttgctttgcagaagaaatacggggccggacggcggattagcaacagctttcaaaccaacggcgtcctgctggacgatgaatggtgtgagtttcttgcgcgtcatcatttcctggttggtctgtcgcttgatggcccggcggagatccacaacgagtatcgcgtgaccaaaggcgggcgcccgacgcataagctggtaatgcgcgcgctgaagacgctgcaaaagcataatgtgcaatacaacgcgctggcctgcgtgaaccgcaagagcgcgcgcgaaccgctgcgggtctatgattttttgcgcagcgccggagtcgaatttatccagtttatcccggtagtggagcggcttgcagatgagcgggccgggcaggatggtctgatgctgcatggtccaggcgatttagagggccggataacggaatggtcggttcgtcctgaggactacggcgattttctgatagccgttttcgatcgctggatcaaacatgacgtcggcaaaatttttgtgatgaatatcgaatggacgtttgccagctttgtcggcgcgccgggcgcggtttgccatcatcagccgacctgcggccgatcgctggtggttgagcataatggggacgtctacgcctgcgatcattatgtctacccggagtatcgactcggcaatatgcgcgagcagagctttgctcagatggttgattctcccggacagcaggactttggcaaggataaatatgcgaagctgcccagtcagtgccgtaagtgtgaggtattgaaggcctgctggggcggttgtccaaaacatcgctttatgccgggcgataacggcggaccggggctgaactatttatgccctggttttcaccgttatttccgccacctgccgccgtatctgaaagcgatggccgacttgctggcgcgcggtcgccctgccagcgatattatgcaggcgcagctgatggtggtgaaaaagtaa

SEQ ID NO: 190292 - DNA, 126 bp, Klebsiella oxytoca
atgcagtacaaaaccatctgtaatacgtacggggaaggcgccctatgcaaacccggatgcaaaattcagcgcaacttcaacgtcttcgcatcaatctctgacgggcgacttgaaaaactcggatga

SEQ ID NO: 190293 - DNA, 309 bp, Klebsiella oxytoca
atggggtttgaatcgcctgcgaaggactatattgaggatacactgaccataactaaattgtgccggatggacgccaactcacgcaccgtcaaaaccgattgtggatacgccattttggatatgtctctacggccagagcagggcgatatcgttctgatccgttacggcgagatgatggatttcggtaagttgcaagggcggtcatttattaccagggaaggagaagttgtcgagggggaagatgtggaggtgttcggcgtcgtcacgttcaccgtcaacgatctgcgccgggatgacagcccggtgtaa

SEQ ID NO: 190294 - DNA, 240 bp, Klebsiella oxytoca
atgccacgtcgatacgaaattgaggtcgcttgccgggcggcgatagtcatcgagcccaacggcaggcgcaccatcaccaccaggcggtttctgcaggagctggagagatataactggcactggtcgccacggcaggcgaaccagtggatagaaatatacgtcacgacgttcaaggacatctccacccaggagggtgatgaccgggtattccagttgtataacccgaatggaggtctgtga

SEQ ID NO: 190295 - DNA, 633 bp, Klebsiella oxytoca
atgggagagcgcacccttgaccgaaaagaactggcgatagtctggcgagctattgaagactcccgcttgatggaacggaataagatactttataaactgtcactactatgggcatgcagggtcggcgaactgaggcaagctgaagtatcgcatttcgattttgaagagggtatttggaccgttccatgggaaaaccacaaaaccggacggaagagtaaaaaaccgatacttcgtccgataattccagaaatgctgccattgataaaacgagctattgatcttgcacctggtcgttttgttttctctaagtatgaagataagccgatgagtgaaggcttccatatgagcatcagcaataatctggtgaagttcatgcttaaagcctacaacgagcaagttccgcatttctcaattcacgatctgcgcagaacggcacgcacaaacttttctgaaatcacagcgccgcatattgccgagataatgcttggacataaacttcctggaatatggtctgtatatgacaagtacacctacattgatgaaatgagagaggcatatagcaagtggtgggctcgactgatgagcattgtcgagccagatgtactagagttcaagccacgtcaggccgggtaa

SEQ ID NO: 190296 - DNA, 672 bp, Klebsiella oxytoca
atgctaaaaattagtgatgtagaatctacggctcttgatggcctttttactgatggaaaaatatccggtggcattcctcccacaaggctggttgctgcatggtttaatgccattcagactgaacttgttaacgttgtcgaaggggctggcattgaattagaccccgaaaattcagcgcaggtattagaagccttaaataaattattttctattagcgactatcttaaaaagtcattgaacctaagtgaccttgacaataaatctacagcaagaactaatctcggtctgggtaattctgctacacgagcggtaggaactacagctggtacggtggccgcaggggacgattcgcgaattactggcgcattacagaaagatcaaaaccttgcggggttaactaatctggcaatcgcaaggggaaatcttgggcttggcgcgatggccacaaaagataatcctccgtttataaatgaaataggggcctatgcatttgcatggtacgacggagcaatgggttacacgggcactgtagatggctcggcattgtttccctcgacaggtgatggtaatcacgcaacaacgccgctctctggcacatggcgttgtatggggcagacagaaaccatcaacgaccagcaccgcacgactttatggcagaaaatcgcaaactga

SEQ ID NO: 190297 - DNA, 381 bp, Klebsiella oxytoca
atggcgaaagaaactaaatcggtgctggtggatgacctgaatgcggggggggctggcgtcgaagaccttaacgctgaggacctgaacgcgggagaaggtacccaggacaatcaggtgcatagcgatacaaacgctgatggttcatctggtgatgatggcgctggggatgattcagtcgaaactgtttcggagcctgaatttgtggttctaaagggaaacagcattcgtcatgacggtgaagtttaccgtgaaaatctgcgtattccggtctccggtaaggacgctgaacgtctgctggctgcaggtgtgatcgccgatgttcaggttcttcggcagcgtgcgttatctgctgcgcgtggcgtgaaaattactacggagtaa

SEQ ID NO: 190298 - DNA, 579 bp, Klebsiella oxytoca
atggcaaagaaaccgtttagttttgcccaccttattggatttggcgcgtcggcttccgaagaggaagacgataaaaaagccaaaaaggcgaaagcccgtcgcgcggaagaagacgagcgcgatgatgatgcggaagacgatgagcgtgacgacgacgctgaagaagacgaacgcgacgacgatgcggaagatgatgacgacgatccggacgcttccgaagaggatgattccgacgatgacgacgaccgcaaagaaggcaaggcggccaaaagtgcccgcattgctgagcgtaaacgttgcgcccgcatcttcggcagtaagcatgccgcggccaatccgtcactggccgcttcactcgcattcaacacagggatgagcgctgccgccgctatcgacgtcctggcatctaccgcgccagccactcaaccccaggcgacgcgcaagcgctctctcgatcagcgcatgcaggaaagcgagaatgtccggcttgggctggatggggataaaccatctggcggtaaagcgacgctggtgaacaaaatgaccagtctctacaactccaccaaaggagagaaataa

SEQ ID NO: 190299 - DNA, 2127 bp, Klebsiella oxytoca
atgtccacaaacatatctcagtcctcggagagccagaatttaactcagctgaagattgaacggcttcaactgagtgtcagaaaaggatggacaccaccgccgcgtatcagcgttccgcaatgggcggatgactttcggaagctggcgaaggaggccggaagcacgtcagggaactgggagacctcgactgtagaaattgcccgtggtccgatgctggcggcgaccgaatccggcgtacatgtcgtcacggtgatgtgctgcactcagctgatgaaaacggcattgcttgaaaacctgttcggctatttcgctcacctcgacccttgcccgattttgctcctgcagccgaaggaagaggcggcagagcagttttcaaaagagcgtatcagcccgctggtgcgcgtaacgccggtgctgcggaaaattatcggtgactctaaacagaagagttcgaaagaaaccatcctctataaagcgtttacgggcggatttctggcgctggctggcgccggtagcccggataacctggcacgccgacctatccgcgtacttttggcggatgaggtggataaatacccgattacccgagagggggatccgataaccctcgcagaggaacgaactgcaacgtttggcctgacctggctttccgttcgcgcctgttcgccgaccgttgaggacgaaagccggattgccgacagctatgccgaatctgaccagcgccgggcctcggtcgtttgtccgcattgcgggcatcggcagtttctggattttttcaaacacgttcagtggccgaaagagggtgataaacacctgacaaaatcagccatgatccactgtgaatgctgcggtgccggctggtctgaaggtgagcgcctgcgtgcattacagactatccgatggcatcagacccggccatttgagtgttgtggagcacgccattccccgttgctcgagtacgatcaggcctggcgggcgaatgacgaaaatagcgtggcagctgtctggaaatggtccgaatcaccgcggcatgcggtctaccgggcgatttgtccggattgcggcaaagaggctgtcgataaccaccacgccggttatcaggcgtccaaactgttcagcccctggcagaaagataaaccgtcggatatcgcgggaaaatttatcaaggcgaagggggatccggataaagagcaagcctggtggaacacgcaaatggggttgccacatagacccaaccacggcaagcagctgccagttgatattctgctggcgcgtcgtgaagtattcccggccatcgttcctgatggcgtggctttgctaactgcaggcgtagatacacaggatgatcgtttcgaaatcacgatcaccggctggggaagggatgaggagtcatggtcggtttcccacgatgtgatttatggcgatctggaaacggatgagccgtggaaacgactcgatgcgtacctgaaacagatctggcgccggcgtgatggtcgtggactaaacatcatggcgacatgcatggactccggcggacaccacacgcaaaaggtttacgaatttgctaaggaacgtttggggcgtcgtgtatgggcgatcaaaggtgagtctgctcaaagcggcaggcgtaacccggtctggccgacaaagcgcccgacatcgaaaagcaaagccactttccggccaattatcatcggtgtgaactctgccaaggatgtggtgcgcggtcgcctccacctggaacctcctgcaccgggcgcagctgcggcgggttatatgcatttcccggatgaccgtgacctcgggtatttcaaccagctgctggccgaacgtctggtttacaaagtgacggcaggccagcgcttcagtgtctgggaacagataccagggcgggcaaacgaagcgctcgactgcctggtttacagctacgccgcactgtgtggactcaagcatatggggttaaagctcaacgttcgggccgcaaaccttgaagccaaccctgaaaaattcctgccggcacctgccgtacctgaagaaaaaatcagctacgagttaccgggtgccgtcattgttgagcagccagatgaaaaaccaaagcgaaagcggatctcgcaacttttgccataa

SEQ ID NO: 190300 - DNA, 564 bp, Klebsiella oxytoca
atgaccatgatgaatcagagccagtatgcgcagcactcaggcgtcgatcgcaaaacgattgggcgctggattaaagccggccgtttcatcgtgatggacggtgacctgattgatgttgaagcgagcgatgccgcactgaagaaaaaccgtgacggaaaggatccgcgcacatcgaacgcgaagaaaaagaaaacgccggcggtcgttgatgatgtcggtgatgaaattgaagacactgccagaaaaattatccttaccgaaggtgccgatcttacccgggaggaagccgcgcgggtgcgcgaaaactatatggctctgctggccaaacttcagtatgaaaaagacagtggccagacgattgaactggtcgccgccgaggagattcttttcaacgcctttcgccaacagcgtgatgcctggatgaactggccttcccgggtggcaccgcttatggccgctgatctggatgtgccggcggacaggatgacagaggtgctgatcgaacatgtccacaaacatatctcagtcctcggagagccagaatttaactcagctgaagattga

SEQ ID NO: 190301 - DNA, 273 bp, Klebsiella oxytoca
atgaccaaagaccaacttgaacacatcatagcaatgtttaacgcacagcaagccgcaacagtacatctgtcgcttttgtttgcagaacaggccggtatctcaaagggcttggtagctgattcatttcgccaaatggcagaagcgctgcaggagaacgtaaataatcgggaaaccgtcgctttggtattgaaccagatagcatctggtattgactcacccgcaacggagcaccagaaaagcattgaagagatgatcaagaacgtcctgcattaa

SEQ ID NO: 190302 - DNA, 870 bp, Klebsiella oxytoca
atgattgatttttcatctttaattagcagtgtcccagataaatcagctacaacaggggaatggtttaccattcaatggactcctgatttagctactggtgaaaaattaaacattggtgtttgctttagggattcgtcaggaagttcatatgttcaggtattggaatactttgacagaataaactgcctctactctcaatcggctgtgttacatctccgtcttgcttgtgaagtagctaaagaagccgtaatgctaaaccaatatgtagaaatggctaacatcagtggagtaactttcgtttctaaaggatttgctcaagggaaatcctcggatgatatcttatcttctttattttcaaatgtcgttccgttagcggtgcgcaaatcaaagcctaaagaaaaagcgtactatccgattagtagggagcggttgtataacattatggatgggcatctgaaaaatactctagaatataatgaatattttgagatgatagagccaacaccggtaaaacgggtaagccttggaaatcaggttcagtctttatttttaccgtatacagttgggcgttcaattggaaccattgcatctgccgcatatgctgatgaaaatacagctaagtgtcatttgtatgacgctcaaagagatattgctctggcccttgggaattatacggaatactcttcgggggcgatctttattctttcaccaaataacgatttaaaagttgagaaaagagatcaggttgattctgaaattgataagttttgctggtatttgagaacattatcggtatatacagaggttgatagcgagcctgtgcaattagcagataaagctgctcattggtataaaaaaattgcagcataa

SEQ ID NO: 190303 - DNA, 804 bp, Klebsiella oxytoca
atgcgaacaacaattgagctgttaaaccaggcaagcctcaaatctgtactgtctagaccagatgaaggactaatggcgttaacactcctttctttagttgagtggtcagatggagttcagcgccagtgttacgtgaaaatctttgcagaaaagcaagggataggggttttcaacgagatcctcggatatctattaacaaaagctgaagagcttccagttgcaccaaaagcaggagttttaattcttcctgaggaattaaaaaaagaaatctcatttcctgtcgcgccggttgcattcttaacaagtaagattaatgggaattcgcccagtagtttttataacttggggcaacttttgaagtttgaaagcttatgcaaggtgattgatgggtgggaacggttaccacaaacaatagcatttgatgagtgggttgcgaaccaggatcgcaatttgggaaacgtcataattgatgcaaatttagatgtgacattaatagatcatagcaacctacctgtagatttagtttggacgacagccttgctggacgttgaaatagaaccccgaaacgttttaagtgatgccttcaggaatgcccctaatttacctcagaaaatggaaattatcagaggcgctttgaaacaattcgcgagcttaaatttggttcgcgatgaaattattttttgggcgaaccatatgttggataatgaacgtagagaaaaattattattatttttagaaagtagagccaaactttctaatgataggttgagcaaaaagtacggtcttttggcgggtgtcgtatga

SEQ ID NO: 190304 - DNA, 609 bp, Klebsiella oxytoca
atgacaccacgtcaacgccgcattcatagtgcaggattagaaattgtcgccgccgctccgcgcaagagctggctggggagatttacaccgctggctcatattcaatctgcctggattaaatcaatgctcactgtgtggggagaatgtgtcggtggtaaaactcgtgcccaatatcgcttagagaattgcggtcgtttcttttctgacgttaaagattctggttggtccgatagccagctatcccgaattaccgatgctatcgaacaggctcgcaaagaggggttcatgggagcacaggcagcagcgcgtgcccggacaatactctgggcgataccgcttaaagatatgatcgaagaatcagagcgtcgtgacgatgctgattttatagaggaagtcatgttgcagacatttaaaactgacgatccgatttacctggtagggatgcagttttacacgaccagaaataagatctccgatatcaccagggatttgcagctcgtggcgccatggctgacgaacggtgaagcacgtaagcgggttcggtggtgcctggagatattcagggcgaaggtttttcttgccgtcaggcaaaagatgaaggacgtatag

SEQ ID NO: 190305 - DNA, 1038 bp, Klebsiella oxytoca
atgcgggcattgctgaaagttgatatcgcccgacatctgggtgttgttttgctgaagccagggggcgagctgatgcctctctttggcaaagggcgcgtactggtggaattgccgcctgcgtatatggacgctctgcctagtggccggctggctgatgccagacaaccgctacgggatgataaagagctcaaatcctttttcatgaaagagcgggtcattgcagcggcggggggagtcaatgccctggaatcgtggcttgaacgtacggttaagcactgccagtggccacactcaacctatcatcaccccgagttggtaaatttcagacatgctcccggggtgatacgcgcctgctggcattgtgataacgatcttcgcaatcagaccacgcaaacactggataatttggttatgtcgaacacgactgactggattattgatacggcactgatttatctgggatacaacaaagaacgttcgctttctctcgctgaattgtgctggtgggcagtctgcgagggtataggcagcgaaatcacagaggaaatggcccgccgttccctgaagttgaaggtcgaaggttttcagcccgtctaccgggaaagcgatattgttccttccgtaccatccaccagcattttgcaggagcgcctggctttaatgcctcctgcgccaccagagtcacccccagagcgccaggaaccaattttaggtgtgcatgttgatccggaagccccttccacgttttttgccagacctaagcgcatccgctgggtatcccctgattttctttcctgggtaaaaactcaaccctgcatgtgctgcgggcagccagctgacgatgcacatcatttgattggttgggggcagggcggcgtcggtacaaaggctcacgatatttttacgatcccgctttgccgaaaacatcaccgacagctgcatgaaaacccacgggcatttgaacgcgaatacggtacccagccggtgctgattattaaattgctggaccgggcttatgcgctcggcgttctggcgtaa

SEQ ID NO: 190306 - DNA, 204 bp, Klebsiella oxytoca
atgaagagaagctggtttcagcatacaggtttgacagagtcgcaggcactggagctggtggcgcgctaccggcaggcgaactaccaggtagaaaaatgcctatcccgtgattttgtatcgtgggaggttagcgtttttttacccgaatcagaaaaggagccccgcgccgacagaaccttcttacaaaaaatgtggagggactga

SEQ ID NO: 190307 - DNA, 393 bp, Klebsiella oxytoca
atggcgcataccatcgcaaaaccagaatcaaatcagaccggcagtcataacgacaacgctggtctttcgtcattccagaaactgaccccgcgccagcaggaggtgtttgatctccttgttgcgttcatccaaaagcacggttacccgccgacggccagagagctctcagatctgattggcgcagcgtctccgaacgcggccgctgaacaccttcgcgcattgcgcagaaaagggttcatcaccatcgcccctaatatgtcccgcggtatttctatcgtcggtcataaagagccttcactcgccgtgcagctgctgcaggaaatggttcataacgaaccaggggcacgcgaacgtgccattgagttcatccggctgtatgaggcccagctatga

SEQ ID NO: 190308 - DNA, 2004 bp, Klebsiella oxytoca
atgaaaatcaggcctcagcaacatctcattaacatattgacttctaccaagcagcatcatccgaattttacgctttttttaggcgccggtgccagtataactagtggtgttgagagtgctggaggcatggttaaacgctggagaaatgcctatacatcgatgcatggagaagatgatctatctaatcaaccatggtttgataaggaaaatgagtattccgaactttttgaagcgctttatgatcaacccacacagaggcgcgagtttatcgaaagctgtataactggagctaagccttcttgggggtacgtatatttaacgaaccttttggataaagggcattttaatactatctttactactaattttgatgatttagttaatgaggcgtgctttacattttccaacaatttgaggcctatcgtttgtgcgcatgattcaagtattgctagtgtaaggcttacaactactcgtccaaaaatcattaaacttcatggtgattttctcttcgataatatcaaaaatacaatacgagaactcgaatccctcgaagataatatgagggcgaaatttagacagttcgctactgagtttggtatgattgttatcggttattctggtcatgatcgttcaatcatggacacattgaatacattattgcattctggaacttgcttcccccatgggatttactggtgtacaagggacggtgtcgataaccttcctgagcagctaaaaaatttagctcgattccctcattttcatttaattaaaatcgatggctttgatgaattcatggctgaactgcatgaagctttggggtgctctctccaacaggaggttgtagagccgtactcagcattgtcagacaagctagatagatattttctggtttctgaggatgatgacgatgatgataatcaacatgcaataattaggcgtgatatggacaaccttgcagatcatgtaaggcgtgttaacactgtgagtcaatttgtcaaaaaaataaaattgcttttatctgaaaaagcatcttcacttgatgatgactcaataacaaaatctcttgaaataatgcttaaagagactaaattcgcgggttctccggagaatcttcatttttacaatacgccaaattatcttatggccaactcagcctttagaactggagaatataaagagtgtgtggagtatgcaacaaagcatttgtcaaatggtccttcaattgaaactgaagcattgttgctacgctcttatattcatcttgaagatgaagaacaaattaacgattctttaaccagactatctcattacaagaaattaaaagaaggggaagctactaagattgttaacgctttagtagaattgatggattttgaaaattactcaatggctaataagttactagatcttttagattcacggacaattccggcaaaacataaaaatctcataactattaacagagctctttgccaaaagttacaagaccaaacgatagattctgagcttgttttagatttagaagaattgcttactgaatcgatagataacgacgaagcatggatagcccttggagctgctatactccttggaaatgacgatgttgctaaagaagtatccaattctttgtcggaaaccgagattatagctgtgataacgcaatctatgccaatttttagattgatttctgactctgtttgtgaaaaggtcaaagctatggcgattgagaaaggttacgaagtttcattcgaagaacattcggaagacgtaacagagtcacaaaacacaaattcttcagaagaaaaaacagctgatcaacaaggccagaaaaccgatgatggccctgcaccaagtgatgtagatagttttgctgtcagcgagccactaggtctcgatactgataagccagcagataacgatgaggcgtttgtggattctttagaacctcaggaaggggaaaaaagtgcgattggagatgatctttctgagagacctgcttaa

SEQ ID NO: 190309 - DNA, 234 bp, Klebsiella oxytoca
atgagaattgaaatcacaatcgaccgcaagaaaccccttcctgatggggctgagcctgcactggaagtggagctactacgccggttaagccaaaaatatgaggactgcaaattatcaattcgccgcgcaggggctgacgggttgagtgttttgggtggtattgacggcgataaagaaacgattgaagaaatcctgcaggaaacgtgggaaagcgccgacgactggttttattga

SEQ ID NO: 190310 - DNA, 261 bp, Klebsiella oxytoca
atgactgatatcaccgaactggcgctgatgttgaaacttgagttacatcgcgctgtaagcaatttcaatcctcagatgaatgttaaaaccagagacctaaaggagttggtagaggcgctggagaaggcgcagcgtgccaataactcagcgccagcaatattgcgtcagcttgccgaagagaaacaaaaacgcggtgaagtagcagcagcgaccgcctttaactacgcagcttcagcactgcaaaaggagttgtcgaaatga

SEQ ID NO: 190311 - DNA, 207 bp, Klebsiella oxytoca
atgattaccgggaccacgaattacgatgaggctccagatgttctttgcgcctcgtgcggcgggtattacaaagccgacgaaccggaaagtcacaaatgcaaagggaaagcgcaatttcatgacgaaattgaatgcgatatctgcggtttcaaaagcgccgactcggacggtgctcactactgctgcgaggataactttgatgactga

SEQ ID NO: 190312 - DNA, 222 bp, Klebsiella oxytoca
atgagcggacaaatcaaaaaccgcgtgccgacgcttaattatgacccagcagacccggacaagatgaagctcccggcaggcaacacctgcggtaactgccaccacatccggcgctgcaaagccatgtttggacacaccgaaactgacacctattgcgattggtcgccatcccgctttgtcgtggactcggcttcaattttgctgcgtgagggggccaaatga

SEQ ID NO: 190313 - DNA, 267 bp, Klebsiella oxytoca
atggctaacaaatcgcgtgaacaacagcaggcgagcgttcagaaaattatcgagctgacactgacgaaaggccgcctgacggtcaaagaggcctgcgccgagcttcatatgtgccgtgactccgtcggtaaatattttcgtgctgcggtgcggtctggaaaggtcattcgctatgggcgtctcgggttgtttcgagaccaacgagcgactatcgattttgatctttgcagattcagctaccggaagaactcaggagcagccaaatga

SEQ ID NO: 190314 - DNA, 795 bp, Klebsiella oxytoca
atggctaaaaattcaatcgacgcttatggcgccagcggtaaaaccaacgtgctctcatttaacccggacgcgttacaccttgtagatgatcccgcccacctgctgtacgacgagcgcattcatctgccgctaaaagaagcaaccgtgctcaatatcatgaagctgggggtaatcgagcctatagccgtctggaaagacccggaaaccggaaaggtgtatgtcgtcttcggacgccagcgagtcaaacatgtcatcgaggctaaccggcggttggttgagatgggtaaagagtcgttgctaatcccggcggtggtaaagcgaggcacgcttatccagatggctcagttgatggttagcgaaaatgaaattcgccaaccggatacgccgatcgggcgtgcgaaaaagatggctgcattacaggaccgtggccacggcgatgacgacgtagcgctgctctttggctgctcagtgcaaaccgttcaggcaacgctggcactcctcgaatgtacacaggcagtacaagctgccgtcgagtcgggagaaataaccgtcacgcatgcgcgtcagctgggcgacctgccgccggaagatcaacgcgagaaggtaaaagagctgactgatgctggcgcaggagctaaaggccatgaacgcgccaggcgccagcgcgccgtccttggagatacaaagccgcggctcagatcacgtaaggaaatcacccatgcacttcatacctccagcggcgattacgctgacgcgctgcgctgggtgctgggggaggaacgtaacaatggctaa

SEQ ID NO: 190315 - DNA, 441 bp, Klebsiella oxytoca
atgaccaaaaaaaagaaagaccgagtaaccaacgcacagatggcgcttgccattgtcaacctgacgcccgactgcgtgctgcaggacgtgtgcgaagcgttggatttacagtccagcaccgccggagcaattcttcggaaacttaccgaggctggcaaattgacccgtttccacaacggaacccagtacgtgtattgggtaaagccgggcgtggaagtgccggaagtggtgctgcctgaattgaccccgcgcgcagaaacaggtgatgttcagcaggtgaagtcgggcgtagttctggcgaagcagctggaagataaaaaactctggcggcgcgctgcgacggtgtacacaaacatcctgggaatgaccgccacagcgaatgaattatggctaattgcccggctgcgcagtcgttgcctgcgtaacgcgcggagatgctga

SEQ ID NO: 190316 - DNA, 984 bp, Klebsiella oxytoca
atggcagcgctgccctacatgcaactttacattgctgattacttggcggacaccatgcatttgtctaccgaagagcacggcgcgtatctgctgctgatgttcaattactggcaaacggggaggtctatccctaaaagtcggctatcgaaaatagcacggctaagtaacgaccgttggtcgtccgttgagccttcgttgaaagagttttttaacgataacggcaccgagtgggtgcacgaccgcattgaacgagacctggagatggttcgctcctcacagcgacagaaatctgacgccgggaaagcctcagcaagagcaagaaaaggcaaaaaatcaacggcagagaaacgggatgctaacgaccgttcaacgggcgttaataacccgttggaacaggatgccagcggcaacccaactaataaagatccagatatagatacaaatctaaaagaaaacccctctctacgcgagagtgaaattccagcgattcaggaaccgcaatacctcgaagggctggatatccccgtcggtaaattcacgatgtatgacaactggcgaccatctcaggactggcctcggctggctgccacctgggggattgcgctgccagtaccggcatatctgccgactgaactggccgagtttaccgcctactgggaatctgaggggaaagtgttcactcaggtccagtgggagcaaaaatttgcccgtagcgtggtgaccgccagagctaaatccaaaccacaaccagtaaccggaggtaacggcaatgcaggacttcaaccagttaacaccgcatcccgggcagtccaggaaattcaggcagccagagaacgctgggagcagaaaaacggacttactggcggcggacacggcatggaggctctggacggtcatgggcgagatattttcgaaccgctggacccagaagaacggggcggggccttcggatatgtggatagcgcagattgggtcgatgagtga

SEQ ID NO: 190317 - DNA, 555 bp, Klebsiella oxytoca
atgcaacctatcacagtaggaaatcatacttcgccggctgttgttcaactgaaatctgaaaatcagtattcgccgcgacgccgggacagcattaagagcagaaccatcttcgaagctgttcaagaatgggagtcaactttacccgggcgcgcacaggaaatcatcgcgcagctggtggctgagcagtgggaaaaacagaacgggagggggatcagcgtcaacaaacagaacctttaccgttacctgaaaaatgagagtggatcggaaaagtacaccagttacgtgatgcagctggcgccggccattgctgatgcgatgccgatagagatcgcacgcaaatatcacctcaaacgtggattcactgaagtcgagctggtggccagcgcgataaaagaatgcagcgaggcgcaccacgcaaagcttatcggcgttccgttgcaaaagctggagcgtcagatctgcaacgcagcgatatctctatttaatctgctacccgcagacgtggcggggccactactggcgagcatcagcgccgtagcgccacagtgtttttaa

SEQ ID NO: 190318 - DNA, 222 bp, Klebsiella oxytoca
atgacagcccttgataatgcaattcgcgttgctggctctgccaataaattagctatagccattggcgtttctggtatggccgtaagccagtggaaaaccaaaggtacgatcccttcatctcgagtgctccaagttttcaaagctactggagttaccccccatgaacttcgccccgatttatacccgaatcccactgatgggatgccgaacgaagaggcgtaa

SEQ ID NO: 190319 - DNA, 195 bp, Klebsiella oxytoca
atgacctcgctgtttgccttagtcatcagcgtctgcgcgctgacaggtgaatgctctgatgttctgatcggggtgtatgacacggaaaagatttgcacggatgaggcagctgagcagcacgttagcggccagtgcttgccctacaagcaggcgttcaccgcggctgacgaccaacagcctgcagtaagtttttaa

SEQ ID NO: 190320 - DNA, 339 bp, Klebsiella oxytoca
atgtcagctaacgatctggcattgaaatacagcaatgcaccggctgagcaactcatcggcgtgctgccagttatcgaagtaaaagcagcactgcgcgatgaggttgaagaggacgtgttagacgaagtttggactgagcataacttcgagatggaagccatgggcgaacaggtcgatgaaactgcccggctcgcaagaaagtttgaactggtcgctgaatcatttggcactgcaataaaactggctcttacgcagcaccatgcggaagcgcaggcaacattgattaaagcgcttgaggtatatccgggatatggccgggagccaccagcggcctcataa

SEQ ID NO: 190321 - DNA, 1422 bp, Klebsiella oxytoca
atgagcaactatgcgtacctcatcaaagctaaagcaaaatcagctgacgctaaaagtctgttttgctggttctcggcaaaatccgactcacgcgccgatcgtgaaatactgaatcttctcgaagacgccggaatatccgttggtcgcggtgctgaccaccagctgccgatccgcactaactggtttatcgttgacgacctaccagaagaaaacgtgctggatgatacctggtgcgaccgctacgagctcggcggagaagatgggatctcctggggaaaaattgtcacaccagaaccagatgaacctgtcgaagggctgacccctgaagacgatgcaggcgatgcaggcgatgcaggcgatgcaggcgatgcaggcgatgcaggcgatgcaggcgatgcaggcgatgcaggcgatgcaggcgatgaaaatgcagtatatccactcgcgacaatgcctttccgcactcagttactggcccaattcgtagccgatgaccgtcatacctaccacatcagcattccggaacgtaaccggctgtcaattctggaaatggatgtcgataaccatgccgtacaggatctgattctggcggcggagaacgtgccggacatcaaatcatatgatatgccgggcctttggaaatttaccagcgcgatgaagtctgtattccctgcagaaaagcgccatgagctgggcaagcaggtccagtttgcaaaattatggtttcagacgtctcaccttgcccgcgggctactcacaaaagagtgggctcgcggcaacttcatcacgacagttaatcgtacgccatccggagcaaacgccggcggcggtaataaaactgatcgcaacccggactacgaacacacgctggatacgcttgatcaggaaattgcgctggctacgctgccaatggattttgatatctacaacattccagtgtctatacatcatcgtgcaaaagatatcgtggctaaaaaagaaagcccgtggaaagagtggtcgccggctctgcgcagtacgccaggcatccttgattattctcgcgctgcgatcttctccatgatccgcggtgctggcgataacgtccatcatttcccggacagcctgcggcgctacatcaactcctgcctcactgaaagcgtgcatgacaagccgtcggccgaaatggttgatgctgccaacaaaggcgcggtcgtggaggatccggtaggtgatgagatcagcaagctgctggccgccgagcgcggtgaatttgtcgagggcattagcgacccggcggatcctaagtgggtaactgaagacctgacgagaaaagagcaaccgcaaatcgccagtctcggcgctggcatgttctccatcgaaggcctaatggactctcctgccccaacaaacaccaaagaagaggccaccagcaatgtgtag

SEQ ID NO: 190322 - DNA, 123 bp, Klebsiella oxytoca
atgtgtagatggaagaaactggcggtgatgaagccgcgaatcatgatgaaatgtcagagagcaaagcggcagctgagcatgctgcgtgcgaccctgcatttggtggcgcgtcagctgccgtaa

SEQ ID NO: 190323 - DNA, 531 bp, Klebsiella oxytoca
atgggtaaaaaatcaaatgctcctatcgtctccattggcgccgtattatttgacctggctacaggggttctcggcgaaacattttacaaagttgtcagcctggaatctgcggtctcatggggtgcggagatcgacccctcaacagttatatggtggttaaaacaatcctctgaggcgcgttcggccatagccaatgatgatgccataaagctggatgatgccctgctcatgttcactgacttcgtcctggagaacgtcacgggcggccgtaaaaaagcccaggtgtggggtaatggcaccacattcgataacactattttgcgttcgtcatttgatctcgcctgtctcgattgtccgtgggactactggaatgaccgcgatgtcagaacgatggttgagctcggcaaagccattggcttcaatccaaaaaccgctatcccgttcgaaggtgaccggcataacgcgctggcggatgcacagcaccaggccaagtacgtttctgccatctggcagcgtctgattaaaaactga

SEQ ID NO: 190324 - DNA, 1062 bp, Klebsiella oxytoca
atgttgcaacggaaccaaatttcgacgccatttatgggacgaccacgaaaaaatccagcggacgcgcagctgccgcccagggttaccaaaaataaatatagctatgtgtggaaacccaaggggacaaaaataagcgtaacccttgggaaaattagatatacaaccatgtccgcactctggcggaaatacgaggaggaaaaagccaaacgccacgacgttatgacattcgctaaattatggggaatgtttctggaaagtccgacctttaccgaattggcgcaacgaacacagaaagactatcagcagcatgaaaggaggttattaccggtttttggaaaggtaaaagcagacgatataaagatcgaacaggttcgtatctatatggaccgccgcgggttaagcagcaaaaaccaggctaatcaggaggtatcaagtatgtctcgggtatatggttgggggttcgagcggggatatgtgaaaggaaatccatgtaaaggcatccgcaaatttacgctcgtagacagagacgtatatattaccgatgaggattatctggcaatttatcaacatgctcgcacggagattcaggtggcaatggagatctcatatctgtgcgcagcacgagaaggcgatgtgtttgatttaaagatatctgacctgatggaacgcgggattttcattgaacagaataaaacagggaaaaagcagattaaagaatggtcccctcgcctgcgcgatgcgatcgaaatggcacgggtccatttagttggtcggtcagctgcaggttacgttatcccaagcccatcaggtggcaggctaaaccgaaaaacgttcaatacctggtggaatgacgcaaagcgagaagcagggttaaagttgggcagaaagatctccggtacctttcacgacatcaaggctaaggcgatttcagactttgaagggagtagcaaagataagcagttatttagtggacacaaaacggagctgcaggttgcgacatacgacagaaaggtgaaaatttctccgactctcaacgttccaccgctgcagaaagacgagtga

SEQ ID NO: 190325 - DNA, 711 bp, Klebsiella oxytoca
atggcaagaattacaaaaaaggaatcaggattacacataaaggtgatggatctagtctactcagataaacaactgactcaagatgataaagagttcatcttcaataactacaaaggcgatggtatcggtgcaactggtgctttctttactcccgaaatgctcgcgtgggatttcattcttgatgcagggtgtagtggtgactgtatcgaactatgtgccgggattggtcgccttagctactaccagtacttaaggaatgagccaacgcatattacatgtgttgaactgaatccagagtacgtaatgattgggaagagggtactgccagaagctgaatggatatgtggtgatgctcttcagtactcaccagatcgattctatcgtgttgcctatggcaatccaccattcggtaagatcaacacgtcagaggcgtatacaggccgttataagggcagtgaatttgagtacaaggtgatcgatcatgccagtacattttcatcctatggggtatggattgttccgcaaggttcagcagggtttcagtacagcggcgtacatttctatgagcgtagagagtcacagaagtacaagaaattcgttgatagtactggatggtcgtttgaaccaggctgtgggatcgatacgtcgatttaccgtgaagaatggaatggtacgaacgtcgtgtgtgaggtggttactgttgagtactaa

SEQ ID NO: 190326 - DNA, 210 bp, Klebsiella oxytoca
atgactgaatcgctgtttgaaagtaattatccaaaagagaactatacctacgttagaaagagttttagaacgaaaggtacaatgggtcaaactgaaattgaagtctttgatattgtctcgaaagaaactggtgatatagttctcgtagcgacgcgtacagaacatactaaccttcgtgggttggatattactgttagttgggattggtaa

SEQ ID NO: 190327 - DNA, 549 bp, Klebsiella oxytoca
atgtcagtaatagcattcatcacagtttttaaagtatatagatggttagattcaaaacttaatgaaaaaggttttgaacaagcaaacgtttatattagttactttattgaagcgaaagtaaaggcggaaatattacatacttacatcaatgatatgtatgaaacattaggtaataaagatctcaacatcaccgataaagagtaccaaagtaaaaactcaaaggttaaagatttgcatgctgattataaagatcacctaattaaattgaaatctcaattagatatattacgagtttgggacattgaagtacatccaaacaagtctaacgaacttgaaaaatgtataacacattactacaattttattatcattagcgataaaatgattaacacatatcaagatgtaaatggtatggcacgtaagaaaaattgggaatttaataatttgagtttcaaacctgccttcgcacttacccaaattctcccttcagtatggcttacttcgtggcgagtattgtttagagagtccaaatcaactcccgccgattaa

SEQ ID NO: 190328 - DNA, 291 bp, Klebsiella oxytoca
atgattggaatgataattgatttaatcaaaactggagtaggcttcttccagaagaaagaacaaagtaagcaagagctggacgcacagaacagccatgaacagaaccagatcacacttgaagaaacgcgtaagggcttcacttggcgacagggcttaggatgggtactgacgttcatcattctatggaactacgtcattgtgccagtactggccttatgtggtgtagtactccccatcgttccacttgatgagatatggaaagtactgataatcttaatcggcgggagttga

SEQ ID NO: 190329 - DNA, 237 bp, Klebsiella oxytoca
atgcctattcataaatgctttcttggtaataagttcaagaaggtactaaagagtaaacagattaatatcgagcattttatgaatgtttgctatgagaaaaaacaagatataacggacggttcagtacttgcatggtcactacaaggtgatgaaatggatgtgtacgtaatcgaacataaaaaactattcgttaagggaaaacacttttgggtgtattgcgtggggatcattgaatga

SEQ ID NO: 190330 - DNA, 561 bp, Klebsiella oxytoca
atgacaagaataacgggtatagataacgccacgaactatatacaaaaaacaggaacgaagttaggtaaaaagttccatgatgaaatcatcaagcgttcaagagtattatctatgaaagtacaggcagatatgaacaatgccgtagacaaaggtgcagtacctttcactcaacgatcaattctattcttttataaaaagcggggtagtggggttacagctacaatcatggtcaaagatgttcaggcacagtacttatatggtgtactggttgaacaaaaggccattgataaatttgtaccgacttcaaaagcaagactaacgaagcagggtaacattagtggtctgaagaaaaacttatcaagtggacgatacaagattgtcaaaggtaagaacggaaaagaacgattaatagatactgctcaaaagaaaaaacaaaagcgtgtaatcggtctacgggaaagtaaacgccgtaaactaatttatgatttctatcaggaagtgaatgatggtgtgatgttagtaatgagtggtatacagggaacattcaaggtaacaagatga

SEQ ID NO: 190331 - DNA, 450 bp, Klebsiella oxytoca
gtgagagttaataaagcatgggagatgttcgatactgatatgtgggatatgtcagaagtaacagatgggaattacgtctcgtttatctacattattcagtttccagatactggcgagtactatttcggtaagaagcaaatctataaaaaagtacgcgacataaagaatttaaaggctacttcagttgaatcgaactggcctgattataccggtagtagtaagtgcgttaatgaaatgattgatgccggaatgccatacaccaaaaagattttgtactgtgtcaaatcagacgcagaggcaacgattttagaaacggcattgattagctactttggtttacatcccgactgtttaaataaggcaataatgtgtaaggcacgattaccaaagaatcgtttagatttatttaaagtactgcaagatctaattgatatgttgggtgtgaggtaa

SEQ ID NO: 190332 - DNA, 450 bp, Klebsiella oxytoca
atgagtaaactaaaagacagattaaaagaatatgaaggtactatcgcttatcaaacaaaattgaagtactttcacgataacaaattttggacatacaaagattcactaggctttgaaaccattggctacggtcatttactacatgttggtgaaaagtatccagatggtattactattgagcaagcagatagactactggaccaggatatacttattgcaatacataatgttgaaacgctcaacatctggctacctgacgactggaaaaattttcttgtgataatgatgttccagttaggtttaggcggggtacagaaattcaaaaagatgttagtagcccttaaagcaaaagattacccggaagccatcagacaggctaaagattcattatggtataaacaaacacctaatcgtgttgatgcaatgattgcagtactaaccaacaaataa

SEQ ID NO: 190333 - DNA, 267 bp, Klebsiella oxytoca
atggacattggtacaatcttggctcttattatttctggctgtgtacttctgtacacaatattccgcgacaatacaaaagatactgatggactacttacacgtgtttcagaactggaaactaaacaagcagtacaggaaagtagtatggtgcgtattgaagctgatcagaataagatgcgtgatgctttaactaaacttgaaaaccagattcatgatctggatgtgaaaattgaaaaaatcattaccattcttgaacagaaacaataa

SEQ ID NO: 190334 - DNA, 657 bp, Klebsiella oxytoca
atgtcaggttttgaagtttataattctgcgggtgctctcacgattgacagtactaacaagtcaattctcacaggtgctgttaaggcaatgggtacactaactgatcaggggtactacacaggctttacatgtgcttttggtaatggtggtgctcttggcttcttaccacctgcaactatcgtgaacaggaacactacacagtactggtttcagatacagaaagatggtggctggtgttttcccggtgctgagttgttccagccggggatagggcgattcatgacgagtacgcacactgcaacgcctacgtctggttatctcgatgtgtttaatgcttctggtactttgatatggtctgctgcatcggcggctaccatgccccgtatacaaggtttcttaaccgtacctgctgcaacagatttgagtactgcaatcacagtaacaagccctgttgctaatccctggttttgctggtcacaatgtccgggtaacttaagtgatgatggggaaacaatcggttattcgggaatagttattcgacgtaatagcagtacttcattcagcttgcagtacgtttcaaagaaccagaaaacatatcgtcaggcaatgggtaacaatggatttcaaattgcattagctactttcaccggatattaa

SEQ ID NO: 190335 - DNA, 3204 bp, Klebsiella oxytoca
atgggtaagagtttagggggcttctttggagctatcataactgcggtaattgtcgcggcagccgtttactttactggcggtacagcactggcagctatcggttggggtgctgctgcgggagctgcttcactggtggctacatcaatgttggggcaaatcggcgtaagcggttatggggatgtatcggactcactaagccgtagtacttccccaactacgggattacctgttatctatggcggtgagttgccacataaaaacggggtatcaggtggttcatacgtactgacaggttcaattgtgtcatggtacaacgtaccgaatagtgattctcaatatctcttttcagaacaggctgtagcatatgcgggtactgaaaagaatattttacagatttatatcgataacgaaccaattttagccgtacctattacacaagatggaatagtaccgaaagccagtattgcggcaaagtatcaggaatttctacaattagaagtacgctttggtggtgattataccagtactaaaacgttagctacaggatatgcagggccaaaatggactgataaatttcttggtaaaggtattgttagtatcagtacggttatcaagaaaacacagaaatcattagaaaataatattctcgttaatgatcagtttgctttgaccgttgaaatgaaagggcaacgtatttttgatttagtggatggcagtattaaagcaagtagtaatccaccgtcaatcatctatgattacttaataaatacgacgtatgggatgggcattgatcccgcattaattaatcttgataccttcaaagagacggcagcctattgtgatgctttcgagtactacgcgaatggtgcgatcagttaccaatcaagctataaagaaaacatagaaaatatctgtcaatcatttggcggtattatgtatgtccacgccggacagatttgtattacgacagaccgtaaaaccgtttcagtcgcgtcatttaatgaatctaatatggttggtgcggtacagatttcaaccagtggcggtactgactacttcaatgtggttgattgcaaattcactaaccctgaatcaatgtacaccacggatgtagtacgtataccttcagatatcaccgttgatgaagctgttcggcaagacgggcaggtaatcgcacttagtcgtgattacagttggtcatatgatcctgatgtcatcgctaagatggcaaacattgatgtactcaaggcaaagtatgctttacgtactatcagctttaccacgtccgaaggatgggatctcaaggtttgggatgctatcaatgtcagtaatgccgaattgaatatctccggtaagtttaaagtactgaacaaggacattgccaccgatcaagagaacgtaggctatgtaacgctaacctgcgtggaagcccctgaccagatgtatgacggtgtagatccgggcgtatggtcgccgggtggtgtgattaacttccctgaacttactgtgaaggctccaacgaatctacaggcagtacgcaagggcaacactaccagcggttctatcattgatttgacctggacggcttcagaagatccgtacctacggggctattatgtttactacaaacttcacagtaccagtacatggacatatgcggggcaaacgggcgtacagaaaaccacttatgaactgtttggattgtctgacactgcaagctatgactttggggtagaggcgtataacaatcttggtttggtatcgcagcgtgtaacccttaacggaatagtaccgacttataactttgctttaccttccgtaactggcgtagtactggcaaatcgtactgaatcagcgttaaccaccgatgcacctgattttaatattgcatgggattcacagaagaacttaatcgttaatggtcgctcgttttctgattacttcaagtactacatcattaaaatctataacggtacaacccttgtagatactttctatacgcaaagcaatagtttcaatttcgctcttgcgatgaatcgtttaaaagtacgtaaaccaactattggtattatcgcacagggatttaatgatggaacgtattcacaggaagtgaaaattacagtagaaaacaaacaatgtggattagtacaaggcgtatcattcactggtggttttggtaatttatttgcttcatggacacaatcaactgaacgtgattatgctggtgctgttatcagtattgttaacgggaataccagccgattgtttaccagttatgcacctgaattcgactcagtaccaaacatcgttgatggtgaatataaggttaagatgggattctttgacgtattcggcacggacaatattcagtactgtccagagcagacgattagtattaacagcaaataccagttcactgaagaggatgcagatgcgataaacggtattcttgatctcgatgaccgactaacagagacgttagaaaacgccgtcaatgaatcgaacgagtacaccaatacccgtgttgatacattgaaaaacaccgtagacgggaacactgcaagtatcggtacgcttacacagacagtagcgactaacaacacagcacaatcacaggccgtcacacagctacgtagtgatgtgaatgggcagatagctaccgttaaccaacaaatgagcacaaaggcaactgcaagcacagtagatagccagtactctctatccgtaaatgctaatggtacagttgcaggcatccggctagttgcttcttcaggaacggctacaaactcagctttatatgttgccgctaacaagtttatcgtttccggtactgatgcggcgaccgtgggtggtactgcacctttcgctattgttaacggtactacttatctcaaaactgccatgattcaggcggcgagtattggtactggttatattgctgatgccgcgattacaaacgctaagatagctaacttaagcgtgaatacggctaaaatcgctgatgcaactattactacggcgaagatagccagtactattcaatcaactaactatgttgcaaatactacaggctggcaaatcaataaagccggaactattttgattaatggtagtggcggtactggtcgtatggttatcagtaataacatcattcaaatctatgataataataatgtgctacgtgtacgcatgggattgtggtaa

SEQ ID NO: 190336 - DNA, 402 bp, Klebsiella oxytoca
atgaaaaatctacacaatgaaattatgaatgtcattcagtacgccattgataacccgtatcagtttggagataacgattgcaatattattgtattacgtattatcgatttaattaatggtactacgcaattagcaaatcgtgaatatacaagcgtacaggaaggtatagcaggtctaaaggctgaaggatggaatcatacaggggagatagttgaacagtactgtaaccccgtacaggtcgttatagacggtgatatatggctagatcctgataaccctttaattatggcagtggttgtatcaggtcgggtacttggagtgaatgaaagccatgatggctttgaacttcatccaaaaccaacgaatggaacattttatagagtaaggaaacacaatgggtaa

SEQ ID NO: 190337 - DNA, 624 bp, Klebsiella oxytoca
atgaatgatgcagtttttactaatgccaatctattgaagtactggaagttagttaaaggtacgacgaagacacgattaacactaatggatgtaatgagcttgggtgtacaggtaacttgctttgatgtactgccaaaaggcacaaatggttttcactggacagactcacttatagatatcaatttagatggttatcaatatattagtttccccgatattatcagtggttcacttccttcctattcagaacaaaagggcatcacgaatgatgctatcaacttcaaagtcagtaatgtgaatcaatcagtacgtgcacttgcattaggtggatttcttaaagatgctcagatgaatatcaaattagtaatcttgaatccatattacagtactgtaatcgattcaatgcttatgttttcaggattcattgattacgttcaggcagtagcagacccaaatcagaaaactaacgaaatgacgatatacgttaacagtgtatataaaaagctagaccgacagccagccttaattgctgctaactcagtatatcaatcttactacaaaggtgatgagtactttagtctgttagggcaagttaatcaaaatcaaaactggaagtacaaataa

SEQ ID NO: 190338 - DNA, 558 bp, Klebsiella oxytoca
atggcatctttttcaaatcaaataaaaataacaaacttccagattaaaagtactgaaccagtctattcaaatcagacatggacgggccaacgtatcatgagaagtacaggtattcaatactatgagattcagtttcagttaagtttcaatcctgccagtgttggcgaggttcaaaacttccttgctcagtactcacagggtaagccctttactttttcacttggattgttgagtacgtacagaggcacacaaacgggatcgttaaccagtactgcacttgttaacaaaggcaatagggtaatcaataccagtaataattctctagcggtaggtgaatggattcaatttactaaccacaataaaatctatcgcattgtagaacgtaccagtacatcaattactatttttcctgtcttacaaaatacagtacaggcaagcgagattattaaatataacaatctgatgatcgaagcagtactggaccctgataatgactatacattgccagtcggtaacataatgaatatgacatttaaggcaatggagaatattacataa

SEQ ID NO: 190339 - DNA, 558 bp, Klebsiella oxytoca
atgattgacttcttaaaccacatattgcctatattatctgctattgcattccctatagttgtggtagtagtaactctttatatagtctacagaagcggaagtacatccatcattgctaataagatatgggggatattcattggtgagaaaaatttcttcaatgaagaattagcattaaaagaaaaggttgaacatgatgttgctaaattcaactttaaagtaaatctgaaaaccaggaatctcactcaaattgaacaattttataaatttctggaaaaattcgatctggatatagataacttcaaaggacttcgtgactgctacttgccatcattgcagaaggtcaaaaaaacatctaaaagtgaaatatttaatattggcctggttgtcttgttaataggcggttttttgttacctatcttcattggcgtgtttatatttagagacatttctactttcgacggagggaaagtacgaatgatttgttatcgtacccggcaggtagctcatcgacaccgccgtggaactgccccgcatcagcaccttttgcagtactga

SEQ ID NO: 190340 - DNA, 2004 bp, Klebsiella oxytoca
atggcaaagaataatgtaatccgtgtagaaattgacggtgattccggtggcttacagcgggctttacagcaaggtactgaagcagtagaagaatttggtggtaaggctggcggtgtagttgaagagttcacaggccgctttagtgggatggctggcgggttcagtactgctatgactggccttgcaggtgctgcggctattggtattggtggacttgctgcactggtacagtcttcacgtgagtatgttcgcgagatgaatgaaatcagtaaaagtactggtctatcagtagtacagctacaacagctatcatcggcgtttagtggtcttggtcttgaaatggataagtttggagactttaacaaggatactttagataaactcggtgatgcctttcgtgctggcggtggcgtgtctgatgatttaaaagagtttggcctgaatctacaggactataacaagtacttgaaacaaactgatggcggtatgaaagccgttattcatacgttttatgctatgcgtgatgcgggtaaatctcagggtgaaattgtcaacgtaatggaaacattagcaagtgattcatctcatatgattagtactttacagcagttcaataatgaagcagatgcaactgcatatatccagcaacagaacgccgatgttactaatgaagcagccgaaaagtacgcggaatttgataagaatctaactaagctaaccactaatattaaaggtactatcgccgatggcctttcacctttagttgatgcaatgaacagtgtatatgatgccgccaatcaaaagccacatgaggcgggattatttgaggatcttaaccaacgtataaaggaatccaaaggtagtctacaggatatgttagatatctgggagaagctacgcatggcgggggcgttaaactatcaaggtgcagcccttcatactggctcgatggataacggcaaggggaaccagtacgccgacgctaaaaagaatcttgaaggtctggtgagcaactttcagaatgatattgctacagtgacagcccctaaaggtggttgggtagatcagggcaaacagcgtgaagatgcacagaagaaagccgatcagttacacaagcaagcagaacaagctcaaaagcaggcagatgcaaaacggctacaggctcaacgtaatttagaaactgctcttgctcaggttggggaagatggttttaaagtacgcctacagcagtttgacagacagcaaaaggcacttttaaaaacgattactgattcagctaaagtactcggtattaatcctgatgaaatgctaaagaatgcgaatacttccggtgctaaacaacgtactgatctaattaattctatggtcggctattcagatccaaatcaaggtcttaaagatactaattctctaatcagttctggattgctaaatgatcagcagaaagggtacttatcacaacagcaaaatcagcgtatcaatggtggtaatccatttgcttatgatgatactgatcaacgcctgaatgataatcaggacgcgatgaatgctgaattagcacagaatgatttactgttgaaaggtcatgaagactacgaaaagcgtaaggctcagataacagcaaagtacaatgctcaggccattgatatcagtaaccagaatgcacagcaacaactcacaatcttctcagatactgcacaaaaccttagtggggcgatggtggccgcatttggtgaatcgtcgggtgcagccgaagcggcattcatggtttcacgtgggatcacgatagctcagacagtactaagcattcaatccgcacttgcacaggcacttgctacgccgtggcctcaaaaccttgcgaactatgcacaggtagcctctcttggattgagcattatcagtactgcaaaaggtgctgatgcggggcagttccacggcggtgtcgatgagctacctgccgggtacgataacaaatcattcgtactttccctccgtcgaaagtag

SEQ ID NO: 190341 - DNA, 300 bp, Klebsiella oxytoca
atgaacttaaaccagcttatgaagaaactacagccagtactacaaccctacgaagtagcaggtgaaactatctatattcatcgtccaaatggcagagactttgcaaaatgtactgatgttgcacaaacactaatcttatgtgcgaaagatgaaaatggtgatcctatcttttcagatgaagatattgatggacgcattaatgtaaacagtattgattttgtcattcaaaatgaaatatacgcggcaattatcaaactcgtaaatgattcaaatcctacggatgaagtagaaaaaaagtaa

SEQ ID NO: 190342 - DNA, 465 bp, Klebsiella oxytoca
atggctatggatattttttctggtgctaatattactgtagaggtaggttctgcgggttctaccgttgctactgattttgcagaagtaccagaggtgaataccttcactacttctggttttgaaagtactgtaattagtgttaaaacatttaactcagcatatgaccgtaaactattgggtactaaatctatccctgacatttcacttgcggttaactatcttgcagataacacagtacaccaaaaattagaacaactggcagatgatcaaaagcgttgccaaatcaaactaagctattttgaagatgctactaaagagaacggattctatgtggtttatacgtgctttgtctcaagtactactatcggtggtgacaaagacgaagtagtaactaagacatttacacttgctgtagatggggctgctatcgattcaggtctaatcactacgggtactggtgagtaa

SEQ ID NO: 190343 - DNA, 2841 bp, Klebsiella oxytoca
atggccgacattttttcaggtaagggattaactttacaatataatacggacactggaaaccgttcaccacagggcataggcaatgttactattaataatgtaactgaatttcctgctctaaccatccagtcagaaacaaataattttgaaacctatgataatgagtacaagacagtactactatctgataaatcagtagaaccatttgatattgtggttgcatacttacctgatgatcctacgcaccaattcttagatgaaatggctgaatcacaatctgtatttcaggtcattattcagtatcaattagatttagaagaaagtcagatcacttatgccatcgtcaatggttacgttacgggtactcaattatccggggataaggatcaggtagttactaaatcctattcttttacacctgctgatgtagttgcccgtgtaatgacaatggctgcacttcttcctgtctatcagggggattacggcgtaggtgctaacactactggtataccgcagtacgcaccagtcacaccaacgggtaacagctttatcaaaataccgtcaacacaacagggtaatcctgctggggccgatatgatgggcatagggcttgtcgacggttcgagcgttgctgaatttgcgatgacaaaaacaggcacactaagcctattcgcaaaaaatgccaccacggcatggactcgtatctacacggctacacagatggacgcacgttatgttcctctcacgcgaaccgtcaacggtaaagcactaacagcagacattacattaaccagtactgacaccggttctgtacccgtcgagcgtaccgttaatggtcatgagctttcaagcgatgtagtacttacaaaacaagatattcaattagaaaatgtcactaatgatgctcagttaaaagttatcagtaatttagccgatatcgctgataatgaaattgcccgtactaatctggatgtgtattcgaaagaacaaattgatagcgatattgatgaggttaataattcaattaatacattaactactcatgttaatacagatttggttcctaaaacaatcacagtaaacggtcatgcattatcatccaatgtgacagtaactaaagccgatgttggtttatctaacgttactaatgacgcacagctaaagatcgcaagtaatcttgcagaccttaataatattgtcacttcccgtactaatctcggtttaggttcccttgcggtgcagaactctaacgcagtcgctatcacaggcggtcaggcgacgttatcgaccttaaccctttctactgcattacccctaacgagtggcggtactggagcgaccacggctgcggcggcaagaacgaatcttggacttggtacggctgcgacggtaaacgttggtacatctggcggtactgtacctttgctcaacgctaccaatacatgggatggggggcagaacttcaacggatctattgctattggaagcaactcaaccacttcaaggggtattgagctgggtagtagtactacggcagtactgacattccttgatatgcatagttccggtactggtaacgattttgatgtacgtctgtttgcatcgggtggcgaaacagcaacaggcaaaggtactttgggaatagtagccagtgcagcaacgttgaacggacagcaaatttactcaattgacaggacgctatcagaagttgggcttggaatagatcctcgccatgttgccgatatgaaggatgcaccgaaagggttcattcgaacgactacagcaactattgattcccctccatcattcggcggtgctggttttgtatcacagtatgatggttcaccgtcttattctggaatgcttgttcagcctgatggtaatcgtgtctttgctggaggcgtacaaccatcactgaacagtggtaaatggcagtggcatgaagtaccgacattggacaggtcaaatacgttcaatcaacctcaagtgatcagcaatcaactcacggtatcgcgggatgattggcccgcaatcaacttagatgttagtggtggtgatgatgtggtaggtcgccgggtaagaattgaaaatagccaggaagccggtaagggacttattttctatttcagagataagattgggtcagtcactggacagggttgggcatatctaccgccaatttcgggctatggttctcccattggccttgctggaggacttgcccctaatggcacatcatacgattcttccggttcggatatgaatataggtgctcaaggatggcgtgccgttggtggttcatggactaactcaccttcggggagtgctgctgcgaacgtatatgggtctttgttcactcaggcaactcaagggttaaacactgggaactataatggcacaggtactactaaccagtggtatcagcagcgattctatgacaccagcaatcgcatatatacacgggttcaaaccaatgctatggcgtggggaacatgggcacagttgactacatctgctgtctctgatgaaagggccaaagatattggtgaaccattagatctcaatattgcacttgataatatttctcggatggactttgttaactttacttttaaatctgatgaagacgagacaccacgccgtggagtagtttcacaacagattatggatatagatccacaatacgtaaaagaagttggtgatctgtaccatcttgatgaaacaccaatgatgttagatggtttagccgcaattaaagcattaaaacagatgaatgatgatctcagtactgaaattgaaaacttgaaagtattagtacaatcactaatcgataataaataa

SEQ ID NO: 190344 - DNA, 1293 bp, Klebsiella oxytoca
atggaagaaacaaataacgatagcgaaattgaaacgacagtagacgctaccgaacaggaagttaaagacgaagttgaagaagtagtagaacacgtagatgaagttaaacgcgatctaagtgatgaagaacttttagatattctttctaaacgtcctgacttactcaacaaagtacaaggtgaagaaccggaaattataaatagtactgatgatactgaacgtgtacgcgaactagaagcactcggtaaagtacttaatattgatgtatcggatgccattggtaaaggaattaccgtgaccgatttcaaacgtcaattgaatgacattaaaaacaatcctaatcatgataaggaaatcaaatcgatggataaaaatctattaaaggatatgctacgtgctatcaaagccggtgataaaacctctcttgaaggttatgaattcggtaagaatggttatgtacgtgctgtagtaccttcaactaatactactacggctgctggtgtagtcgcagatgatctacaagaccaatatattccagagctattaaagctatctgctcttggtgaactaaatactactgtttattcaggcttggctggtcgtggtaatctttctattcctaaagctaatggtgtaactccggtatttaaattctatggcgaagcagaagcacaagatgattctattgctaacttcactaaagttaccctaacaccaaaagcattcggtggtgctattccactaagtaaaactgcaattcttactgctccaaatattgaaacattcgtacagtcagaattaatgcgttacgcggctcagggcttggaacaaaacgtaatggataaaatcgttgcggctgctccagtactgaacgttgctactgcgggttctatcactcttgaagatgtccaaaacgctgttgctcaactggcacaagctaacgtgaatgttcgagctgcgaaagccgtgatgaatgcaaagactctttctactttacgtcagattgccgtacttgataacaccgccgctaaagcgatggttgaaggctatcgtagtgaagctatgtggttagcagatgaagtacaggtagttgtttctgaattcgttgcagatggtgagatcctaattggtgatttcagtaatgtaattatcgcaaattgggaaggacaggaagtggattttgacgataccacttatcgctcaagtaacactatcgtttaccgcgtatgggattactcagatattgcacttgctcattctgaagcattcgttaatatcgttattggtgagtaa

SEQ ID NO: 190345 - DNA, 150 bp, Klebsiella oxytoca
atggtgaaatctataatgaaatccttctatgcggttctgataacgcagacctacgccgtcttaatcaaaatggtgcagtactctttaatcataatcgtgatgatctcattggtgctgttgtatctgcacatatggacgccgaccgtgtag

SEQ ID NO: 190346 - DNA, 1509 bp, Klebsiella oxytoca
atgttctggaataaaaaagaagtcacacaagaagctaaacctaagaaacaaaaacaagagcgtagtactaaaccatcaacacttaaacgtgatattcaggcagtacgcaacacatcggttatgaattttggatttaatgctaattcaggaagcaatatcaactttctgatatttaaagcactatctaccatgcgagcgttttcacgtgatgcagtacttaaaaacccaattgggcgaaagtacatgaacctttccgtggatggtgtagtaggttctgatggtgtttatgtgaaaccagcggtagagattgacggcagcgaagatgaaattaaccagattaatgaacaattagagaaactatttgatcgttgggcttatgatccagaccgctttagcgtcgatggtgctttaagtttcgagctattccaacaaaatgtagagaagattagggtacaagatggtgaatgctttatcagaattcatactattaaccgtcaaataaaattagaaatcttagatactgctcgtttacagcaatccaataaccaacatttagccaatggtaattatatcagtaatggtatcgaatttgaccaatggcacagaccagtaaattactatttctctagatttgatcccgttacgtacacgtacagtactggagattatgaagtcattccggctaatgaaatatgccactacttcatagcagaccagcaagggcaggaacgcggattacccgatttagtcgctacaagtaagttaattgaagatctgaagaacttcacagaggctgcattaacagcaaaacgtgtaagtgcttccagtatggcattcattactaataataacgacactaccagtacagatctgttaggtgctgatgagcgtgatgaagttacaccagtatacacagagtactttgaagcgggctttattggtgaattaggtgaagggcaggacattaaaactgtcactccgacgaatggtgtagatggtatcgatcagtttactaatgaactcatgaatcaaattagcatgggcttaaacgtaactaaacaggctctattatctgacacatctaatgcttcattcagtgctgcacgattaacagaaaaactacaacaaaccactttccgtactcgaaccaatgtacttatcagtaaagtactcaaaccaatctatatagcttggttaaagaatgaaatgattaataacagcaaattgaatctcagtttctcagactttgatgatctcatttgtgctcgctacattctacaaaagccaattagtttagatcctgtaaaggatatacaggctgaactacttcaattggaagcaggtattaaatctaaaactcaggttatcgccgaacttggtggtgatccagtcaaggtattagcagaggtacaggcagaaaaggaaaaagaaaacccaaacaaggaagttaaccaggatggaaatcaaaaaccagaagagggaactaacgatacccctacaggcgattaa

SEQ ID NO: 190347 - DNA, 531 bp, Klebsiella oxytoca
atggcactactaccagacaagatctatttggtatcaaatccaatggatctaacggtaaaagtacccgctgctacgattctcgttattagttttacttcatccggtcaaagtacatcattagataatctcaatggcagtacttcaaaagattttacggttacattagatataagtacagcaagtgaattacttttctgtactcaaatatctaacggacaagccagtacatttacttctgaggtcattaatccattactttatacttctgaatacgcacaattgaaacagatgatcagtgaaattgatacggtaattgctaataaaattgcaggtggtgctaattactcaatcacaatcaataataaaactcttgtaagtgaatcactatcatcacttgaatccatgcgtgaacgctatgtgaagcgtgcaaactcactatttgtaaaaatgaatggcggtactttatccagtggcggcaaaccaatcaagagtattacggttttcaagcctaagccagggagtacacgctaa

SEQ ID NO: 190348 - DNA, 1455 bp, Klebsiella oxytoca
atgatcaacggcacgtttatctattggctaaaccttaatacaccaggaaacctacgcggtattacaacacgtgttgttctgttggatgaagtcagtacctgtgagattactgatgaaggtaatccgattaaactggctgaagcacgtaccagtactttcggcagtgattcactagtagttgtatcttcaacgccattgtataaagacgatctaattaatgctgaatataacctttctgataagcgacggtactttattactcatgcatgcggtcatgaatatactttcgaatgggaacaagtagcatttgaatttaaaacattagaaaatggtagggcaatacctgacagtactactacccgtttaatttgtcctcattgtaatgaagagattgatgaacatacacgccaccaaatgatcgacggtggtcgatggattgctactaacaaagatggtgaaccgggtgtagtagggtatcaaatcagccgtatgtattccccattgaatactattactgaaatggtttcaaagtttgccgatgctctttataacttcaatcttcaaactttctggaacaacgaaatggggatgccttttgaagatgaataccagaaagaactagatatacttcaattagaatcattacgagaagatgaatttaaccttcaaaacatccctgaaagtactttaggcataacaatagctgtagaccagcaattagaccgcttagaagcaactgtatttggctttgatgagaagaacatttatgtgctcggtcatgaatttttctatgcccacgattgtacaaagattgaggccacagcatggaaggatttagaccagttctgtaggcaagatttccgtactgtacaaggtcgcatagtaccgacacttgccgtattcgtggacagttcgaacgggaacgccaccgatacagttaagaagttcacagcacgttgggctaagtatcaccccatcaaggggtcaagtagcactactggtgatctcttcaagacgagtacacaggctggctaccagctacagatcctaaacgtacatgaccagaagaatacgatacgtaaacttttaaacctaatgctcagtactgaagcggagaacgcaccagttaaattacgctttagcagtactttaccgtcagattactttgaacaactttcagcagaagaattaaaacctgctggtggaaaattagtttggcgattaaagaaaggtcaaaagcgtaatgaggctttagattgccttgtctatggaatgatagcgattgtatatgcacaaagtaaattaggtactcaaccattcaggaagctacgtgaacataaagtacaggaaagtactaaatataatataaataaagtagaagaaccaataaccaaaccagagaaaaaacagacgcgtagacgtactggtatgggttctaattggttcggcaaatga

SEQ ID NO: 190349 - DNA, 2463 bp, Klebsiella oxytoca
atggataactggtcagcgctttttgacggacagacccgttactttctggatattaatgacagttcggtgaagccggatgttctgcgctttcgtggcagggaagcactgagcgagccattcagatgggatatcgagttcacttccccggaggcgaacatccccccggaacaggtactgatgaaatatgcctctttccggatgcggagcggtaaaagtgttcacggcatggtgacccgcctggaatggctttcatcctcaaacgaccagtcccactaccggcttacgctcagttcccgcctggcgctcctgggttacacccgacagtgcgcggtatatcagaaccagtccgttcctgaggtggttgagcaggtgctgcgcaaacacggactggaaggcccggactttgagtttcgcctggaacgcacctatccggcacgggagctaattacccagtggcgggaaacggacctgcagttcatccagcggattctgtcggaggtggggatttactggcgcacggagatggacgacgtgcgtggtctggataggtacatactggccgacagccagctgaactatcagtttgacgtgcgcctgccctacagcgagccatcgggtctgtttgacggcgcggcagaatcagtctgggatgtccgaacctggcacaacatcgccaccggcaccgtcgtcacgcgtgattacaactaccggactgccagcacgccgatggattcgacggtcagcgtgcgtaacgatgcggtcaccaccggggagcattaccgctacgccgcgccttatcgtgacgcaggtgatgacgccagtccggagccggaaaccgaatctggcgcgttctgggcccgacttcaccacgagcgggagctcaacaggtcggcccgtattcacctgttcagcaacgccgcccatctcacgcccgggcaggtgctggagtcgcagggcgatgtcattgccgccctgaaagaaggcgtcgtcctcacgctggtgaccttccggggggcccgggattcccgcctgcatgtgtcggtgtggggcctgccttacaccgaacgttactgtttccgcccggcggaaatgccgcgtccggaaattcacggtacgcttccggcgcggattgaaagtcaggagaaaaatgatgtctacgcacacctggacgaacaggggcgctaccgggtgaagctggactttgaccgggaggggacggagccgggttacggctacctgtggttgcggatggcgaaaccatatgcaggcgatacgctgggctggcatacgccgctcatcgacggcaccgaagtggcgattgcgtacagcaacggcgatattgatctgccgtacatcgcgtatgcgctgcacgactccgaacattccgaccacgtcacccgtgacaatcacacccgcaatatcctgcggactccggcgaacaacaaactgcggatggaagacaggcgcggtgaggagcacatcaagctcgccacggaatacggcaagacgcagctcaacagcgggtacctggtggactgcaaggggcaacttcgcggtaaaggcacagagttgcgtaccgacgagtggggaaccctgagagcagggaagggactctttgtcgctgcggatgcgcaggcgaaagcgcagggtgaggcgctggatatgagtgccgcgctgaaggaaatcgaccggcttaatcagcaactgcaacagctggaaatggccgcggaacaggcgcaggcgctgaaggcggatgttgacagccagatagagatgtttgagcagcggctgaaaccgctcaatgaagcggtgcttttctcggcgccggaaggcatggccatgaccagtggtgaagatatgcagctggccgctggccggaacctggcggttaactccggagaagacttcagtgctggcgtgatgggcaatatgaccgctctggccggagagaagctgggactgtttgcccggacggggcaagtcagcctgaaatccggagaagggccaatagatgtccaggcgcagaacgccagcatgcggttgtttgctgagaagaagctgacgctgagctcagcgagtgacatctcctttgccggaaaaaaacgtatcacgctgatcggcggcggaagctatctgcgacttgaggccggaaaggttgaatatggtacgacggcgacgtatatacgcaaagtgaagcggactatggctgcgggaagtaattctcagactccagaaatcccatttttaccagggcctggtgatgtttttcgaaggagttttattcttgttgatgatagaactcaagaaccaatatcaaatattagatatgaattgacctcacctacaggttctgtcgttaaaggcgtttcatgcgagaagggcctaacaggttttgttagtcatcctgatgaggctgaagtagaattaaatattcttgaacaaaattcattatttatagggtga

SEQ ID NO: 190350 - DNA, 525 bp, Klebsiella oxytoca; identical to SEQ ID NO: 188697

SEQ ID NO: 190351 - DNA, 372 bp, Klebsiella oxytoca
gtgaaaactgatatcaccgaactggcgcagcgtgtgcgccattgggctgacatgtccgtactgacgagcgagcgcgtgtcttgcttgagcgtagagcaactggaagaaatcgctaatacgctggaatcccgcaccgtcaccattgagccatttcgctcgtttgttaccgatgctgatttagtggcgttacaccgattcgcagaatgttgcgatgaccctgaatctggtggtcacgatttggaaaaagagcaagtgctgcgacttgaggcaattggtgcattgcggcgatctggttgtgtccactggattactggttttggtgacgtcctgatctccattacagctgacttaagggtggaggatgatctatga

SEQ ID NO: 190352 - DNA, 129 bp, Klebsiella oxytoca
atgaataaaaaactcatagctgaagcctcccggtttaagtcatcgaatgagcgtaaagaattctggtgtttaattattggcgtattagcagcagccttaacgctattctttatttttaacttagcctga

SEQ ID NO: 190353 - DNA, 126 bp, Klebsiella oxytoca
atgaaattaaccgtcggcaatattcttttattgtgcgcactgggaggtattctcctttggtgtgcagtagggtttattggctattacacctttgtcgctgtctgggattattttcataaactgtaa

SEQ ID NO: 190354 - DNA, 255 bp, Klebsiella oxytoca
atgctatttcgcaagaagaaaacgttaaaaccctgccgtactacacacagatatctgttttcccgagccttttttaagaacgtcaggccggggattaacatcggcattattgccggacgcgagcaggtgaaaaactacatgtcaggtgcatggtggaataatgacccggtcattaccgcccgtaacatccatatggcatggggtggcattcatgccgaattacaacctttgacaggtgatgataatgacaaatga

SEQ ID NO: 190355 - DNA, 216 bp, Klebsiella oxytoca
atggcaataaagattgagatttatatcgcgctaaccccggaaggatttatctactgcaaaatgtcgggcgcaaatacaaaggacgcgggcgaaagtgagctggcgacgcttgagttattaaaacctgttgttgagggagctgttctcgacaaacttaaagagaccggctatcgggttgccgctgattattttcagccttgcggtaaatcacattaa

SEQ ID NO: 190356 - DNA, 321 bp, Klebsiella oxytoca
atggatgaacaaacacaccagttgtccgaagcaataaacaaactcacagagttaaataacgccctgcaaaaaagagttcttgtccttgaggccaatgctgcaattgacgaaacagctcactcatttgccatcgccagcgactccccctctgtcaggctcacaagctggaatcagtgggtggccgacaggattacagagcatgcagtaaaaaccagctcttcaggaaagtctgaagagccactggtcaaactttttattgaggctcagttgaaacgaattgagcactggagcgaactgtttcgtgaagggaatggagactaa

SEQ ID NO: 190357 - DNA, 504 bp, Klebsiella oxytoca
atgagtaaatttgatgagatttgtgcagcttataaagtatcccaggataattattcttcctaccgcgagcgttctacggcttttgctattggtttaggtcgcaggtacatccggtaccttggtttaaccaaagaaaattttaaatgggttccagagagtgacacctcgacccaaaaagaaggtattaccatccccggtgccatgcatctggatgacgatacctactggcatatgggcctcaagatcaaaatcttttcagcacctaacgtctacccgcaacaaaggcttttgatcatcttcaaatttaaacaaaaagataaaagtaagtttgaagtgatggtggatggtgacgataagaaacatatcatcgaaatagacggcgatgcgtcatatacagtgttcttcaaccacttacagaaaatcatcatgagcctttatgaagatgacctggataacttcctcgcgtcccagcaagaaaacaggacgattggtttcatccagtag

SEQ ID NO: 190358 - DNA, 366 bp, Klebsiella oxytoca
atgtcactatttcacaaggtccgtcatcagcgactgcgcaactggatcatcctcgccgttgccctgctggccactattgccatcatttcccctgaacagctcggcgtcacgctgtacaagttgtcgttggtttccatcgccgccattctcggctatcacctcgaccgggcgctgttcccctatgccagcccggggagctacctgattgacgactggaaagagaacctcggcaaaccggtgcctgtaagccgtaacgaacctgaatatcccgtggtaacaggctacgagctgatttttgctgccgttctgctgcgacgggcgctgattgtcgcggcgatctgcctcggcgtgacgatggggctctga

SEQ ID NO: 190359 - DNA, 633 bp, Klebsiella oxytoca
atgacccggctcgcgctttccgtcatcctcctttgtctgttgagcggttgtcatccggttttcgcggccagcattccggttgaggcccgacaataccagcgcgagctgacccgcaatgcccgcgctatctgggggcttaatgcaccggtgtccacctttgccgctcaaatccatcaggaatcacagtggaatgcccgggcccgttcgccagtcggtgcacaggggctggcgcagtttatgcccgcgactgccagctggattgccggtatttaccccgaccagttgaaagaccatcagccctataacccgtcatggtccattcgggcgctggtgcagtacaaccgctggcactggcaacgtatcggcggtactgccagcgactgtgaccgcatggcctttgccctgtcggcctataacggcggtctgggttgggttcagaaagaccggaagctggccaccagtcgcgggctggatgccagtcgctactggaaccacgtcgagcaggtgaatgcgggtcgtagcgctgccaactttcgcgagaaccggggctatcccctgaaaatcatctacacctggcaaccgctgtatctggcggcgggttggggcccgggagaatgctatgacgtggactga

SEQ ID NO: 190360 - DNA, 450 bp, Klebsiella oxytoca
atgacgtggactgattggttcaaactgctctctcgttacctgttgttagtggctatgggggtgggaacgctctggcttatctggcatcagggctatgaacgtggcgcgggtgatgtgcgccttgaagttgccaaccagaggacccaggaggcaggtgacgccctgcagaagtttatcgacggagccagacaactgacggcagaggcgaataaagccagtaacgcactggctgcacaggttgcggcccgtcagaccgcagacgaacaatccacccgggagttgaaagatgcactcaaaaaaacggcgtctcagcgtgttatgtgcgtgtttgatgacggtgttatgcagctgctccgggaggcgagacaacgcgccgcaaccgcagcagcagatggtatttccggcggagatgaccgtaaagtgcccgcctccggaggaagcggacgataa

SEQ ID NO: 190361 - DNA, 303 bp, Klebsiella oxytoca
atgaaatttgaggaattacagttcagctggcaggtgctgcagtgggccgttctttccgctatcgggatttacagctggattgttggtcgccagtcggccagcaaccgtgaactgcttgagctccgtacccgcctggcctccattgaagcgcaggtggcccagatgccaacccagcgacaggtctccattttgctggagaagttgtccagtaccgaagccagtatcaccggtatgaacaaccagatgtctgggatggccagccgactggagacaattaacaactatctgctgaacaccaagtga

SEQ ID NO: 190362 - DNA, 297 bp, Klebsiella oxytoca
atgagcttttctgattatctgcgtaccgacatgcgtctggtgatcctgcgtatcctttccgaaatgccgagctacagctctaacagctcagttatctggtcggtactgacgcgctatggccattccccgagccgagaccaggtgaagtcagaactgcgctggcttgaagagcaagggctggtgacggttgaagatatcgagactgtgctggtcgcccgactgagtgaacgtggtgctgatgtagctgcaggtcgggctatcgtgcctggggtaaaacgccctggcgcgggaggctga

SEQ ID NO: 190363 - DNA, 198 bp, Klebsiella oxytoca
atgccagaagtaaaactgctgcagccgcacacccacgcggggaagcgtcttgcagccggtgaaaccctcaccgtcagcgataccgaggccacctggctccgggagcataacgtcatcgaggttgtactgccagtcgtgagcgacgtgcagagcagccggggcaaaaacaaacaacaggagtcggaagacaatgtctga

SEQ ID NO: 190364 - DNA, 747 bp, Klebsiella oxytoca
atgtctgaaacttactactacggccaggggaaagtgtatctgtcccgccgcctggcgaatggcaggcccggcgcaattcgctggatcggtgacgtatcggccttgtcactggcgttgacggttgagcgtctcagccataaggagtcctattccggcaaccgtggcacagtgcgcagctttattaccagtcaggacgggacgctgaccgccacctggcacgatctgtcaccggaaaatctggccattgtgctgtatggagaacaggtcgtcatcccggcaggcaccgtcaccggtgaagttctcccggcaggtattacggtgggagaacgctacgttctgaaccatcagcgcgtcagtgacgtggtaatcggcactctggtggaggggaccgactacgaagtggattatacctacggggcgatcaccttcctgaccgctcaggcaaccgcgccatccgtgaattatggctatgcgggttcggtcaacaccacgctgttcacccaaaaaccgatagatctgtttttgcgtttcgaggggatcaaccttgccgaaggcggcgcggcgaagattctggagctttacaaaatctccttctctccggcagctgcgctggcgctcattcagggggatacctcactggccggtctggagacaaccgccacggtactctatgacaccgcccgtcctgatgacccccagattggtcgttttggccgtgtcattgatgttgcggagcctgtcgcatga

SEQ ID NO: 190365 - DNA, 1185 bp, Klebsiella oxytoca
atgacaatattatttccctggctggcagaccccgactggtcccgtggcgtgacagagacgctggagtggaaaacggacgtgctgcagtcgccaaccggcgcagaacagcggatttcccgtcgcctctcgccgcgccggacgttcgagttcacgacgctggtgcatgacacgggccgccagcgttttgagaatatgttgtggcagggttgtgccggcacatgggccatgccggtgtatccggatgttttttcgttgccggcaacggtattcagtggcgggagtgccatctccattccgactgccgggcgcgacttttctgtcggcggaactgtgttgctgaaaaccgacgagtcctcagatgcaaccagcaggatggccaccatcgccggtatgaccgatgatgccctgcatctggtctcccctctgaccgacagctggcctgcgggctcactggtatatccggtacgtccggcggtgctgacagatccgccgtcgctctctcgcctgaccgataccgcgacgaccgcgcaggtgcgctttcgtatcgcagagcataatgccttcagcaatgcgccggtgctcacgcagtaccgtggccacccggtgctggaggccgaaaccgactggggcgagtctgtcagcggcagctatcagccgctcattcgtgagctggataacagcagcggtattccgtaccggctggatactgccggtcgcccgttctggcggcagacacataactggttcaccgctaaccgtccggcgcagacgtcactgcgccagcttctatggtacctccggggtcgtcagcggccgatatgggtgtcaggccagacactcgacttctccccgactggtgcgatcgacggcaattatctgaccgtgagcgaaacgggttttaccgagctgggtattcgcccgggtcgccgcgacatctgtatcttactggccgacggtacgcggtattaccgccgcatcatcgctgccagcctggtcgccgatgcggagcgcctcgtgctcgatggcgacgccatcactgcaggccagaaccagatcgttgccatttccctgatgaccctggcccgtcaggactctgacagtgtgtcctgggagcatgtgactgacgccgacggcgtggccagagtcgccaccacttttaccggagtacgtgatgagctggagtga

SEQ ID NO: 190366 - DNA, 816 bp, Klebsiella oxytoca
atgagctggagtgattttgaatattccgtggccgatggccagccactgacgctgtatcagtttcagataggtgacagcctgttctggcgctataccaacgcagataaaaatatcgactttgccgatcataactgggaagcacaggccatcagcaacagcggcctcagttccgggagcagcgatggtatggatattaccgttccggcgtctaacccggtggcacttctgtttcgtggaacacccccgtcccgctctgtcagagttcgggtaatgcgctggcacgcggatgacacatccggcgaattccgggtggtctgggtcggggagatcactgacgtcaaacgagagcaaatcgaactctgcaaacttatcactatcagtctggccagcacgttttcccgaatgggtctcaggctcacatgggggcgtcagtgcccgtatgcgttgtatgaccataactgccgagttgatccgctccagtttgcggtcggtggcgtagtggtcaccgctctcgatggctcgtctatcaccgcaaatctgcccgccgggcttgccagcgactggttctccggcggttacattgagttcgaccgcaatggctataacgagctgcgcggcctgcgtgcgcaggacggtaatacgctgcatctgtttggcggcaccaccggcctacagctcgggcagtccgtcacgctgtatccaggttgcgaccgcacgattgccacctgtaacgataagttttccaaccatctcaactatggtggacagccccatattccggggaagtcaccatataccgttatcaaacttttttaa

SEQ ID NO: 190367 - DNA, 234 bp, Klebsiella oxytoca
atgtggtgggctgtcgctaaatgggttgccacgattattgcgtcgtatgtcattaaccgagcattgaccccgaaaccaaagaacaatacccctgaggccgctacagaaaacgactggaatatgcctatgcctgatgaaggcactccccagtgtgtcttttttggtgattgctggacggctgactggttcgtgctgggctacggcaattatcgctatcaggccatcaaaaaataa

SEQ ID NO: 190368 - DNA, 2028 bp, Klebsiella oxytoca
atgtcaaatttgcaggaaactccagaatgggtcgagtttatttatcaactcacggaagagacgccggtactgggtaaacaggaaggagttccgggcgatggtccatcaaacctgcaggcgtttcagcttgcctgcagaacactgtatttaaaattacaacaggcttacctggaaaatcagcttgatgcttataacggtattataaaatccggagagctaccgtttaccaatattcctgctgcacaggatgctattaacgccggtaagatcccggaaggttcccttttctccgtgcgttcggcaaatcctgattactgggttgatgaatataccaatcaggggggagctcccgttgcgacaggtaagcatctgatttctgaagcagcaattactgccagaattaatactgacagtaatggaaatatagcatttcacaaagaccttgatggattaaacctgcttgctgttgacgatgcaggcgggctctatgtcgtcggggtgaacggaacgattcaggatcgtctgaacacgttgcaaaaaaacacatcaccggcaattctccgcctgaccgatgccgaaaatgccgcttttgcctcagtagacgaatacgggcatttacgcatgccgggaatgccggagagtatgcaggagcggctcgatgccttaaaaaaacgaatggaagtgatccgtaagcgaggcatgattctggatgtgcgggattgtggcttcaatacgaaaacaggacaggacgcccatcgcccgctacaacgtggttacaactggttgtcggcaaacggcggcggcgttttatatgcgccccccgcatactacaagatgcccatcccggtgatccccaagtctggcgtgtctcttgtcggaggcgggcaggaaggcacgatatttttacctatgggatacctgcctgcgtttcagtatcgggggaaacccaccgaggcatcgccggaaatttacgtcgaaaatatccagttctgtgattttaccgttgacggtgaaaaccagcagttacacccggagcgcggttatatcccggatatcaagggcatcttcctgcaatattaccgcaatgccgtttttgatcgcctgactgtcagaaataccggggcgaccggtttcggtgtggatatgccggatagggttttcgtcgctaacttcctggttgaaaactgtggcaggctggcgcaggtcggcgacctcggcgcgtcggggttcggcctgggtaccagcttcctgagcagcgagccgattttcctgtcaaaaattgtggggcgcgggaataagaattacggcatcttctttgagccacagcgcggcgtcggtactgcgcaggatgcgattgtttccatggcgactttctccggcaacttcgcgggtatggcggattgcggtattgagggactgattgcttctgatgtcaatctgcgcgggaaccagcacggatttatggctgataccggaaccaacaacggcggacgtccagggcatcgcgggaagctgattaattttattattaaagacaatgcaaaacacggtatgtattttgtctcggctaaaaatgagaatctcatcggtgagtacgccattattggtgcgcatattttcggtaatggtgaggatgggcttaatttcaattactcgaataaccgggcaaactccggtctgcgagtctcagattgcgatattaatgataacggtcgtcatggtctgaattttgaggccgggccggttatcaacgcccatgtgacaaatacccgcttctggaataacgggaaacaggctgcgggtaacggcatcaacagcagtgcgagcgtgaagaaaagccgtttctcgatgaatagctattacgatttgcagtcggcacccacgcagcagtaccccgtatctatcagcggggatatggaggatgtcgacatttccttcaaccacggcgcaggcaatgtgcataactcactcaacctgaccgggaataaaacccgcgtcaccacgctttcaaactcggggatcgaataa

SEQ ID NO: 190369 - DNA, 1428 bp, Klebsiella oxytoca
atggccacgaatattcagggcaatatgaaatataaagggcgcttaagccagctcccgtcggctaacgcgcctctgccggaaggcgctaacctgttttcagactttgcgggtgggcgtcatgtaatcaaacatgccagtggtaacgttctccgctcaactcaactggcggatattctctcattctcacgagcaagtaccgcgacgcgcgtcgctgaaagcgggttgctggagtacctccaggcgaatgaacctgctattgattatcaccccctgtccggagagtgtctgggactgcgggttgagcgtagtacgtggaaccgcctggcatggagtcaggattttaccaaaaccgttacctggactgcttcgggagtcgatcttacgccgggggcagcgccggccccagacggtaacatgacggcaacaaagctgattgaagcaacggattcactcgaggcggtgcgtaaactggtggcaactaccacggcggaagcgaccaaaggtaatcctttcgcgtttagcatttttgcgaaagcgaataccgcgagcgtgctccagttgtcagccgtgggggcattccccgaaccgacgtttgttaactttgatctgaaaaacggcagactcggcaaaacttcgacgggctcaaccacccgggggttgttacaggcatcaattgagccgtaccgcaacggctggtaccgctgctcaatcgttatcatcctgtacagcgccacgaacccggaattcactctggcgctgacggacagcgataccagcgcgggggctctcccgtcctatctacccgttacacctaagtcagtgtttatctgggcgggtcaggctgagttttctgatggggtatcatcctatattccaaccaacggcgcggaattacagagggcgagtgatatctgcacgacaccaacggtggcttcgtttgtgaccgctaaggcgggtactgtgctggtttcagttgtgcatcctcacagcatcatggccatgaccgagacctatggatcgctctcctgcgccgccgtgattgataattctgtcgtagggcctcatgtgcgatttgcataccgaaatgccaatgttgatggcaattatggtgcggtactcggtgtggttcctgacacgaccgggaccgcacagaatctggagatcccctcgatggccccggttcctgacagcgagcagtcgtgcattttttcgttcgacgcgaccgcgctgactgccagactgtttgacgggcacaactggtatgaacgcagcctgacggcagcaccaccagccctgaatcgtctttgcatcggtcggggttatctggattccagcaactatctgaagggttatattaaaaaaatcatttactggccgtatgctctggatgaaaccgagatggaagaggcgatttcaactttcggttag

SEQ ID NO: 190370 - DNA, 1191 bp, Klebsiella oxytoca
atggatgatttaaccctgcgctattacgaagcagagatgcgctatctgcgtgaggcgggtaaagagtttgcccgagcccatccggatcgggcagcgatgcttaatctggataaacccggcgcccgcgatccttatgtagaacgcctgtttgaaggctttgccttcctgatgggccgtttgcgtgaaaagctggatgatgacctgccggaactgaccgaagggctggttagcttgctctggccgcactatatgcggactatcccgtcgctggccatcgtcgagttctcgcctgactggcgcagtctgcgtcaggccgaaatgctggcggaaggtttctccgttttgtcacgccctgtcgggccgcataaaacagcctgccagtatcggaccacccgcgatgtgccgctacaaccgctgcaccttgccgacgcccgcctgcacacagaaaacgatggccgctctgctattcgcctgcgctttgaatgccctgaaaaagtggactggagtaaagccgggatcgacaaagtcgccatttttcttaacgcagaaagtccggttagctcagcgctgcatctggcaatgacccgtcgcgtccacgccatgtatgcgcgtcatgccgggacgcacactgaacgtcatcagtttgacggctggtgcaaacccatgggctttgatgacaatgatggcctgtggaagaaagccgatactgccttcagcggttatcaactgctgctggaatatttcagcttccgttcgaaatttatgtttgttgagctgcgcggtctcgacgccatcgggctcactacggccagcacctggtttgaagtcgacattgtgctcagtgaagcctggtcatccgatctgccttttgagacagaaaacttccggctgcactgtgccccggtcatcaatctctttaccctggaagccgatccgctgacgcttgacccgctggataacgaatacctgctcaggccgctgcgtcttcaggatggtcacaccgagatttacagcgtcgataacatccatggggcggtgaagaatggcaaacacccctatgtaccgttcaccagcttcaggcaccggggcggtatgatgcgccacgatgcccctgaacgctatttccatacccgcgtgaaacgcggcccctctggcctgtatgatgatgccgggcgcgataaattccaataa

SEQ ID NO: 190371 - DNA, 1608 bp, Klebsiella oxytoca
atgagttcaccggaagatctgttaactgcctgcgccaccagcctggaagagaggcagcgcctcatctcccgggcaaatgacgccctgacactctgggataactggttaaaacccatcaaccctgaaacggaagcgggggacgatcctgcatacgatgataattttcagctgatgcgtgaagagattaataaactttcaggtaccgattcagcgctgttgtgcgagctggcccagaagtgtctttgcgaatgcgccaaagatattcgtgtcgtgacctggtacgtactggcccgactcagccgcgacggtgaaaaagggttgtccgaaggcctactgcttcttgtcgcgatgctgaaccgctacgggcagacatgtcatccccagcgtccggttgcccgtaaagctgcgctggggtggctgaacagtgcaaaagtgattgatgcactgctgttatggcccgaggtggaccacaatgatgccggtctgacggctggcgccatacacctgcttgaatccgctgtggctgacttgccggaagcggaaaaaccgtcttttgcagggctttgtaccgctcttgaaaaccgcctggcacattcaggcggcatggaggctctggttccccagaacagcagcgcccaggagctcgggcgtgaatcaacccattcagattcaccacaactgtcagcagtgaaatcgggccgcgatctactcgaccaggcaaagttactttcccgctggctgagcgaacaaccgcagggctggctggcttctcaccggctgataaagaccgtgcggtgggatacggtcgatcagaaccccccactcgacagtagtggtcgtacccgcctggtagcgccgaaacccgagtatcgtgctcaacttaaacggctatatcttcagaaaaactggaccgaactggttgagcaggccagccagatgtattgcgaaggggtcaatcatttctggctcgatcttcagtggtacctctggcaggggctcagccatgccggtcagccctgggatacctgggctgactccgtcctgttcgatctgcggctgctgcttaaacgcctcccgggccttgaagggctggcatggaatgacggcaccccctttgccgacgaagtcaccaccgcctggattactgaaaaagtaaatgaagaaggcctgatgtacggcgatgaacccgctaccgttgttaatggtcaggctgatgatgtgctgctccttgagcccgaagctatggagaagggagacacggaagggccagaagcggcgcttgcctggctccagtcccgaccggggatggataccccccgccatcgctggctgatacgcctgctgatggcccgggtggccgagcagtatggccgaaacgatatggcgcttcatctgcttggtgaactcactgcccgtgcgccactgctgacgctgggagactgggagcccgctctgttgtttgaagtccaggcccgacgcctgaagctgctgcgcatgaaagccggtcgcagcgaatctgataaagcccgtctgatgcctgagatggatacgctattggcgggtctgatcgccattgacccggcccgtgccatggtgctctgtggctga

SEQ ID NO: 190372 - DNA, 360 bp, Klebsiella oxytoca
gtggattctggcgcgctgttctggctttgctcggagaccagcgccaagaggcgtcgaaaagcatcaacgcctcatcccccggacaagccggtgcagatttttgcgggcgaccgggccggttccgcgctcaggcaggcaccgcgagcgccggaagccagtacctcaggggacagcccctccacgcccatcagcgccttcgcccccatgtcagaaaagcccactggcaaacccactcagggggaggagaaaagtatgctgctgaaatggaagccatcgcaaatcgtcaatggcaaggacgacgattgtctggaagcggtcgtgaggtttatgaaagaaactaacaaacgggaaaaagaatga

SEQ ID NO: 190373 - DNA, 3369 bp, Klebsiella oxytoca
atgtctaaggtaaaagtaaaaacactcatcggctccgttgtgactgtcgccttttttctgacagtcatcgtggcatttctgttttatgcctttccggaaaacgtagcctcgggcaccggcttcggaccgtatgacggtcaacgaatactcacattctgcgccatactggttgccgcgttgtttttactcggctggctgatagagaaggctttcgaccacgcgggtaaatccgggttgtatttccagtgggggcagaaaaaggctgagactgccgctccgttgacgaacccaattcccagtgaagaagacgatgatgaacccgttttcagcgaagacgtcgtgtccgaacacctgcgctttcgctatggacgccgctggaagcgtaaagtgcgtctccttttggttatgggcaacccggacgacgtccacaacgcggccccgggcctgtgtcatgacctctggcaggaaggcgacggcaacgtactgatttatggcggcgacgcccagtcgcttccggatgagatcttcctgtcaaaactgaaacgcctgcgtcctggtcatccggttgatagcatcattcaggtgataagtacctcagctctcccgacggatatcgaacgggatgcctttttgcgctgtcgccagaaagccgaccatctgctgggctggcaggccccagtctggttgtggctgactgacaaggcaacgggggctcagcaggacgaggaaaccactgcaacaggggttattttcggaccgggaggcaccgtaaaagaggcggatgaggcgtttagcatactgacgcaacgcctgcaaaaagccggtatagcacagatactgaataatccggcgcatggcagcctgctacagttatcctcccacctgcggcacgaactgaaaggcagtctgaccgttttgctcagcgggttgatgcagggatctgcggcctttcgtttacggggggtcatgttcagccctgaactggctgttgccggaacggtgccgaacacacgtctggacaccccgacatggaaagccgtcattgatgactgtgatgcggtcagcggcaggaaactgggtatcggctggctaaagatgctgcggttaattttgctttccctgattgtcctgtggggggccggtacactgttgtccctgatcgttaaccgtacccagatttatcaggcgcaggaaacggcgaggcaggcagcggatactgcaaaaacactggctgaacgcctgcacaaccagctcgtactccagcaagccattgcccgtctgcaacatcgtgaggcgaccggcgctccatggtacacacgatttggtcttaatcaggacagcgacacgctggccgcactctggcccctgtatgctacaaataacgcacagctgatgagggatgccaccgcagagaatctcaggcagcagctgaatgcctttgtgcaacttcctcctgccagtgatgcccgaacacagggcacacagcacacctatgacatgctgaaaagttatctgatgctggcccgtccggataaagcggacgcaggttggctggcaaaaaacgtactggtcgcctggccgaaacgtcagaatgtaccggatggtacctggcaggacctcgccccgaagctgctgggcttttatgcgcagaatctccctgcacaccccgaatggaaaattaagcctgacgctgaattaatcggcacggtccgccagatcctgcttaaacagataggccagcgcaacgctgagtccgggttgtaccaggacatgcttaagcgcgtggccagcaactggcctgatttaacgcttgccgatatgaccggcgataccgatgcctcaacggtattcagcacggacgaagtcgtcccgggtatgtttacgcgccaggcctgggaagagcaggtacaggatgcgatcaacgaggtcgttaaaacccgccgtgacgaaatcgactgggtactgacggataaaatccatcagacagggagcgatatttccccggaagcgctgaaggcccggctgatcgaacgttactttaccgattttggcaatgcctggctgaatatgctcaacagcattcagtggcaggatgcaacttcactttcagaagctattgcccagctcaacctgatcggcgacgtccgccagtccccgctggtggcactgatgaacacgctggcctggcaggggaaaacggggcagaagagtgaggcactggctgattcgatagtggactcagcgaaaaagctgatcggtcagaaaaaaaatgccagacagtttattgaacaggcacagggccctaaaggtccgctcgatggcgtgtttggaccgctgatgggtctgatggagggtaaagaggggaccggtagcaacggtaatctcagtttccaatcctggctggcccgtgttacccaggtgaggctgaagcttcagcaggtcactagcgccccggatccgcaggctatgtcgcagatgctggcccagactgtgttccagggtaaagctatcgatctgacggatacgcgtgactatagcagtctggtggcggcaagcctgggtcaggagtggaacgggttcggccagtcattgtttgtgcaaccgctggatctggcctggagacagatacttgctccggctgcaggaagccttaataaccgctggcagacaactattgtcgatcaatggaacaaagcgtttgccggtcgctatccgtttaaaactaccggcagcgatgcctccctgccgttactggctcagttcctgcgcagtgattcggggcgaatcactagcttcctgaaaactaatcttggcgggatccttcaccaggaggggaatcgctgggtggtcgatccttcagcaagtcaggggatggaggtgagcccggatttcctgcgggcaattaatctgctggctgaactggcggatatcgtttttgctcagggcgatgcgggtattcactttgaactgatggcgcgtccttcccgtgatatagcccgtatgcagttgacgcttgacgagcaaaatctggatttctttaaccagatggaaagctggcagagctttacctggccggggaatacgtactacccgggcgtcagcctccgctggcgaagtgtaagcagtggtatgcaactctacgccagtaaccaggggaactggggcttcattcgcctgctggacacagccctgatcacaccactcgatgccagccgtacacagctggtgtggatcaccgccgacggcaatcctctgaagtttgtgatgcgcagtgaactcggcaacggccctcttgcgttactgaagcttcagggattcacgctgcctgacactatcttcaacgtcgcacctggcgcagaagagcgctaa

SEQ ID NO: 190374 - DNA, 1209 bp, Klebsiella oxytoca
atgccagtcctgctggataccatccctgaaaaggcggcgaaggttccacgacctgatacccgccgctggctgctgttcctggcatttgtcatgtcaggagggattgctctaacgctctggaactggacgacagaacgcactggctttattttctggtttactgctctgggattgcctttctgtctctggggactgtttttctccctgcgccggtttgcatacaaagcagagcaggtgggggctgagtcccggaatgtggaacgcgaagcgcttattgatcgcgaaactcgtcggggccagcgctgtgcctggatactcgatacatacgttcaacacttttcagggaatagtcctggtgcactggtgaaagcacttaatcataccgttgcagcttcagaggcctcaacgccacggggttccaaagctgctgtcaggtatgcagccttagccagttttcagacagatctggattcagaactcctctccgccacgtcaacacttgtcgcccatgtacaaaaaattaccgacaccctgtcgaaggagattccttgctgcctgatgctggactgtgacgacgatatccgacccagactggaggagcacttcagaaatgaactcacggccagaaccgggcgggtcttcaggctccttgcgggcaaaggtctggctgggcttgatgcctggctggaccagcgctgggacactccaggcattcttgctggagtgacgttttcattgcctgctcagcctgatgaaggtgacgccgatgccattacccttgtggtgctcagcaaccgtaaggctgttggttatcctgatgcggtatgtcttcatcgccctgaaaagggccaggaaacccggcttgtaaaaacgctggaaagggcactgttatgggccgcaacacctcctgaagcactaaaaacggcctggtatacaggtccagtcctttcaagcgggagtggatggaatattgcttgtgaagataacggggggacattcagcttgtcaaaagacaatcaaggtattgatcccgctctgggatatgccagacgcgccgccccctggcttgcaattattcttgcctctgctgcatgtagcggtcatggcccgcaggttatcgccgcacaacccgccgctgataaagacgacatctggatcgccgtcatcaccaaagaagaagttcgcaaggaatcgcctaagaatgtctaa

SEQ ID NO: 190375 - DNA, 264 bp, Klebsiella oxytoca
atgttgcagattattcgaaaaggcgacaaaaccactcacgatggttcagtcatgacctgttctggcaccatgatatttggtgggattggcgtggcacgtaaaggtgacagcgtttcctgcccgatacctggacatggtccgacaactatcatcgaaggtaaccctgattatcttgataacgggatcccggttgcctttcacggtcatagatgtggctgtggttgcacattgatcagttcttttgctcctgccaaggttgcctga

SEQ ID NO: 190376 - DNA, 591 bp, Klebsiella oxytoca
atgagtgtttccgggggggatgtagagtttggtgatggtgtaaaaaaatatacctataaggcttattgtagtgtcgtggatatgaccaatggttgcattgttagtgactgggatggtgaggcatgtggttatagctgggtgggtaataaagatatattagccagttcaggggatgttaatgcagataaatttgacttccagtcaatgcgcccgatgatcaacaaaacgatagatgatttttctggaatagatgaaagagaggtagtcaacatgcttcagtgtgactcgccatctaaggaaaatataaacacatatcaaagaatgacaaaggaaaacaaaaaagcggaaggaattgtattgaagtccatttctgaatatctaagaaaaattaccgcgatatctacggtgaaaaccaagtcaaatttattcacttttccaaatgacaataacaaaaccagtgcttatcttattcccggagataagataaagattattcagacatctccagacaataaattggtgaatattggatatatcaatacaaaaggttcccctcttatttcctggatcaagactgatacacttgagtaa

SEQ ID NO: 190377 - DNA, 1032 bp, Klebsiella oxytoca
atgccgatcatagcaccaataccccgtggcgaacgacgcctgatgcagaaagctattcataaaacgcgcgataaaaatcatgcccgcagactcacggccatgctgatgcttcatcggggtgaacgggtcagcgatgttgccagaactctctgttgtgcccgttcatccgttggtcgctggattaactggtttacgcactcaggtattgaaggcctgaaatccttacccgcagggcgctcccgacgctggccttttgaacatatctgcaccctgttacgtgagctgataaagcattctcccggcgattttggttatcaacgttcacgctggagcaccgaattactggcaataaaaatcaatgagataaccggttgccagttacatgcaggaaccgttcgccgctggttgccatctgcggggcttgtatggcgcagggccgcgccaactctgcgtatccgtgacccacataaagatgaaaagatggcggtaatccacaaagcgctggatgaatgcagcgcagagcatccggtattttatgaagatgaagtggatatccaccttaatcctaaaatcggtgcggactggcagttgcgcggacagcagaaacgggtagtgacgccggggcagaacgaaaaatactatctggccggcgcactgcacagtggcacgagtaaagtcagctacgtgggcggcaacagcaaaagttcagcgctgtttatcgctctgctgaagcacctgaaagccacttaccggtgggcgaaaacaatcacgctgatcgttgataactacattatccataaaagccgcgaaacacagcgctggttgaaagcaaatcccaagttcagggtaatttaccagccggtttactcgccgtgggtgaatcatgtggaacggctatggcaggcacttcatgacacgataacccgtaatcatcagtgccgctcaatgtggcagttactgaaaaaggtccgccattttatggaaacctccagcccattccccggaggaaaacatagtcaggcaaaagtgtag

SEQ ID NO: 190378 - DNA, 219 bp, Klebsiella oxytoca
atgagtattatatctgggctttttttttttaaaatcagggactccctctttggagtgtatgaccacgacattatctttgatacagatgatgagtacgatatcccgcacacgcctatcaaggatgtgcaaatatactgtgattatccaagtaatcctgtgtgtataacgttattttcagagtatgcgattttatccgtacatgcaaaccggttacagtaa

SEQ ID NO: 190379 - DNA, 510 bp, Klebsiella oxytoca
atgaccaaacgtaaatacacctttgaacaacgccttgaagtggttatgcactatttcgctaccgatgatggttatcggatcacatctgcccgctttaatgtacccagaacccaggtaagaatgtgggttgcagcctatgatgcttacggggaagaaggactaagacccagagataaaggcgtttcaattgatccggagatcagaattgaagcagttaatgcggtgctttcagggcaaatatcccggtgtcaggcggcaaccaaatacaagcttgctggttcagcctccatcagcagatggatagatgtatttgataaacatggggaggaagggctcagatcgctgcgtcttggcaaaaaaaggacccctgagatgttagatgatcctcttgctgttgaagctgcacgggaacaatccaaagacaaacgtatccaggagctggaaagaaaggtcaggtttcttgagttacgggtactgtatctacaaaagctgaaagcctcagttcggtaa

SEQ ID NO: 190380 - DNA, 648 bp, Klebsiella oxytoca
atgggagccatcaaccataaggttgtccagcgcctgatgaaccgactttctctcaaagcggcgattaaagttaagcgctacagttcgtggcgtggagaacgcggtgtagtagttgataatgttttacagcgaaatttcaaggcaacccgacctaatgaaaaatgggttacggatgttactgaatttgctgttaatggcagaaaactttacctgtcacccattattgatcttttcaataatgaagtgatttcctacagcatttcagagcgtccggcgatgccgatgattgatgaaatgttggataaagccctggcaaaactggatgagcagagttcacccgtacttcattccgatcaaggctggcagtaccggcaccgctggtatcaataccagctcagagcaaacggtgttgtgcaaagcatgtcgcgtaagggcaactgccttgataatgcctgtgccgagtgcttttttgggacactgaaatcagagtgcttttatctcaacacatttaatgatattgatgagttaaaagtagcggttacgaactatatcgattattacaacaaccgccggatcagccttaaattgaaaggcctcagtcctgttgaataccgtctcaaggccttcccatatccgctcagaatctag

SEQ ID NO: 190381 - DNA, 576 bp, Klebsiella oxytoca
atggccgtcaatcttcgtcgcgcgttaccccatcaggacacgcctttctttcggggacttcatattgttgtcgccgttctggttctggctcagattatcaattcgaatatgacggaaactgagtctctgggacagttttcgttgacaggtatggtgacttttctgcacatcatttccgggtttggtctgttgctttgtggtgtggttatgctgttctggatgctggctcagcgtggtgcccggtattatttctcatacctgtatctggattttcagggcgtcaccgacgatttcaggacgctgcgtcagtttcgcctgcccgaagcacatgccggaggtatggctgccatcgttcagggactgggggtgctgtcattactcggtgtggcggctgtcggcggactctggttcattctgaatatgatgtacggtcccgattcggtcctggtacatgacgttctacatttgcataagtttctgacggtctttattgagacctatttctgggcccatggtgcgatggggatccttcatttgctcctgacaattcggttgcaacagttgaataaggaatga

SEQ ID NO: 190382 - DNA, 306 bp, Klebsiella oxytoca
atgaacgagatgagtgaactgcaaggccaggcggaaaacgcggccgcattgctgaaaacactgagtcatccgcaacgtctgctgatcctttgcattctgaccgggagtcctggtacagaggccggagagctgagcagactcagcggactcagtgcttcagccacctcccagcacctgtcacgaatgaaatctgaagggttgattgaagggacgcgtcaggcgagatatatccgctatcacatcaaaaatgacgcgatttttgcggttgtacagactctgaagaatatttactgcccgggagaataa

SEQ ID NO: 190383 - DNA, 534 bp, Klebsiella oxytoca
atgaccactgtcaccgtgacgcctgctgaaattaatgcacagcatggcaaaccagttcttctgattgatatccgcagccatgatgaatggcgaagggaacacatttccggcacacgttccctgtcgctggaacaacttcatgctggttgcttcagtgagaccgggctgagcgaaacggatacggtcattttccattgccagagtggtatgcggaccgggaacgcggcagaaaaactcagtcagtttgtgtatccggcacaggcactgatcatgcagggaggcctcaatgcctggaaagcggcgggctacccggttatcgttgatcgccgtcagccactaccactcatgcgacaagtacagattgccgcaggggcgctggccctcggcggaagtctgggcggactattcctgacctctgtgctgtatgttattcccggatttgtgggtgcgggcctgatgcttgcaggaatgacaggctggtgcgggatggcaaaactgctcgccgttatgccatggaacagagagcatgaataa

SEQ ID NO: 190384 - DNA, 924 bp, Klebsiella oxytoca
atggagcttaatgaaaataaatgcaatgataacgaatatcataatcgttcattggcggcacaaaaaagtacgatgatcagtgtagctgtaaatatattgttatcctgcgttcagattttactggggatattttctggctcacagggattaatcgctgatggcatacattcgttttctgatttggtgtcggactttgtcgttctgatcgccaataaaaaaagtcgcaagccttctgacgaagatcaccattacggtcatggacgctatgaaaatggggcgtcgttgattattggcgcaatcctgttccttgtcgggtccataatgatttggtccgcaagcggcaagctgtggcaccctgaagccatttcagaggtgcatattgttgcgttgtgggtagcactgttcgcgctggtgacaaaggaactgcttttccgctatatgctggctgtcgcgacacgcattcagtcgtctctgctcatcgccaacgcctggcatgcgcgctctgacgcagcttcatcagtggtcgtgtctgttgggattgtcggcaatttacttggctttccgtggcttgatccggtagcagcaatagtggttggcgttctgattgcccgtatgggctacacttttgccgccaatgcacttcatgacctgatggatcgttcggtaagcactgagatggaaactgcaattaaagcgattattctcgctgtccctgacgtcctcggagtacacgatctgaaaacacgaaaaacgggcgatctcatactagtagatgtacatattgaagttgacggcgagctttctgtcagtgaagggcatgatattgccagagcagtacgtcaggcggttctggaaaataaaaatgtgctggatgtcatgatccacactgacccttatcagtgtgaagaattgcccgtttgctaa

SEQ ID NO: 190385 - DNA, 321 bp, Klebsiella oxytoca
atgctacagcctgttcaatttttcaaaattctgtcagatgaaacccgtctggctatcatgatgcttctccgggaatccggtgagatgtgcgtgtgtgatatttgcgcggccaccgccgagtcgcagcccaaaatttcccggcatatggcaatccttcgggaggctgaactggtgctggaccgtcgggaagggaaatgggtccactaccggctctctccacatatgcccgcatgggcggcagaaactatcacaacatcctggcactgcctgcgggaagatgttcgtcagtggctagaaatatccgtaggatcatcctgctga

SEQ ID NO: 190386 - DNA, 1290 bp, Klebsiella oxytoca
atgttactggcagtgagtatttttttactgacgctgatcctggttatctggcaaccccggggactcagtattggctggagcgcctgcattggtgctgtgctggccctggtttctggtgttatccatgtgggtgacattccggtggtctggaatatcgtctggaacgcaacagcgacctttatcgcggtaattatcatcagcctgctgctcgatgagtcgggctttttcgaatgggctgcgctgcatgtatcccgttgggggaacgggcgcggtcgtctgctgtttacctggattatcctgttgggcgcagccgttgcggcgctgtttgctaacgatggtgcagcgctcatcctgacccccatcgtcatcgccatgctgctcgcactggggttcagcaaacggacaacgctggcctttgtcatggccgccgggtttattgccgataccgccagtttaccgcttatcgtgtcgaacctggtgaacattgtctctgctgacttcttccggcttggctttacagaatacgcatccgtcatgcttcccgttgatattgcggccatcgccgccactctgggcatgctgcatctgtttttccgccgggatatacctgcaacatacgacgtctctcttctgaaaatgcctgccagtgcgattaaagatcctgcaaccttcaaagcaggctggattgttctggttctgttgcttgttggattctttgtgcttgaaccactgggtatccctgttagcgctattgcggccgtcggcgctgcggtactgttcgccgtcgcaaaaaagggtcactccatcaataccggaaaagtgctgcgcggtgcgccgtggcagatcgttgtgttctcactgggcatgtatctggtggtctacggcctgcgtaatgcgggtttaacagaatatctatccggtgttctgaatatgctggcggataagggactgctggcggcaacgtttggcacgggcttcctgacggcattcctgtcatcggtcatgaacaatatgccaacagttcttgttggagcactgtcgattgacggaagcacggcgtccggcgtcatcaaggaagcgatgatctacgccaacgtgattggctgcgatctaggccccaaaatcacgccaataggcagtctggcgaccctgttgtggctgcacgtcctgtcgcagaaaaacatgactatcagctgggggtattacttccgcacgggcatcatcatgaccctgccggtgctgtttgtcactctggccgcgctggcgctgcggctctctgtcactttgtaa

SEQ ID NO: 190387 - DNA, 165 bp, Klebsiella oxytoca
atgacgctctgttcgttattttctttgcgctgcacagatgtgagaatgcccaacaaagcgtcaagcggtcatgcattcatgcggttgtctgaaaaattgtacctgcaggggaaaacgcttctctctgagcgggggattattcagactacgcggatgaccgattaa

SEQ ID NO: 190388 - DNA, 1944 bp, Klebsiella oxytoca
atgaaattcttaaagaatatcccgtcttacctgtttttcaccggtaagggaggtgtaggtaaaacttcgatttcctgcgcaacggctatacgtctggctgaactgggaaagcgtgttctgcttgtcagtaccgacccggcttctaacgtcggtcaggtattcgatcagactatcggtaacactatccagcccgtgactgctgtgcctggactttcggctctggagatcgacccgcaggacgccgcccagcaataccgcgccagaatcattaatcctattaaaggtcttttgcctgatgacgttgttaacagcatcagtgaacagctttcaggagcttgtacgacagagattgctgcgttcgacgagtttactggcttactgaccgatacttctctgctgacccgcttcgatcacatcatttttgatactgccccaaccggccacactattcgtcttcttcagcttcccggagcctggagcagcttcattgaaagtaaccctgatggtgcctcctgtcttgggccgatggcggggctggaaaagcaacgcgaacaatacgctcatgccgttgaagcattatccgatcctgaacgaactcgcctggtgctggtcacgcgattgcaaaaatcaacactacaggaagtcgggcgtactcatgacgaattatcagctattggccttaaaaatcagtatttagtcattaacggtgttctgccagctagcgaagcagaacgtgatgcactggccgccgtaatatggcaacgagagcaagaggcgctggcaaatcttcctaccgggttatctgatttgccgacagacaacttataccttcagccgctgaacatggttggtgtgcccgcattgaaaggcctgctcaacgaacacgctgagatagcattgcttcctgaacaaagcatacaaaacaaaccagagaatatgtcgttctctgtcctggtcgatgatatcgcccgcagtgaacacggtctgattatgctgatgggcaaaggcggtgtgggtaaaaccacaatggctgcggctatcgccatcagtctggcggataagggttttgatgtgcatctaaccacctcagatcctgctgcacatctcagtacaacgctgaatggcagcctcaaaaatctgcaggtcagccgaatcaaccctcaagatgaaaccgaacgctatcgtcagcatgttctggagacgaaaggcagggatcttgatgaggccggaaagcggctgctcgaagaggagttacgttctccttgcacagaagagattgcggtgttccaggcgttctcacgcgtaatccgtgaagcaggcaaacggtttgtggtcatggatacggcaccgaccgggcatacgctattactgcttgatgctaccggggcttatcaccgtgagattgctaagaagatggggaataaagttcattttaccactccgatgatgcagcttcaggacccggaacgcaccaaagtcctgctggttactctgcctgaaaccactccggtactggaagcggcaaacctgcagtccgatcttgagcgtgcggggattcatccctggggctggattatcaataacagcctctctattgcacagactcattcaccactgctgtgtctgcgtgctcaacaagaacttcctcagatcgaggctgtgaagaaccagcatgcaaggcgcatatggcccactcaacagcgacgtattgtggagatctcgaccgcggaaacgcgtgtaatttcgctggcgttaaccagcgcctttatgttctgcggtattggttttgggtcggcggtggcatcatggctttatccgctgtcggggttttacggagtaatgataagctcagtcctgttcctgctgctggcactggccagtctgtggacgtctgaatggttacgagcacgttctgcgaaatatcaggcggttcacctgtcataa

SEQ ID NO: 190389 - DNA, 363 bp, Klebsiella oxytoca; identical to SEQ ID NO: 180186

SEQ ID NO: 190390 - DNA, 354 bp, Klebsiella oxytoca
atgccagaaatcgcatccctacaacttttcaaaatactatctgatgaaacacgcctaggtatcgtactactgctcagggagatgggggagctgtgcgtttgcgatctctgcacagcgctggaacaatcacaacccaagacctcccgccatctggccatgcttcgggaaagtggcctgttgctggatcgcaagcaggggaaatgggttcattatcgcttatccccgcatattccttcctgggctgccctggtgattgagcaggcctggttaagccaacaggacgacgtacaggccatcgcccgtaagctggcatcagcaaactgctctggcagcggtaaggctgtttgtatctaa

SEQ ID NO: 190391 - DNA, 642 bp, Klebsiella oxytoca
atgtttccagtcggcattgacgtaagtaaaaacaccctggatctttgcatgctttatgacggtatcaaaggacgcataaaaacccgtaacatccagaataacagacattcagttgaaaatattcttcgctggctcaggcttcaacattgcagtccggaagatgttcatgtggtaatggaagctaccggtgtttatcacgaacggctggccactgaattacatgatgccggtttccgggtttctctggccaaccctcaccgtagtcgggagtttgcgcgtggcatgggaatcatgacaaaaacggataaggtggatgcgtatatgctggcctgttacgcattccttaagaagccacaccgctgggagccgccggcacccgaaatcagatatctcggtgcactcctgcgacggcgggatgttctgctgggtgatgccctgcgtgaggagaacaggctggaaaaatacctgtcgacagacacacctgcagatattatcagttcctgcaggcgtatggcgcagcttctgcgcgaggaggtaagtaatatcgagcggcagataaaagcacatatcaaagccagccctgcactgaggcgtgattatacactgctgacggctttgttgaataaatcgaacttttgctga

SEQ ID NO: 190392 - DNA, 648 bp, Klebsiella oxytoca
atgtttaaaccgtccagccgtgagatcccaattgagaagcaagccgcaacgctgttatttattgatgtacaaaattacaatgctcgccgtgatggtggggaatatgtcgggatgtcgacaaccgaactgaatgagaggttcggctacttctttgatataattgaacgcgaaacaatttctaatatgcaaaaaatccagactgcatgtcgtgcaagtcagattgaagtgatgtataccgttatagaaagtctgaccaaagatggccgtgaccgcagcctagactacaaaattaccggctttaacgtgccgcgtgactcctgggacgcgcaggttctggaagctattgctcctggtgatgatgaaattgttctgtcgaaaacctcttccagcgtatttatctcgaccaacattgattatgtactacgtaaccttggtacccgttatcttgtggttgcgggttttcttaccgaccagtgtattgaaagcgcagtacgtgacgcctgtgatctgggatacttggtaaccttagtgactgatgcttgcgcgacactgtcggctgaacgccatcaaaactctctcaacgctataaaaggttattgcaggcaaatcactacacaggagtttctcaatgaactctccgctggataa

SEQ ID NO: 190393 - DNA, 792 bp, Klebsiella oxytoca
gtgagcgccccccttcttttttcagatgaacctgctccggtaatggtggaaaaccaatcgggcatttctccttttttgatcctttgtgaccatggtggaaaacgtatcccgcgccagcttggcgatttaggtttaccgcagcatgaaatagatcgacatatcggctgggatttgggcgtgctgactgtgtcccgacatatgagtcgtttactcaacgccccactggtgcatcagatatattcccgactggtgattgactgtaaccggcaaccaggtatccccagttccatcccggaggtatctgaagccactaccattccgggaaatatcggcttgacccagcaggagcgtgaccagaggcgtgacgaaattttcactccttatcatgatgctatacgcgcgatactgactgaaaggaagaaacacggtattccgacctgtatcctcgcgatgcacagctttacaccggtatatcatggtgaatcgcggccatgggagatcggtgttctgtaccagcatcaggctgaatatgctctgacggtactggagcgattaaaacaaacccggcgatggtgtgttggagataatctgccttactccgtttcagatgtgactgactatgctgttcctcagcacgccattaaaaatgaactcccctatgttgaaatcgaaattcgtcaggatttgattacagaaccagaaggacaacgaacctgggctgaagatctggctcaaatatttacagatagctgggacattctcaccagtcaacaatataaaaaagaggcataa

SEQ ID NO: 190394 - DNA, 852 bp, Klebsiella oxytoca
gtgctggcacaacagataaaagacaacatggcggagctaagtcctgcagagcgtaaaattgccagggccatgctggctgactatcccggtgctggtttaggttcggtgcaaatgctggccgatcgagctggcgtcagtctgccttccgtggtgcgttttgcacgtcgaatgggatatggtggtttcgttgattttcagcaggcgctgagggatgaaatatcggaacaggctaaaggccctttacagcgcctggataactgggtaacgacagaaagcgcatcgtcgttgatagaggccgccataacatcctcgacactggcgatacagtgttccttacgtgacatagcggaatatgagatcgctgaagccacccgtctcatcggtgctaaagaacatcatataatcctcggtggcggtcgtatcagccagtctctggcaatgtattttggccgcaacctgcaacaggtgagacgcggtgttgaagtgctcgccgaaaaccatcacgatcgtattcagcagatcatcgacgttaataaaaatgacgtattcgtgttgttcgattttcgtcgttaccagcaggatatgtatcaactggcacaggagattgtggcacgcggtgccacactcatagccgtaacggatacccaactttcccctatagcttctctcgctaaagtcgttctggctatccatgtcgaaacgccatggctttttgatgggtacgccgccggtattgtcctcattgatgccattatcgccagcattatggaaagccagggtgataaaaccgtgcagcgcctgcagcagtgggaagcacttggccccctatctttaaatgcaaaatccaaatga

SEQ ID NO: 190395 - DNA, 1371 bp, Klebsiella oxytoca
atgggcaagcaatctgtaggtgtcgatgatgaagtcattgatttacaaagcataagtgaaaacctcagagctctggggatcacgaccctttttacctcgctggtcgactctgcgggcgtaatccgaggcaaatctgtcccggtaaaccggctcaaaaccctttgtcagtcaggggtgggagcatcgccttcctgggctctgttctgtgccgataacgcgattgcctggatcccggcattcacggctgttggtgatcatcgcctgcgcgccgatatcagttcactggtgacattccaggatggtttttgctgggctccggtggatgtttttgaacaggaaggacagcacgccgcctggtgcagccgtcattttctacgccagcaggtcgcagcgctgcaaaaacagggtatcgaaactctggcagccggtgagcttgaattctatttgttaccagagcaggacgtaccggggcatagcggatggcacgcttacggtataggggggctactggctcatgagtcgatgatcaatgatctcgtcagaacgcttgaagaagcgaatgtcggcctggaacaatttcatgctgaatatggctcctgtcagtttgagctttcactggcaccggccgatcccgtgacgatggtggatcgcctggtgctgacacgtattttactgggccgcattgcacgcaaacaccatttacgtgtcagtttctccccaaggccatttgcgaatgaagcaggtaacggtgctcatctgcattactcctttacacgtgaggggcaacctctgctggccggcggtaccggtatctacggtattaccgctgagggcgggagcctgatagcggggatcgtacgatatctgccggaattggtggcattacttgccccgtcagtattgtctgccgaacgcctgcaacccggccactggtcgggcgcgtatgcctgctggggactggaaaacagggaagccgcagtacgttactgtgcggcaaatcggggcaacccttatggcgcacatcttgaagttaagtgtatagatcctgctgccaacccctacattgcctgtggggcagtgcttgggatggcgctggctggtctgaaagacgaacttcccctaccgcagcctacacaatctgctccagccgatctctcagaagctgaacgcaatgagcagaatatccagcgacttataacaaaccacagcgaggccttaacccgtctcgcacaaagctcactggcgcagtcaatgttacctccggagctactgggcgcgctgatcgccgtacgccagcatgaacaggatacctggggacatctaccgctggaaaccatcacggagacattccgcttcgcatggtcggtttaa

SEQ ID NO: 190396 - DNA, 1467 bp, Klebsiella oxytoca
atgagtcatgcatcaaataaaaagcgaagtttaaaactctgggaggctctggcgctctctttgggaatggttggaccaacactggctatgtcaggtaatgcgcaggggttgatcgactcagttggcaaggcattgccgattgtgtttgtattaggtctgatcggggtagcattaattgcctatggttttatccgtttgacccgattttataatcacgctggtagtgcctacggtttggtcggaaaaactgtcggtcctcgcgccgggttcttttccggttttgccattatgggaacgtatcttttcttttcgattggcacacttgcggcactgggtgcatttaccaatgcttttctggccgcattattcccctcctctggttttcagatcccatggattatcactgcgacagttggagtgatatttagctggatcctgaattctcatgatggaaagacggtcgctcgcgtactgatggtgattgaggggctcggcattgtattgatgctggtactggctgcagtgattgtcgtacatcaaccggcgacaggggcagaacatgcttcattgttcagtttgaatggcgtcagttttcaggcggtaatggctggcgtcgtcgccgctttcctctcctgggctggctttgaagcctgtgccaccctcggggaagagacagaaaaccccaagcgcaatattccgctggcactgctgggttccattctgctaaccggtgtgctgtttgtggggatgatgtatgtgcaaacccttggttttggccttagtgagtcgggcctgaatgccttcaaaaattcagcgaactccctgggtacattatcacaaacatacgttggcaccgcatttaccttagcgatgttgtttaccgccatgatgtctgctttcgcggcaaatttatctgccgccgccacctccagccgtctgttatttgcgctcgctcgcgatgggtttggtccagcgtgttttgcgaaaatgtcagataaaaatcatcaacctcgtaacgccctaactctgatacttattctcagtctgctggttgatgttgtggcctggctgagtggtaaaccggcaatgggaacgggtaacagcgcgatagatgcatacttttattttgcgatcatcggctccgtttgcctgatggttgcctatctgatgatcgagattggagtgattaattttatcgcccgcatgggtcagaacatccctaaatgggagctgatcatgccagcgctgggcatcgtcattatggtgatgtcgttatatttcaatgtggcaggccaggaagagctctttagtccggcactggtggcgttttactggtgcatcgccggcctgatcaccatcatttcggcacccaagctcgtacgaaatatcggattgtccctggcgtcagagtttgcaaccccaggtgataaagtggcaaccaggacagtacaaaaggagtggatatga

SEQ ID NO: 190397 - DNA, 1323 bp, Klebsiella oxytoca
atgagcaagcagatctttcctgacgaagcagccagtttgtatcagcgtgacacccggtccgtagctgggattgagaagttacgcttcttcccgttagccgttaccgctggcaagggatgctggttaactgaagcaggtggccggaaattgctcgatctgtcagccacctggaccgcggcaggactgggtcatggtcacccggaaatcgccgcggccatcaccagggctgcacagaatccagccggggccggtggcctttcagcggtacacccggattcggtcggacttgcagaggagctgctggccattaccccgggcaacggggatcgctgcgtctatctcggacatgccggtagcgatgccaatgacgtggcgcttcgcgcctgccggctcgccagcggaaaacgtaaggtggtggcttttgcgcatgggtatcatggaggtatcgggctggcgatggaagtatccggagtacatatatcggcaggtaacgcagctgatccagacctctacctggcaacttatccaaatccattcagaaccaatgatgaaggcgctgcggcagtcagcgcaagccttcacgaagttaaagaacagctcgatcaaggtgatgtggcttgtgtgattgttgaacccatcctgtcggatggtggaatggtcgtgccaccaaaaggttttttaggtgggttacatcgattatgcgtaaaggcgggtgtgccgctgatatgcgatgaagtcaaaatgggtctggggcgccccgggctgatgcacgccttccagcatgagaacatcgttccggaaatcgtcacttttggcaaagtgttaggtggaggtttgccgctttctgccactgtgggccccaaagagatccttggtggtcccgcagcgcatgcattgcttaccaccgcaggaaatcctatttgtacagccgtaggccgttctgtgttgcgtgtgctgcagcacgaagaactgcctgaacgagcggctcaggctgggctttacttcattcaacttctgcgtgagctggcgaaggacttacccgagatcggcgatgttcgtgggcatggtctggctattggcatcgagttagtcgttcctgacggcagcaaaaatccggaccgggcgctcgcgcaaaaagtcgtatatcaggcatggaaagagggcctggtggtgtactacgtcggggggaatgtgctggaaataacgccaccgttaattattacccgggatgagataacctgcgcggtagaaaaactatcgctcgcaatacggaatgccccgaaggtcacacgtgaagaaatacagccttatgctggctggtga

SEQ ID NO: 190398 - DNA, 720 bp, Klebsiella oxytoca; identical to SEQ ID NO: 152534

SEQ ID NO: 190399 - DNA, 315 bp, Klebsiella oxytoca
atgggtaaaccaacatttagatcatttaacgatgtggtcagggagcttgaggatgtatatggccataaagagctatggctttattcaggaacggcatacgcaacgtcaacagaaatgattgacgccagacataactggaaatcgccaaaaatcctgaaacgtaacggaagaatggttgcagaacgattggataactcggactcatggcaactggttggtgactacaaagatccacagtcacaagattgtgctccgccctggcaatcctgtcagatagatgactattttaaaggctattaccttatcgccccctag

SEQ ID NO: 190400 - DNA, 141 bp, Klebsiella oxytoca
atgaggaatcgatgccgctttcgcggtttggatatgccttttgccctcctcgttaaccgtatttgtgaagaaggttggcgtatttttgtcctgccctgtttgaaattacaccgttttttctcgtttgagcacaaaatgtga

SEQ ID NO: 190401 - DNA, 729 bp, Klebsiella oxytoca
gtgttcagggtcagcggaccggaaagccgacgtaccggcacaacccagttcggacgggctctccgggaactggcgatcgaattgatttgtgccaacagcagccaggcaaaaggtcgcgtggaacgggtaaataaaacgctccaggatcgcctgattaaagagatgcgcctgcagaatatcagctcggttgctgaagccaatcagtggattgaacatttcatgtccgattttaaccgtcgtttctcccggccggcaaaataccctaaagatctgcaccgtccggtcacacagagtccactggagctgaatgatatcttcgcctggcaggagctgcggaccttatcgaaagcactgacttttcagtatgataaagtgatgtatatcattgaacccactgaacaaaattcgcgcatagcaggtgaaaaaattaccgtttatgattaccctgacggaagcattgctttccggcatctgcaccggccactgggctataagattttcgataaactcgcctgcgttgatcagggtgcggttgttgacaacaaacgactgggtgccgttttgaaactggcgcagcagaaacaggacgagctgggggctgaaggaaagcgaatgcgcagcaaaaaaatgccccgcaggcgtgcccaggagcgcgtactggaagagctaagggcgatcaatccggtgctggccagcccgcaggattttgtccccagcctgaagcgatga

SEQ ID NO: 190402 - DNA, 306 bp, Klebsiella oxytoca
gtggaatatagctctataactgatgtcagaaatcatatcgatcagatagacagtgagctggtcaaactcatagctcagcgtgctcaatgcgttaaagctgcagcggcgtttaaaactgatcaggcatccgtgcgtgcacctgacagagtacaacagatcatcgaccgggtacgtaagcaggccactgaagcaggacttcccgaaacgattattgaaaaaacctatcgggcgatgattggcgcattcattgattatgaactcgggcaacaccagcagctgcagaagacgaaatccggccctgaataa

SEQ ID NO: 190403 - DNA, 603 bp, Klebsiella oxytoca
atgagacaatttagtaatgtgtggtatcttgttttatctgtatgttccttttatgtacatgcaaacgctgacttagatgttacggactgttctctaaagggaagtgtttcttgtgatgttttcttgaaaatggaacgaaatgttgatgatgtatcttacaaagttgaattggcagatactgaaaatgggaaaaacatattcccttattttgatatgaatgaaacaacagaaagtgtctctttgcaaaagcatggagaaagatatgttttttcaaaagtgtatcttgatagtaccaaggctatagagtttatttcgtttaagtatgacaataaacacctttcacctgtaaactattattacattgagagttctattgattttaataacaacgtgaagaaatggtctggcaaggaatgtgatacatcagcagggaaaatacctgaaaaaaaagatggcttactattacaagtagcctcagaattatgtgttaatcaaattaagttagcatacagcccaaataaatatatcggaaatgatatcttattttatctgtcacaacttactgatggtgttgaaaaaacagcttcctgtgattgctcttga

SEQ ID NO: 190404 - DNA, 1113 bp, Klebsiella oxytoca
gtggtgaagggtattctggagcagttatataaagcggcagaggatgaaacccgtacatctcacgcgcttaacaagtataactataaacggctgctggaattgatagacagtaaccaggacgggtattactcggagcaagagtatcttcaggcggttcataatgtgtcatatcgcgaccatctgtaccgtgtgatagcgaagcacgccagtgaatggtactacggtaaggatgacccgctgtggaggacatacctggatacgttaaccacggatgcaccgttgtggaaaacgtatctggaagcgtttctggataaaatgacgtggatgaaggcggtgacggaaaagggcgtggtactgggaccggagccgtggcatatgcatccggtggtgtttttggaggcgatgaacagttcatctaaatggtttgatattgaaaaatttattcaaaagtataaagaaaaacattctgtagtttttgggttctatgatcgcggaaacaaaataaccatcccagcattgactcaggactctgaagagtcattgcgaaagcttttaaatgaagtgaagaagcagtattataattattttgacgagtttaatgaaaaatttgtttcgtatatgcttgctacaataagaatagagtcttatgactacaggcaaagattgttctttaaaccaattagtgaagatatttcatatgacaaggcggaagtcgattatggttcaggtccaacggcatctaaccgacaaagagctatgttgaaccacaatacaaatattggtgatgggtataaatatcgcggacgtggtttagtacagttaacatggaaaatttcctatgagaaatttaaatccataactggtatagatattgttaccagtccagatctctgtcttgagatcagcactgctgtttcaattatgatgaaaggtatgaaagatggtggtttcagggccgggcatacattagatatttatttgggagcaggtaaaaaggattactttaatgcaaggttaatcatcaatggctttagacatggtattcctgataaggctgatgagtttaaagattatgctgaattatttgaggtgataataaatgagacaatttag

SEQ ID NO: 190405 - DNA, 288 bp, Klebsiella oxytoca
atggaaacaagggtgcaattcagaattgaatctgaaacaaagaaaatggcaaagcaagcacttgaaaaaaaaggcatttcacttagcgatgcgttaagagcgtttctcgataagttagcagcaacggagaaggttatgacgaaagaagagacatggctgaaagagcagatagaagagacattctcaagagtagacaaaggagagatccgctattactcagaagatgaagctgacgaacgcatgaactccttcatctctaaaatcgaacatcaacacgaaaccgcataa

SEQ ID NO: 190406 - DNA, 396 bp, Klebsiella oxytoca
atggcatttgttagtcaggttgataagtccagggctgcttcgagcaggattggtgattcgtctatagtggtcactcaatcatacaaggcgtcaactaaggctcaggagctatccattaggttgacatcgttagtgttatctaaaggaggtatgaaaattggtgattacgttgatgttctttatgacaaggatagtgatcgctggatgttaaggaagatggatggaggtttaaaaattactggtaaggatgatgcccctacggggttgattagatataccctgaaggatacacatgcgagatttaccgaagataaagagcacctccctattcgtaaatcctctattgaggattcactggagattgaggatgggcagattgtatttaagcttgattag

SEQ ID NO: 190407 - DNA, 264 bp, Klebsiella oxytoca
atgatttcgaaggttctatgggcagataaggcattatctgatcgagagactatctttgagtctaacgataaggtttctggtttgtcgtatgcaaaatcagaagatgcaaaaattaaacgtgctgtttctacgataaaacgaaacaacaaagtaggcagaaatgacctggatgagcgaggttatgtctatgttctacctaaaagatacaagattttgtatcggctgactgaggagcatatttttattgagcgcgttttctactga

SEQ ID NO: 190408 - DNA, 861 bp, Klebsiella oxytoca
atgaaatattttaaaatattggtattgatttttattttttccacaaaattatcatatgcaatagatttcaaattatcattatctgaccaagttgaagatgttaaatatttttcattgcaagtacaaaacaataataaaattaaaaatatagacgtggcccttgaaggtgacgccaataatgtcacgataaaacaatattattcttttcaatgtaaatgggggagggtgactggtgttagattaagtatggactcatcctctgctgatgggccattatcgtttgacaatatatatatgctggacagtgagttaaatatagtttttgcaaagtcatatagccgtgtgggtaaaaaatggattgatcctatcagcttaaacaatgctgtttgtaatcgtttaagtgatggtttaaaaaacgatttgtcatctaaaaaaaattatattgtagattttgagtctatacagcaagggccttttactctaaggggagtagataatgtatctattaaatatgttagatccgactctttagatcttattcgtgaagatgtaagtggtgaaacagtgattgattcaatagaaaatcatgataatgtggctccttcagttcgtacagtcttttttatgaatattaattctgaaatgaatattattagtctggtctcctggggaggaaatatggacgaaggtaattattataaagtatatgggtatacatatgatgaaactgggcgcatgcatatcaataagttcttagataaggactctaatttgtcaggttttaatgcgaaaataaagccatttaaatataaaaatgcagactctataaaaaaatacatacttaagaaatataattcctag

SEQ ID NO: 190409 - DNA, 1173 bp, Klebsiella oxytoca
gtgacgctgaataaggcaccggagagttttgacctgattgatggcataaaacaaccggataacgtggtgaaggggattctggagcagttgtataacgcggcacaggatgaaacgcgtaccactcatgccctgaacaaatataactaccagcgattgctggagatgatcgacagtaaccaggacggctattactcggaacaggaatatcttcaggcagttcacaatgtttcctaccgggaccacctgtaccgtgtgatagcgaagcatgccagtgaatggtactacggcaaggatgacccgctctggaagacataccttgatacgttaaccagggatgcgccgttatggaaaacgtatctggaagcgtttctggataagatgacatggatgaaggcagtgtccgaaaagggagtagtgctggggcccgaaccgtgccatatgcatccgattgtatttttaaatgctataaggaaagggaagccaaaaattacgcgagaaatgctcaggaggatttggaatagcccaggcaatgtttctgacgctgttcttgatattgttgctgaagagttttcgaataaatttgaagcgtgtaatattaataccaaaaatagactttatcatttttttgcgcaaatttttcaagaggtagggcctgcgtttaatttaaatgagggttttaactatagaccacaagtgcttatagataaatttgcatactatgctaatcatcctcaagacgcgcaaaccgatggttatatcccaagaagacaagccgcaaataaacaaaatattgccaacagggcctatggtggacgagagggaaataatgatattgcaagtggagatggatggagatatcatggaaggggaatgaaacagttaacattcagaaataactataaatcttttacaaactatcatgaaaaagtttggggagaacgtgttgattttgaattgaatccagaccttttacttgatacggtttatgcggcaagatctgctttatatttctgggaccagaataatctatacagaagagctgacaatggaatcagcagggttgtatctgactcaataacgagaattgttaatctttatgataatcactatgaagatagacataatgatttaattagattcctgcaagagagtatttttgatgaaatattttaa

SEQ ID NO: 190410 - DNA, 468 bp, Klebsiella oxytoca
gtgtcggataacctgtttaacggacgacgtttccgggcgctgactgtagtggataattttagtcgggagtgtctgacgatccatgcaggaaagtcgctgaaaggtgaggatgtggtcggtgtgatggaggggttgcgggtgctgggcaagcgcctgccggtacgtattcagacagataacggcagcgagtttatttcgaaaagtctggataaatgggcgtatgagtacgtggtcacaatggacttctcccgccccggaaaaccaacggataacccgtttattgaatcatttaacggcagtctgcgggatgaatgcctgaacattcactggtttctctcgctggaagatgcgcaggacaaactcgacaactggcgcagggaatataatcatgagagaacgcattcatcattaaatgacatgactccggctgaattcatccgaagtctccggaaagacgaagatctctga

SEQ ID NO: 190411 - DNA, 243 bp, Klebsiella oxytoca
atgggcaagaacggttttgatctggcaatcaaacgcggggtgcagcagtttgagcatttaggccaatgggctaaggtctgctattggggatacagtcttgatgagttttcatatggggatcgcgttttcttccagaaccagcaaggtacatactggttaggcacgattgagcgtgattgcttcgtgttcatactggaaacgccgctaagttcagtactggaagaaaacgcgatccccatatga

SEQ ID NO: 190412 - DNA, 510 bp, Klebsiella oxytoca
atgaaactcgaacattgggcaattccgatcacttcattggacggtatgttactcggcgtagagctggaaacccgtgtactgataaacggttgccaggtactgatgggggcaggaaaagaaagtgaatatatccgtcacgtggtctatcagaaccagttaagaatgattcagggtaaagccgcatggttcaaagaaaaggggctgttgtgcgtgctcagtactggcacaggtacacgctatgaagatctaccattcatacggtacatggctgctgaaccactgctaacggacggttacgacttagttcgactaaatagacggttcactgaagaacacatagagcggctgatcttcccggtactcatcaataacatcatgcagtactgcgacaaggtgatcgtacaagtcagcagcaatcgaaatcacaggattttacgagagtcgggggtatgggcagtacagggagagtacaggccaatccgctttgaacaatgcgaacaacttctatag

SEQ ID NO: 190413 - DNA, 780 bp, Klebsiella oxytoca
atgcgttttatgttaaatatcaacaatttactaaattatcataatgccaaaaaatatatttctttaaaagtaacttttaggccccgtacccccttcggccaaaaaattttcgcgataggctggttgtggtggccagcaacaactgctggtcagttgcaactgaacagaattggcatcattgatatgactgataatcaaataagcagctcaccgcccctgtggcgtaaaatcctcgagggcatccaggatgatttccaaaattcgctgggatatcctgccacattgcgccgtcgcctaaacaacgggaacctgccagtgagtcacccgcaactacggaacacgttctggctgcgttccgtgatttgttggcaaacctggctcgaatacgaaaaacaccgtattcgctacctgcgtctcggccacgacggtgattttgattacctgcagcgccatattccccagctggatggtctgatcaacagtaagatctcagaaagtttttgttgtgatattacggcagttgggggactgagtgcgtcgagagattgtgaccaggacctctccagcctggatgcgtttgcacagcagtgttgccaggaattggcaattccgctgaccagagataggttaaaccgtaatctcagccaccacggcctacggctgtcagagatggtattcagccagtttacctggatgcctggccggctttactggaacaatgtcgacggcgcccaccattttgcagcagcccgtttcctggtaatgactccaacttattga

SEQ ID NO: 190414 - DNA, 1161 bp, Klebsiella oxytoca
atgaaacgaagaactcggattaactacacgccagagcagaaggcaattatctgggacagatataagcaaggtgattctctacatgatatcgccagaatgtttgacagatatcattcttccattatgcccactatccaccagacaggcggctaccgtcctcccgtgcgaaaacggcaccgattagcgctttcgcttgatgaaagagaggagatatccagagggctggtagcaaaactcagtatcagagacatcgccgccaaattatcaagagcgccctcaacgattagccgcgaggtcaggaggcacggtggtgcaaaacaataccgtgcagcaaaagccgatgctactgcgtgggaaaatgcgctgagaccaaaaccttgcaagctaattgaaagccccgcattgtgtaaaatcattgcagagaagatgcatcaggactggtcaccggaacagatcgccggttggctgacacgctgttatccggataatcaggaaatgcatgtgtcacacgaaacgatttataaaacgctttttatacaaacccggggagcattaaaaaaagagctgcagcaatgcctcagaagcggaagagcagtgcgtagatccagaacgtcatcgcttaaagggaaaggattagggtcaatcccgcacacgatacctatcagcgaaaggccacctgaggccgctgacagggccattccaggtcactgggaaggtgacttgattcagggctcgaaaaactcctatatcatcaccctcgtagaacgtcattcccgttttgttatgctggcaaagatcagagacaacaagaccataacggttatatctgcactcatcagacaagcccgggaattacctgctgagctttataaaacattaacttgggatcgtggcgctgaaatgaccagccacacacgatttactgtagcgacagacattcagatttatttttgtgatcctcaatctccctggcaacgtggctcaaatgaaaatacgaacagattgctcagacaatattttccaaaaggaactgacttatcggttcacagccagcaaagacttaacagtgttgccagacagctcaacgaaaggccgagaaaaacgctagactatgaatcacccgcagaacggttcaataagtgtgttgcgtccatcggttga

SEQ ID NO: 190415 - DNA, 378 bp, Klebsiella oxytoca; identical to SEQ ID NO: 15904

SEQ ID NO: 190416 - DNA, 276 bp, Klebsiella oxytoca; identical to SEQ ID NO: 101357

SEQ ID NO: 190417 - DNA, 357 bp, Klebsiella oxytoca
atgaaaactaaagtgttgttgatttgcatttttactttttattcattaaatgtttttgccgcttttaatgatgctgaaaataaacaattattggaaattaactccaagtccgagagattgaagaaggatgctatatcgttattaacgcaagcccaacaaaatcaagcgaacgataacccagagaaaaaacatttaattgattcccttagggcgtcatgggatattaccattgaaaaaagatgttcactggagacatcagaatcacatggtactgatgcggaaatttctgaagtcaataattgtttaactaaaggttacaaggaagaaacggaatattttaataatatgcaaccttaa

SEQ ID NO: 190418 - DNA, 273 bp, Klebsiella oxytoca
atgcattatgcgaccagtggcatcatccatgaagaccagaagacagcattttggggctctgccttcgaaccagtcatggtgagagccatcgatctgaaccagttcgccgagacagtcgcgacgatagcgtggctggtaaacccgggttcgccggcgggaatgaggacgccagagaccgtcggctgtcatccagttacggacggtttcaacagagagatgaatatgatggcgttcagccagtttttcggttgcgagcgttgggccaaaatctga

SEQ ID NO: 190419 - DNA, 1335 bp, Klebsiella oxytoca
atgcgcgaaattaaagttaatattgctcggtttgaaagagatagacttcctgaactgcttcaaggagagattaaacctgagcaaagtatttctctttcacggcttgcaaatgaaaaattcattgcatctggtctgatagctgtttgggcaaaagaacgagatttccttaatccgttaccacatttcatcgtcggatcttccagttctttgtccgatctttgtgcatggtccgctgcattcatgaaaaatatcggtccgctaacagggattattagacttgtagagccatctcagatcaaggaattccctaaagtagaaaacaccatagaagcaaacgatcttgaaatagttagtcagcaaatatcgataatcttagcggaagtaattgcaagatcatctttagggaatgctccagaacgtattgaattgagaagctgcttgagcactgtttcatttgctatatttttagctaaaaatcgtggcttatatatagaaccgaaagaaatcgcatctaggtggactaaagctcgtggccttgtgcaggctaatgagcaaaatcgagtaactgaatccgtattgtcattttattcacatattaatcaatatcctgatgcaaatgctaatcaattggaacagttttataatcatggatttaatatttctatacaaaatcctgagctccctttagagcttgaaataatcgaaaataattacttaaagaaattgcttgatgatccaaaaattaataaaacacccaaagaggatttggttaaaattatcgatgatatcattccgaaattcacccgaggccgtatggatgaagcatttgactatctcccttttgcaaggctgatcacacaaactacaagtggtttggcaaatcaagtagcgttgttaggacagtcagcttcagctttaccagagctaatattaatgcttggagttttgaatggttcatccccggctcctgatatattatcatcttataatggagtaggttggaagcttctttcgcgtttgacagaacgttttgaccctttcaaacgtcccgattgtgacatctcttttgaagaggcttatttatatacagggataaatgataacaccaaaatcgtaggggtgaataggcaacgaattgaaatcgcttggggtgtaaatgtagaagttgttattaatagacctagcgggaaaaatattaatgcttctagcagctcatctaaagataaaaatcaggtttctgatattatcccaacaataagctttattgagcgtcgacttaaggatgctatggaaatgattcgatatataaaagatcagcaggctggtaagcggtag

SEQ ID NO: 190420 - DNA, 1155 bp, Klebsiella oxytoca
atgcaaacatggtggcgcagtgcgaatgagttagatgaagaccagcgaaatataatgggacttcctcctgacggcagcttcgttttaaagggggctcctggctcagggaaaactaatcttttattaatgcgagctgcatatctaacttcacttagacgcaatattgccgtagtagtactaaatcgcagtcttgccgagtttatacgctccggggctcaagcatatgggcttgaacctgatagcgtttttactagccgtggtttggtggctgaaatggctcgtgaagcagggatacctttagacagaaatgcatcttatgaagaggggcgtgaagaagcattacagacccttataaatattcataaaaaaacgaatggtccaatatatgatgccatttttatcgatgaagcccaagatcataacgctaaggaaattcaggctttacgggctttgacaagagatatttttcttactactgattctcgacagatgatttatgctggtgggactaaggcggatagttttgctgatcttgttgatgatgtgaaaacattgaactttcactatcgatgcagtccgcacatttgtgatcttgctgatgctattggagatacattttcaactggatacgaacgtattgctcctactagtcggtatcctaccgatgcgcccaatgagatagttcgtgttttcaatggtaatttattaaagcaagcagaattaattggtgagcgtttggctgggcaagtcagagcttatcgagggcaacttataggtgtttttgctcctaaacgtgaagatgtggctattataactggacatttgcgcgatattggactcggtgacttattgaccgttcaaactagcgatacgggttacctacctttggacgaaaaaagacccatttgtgtatctacggttcatggtgccaaggggcttgagtatcaggctgtacattttgctgctgcggagactgtgagaacatgcggttcgaaccagaaacgtgtcgcgtttacaggtgttacacgtgccaaatcttcattgtctgtctatcatgatgggcaattgccaggatatttaaatgctgcgcttgatccctatagagatcaaacagaccaaactgattggacgagtatattcaatgcgcgaaattaa

SEQ ID NO: 190421 - DNA, 1347 bp, Klebsiella oxytoca
gtggataaagctaaagcacggcaaatggcagaaggtctaaaaggtcgcgaggttggcggttggctggttggaaaatacctcggtagtggaggttctgctctggtcgtggaaggtaagcgtgagaatcaggaaatagcgctcaaaattattgatcctgatttagaagcaaaatttgggccagaaaaacaagaaattagaataggttatgaacagaaacttgttggaaggtctcacccccacttagtcaagatttatgatggagggagatgtaatgtgacgaagttattgttcgttgcaatggaatacctaccatttaaaaatcttgacgaacttgatgaaccttttcctcgggataagttgataaaaattattgatcaaattgcgcaagctgcacgttttctagaggaattggacatttgtcatagggatattaaacctgaaaatattgtaattacgcctgattatgaacgagcaatacttcttgacttagggattttgatgccgataaacccttctgaagctcaagatgccggaaccggagagaacttcataggtacgatccgctatagcccgcctgaatttgtatggcgtcgtgaacaagacacgaaagaggggtaccgtgcgattactttttatcagataggtgcggttctacatgatttaataatgggtaggcgcatatttgataatgtatctgggccgatggctaaattaattgatagtgttactaatcaacaagtaattatcgactccaaggatgtcgatcagcggttgataaatcttgctcgtgattgtctccaaaaagattggcaaacccgcttacgcctcgtggactggaattcatttggtataaatgtaacacataaacatgatccacgtgaacgtattagagctttgttgaagagtggtgatccaactacggtcggtcaatcaaatcctggaaaaatgtctcatcaaaaactaaaagagattgctctaataataagggataaattacgtagtttatgtgtagaaaatgaagagttacctagggctacggtagactttagtatttttgctgataaagtattcgtttgggctgagtttgaagcctcaactcaacatcagttacataaaggtgcacggctaacggtctcagcaaatccagttgagccagagacgatcatcgtagaagcaactgggacttggggcgaattagattcgactgctcagtggaatcggataggtactcttcgctcacgcattgaagatattactgacaatttagaacaagcattatacgagcttgttgctaacgctatgtcacatccagaaccaaaaattggcacatcaatacaaattatgtga

SEQ ID NO: 190422 - DNA, 507 bp, Klebsiella oxytoca
  misc_feature (415)..(424): n is a, c, g, or t
atgcattcattaaacatatccatgcaatccaactacagaaaggtttttgctttccggttcgacttgtcagtaccggagggaatgtctatctcggaaagtaatgtattagtgagtgatctttttgaacgattgagagggcgctttaaaaagaaggcgtggaatggacaaccaatcaaaaaatttgcttacggttggggtcgagagaaggaaaaagctaagcaggttcactatcactgttggattttactacctcgctttcaggttcaaagcgctggttttggtagcagtggtatggttgggttgataggtgagctctgggatgagttgacagataataacggtcgagtgcagctagccaagaatggccaatacgacatcgtaagagacgatcacgctactgttgtagatttgtggnnnnnnnnnntttgtggaacgcatttcatacctcgccaaaaacagaggcaagttttcgtctggagagggtcacaggatcttttcaacatctaa

SEQ ID NO: 190423 - DNA, 1917 bp, Klebsiella oxytoca
atgaagccaaagttgtattcgtatgtgcgtttttcatctgtgaaacaacgggagggtaactcgctggagcgtcagcaagatactgcgctaagaattgcatcccgctatgacctcgaacttgatacaacagctttccacgatctcggtatgtcggcgttcaaaggtaaaaacgcgcatgaagggaagctatcagagttcattaagcagattggggtcaaagttcctgttggatcgtggttggtagtcgaaaatcttgaccgtataagccgtgatgatgcctggagcgcgttggatattttcaaaagcatactgagtaagggaatagtcgttgttactggcatggatgaaaaggtttataagtatgcggatgtaaagaataatccaaccgacctaatcatctcattgctaatgttcacccgtgcacacgatgaatcgttaacaaaaaagaatcgggttgaatcccaagcccgctctctgataagacataacctaacaagagaacctggaacgccagcaagagcaatagaatctgtgggtcaaaatgtctggtgggtagacacaaaatctggatatgttaccccacacccaacgtattttgcggcagcgcagaaaattatagaactaaaacaaggcggtgaaactcttcttggaatccaacgatatcttaacgaacactatcctgcccctaaaaagagggtttataaagaccaggcaggccaagcactgacgtccaaaacggaacaatggggcaagcatttaattcgaaccttcttgaatcctactgttcatgggcaaaaagtctttacgctggataagcgcgatgaatcaggtattgttatatacgatccggattcagaaaagccattgaaggaaacgttcactattcctgattactacccggtattgatgtcagaaatagactatctgacactttcaaaactggatcgacaccgagcggttactcgaagctcctcaaaatacccagagggcaaccctgagcccgaaatcccgttactatcaggtcttggaattcttttctgcgggaagtgtgggtcttttatgttcaaatcaggttcaaacaaaaacaaataccgttatatctgtggctcaaaaattgttcagggtaagccttgcggtaaaaaaggttttacgtcatatcaacttgaacacactattttgcaactaatcgctgatcacgtctggaacaaccatcaagaagataaaacagcctggtacgaatctgagattacaaaggcctcagaatctattgataagcttctgaaactggcaaccctaacggacagcctcgaagagctagcagaacagattaattcgaacaaacataaaaaagtgacgcttgagagagaatttcatcagtacaaaatcaaccgttcagaaattcaaactactggctgggagcaattccaacatttcgatgttcatgacacaaagaatcctaaccgtaagcagattagactgaaggtaaagcaagccatcaaacgcattgattgttatgacattgatgggcggcatggtcatttcgaagtaaccttcgccgacgagacaaagcaaagaatagtgattaagttcaatcgcaaccgatctcctggcgtttcgtatgtagaagcacaaactgtcaacgatcatgacttactaaaaatgcaaggacttgtgttgcactccttcattgatgaactgatttcgcctgacaaatttgcgcagcatattaaggaaaaacacgaagccagtcttcttaacccgacgtatatcaccgagtgggaagacctggtaagccgagacaaaggcaatggaatggctatcatagtggatggatctacaagcaaaacttatgcaactgtcaacggtactaagtacgagattaactcgttggaagacttagaaaaactttcacactaa

SEQ ID NO: 190424 - DNA, 864 bp, Klebsiella oxytoca
atgaaactgttaaaatcatataaaatcattatcttacaatcgttgattctttcaggcacaacacttgcggcaccaggcgacttcaatggtttccgcaatattggttctatagatgagctaatggcacttccacgagaggagctttgttcgaacggtgggccatcgcgaaatgaaatccatcaaatactccttaacgggccactagctctacctatgtatcaaaatgatccaaatgcggcccgcatgcttatcaatgaacaatcccaaaatatcaatgccaagattaaacaaaaatgttcaaccaaagagaatgtttccactcgaaaacttacaagggcaatgcttcgtaatgaagaggaaatgtgcaaagctggtgcgccaactaaagatgaactcaaggttcttataaaagaatcgaacgaaattgatgaacaactaagagcaatgccttatgaaggacgccttcttatggaggaggctgcaaaattaaatgggactacattccgtgaaatgttcatagatgatgtgactaatgctgcggcaaaaaattggcaaaaagcctgttcagaaaaatcatatcttaaaaagagtgaaaaaaaatccacgcaagaaagaaaggacaacaatccgccttcaaatatcaaaaacgaagataactccgatgtcagtcaaaaagcatacaacatcagcgatcaaaaattaaacgaaacatggaataagctgagtaaagatatacgtaagaaattactaccagcacagagagaatggataaagtcaaaatctatttgcaatggtaattgggtatgtctcactgatataacgaacaaacgtactattgaactggaagctgaaaatgcaaactaa

SEQ ID NO: 190425 - DNA, 351 bp, Klebsiella oxytoca
atgcaaactaatgagctggttagagtattgaaaaacgactggctggaatcaccttgtagtaacttctaccacgggaaatatacggttggacgatttcatctaacagatgtgctcatcgtaaaatatatgatgctggtacatgaaatcgatataccagattcattggttagtaatattttcactgacatatcagatatcgacacccgcaaggttatgtatatggaatgcagtgatatgttatcgaatgacactatgaacgagatccgtaaagaggttaaatccccaccatccaacatgagattatatcgtaacggagatcaagtaactaacatagaaatcatggaagaataa

SEQ ID NO: 190426 - DNA, 990 bp, Klebsiella oxytoca
atgcaacctaaaaatctccaagcgaagaagcgacaccattatgtctgggctagttacctcactcggtggggaaatgggacgaaaaatgttttctacactacgaaaactggaaagattgcccatgacagcgttcgagccatagctgctgatgactacttttacaaaacgactacactggcacaaaagcatgttcaagtgatcaaaggcttttcacacttaagtccagaacatctccaaaaacaacatatgtcatacctaaatgattttctgaaagtacagcaattggaagccatctaccgaagatctggcatttcgaatcaagaggctgagacactcttacacgcaacaaaatgtaacattatggagaatcttcattcatcgcatgaagatgctgctttaaaggtgcttaccgcgcttgcgggccagaaactcgaaattttgcaagataaccagaacatgatcgagtttatgatgttcttcggtcaacagatcgccagaacaaaggcttaccgggacgaagtattaaaaagattacgtcgtcatagtaacttagagcgtgaagtagctgacgcgatagcgcattcatggtggtttttaagctatatgttcgggatgaatattggattcagcctatattcatcccgccatgactcaaaccatgcgttactggtgaatgatactgatatcccttttataacatcagatcatcctgtcgttaatgtacacccgtgtgtctcagaaagtgtattttctgtacctgaacatgcagatttttattaccctatctcaccaaatattgcttacattatctgcgattcaaaacgatttacgcctggtaaacatagtgtaagcaacgatacggtgactgaattcaatactaaaatcgcaacccaagcaatggtgcacattattggtaataccgatagtgttcttgctcctctcaagaaacatattggtctccgctatgcaaggaaccaaagtgtctcttga

SEQ ID NO: 190427 - DNA, 657 bp, Klebsiella oxytoca
atgaataaccttagcctgactactgccgaatttgaacgcctactaaaagtatttggctggctactagggatattgggtttgctaatttttctgatccagtggcatttcttccaacaaccaataccttccgccgcatggaaggcattctgctcatctcttgggttttgtgttttattcttcggtatattcacaaaagtggcctggcgctgtcggcatcttgccaagtggatgaatcgaccactcgtccatggagtttgggtgggagagttaaggtctgattacggtgctgttgatggaaacccattggtcgttcctatcttcttcgtaatacggcagacatacctaactctatctattcaatcttttacagagcggcaggaaggagaatcccgtcttgaagctcttttaagaagttcaaaaacagacgttacaagactttgctatgtatttgaattaaggaaaattttttcaggagcacattcaataacaagcggtgcaggtgaattaaagttggccggagatcaattatctttgaatggtacatattggacaaacacaccaacacatggagagataactttgaggctcatcactcgagactgtgaaggtatatcatcgtaccaagatgccaaaaaacgcgatataaccttgctgtaa

SEQ ID NO: 190428 - DNA, 1149 bp, Klebsiella oxytoca
atgtctagttcaactttcagtgaccgcattcagcggatgaaaaaacgccgcaagggctctccggaacaagttaaggttgcaatggagtcttaccgcggtatggcaatggatggtcttgagagttatgacgttttaaagagtgtactttcctcccaagaagaatgggaacgtcgtggtaagggggataatgcgacacgttacgtcataggcgctatgcaacctgttgaatcccaatatactgaggtatcagttaagacagcgaaacgtattgaaaaccagcttgaaaaaagactgagtgaacaccagcttgattttcgtctgcaaggctctgttgctttagatatccacattaaaggtttcagtgatgttgatttgcttgttattgataagcaaatgctaatgtatgatcgtggtggggttagacagcatctatatacaccaacaacgaagaatgaagatgatgtgatactcatattacgcaatatggctcgcgatgaactcaaaaaggcatttccggaagccgatgttgatgatgagaataataaatccttaagaattactggtgggtcattacaacgggaagtagatgtggtacctgcaatctggtgggatagcagtgactatcaggtgactcaggaagagagtgatcgcggggtaatgattcttcacagagagaaacgtgaacgaatctataactccccgtttgtacatatcaagcgaattgagagtaaatgtaaccgttctaatggcggtttgcgtaaaagtatacgtttattaaagacagtaaaggctgactgtaaagatgaaggtacagaaattggccttaacagttatgatataacatcaattatgtatcacgccgatgaaaacaatctccgtcatagtgcatattatgaactagcagttttggtggaaactcatcgatggttaaactatctttgtgcgcatcctgatgaagcaaaaaaaatggatgttcctaacggaactagaaaaatattcgaagatgatgcttcattaaatgagttgttcaaactgactgacgtgattaataatctggttgctgaagtgatgaacgaactctctggcgattttggacgccgattgacagtcaacgaaagtgaattgcttaaaagccatcgagtgctgtag

SEQ ID NO: 190429 - DNA, 618 bp, Klebsiella oxytoca
atgaagagtcatgagtatattgttatatgtggcctaaatcgtagtcaggttggcaggctgcttgctattgtttcttcgattttgtctgcttttatgatctttgcaatgttgaaggcggctgagatgcttaagcatttcaacttcgacagccatattcctccatccctactatctcttggtggggctgggacaatttacttggttctctataaattactggacaaatcactatggagagtaccgctaatcgggagagctctgcgtgttcctgatctatcaggtaagtggcaagttcatggcctgacgaagacggagggggggcaggcctgggaaggtgttctaacgatcgtacagtcatgggataaggtccgaatcgttctcaaaactgctcagtcgcaatctgatagtgttactgcatcgataatttatgatgaaagcattggttatcagttgctatatcactacaaaaaccaaccgaaaatgggcgaagagaatcttcatgcgcatataggattcgcggagttctggtttaatgaagatttattaacggctgaaggccattattttaacgctcaaggccgcgctacctatggcaccatgacaattgagaggatttga

SEQ ID NO: 190430 - DNA, 780 bp, Klebsiella oxytoca
atggatattaatgagttcccaccgggagtaatcgaacatcttggttggtatgtatatcgcctgattgatccacgagatggaagtactttttatgtgggtaaggggaaaggtaatcgcgtttttgctcacatgcgcggtgaagtggctgccgctgatgatgatgagcttctcagtaacaaactcaagcaacttcgtgagattagattagctggtctggaggtcatccatgttatccatcggcatggtattgccgatgaaaagactgcttacgaggtggaggctgctctaatcgatgcttacccaggtttgaccaacatcatgaatggtgcgggcagtaacgagtatggcgctgcacatatcaaagaattaatcgcaacctaccagcctgagacaatagagtttaagcataaggctttgatgatatctgttaacagaagttcaaaggacgttgatctttatgatgcagtacgcttcagttggcgtgtaagtctcgaacgtgcaagtaaagctgaagttatcctagctaccgtaaaaggaattgtcaggggggtatatgtagctgatgagtggttaaaatctacccgtgataactttcctgaaatgcgccaatgggatgaagatgatgagtttgaagctactcaaaatgcacgctttggcttccgtggacgtgtggcatccgctgaagttacacagctttatctcggtaaaaaactccctgatgaccttagaaagaaaggggcaatatctcctgtgaagtattctccgaattttgattcctaa

SEQ ID NO: 190431 - DNA, 1392 bp, Klebsiella oxytoca
atgaaccttaaaccacgcaactttgatgaagtcattgaaaatgtattagttgataaaggtgtttgcacctctgatatattgaataaatattcaaaaaaagagaaatcttattactttaatcagtttctgatcggagccaccaacaggagaaagcatcccaaagatgagtacgctttcttactttattcctctgagagacgaaaacatataccgagagcttcgagatttgatgacatgataaaagatattcctttaatcaaaaaaagttgtaattactgggcagataattggcctaacggctatagagtaactagtgctggatataacattttttcggcatgttgcaaggcagttcctagtaaatgcggtctctataacgaaggaaaaccatacaacccacctcggaatggcatccgctcccaattaaaaaatagcaataaatgtagtatagaagtcaaggtccctaaagaaattcttcttaatgagttatctctcaggcgatacctgaagagcctccaacagagtgacaaccatagaaatatgattagtcaaattgaatacctgttaacgcttgcgaaagcgagtaaaagtggtttattaccgataacatacgtgcaaagtaatgggggacgtttatatgcagaaggctctgtaaatcttcaaaattgtaagagagagattcgtaaagcttcattggctggcatgtttgatgtggatatcgagaattgtcactacaacttactggaacagatgtgcgctcggatcggtataaaaacgccgcgtattagccattatgtccgtaacaaaaaacaggtccgtaaagaagtagccactacgttacaatgcacagaagaacaagcgaaggtagttttgattgcccttatttatggcaccaatctagggcctcgtggggtactaaaaaagctggacattgataccagtgacgaggctctcaaagatacctggattagcaaactagctgaggaagtcaccaatgtgagacgttatgtgattgaggattatacagcgcggactagaggctgttacaaaatcaaaaacgacgctgggatgattgttaagaccataacagaaaacggagaatcggttaagaaatcaaaattattagctcatcttctccacggtgcagaatcactgatacttcagcacatgattagctttcttggtgataatgttgtcttgcttcagcatgatggtgtcacatgccccaatcctgtagatacagatgaactcagtgactatatcgcagagaaaacaggctatcgtgttcaatttgatattgagcaactgaaactagacctcaatgtcgatgccactgatagatttcaacaacaagacctggaagacatttttgaagatgaaatggctgcgtga

SEQ ID NO: 190432 - DNA, 1221 bp, Klebsiella oxytoca
gtggaatgggaagaatttaagcgttctctatcaaatagggatctgaatggcttggactccgagttcacattatcgaccaagaaattagtgtctatgtttaacgctgatggcgctcatctcaataaatggtgggttatgacgccagttgagtggatgtgtccatgctgcaaaagaaaaaaatcagaaatcgtgaggttgaataaaaataattttttaacatgccaactgcatgagcatcatgaccatatgaaggaagtcgtaaaatcgcttttcgaagacatttcaataaggaaaaataatatcgttgcagatgagcactctgaaaaattcgcaataaaaatagcttttgcattatcagcttatgacaatacagttatatgctttgattgcaataaagctgatgcggatgctaagcggttggttcagtgccataaattcttttctttttctccaaaagaaatctccgaatttatttgcgtcaccccaaatagtgaacatcgaattgatattgaaatagctcggaaagtttgggcgagattagagtcagtattcaagatacgcatgaatctggctgagcaatttgcgacaatagcggctgataaacaagactggtatcaaccttcaagcagaacagcgaaacaaactgagcgtattgccactcatttttttggtatgaatggcttgtttgactttgataaggttgaaccggaaaaattgctatataccagtgaaccatttaaaggaaaagtcaattcctggagaaacaaaaaaaatcctgttgctaaaaggtctcctttacaaaatgaaatttcccacctttcatctactagaggtaagtactggaatagatatgatgagcaatggtcttgcccatgttgtaaacgaagtaaatatttctgtgtcagagcatctaaaaagaacccatggatactggaaataaagaaagtcccattatttcaatcgaaaactggtggcaattacaatgatatagcaatgtgtgctgattgcgttgattctgcgataaatttagggcgcgaaattattaaaatctctaacttacacacgtcgtttcctagttctgttgttacgttagaggaactttctcagtttataattcctcgaccacactcaatgcatgcatttcacaatcacttaattgataaaatgctaccatcaattattgaaagatacaaaacctccttaaacggaaaaaacaggtaa

SEQ ID NO: 190433 - DNA, 1671 bp, Klebsiella oxytoca
atgattgccgttgaagaatggcaacccgctgatgggctgacacttgaaccaaatgcattacgtgcagcaaaggagagtgatcgttgccttgcgctcactgcagggccaggggctggtaaaaccgaaatgcttgcacaacgagcggatttccttttgcgtactggaacatgtcggtacccaaaacgaattctggcgatttccttcaaggttgatgctagcagaaatttgaaagagcgcgtcgaacggcggtgtggttctgctctagcttcgcgttttgatagctataccttccatgcatttgccaagcgtatcattgatcgtttcagaccgatacttacaggtagggatgctctagatgcaggctatgccatagttgacaagaaaaatggcccttctcggactcaaatagaattcggtgacctagttccgttggcaatcaaaatattacaaagttcaaaaattgcccgtaatgcaattcggcaaacttacagcgatatttttctggatgagttccaagattgcactaatttgcaatatgatttggttaagcttgctttcctggggactagtcttcgcctcaccgctgtaggtgacaccaagcaaaaaattatggcttgggctggtgcattggatggtgttttccagtcctttgctaatgattttaatgctgtatcactaaacatgtatcgcaatttccgctctaaaccacttttactgcaggttcagaacaaaataattagcaaactagatccttcttctgtcatggcagatgaacaattggatggcaagggaggtgaggtttatgcatggcgttttgaggatggtcagaaagaagccatttatttggctgatttgataaatggatggataaatacaaaacagttacctcctgcagaaattgcagtcttagtttctaaacagttggatctatatgcaggtcaccttatggcagagttagcagcgcgtaaaattccataccgtaatgagcagcatatgcaagatataacggtcgaaccagccgctcgtttgatcgtagattatttgtcttgtctgtacggacagcgagagcctaagtcttggattcgattgatgaatcagctcataccttttgcagatgaagaggtccagtcaagcgtacgaaaagaccttgatcagttgataaaaaagcaacgcaaagaagtgtccgatgccagaaaaactgactcacctcattctggaaggtggcgattcgtcagagattttttaaaacatgtaggttctgaaacacttgtcgcgctatcacccgattatgaatcacgcgaacgcttactggaggtcgttcgtgatactaaagcacgaattgaagatttgattaaaattgaatcagatttaccttgcgcattagggagatttgctgatgatcaagccgtaaggattctcactattcataaaagcaaaggactggagttcgactctgtcataatcatggcggttgaaaatgaaatattttttggcaacgaagatgaaaatcgctgcgccttcttcgtgggggtctcgcgtgcaaaaaactgtttgattttaactcatgcagatcaacgggaacgtcctgctgatgcgaaacgctgggatattagacgaactgctcaatctgagtattttagttatgttacgccatttatagtgaagcaatga

SEQ ID NO: 190434 - DNA, 909 bp, Klebsiella oxytoca
atgacgaaaagtgcggatgcacaagctctcattgctacacatgctcccacaatgttgcgtcgtgttgctcctgagctaatacgatatcttcggttaactcagactcgaaatacacgggtaacctgtatcaaattgccagagaaaactgatgatgcacacaaatttgtccgggaagccgtccaggcatttccagagatctatttttcacgcttggtagtgctcggcgaaggcgatagtgaagagattgtattgccacgtttgtttcaggctaaaggcgcgccagttgatgagtctgcagtcacgatagcacctctaggggggcggcatgtcaatcatttttggcgtttactttcagcgttggaaattccgtatttgacgcttcttgatctggatgtagcccgctatgcagcaggctggggacggattaaatatgtcaatgctcagtttgctgtgtttgagccaagcaaagaacttcctgctgactggccaattccaaaatggaatgacaatacgtcgcctgtgcgaacccaccatttttttaatggtggtactcatgacatttttgttgaactcgagaatagatcgatatttttttcctctccaatggatttggatttttctatgcttttggcgtatcccgaagcgtatggtgttgctgaagaagagccagatgagtcaattattaaagcggtgcttggtaaaagctatttcgattcgacccaatataacgaagaagaaaaaaagttatttgtcacttatcatcaaagtttcaaacttggcagtaaaccagctgcacatatagatgcgttggccaagttaaatgatgacgagttacttgcaaaaatgcctgagtcactaatcagacttgctgatgcagttattgccaaattggcagagttaccagaatga

SEQ ID NO: 190435 - DNA, 1011 bp, Klebsiella oxytoca
atgaagctggaaacaattcggttatcaggttttcagtcttttggtcttgaaccaactgaactgggcttagaagatattacttatttaattggtcctaatggttcaggtaaaaccgctgcactacaggctttatgccgactctttgcgtttgaccctacattgcgacgcctccaacgttcagatttccatgtcccttttgatgaggtagaggttccttcggagcgccagttgtggatagaagccgattttttatttcccgaacttgcaggtgatgaggataatagcaccatagcacctcattttggccatatgcgattggacgagccagaaggtatcccacgagtgcgttttcgcctcacggctacgataggacttgatggagatattgatgaaaccttaatgtatgttcttgatatcaatgctgatggctcgcctcttaataccgcacaggttccccggtctgagcgtaatcatattcaagtccactatctgcctgccagacgtgatcctgctgaccatattacttacggcacgaatgctttactcggccgtttgcttcgtgcggtacgttgggatgctgagcgcgatacaattaaacaattgaccgatcaaataagcaacagccttgctgcaaacccttcagtaaatgcatttagtgaaacattaaaaacaacctggaccacccttcacaagggaaaatttttcgctgatcctaaaatcacatttgttgcttctgagattgaagcactgctgcggcatttatccgtttcctttacaccagggcacgatgattcacttgttgatttctcgcggttgagtgatggccaaaagtcaatgctttacctttctttagtattatcatctcaagctattggcagagctgtgctagcggaggaagatatatcctttgatcccgataagctacgcccaccggtgtttacgttggtcgccttggaggagccagaaaatagtctttctcctgaccctggcccaaattcagtgcagtgctaa

SEQ ID NO: 190436 - DNA, 135 bp, Klebsiella oxytoca
atgacgttagccctcatcgttgacgacgacaccgtcagcgatcagcccctcaggtgccagtacaaagactggcgcttttatcagatctccattagttcaaacagatgttcgctcagacagctggtatggcggtaa

SEQ ID NO: 190437 - DNA, 1251 bp, Klebsiella oxytoca
atgtctcttaacgacacaaaaatccgcaacttaaaaccatccgctaaacccttcaaaatttccgattcccatggtctgtacctgttggttaatccaggcggttcacgtctctggtatctcaaatatcgtatcaatagaaaagaatctcgccttggcttaggcgcctaccctgacgtgtctttagctaatgctcgtcaacagcgtgatggtatccgtaaactcctcgcgcaaaatatcaatccagcacaacagcgctctgctgaaagaaccacttccacaccagaaaaaaccttcaaacatgtggcactggagtggcataacagcaaccgaacatggtctgagaaccacgcatcccgcctgcttgccagcatgaacaatcatatattccctgtgattggacacttgccggtagctgaactgaaacctcgtcactttatcgacctgctgaaaagcattgagaaaaaaggtctgctggaagtcgcagcacgtacccggcagcatatgtgcaacataatgcgtcatgctgtgcatcaggagttgatagagcacaatcccgcggcaaatctggagggtatcatcgccccgccagttaaacgtcattaccccgcccttcagttggagcgactaccggaactgttgactcgcattgaggactacaagcaaggacgagagttaacccgcctggctgtctcactcacccttcacctattcatccgttccagcgaactgcgtttcgcccgttggtttgagatcgatttcaaaaatagaatctggaccattcctgccactcgcgagtccatccccggcgtccgctactctggccgtggtgcaaaaatgcgtactccacatatcgttccactctcctgtcagtctattgctattctgaaacagatacgggaaatatccggacatcaggaacttatattccccggcgatcataatccgtataaaccgatgtgcgaaaacacggtcaataaggcgctacgcctgatgggctatgacacaaaagatgaaatctgcggccacggatttcgggcaatggcatgtagtgccctgatggagtctggcctatgggcgcaggatgcggttgaacggcagatgagtcaccaggagcgtaacagcgttcgagcggcttacatccataaagcagaatatctcgatacccgtaaagcgatgatgcaatggtggtcagattatttggacagatgcagagaggaattcgtgccaccctatgtcaggggccgccagtag

SEQ ID NO: 190438 - DNA, 222 bp, Klebsiella oxytoca
atgcgaaaacccatttatcacgtatttgtcacccaggaaagtcaacccgatgcacagggcgaaataaacacgtattggaccagggttggcgtggcgttcgctcataacggtaagtctggcctgaatatcatgctgacacccggtattgctgtctccggcaagctggtgctgcttgaacccagagaagatagcggcatttcgcaggataccgcctctgcttaa

SEQ ID NO: 190439 - DNA, 1032 bp, Klebsiella oxytoca
atgtcaggtggtatgtttgttggaatgaacaacactatcactggcggtttaaatgccgtactacagggacaaacttccgtgtacggcaatatgatcagtgttatcgccgtcagttcatttacattatttatcacttatcgtgggtatcagactctggcaggaaaacttcaaaccccgatagaagatgtcgtatgggatgtcggacgaatgttgttgatcatgacgttcgttttaaatcttggcagttggctggatttagccatctcggccattaatggattaaaagatggtgtcagcggcgacgataatgtctgggcattgctcgataccgtatgggaaaaagcacagacaatcggacaaaaactttatcaaaatgatgattccaactatgtaaaacttaacggagggattgctgaagttctggtctggggaggcgctatcgttactctgctattcggctcgaccgttaatcttttagccgaaatcaccattctgttaatgaccactaccgcgccgatttttattttctgcctgctatatagattcctaacctccatgttcaataactggttgaaaactatacttaccgttattctgacgattatgttttcagcattgtcaatcaggatagtgattaattatctgaacgaaatattggataaggcggtcagtttcgcggataacgccaatatcatcacgctcggcgttcagtgctgtgtcgccggtgttatttcaggcgtcatcatctacttctcagcaaaagttgccagcgcattaggcggtgccgccgtgcaggccgtgttacagggtgcagccataagcggattgcgcgggctggcgagcaaatctgccgacgtcgccggacccggcataaaggccgggggccgactgaccgccaaaggtggcatggccgcagccgcgacaactggcagattcattgccgcaggtgcgggcaaaaccgtgagcgcctggcagaaacgtgccaccgccattgacagcatgaaacgccagaaccagcagcttcaccgttaa

SEQ ID NO: 190440 - DNA, 1623 bp, Klebsiella oxytoca
atggaaaaaaataagagcggtgaaactccaggtttcaaacaatttgagaatatagatattctcttatcgcatagggagtgctacggtaacccaaagacacctgaaaaaataataggagataacgttagcttagagacattatcgcaattatctattttatcatgcgtgagtaacgaagagcgaaagtttagggagtggtctaaaacaaatattccagcttgtaaaggaaatgctatcgacgaacgccgtatatatggaagagcgcagattatagtgtgttggaagctcatgcttatcagcgcaaataactctaacttgttaattgaaaataatgcagaccctacacattcattaagtatactgcatgaattattaacgcatataaatgattacaatatctcagagaatgtccatcaatatgttataaaatcggctatcattcgttcgagagatgattttaaattcaaaatgtatcgtgcgtacaagatttttattgaaggggcgaatatctctcagtacgtccagttatttcaagaaaaatcaggattctcaatagagagttatattaatatcatttacatgataatttgccggtacatcgtaaaacgaagttctgtaagatttgacattatgttatgtagtgactggatcatagatctgcgtaaggctagccaagaaactgggattaagttgcaattactaataaatgtcatgaaatcagtctcattcgacctcaaggaaggcgcagatttttctgcatctaccatcaatgaaccaactaattgtgatatatttagaaataaaccttttctacgactatctgaaacagaatatttaccaatagaaggtagattcattgaggagcttttgtttgacaatttatttcataaaattcacctctactcaggaaaaacaaagggatttttagatgattttggagccgactttgaactatacgtacaatatatatgcaaagaatcatgcgctttagaaagaactggtttgtatgaatacattcctgagttttcttatggtaaatctaactcaaaatcacctgacgcaatgattttatgttcgaaaaacaaaacacttcttgcatttgaagttaaagcggcaaggtatttagactcaatactttcttccgaaaataacagtaatgctatagaaaaaagttttaataagctcaaatataacccttggaaacaagctcacactgcaatacaccggatagtacttgaaggacgccacccgaagattatagaaggtctttcttgtatgtttgttagtataacaatgaatgagattccgctctctttgcatgatcacaaaataactataggagaccgtgatataagttattgtttctattcccttggtcttcatacatttgagcttcttttatctgttataacccaaaaacatgattatacggcatatgatattttaagaaatgcctacgaacaaaggcataaaatttccactaaaacgtatttattgaggttttacagaaatcaatcaaatacaagtaacttggatcataaagttgcacagtttataagtgtaaggcaccgaaaatttatggaaagctgtaagtattccacccaagtggacctagatctatga

SEQ ID NO: 190441 - DNA, 561 bp, Klebsiella oxytoca
atgatgcacgcatgtaatgcttttgatgggacgtcaagaaagctgcatcctgaaatgcgaaaacatcatcgcagattcactcagtcacttagagagcattacgacatttttgggccaatggctctgcctaacataaatttggaaacaacgttctggcccgccaaggtgagtgatcagcaaaaggcaactgatcgacctgatattgctgacttagtgtactgtatacacagatgcactcatggtcatggggacgagcttcctgaagggtttgaactaattcctgatgccactaataagttaaccactacaagtattattgcaagcgccggtaagattcgcctttctgatagaactatttttggattacttggcattgcagttctttgcccagaaaacagcggactacgaattcctgatggatataacctcacatttgcaggagaagtactgatgattaatgactggtggggaagggctgaagacttcaaaatattagttgaaaaacagaggcttataagtgttaaacttgattttgaagattggtgtaatgaactaaactag

SEQ ID NO: 190442 - DNA, 1104 bp, Klebsiella oxytoca
atggcagatattgatgaggatactactccagatggtatcgagtctactgagctcagtcaggatgttctatctttaattaacaatggattggattttttagataaagcccgtaaagagcttgaagattcaaagcccaaatactctgtggtgagtttctggacagcggtagaaatattgttgaaagtaccgttggcacacgagcactggtcgttagtctgcaatccaaagaaaccaataaaaaagcaatcttacttggccggtgattttcagtcagttacctacgaagaaactcgtgaaaggttaaaggatgtgctggaaaaacctcttgataaggaaacggatagtgcttttgataaagtaagaaagcatcgtaaccgtttggttcatttctatcatccaacttttactgcggatgaacaacataatatactcaaagaacaagctgatgcatggtttgctcttaatcgattattaagggatgagtggaaagacatatttcgcgccaaacataattggaaacttgcatttggcgaaacacgccttattagggggagtgagttttatgcaaaagtgaggcttaaacaagttcaacctgaactggatttacttgataaagatggtattcaaatcggtaattgcaacgagtgccatcaggatgcaacggtaacaaagacggacgctaccagtaatgaaaaccgtcaacttcaagttaccagatgtaaggtttgcaccagtatcgagcggaaagttacattaatttgcccggactgcaatgagtttcaaattttagctgagggagattctgatttcgaatgtggaaaatgcggctcgaattttaatagatatgatctgctagatgatgatttgtttcatagttctgatgagcatgtgtattccgttttaccagcaggatgtaccaactgtatggctcatgaaagtgtttgtaagtttggagatggttatctctgtactcaatgtttattatattattcagaacttcaagcatgcaattgctgtggccatatgagcgatagcgttcctgaatttagccatattaaaggatgtgagttttgtgatggtgatcagcgatatattgatgattga

SEQ ID NO: 190443 - DNA, 177 bp, Klebsiella oxytoca
atggatgaaaggccagcctttcacgaaatccgggcgctgaccgctcacctattcgatctgcaaggtatagctccacaagggcaaatggcgcatagcgatgcgaagtctaccaagatttatacgcaaaaccatatcgattgggttgtcgtacctaatggggaaattaaatctagctaa

SEQ ID NO: 190444 - DNA, 1152 bp, Klebsiella oxytoca
atgaatgtggttgatttatactcaggggttggcggtttgagtttaggtgcttcaagggcgggttttaatatagctggagctgttgagctagatgcgcatgctattttttcacattcactgaatttcccaaaatctaatcatatacataaagatgtcagtaaactttcagcccaggatattttatcagcatgtaacataaatgaaatagattgtgtaataggtggtcctccttgccagggattcagttctattggcaaaggaaatgctgatgatagccgtaatgagttatacatccatttttttaggcttgtcagcgaactaaccccaatttgttttttggctgaaaatgtgcctggtatcatgagtgagaagtataattcagtaagagctaaagcattttcgctggtaaatgaccgttattttttgttacatccaattaaagttaatgcctctaattatggtgcaccaactacaagaacacgtattttctttataggcattagaaaagacttttcgcagcaattaaaagaatcggattttttcccaaaacatacagtagaacaaacattagttaaagaagcattgtatggtttacctcgtgtaataaaaaaggaatggcaggaagaaagtcagggttggcgcagtgtgaaaatggataagacgggatactttttcgatcgcctttgggggcatattcctaaaaatgtgggagatattgaatcacttaataatttgagtaaaggattggtttctggttttcttggcacagtgcatagtgaacaaatcattgaaagatatggaaacctttcattcggagaaaccgacaaaatctcacgatctcagagattaaatcctaatggcttttgcccaacgcttagggcaggtactggtagcgacaagggaagtttccaagctgtacgaccaattcatccaactcaaccgagagttataaccccacgggaagccgctagattacaagggtttccggactggtttcgatttcacgcaactaaatggcatagttttaggcagataggtaatagcgttagtccactagttgccgaggcaatgctattacccttatatcatttctgcgccaatgtcaaaagagaaccttcgaataccatggaacaaccttgtagtattcgatga

SEQ ID NO: 190445 - DNA, 927 bp, Klebsiella oxytoca
atggaatcattaaggagattgaataattacacaaatatttccgaatacgtttatataggttttggtggaccatttcttgaggatttcaaacaagttcataacctgctaaaagtaaataagatgatttccattgagggtgatgaaaatgttcatcgccgacaagaattcaataaaccactatcctgtattgacttaggcaatgctcccgagatgagtggcgactttattaaccgctataactttgatgataaaaccatcatttggctcgactatgcaatgccctcagagcttaattcgcaattaaatgaactggttaatctgataactaagcttaagccaaaagatatttttaaagttactttaaatgcaaatccggaatttttaggtaaaaatcctgaagaactcgatccaagaccccatagatatcgtagaatttctgatattcttacagaaaacttcaccccaacaaatatggaagaaggagatgtatcttttaaaaagtatccagcattacttgtaaaagcgatgaaacgagcggtcgagaatggtctgaaaggacgacctgatataagaattcatcccttaacatcatttgtttataaagatgggcagcaaatggtcactttaacagcgattgttcttgaaaactcaaatgaagaagaggccatttttttaaattcatcccgaataaaaaattggcccttctatgctggtgaatggagagcaccgaaaaatatcaatgttccggcaatgtcgttaaaagaaaggattcatatcgaatcactattacctgaagcttctgtagataatatccatgaaaatcttggttactacattggctctaactcttcaggagccaatgtagatctaagtaatttcatcgaatactacaaggttgttccatggtattcgaaggttctcttttga

SEQ ID NO: 190446 - DNA, 1425 bp, Klebsiella oxytoca
atggtttcaccaaacgttacaatcacagcattcccggcaaaacgattttttgttgagatgcttaccagggatatagagttatctgactctatcttagatttactggataactgtttggatggagttttgaggaaaaataacttcaccccagaacaaacattcggaaaatcaaatgtttacgatgggtattatgctcatattgaattcgatgagaatagtttcaaaataactgataactgcggtggtatcccagggaaacttgctgaaaattatgcatttagactaggaagaccttcagaaagagaagctgaagagttaccaacaattggagtctatggcataggaatgaagcgcgcaatttttaaaataggaacctctgcacaaatactgagtaaaacagatagtgagcaattttcggttaatatcacgccagaatggatgtctgatgataacaattggtctttagaattagaaagaaacgaagtgaatcttgatgaatcaggtgtaagcattaatatacaaaatttaaggaaagatattaaagcttcactttcaaaagatcgtggattcgaagcggaattaattaacatcatagcaaaccactatagcttaataataaaaaaagggtttgaagttaaagttaacggtataatcgtaaaagcaaacagcacaagtttaatacttgatgaagattcaataaaaaataacactgacggtatcgctccatacgtttataaaaatacgactaatggcgtatctattaaagtcgctgtaggtttttatcgtaatttaccaagtgaagaggaagaggataatttattatctggacgttcaacaaccgaaaaagctggttggaccattatatgtaatgaccgtgttgtacttcatgctgataaatcaaagcttaccggatggggagaagctggtgtacctcaataccatacacagttcattggtatttccggagtagtaattttcacatcttcaaatgccgaattgctccctattacaacaactaaacgtggtgttgatggcaactctgaaatatatctctcgactaaagattttatgagagaggggcttaaattctttacagatttcacaaataagtggaaaagcaactctgatgaaagaaaacagatcgtaagcacggcatctaatatggtttctacaacggaaactgattttacaaaatccattccgaaggaaaaatggagtactgtacgccgatctattggtggagaagtattcaaaccaaaactaccattaccgcgtgatacagacccagtacgtcagataaaatttagccgtcgtcatagcgaaataaaattagtatcagaatttctttttgatgatgcaactcagccgccgactgaagttggccagttctgtttcgatgcatttctgaaaaaggcaaaaaaatga

SEQ ID NO: 190447 - DNA, 927 bp, Klebsiella oxytoca
atggcaagaaatataatgatggattatccaatccccgcctactggcaggactttgaaagactgacatgcgaattatgccgtgagctatggaaagatccaaacactcatcggcatggaagagctgggcaggctcagggaggaattgatatatctggccgtgataatacctataatggtcaaagagttgtagtccagtgtaaaaaaagagtgtggaaaactacagcttcaaaggaaacacctgctagttctctttcaattcaagaaatcgatgatgaaataagagagttcattgactcaggaaaaaaagttgatcgttatattattgcaattactggaatgcgggataaggtgcttcagaattacattgactctataaatgactctaacatttatacttttgaagtaagtatttggttctgggatgaatattgtgaatggttaagtgaaaatccaaagatagaagcaagttattattacgatattgttaagtttcgtgatgcatatagtgttgaagaattgttttgcgatatgctctattctgcttttgatcgaccggcctttcatacgaaattctgttttgaaaacagtatagacaaatttttgcagtcgcttgaggctattcaacaagcattaactacaggtaatcttgtaaacagagaggggcatgtacaaaagcaggtacgcatccctgaaaggaaaagcttacctcctgaatataaagaattgaagaagaaaattcaatatttaagagattacacaacacaggaggtacgtgcaggaaaaatcacgcagcagaatgaatggttaatcataagtgataatgtcactgaaagaaaaatgaatgaatttagagttgaaatcataaatttattaaacaatattctcgaccattatggttttgaaaaattttcattggaaaactattaa

SEQ ID NO: 190448 - DNA, 486 bp, Klebsiella oxytoca
atgactatcacactacaggcagtaaacgagctcattcagtcgctggagtctgcgggcgagctgtcgattaaagagacaaaggttatggcgctggcgaaagcgtttaagcagctggctgcggagaatgcactcaggcaggaattcgtcaaaatctgtttccgcgcagcagcagacggcgcatcgctggatggctcagatattcaggagataggtgagcgcctcgggctgtttggtcgcgaaacataccaaccgatgctgcacgggtatatctgtggtcatgaggctggcgaagatagcgtgtatgtgatgaaaagcgcgccagccaccgatcgcatcgtagccgggattaaggctgatggggtggaggagttcgtatccaacaccgtgcataagatttttgatgaaagcgaagcagtatcagctttggcttacctttccttggctaattcacacgtgaagcagctgcgcgagggggccgacaaatga

SEQ ID NO: 190449 - DNA, 285 bp, Klebsiella oxytoca
atgagtgaagcaaaaccgcaggacggcaccacagtaaagggctaccgcacattaaccacgggcgacattgagcgcatgaaccgcctcaaaggtgtcagccggcatttttgcagtctgctcgatactgagcgagaggttgcaacggctgaagttgtcaagcgtggtagtcaggccgaaaccgagagagcagaggctttgcgctgcatggctatcgcgcgcaccaaaatgcaggaagcctgtatgtgggcatgccgcgcggtggctcgccctgacgctgattgctaa

SEQ ID NO: 190450 - DNA, 201 bp, Klebsiella oxytoca
atgttagagcgttatatttcacaaaccgatgctgaacaaaacagattagaagtagttaaagctgcgcttgagatagctaaggccgctgtaggcgctactggagcgaatagtggtattaagtcaggacatgacttagataatgttatcaataaaatcgaccagttggctgacgctattcaagcagccattcaaaagaaataa

SEQ ID NO: 190451 - DNA, 327 bp, Klebsiella oxytoca
gtggaaataagcgaggagcagatagcgcaagtaaagacacatctcagggttgatgacagcaatgaagatgcgctgattgccgcttatacctctgccgcggtcgattatgttgagcgatattgcgacggttcgctggtagaaaccttaacgcctgtagaggaaggcgaggcgccgcctcgtgaaattctttttacctcaggtatatgggctgcgatgttattgcttatcggtcactggtatacaaaccgcgaagccgtagcgcagagcctgactgaagtcccgctggctgttgaatctcttctgatacggcacaggaggtggcattaa

SEQ ID NO: 190452 - DNA, 2421 bp, Klebsiella oxytoca
atggctggcaagtcactaggtactcttactatcgacttgattgcaaaagttggtggatttgtttcagggatggataaagctgaacgtgcatcagccaagtggagtaagcaggtacaagatgatgtggcaaaatctagtgcagcgcttacagggataggggctgctgctattgctgctgggctagctgtaggtgcctccggatttcaattgcttaaatcaacatcaaggcaaatatcagaaactgatcgctgggctaaatcattacagctatctactcaagagcttctcgcttggcagtttgccgctgaaaaggctggtgtatcgggtgatcaaatggctgatatctttaaggatattggcgataaaattggcgatgcagtattaaataaatctggtgaagctgtagatgcacttaatgcccttggattatcagctgaaaaactatcaaaagttagtccggataaacaattgctcgctataggtgaatccctagagaaaattagtactaatgccgagaaaacaacgattcttgaaagtttgggtaatgacctttcaaaattgcttcctttgtttgataacaataataaaaaacttaaacagtttattgatcttgctaaagattatggtgttgctcccgatccatcctctattgatgatttagtgaaggtaaaccagctctttgaagatatggaggctcaagtcgctgggctcaaaattgagatttcggcagggttagctaaagtcgatctaaaccctttacagagttcacttgataaacttcatgatgtactgactgatcctgttgttcttcaaggtatttctgatcttgtatcagaagttgccaagcttgccggatggcttgtaaaagctgctgcgggagctggccaacttgcctctagcactggtaaccgtttcgcggcacttagcggtaaaattgacctctcgaatattgaccaggtcaatgaacgtattacttatttgcaaaaaagccttgagggaagaaatggtttttactctaaaggtgagtcgatgtttggttggcttaccggagtagatgacagcgcaaaagccctcaatgatgagttactttctcttatagaaacaagagataaactttctaataccagcagggtatctctacctcttcaggctgcaacagtaggaactgacaatccgtttgcactacctgcgggaagtacgaatggtaagcctgctaaaacaccagtaaataaacttgataatgcttataaagctgtggagcagagctatctacgtcagattgtattaaccgatcaacttactggtaaaacgaaagaagtcacagagcttgaaaaactgcgattcgatttatctactggaaaacttgtaggtattaataaagagcaacagattaggctggaagggcttgcatctgaaattgataaatacaatgccctgtcaaaattccgtgatttacaagatgagttattaacacctgaagaaaagctccttaaaaccacgaaagaacgctttaaagtcctgaaagatattcagggattgcccggagtcagcaaggaagaagtaaaaaaagcaaccaaagctatcaccgaagattcatttgccgatatgcctaactttactggtatagaccccatgtttggtgggcaactcggtgagctaagaaaagtcgatgatgcgcagaaagagcaggaaaagtggtatcagaaccaacttgatttgcttgaacagaaccgacaagcacgcgctgaccttaatgaagaatgggacgccagagaacttgagttaaagaaaaaacaccaggatgaaatgaacaggctcgacgatgcccgcaatcaactgatgttaagtagtgttgttgatggtctgggatcaatggttgatatgactcgtactgcttttggggagcaatcaggcatatataaagcagcatttgctgttcaaaaagctgcagctatagctcaatcaattattgctattcagcaagggatcgcgatggcggccgcaaacccatttccctacaacctcgtagctatggcaagtgttgcagcctcaacagcgagtatcgtatccaatatttctgctgtggggatggcccacgatgggcttgatagtgtcccagagacgggtacatggctcctgcaaaaaggcgagcgagttactactgctaaaaccagtgcaaaacttgatgccaccctggatagagtcagcaaagacactactggtgggaagctcccggatgtgcatatcagcacaactgtaaatggtgatccagaccagagaacgcttcttctgttgaaagagacacaaaagcaagcagttcaggaggctctcaatttgagtgcaaaccagatcgcaacagggacagggaaaataggtaaggccatgggaagtggttggagcaccgggaggaagttaacctga

SEQ ID NO: 190453 - DNA, 483 bp, Klebsiella oxytoca
atgacgatacttaatcgcctctacgccagcagcgggtcggaggtcattattgaaacgctgcagataactatcggttctgatgttcactacctctgccagggttatgaggacatcaccgcgacgacggagaacggcgagaccgtaacgtttaccgcctgcgcgctggatattgcgctgccggcgcgtaatgaggacggaacgcaggacctgaaattcgctctgtgcaatatcgacggcgttgtgtccacggcgatccgcaatgcgctggggaaccgcctttcggcgtcgctgacttaccggagttatatctccacagatttagcggcgcctgcagcggtaccgtatacgctgcaggtcaaatctggctactggacagcgacagaggtgcagatcaccgcgggctatatgaatgtcctcgatacagcctggccgcgataccgttatacgctccctttattccccggtctgcgttacatcagctaa

SEQ ID NO: 190454 - DNA, 381 bp, Klebsiella oxytoca
atgtttaaccctgacaaatacctttcagtcacctggctgaagggcggcagagtgtatccgcaactcgactgttttggcctggtcaatgaaattcgccgggatctaaacttgcctgaatggcccgatttcgccggggtgactaaagacggtggcggccttgatcgtgaagcgcggaagttaatgttaacactggaacgttctgacccttgcgagggggctggagtggcttgtttctctggttcgacggtgacgcatgttgctgttgtggtgaaattaaatggcgaactgatggttgcagagtgtgggagcgccactaatgtgacgttcctgccgctgagtcgctttaagcgccgctatgtccgagtggagttctggaagtga

SEQ ID NO: 190455 - DNA, 1143 bp, Klebsiella oxytoca
atggcagctagaccgcgtacccataaaatcactattccaaacctatattgcaaacttgataaacgtaccggaaaggtttactggcaatacaaacaccctatctctggccgttttcatagcctaggcacggacgaagctgaagcaaagcaggtggcaagtgaagcaaatacgattattgcagagcagcgcaccaggcagatccttggtattaacgagcgtctgacacgcatgaaaggaaaccgcacggatattacagtttcttcatggctcgacaaatatgaattggtgcaggaggaaagattgaaacacaacgaactgcgcccaaactcttttcgacagaaagctaaaccaatccgtctttttcgtgaacattgtggtatgcaatatcttaatgatataacagcacttgatatttccgaaataacagatgctgttaaggcagagggtcataacaggatggctcaagttgtacgcatggtactaatagatgtttttaaagaggctcaacatgctggtcacgttccaccaggatacaacccagcccaagcaacgaaacagccacgaaataagataagcagacaaaggctatctctggaggaatgggaggctatttatacatctgccgaacaacaacaaccttatttgcaatgtggaatgttgcttgccattgtaacagggcaacgcctcggagatatttgcaatatgaagttttcggatgtgtgggatgatatgctgcatattgagcaggagaaaacaggaactcgtttagccattcccctttctcttaaaaatgaagcgttaaatattactctgagtgatgttatttcaaaatgtagagatgctgtggtgagtaaataccttgttcattttcgccatagcacctcacaggctagtcgtggtgaccaagtgtcagccaaaacacttacttcaacgttcaagaaagcacgggataaaagcggtctcacctgggaagagggaacagcaccgactttccatgaacagagatctctttccgagcgcttgtatcgtgagcaagggatagacacccagaaactattgggccacaaaacaatgaaaatgactgacagatacaatgatgatcgcggtaaagagtggatcgttgttggtaaaaaaacagtatga

SEQ ID NO: 190456 - DNA, 396 bp, Klebsiella oxytoca
gtgccggaaaaatacaacatcggtgatgccaccatgcgccacatcttcacaccaaccggcatgactaatgtctctgacatgcaggcggtatttgacagagttgaagctgttttggtgggaatggagcagccagcaccggtagtgctggatggttacgtgatggtgcctttgaggttaactgctgagaacggcgctaaggaggcgctatccggtgagttttcagaaaccaggtttgtaaactgcccggaatgctttggtgatgatgaatgtgaaacatgtgacggtagcgggagaattgaaataacagtacctgtcacctggacgactatcaaagctatttgggctaaaggcgttgagcatttcacagctacaccaagggaggtgaaaggtgaataa

SEQ ID NO: 190457 - DNA, 882 bp, Klebsiella oxytoca
atggaagataagctctatgtatttaactacacacacaatagaaataagatttttgccaatctaatcagcatcatagatgggattcttgcagatggatacgtacgggatgaagaagtgctatatctcgatacttggctacttgaagccaaccagaccattagaaatggtatgatcaaaagtctaagcacaagggtatctaaaatactggccgatggggttgtttctgatgatgagcgcagtgagttaaagaaacatcttaatgatatacaaaaacaaatacttgatatacccgatgtggatttattctccaatgagtcagatctgcatctattgaatggtctttgcaaaggcttaatctcagatcgaacattaagtgaagaagaggtgagataccttgactggtggttaacgcagaacggggcgttaaaaagtaattacccgggaaaggaattatacgctttagtaaaagagatcctgagtgatgggataatcacagccgaagaaagtgaaaatctacacaaggctctggtggattttaccggttgcgaccttacaagcggcgtcgtagatggtcttgccactaaattaccattagacaatgcagctgaagtatctgttgaaaataagattttttgcttaacgggcatctttttggcaggcaagagagcccatgttgaagacttaattaaaagaaataatggcctaattgccagcggtatcacaaagaaaattgattttcttgtaattggtacactttcctcacgagactggaaattctccagtcacggaaggaaaattgaaaaagcagtttcgtatagagataatgagggagctaagttgaagatcatttcagaagaaatgcttttcgatgcactaccatga

SEQ ID NO: 190458 - DNA, 639 bp, Klebsiella oxytoca
atgagccaagctcagttagctgacctaatcggcctttcacaacaatctgtggctaaaattgaaaatggcgatacgcttcaaccaagaaagatcaaagagatagcgaaggctctagatgtgtctcaaaaatggctacaactcggaattgaggaaaatggttctatttctgattttatagttgaggagcttgaagaagccaaacttgatccagaagtgtttgccaatatcccaatactcgacattgagctttctgctggcaatggatgtgaggccgaaattgtggaatcaattgtcgattctttccctcttcgtcgtttcgatcttagaaaggctggtgtaagtcctgctaacgcaagaatagtaaaaatatggggcaacagccttttaccggtgttgaataatggtgatcatgtagcaattgacatatcacagtcgaaaccgatcagagatggcgatttatacgctgttagagatggggttttacttcgggttaaagtactaattagccaacccgatggaggcttaatactgagaagttttaacaaagaagagtacccggatgaagtactcaactttgatgaaagaagagccagaatccacgttattggccgcgtattctggtcttctcgatcatggtag

SEQ ID NO: 190459 - DNA, 243 bp, Klebsiella oxytoca
atgacgcctgagcagttagccctctcagaggcaattgaaactgctggtggccagtctgagttggcccggaagcttacagcaagctctgggaaggaagttaaacaacaacaggtatggaactggctcaacagagaaaaaagaccgcccattaagcaatctcagcacattgagagcgttactggtatcccaaaagaaagactgcgtcctgatgtattccaaaaatttacagattcagccggttaa

SEQ ID NO: 190460 - DNA, 315 bp, Klebsiella oxytoca
atgttcttctttcgcttcagcaagatctggcagaagtggatatcccaccggaagtactggcacttcctgaatacgttcgccagtctgacgaattcgaaattctctcccgaggtcaatatcgaactgaattgccaccttgtcaggagcatgaatgggatcatacgattgcagagagagaccaaggccagcgtaagccacaataagtgcttcagcagcttccagctcggtgactgtactacgatgttcttccagtttttcctgctggtatacgcggtacaaaatggcattggcttttccaatgagccagttggctag

SEQ ID NO: 190461 - DNA, 477 bp, Klebsiella oxytoca
atgatgaagttaactatcaggcagcaggaagttcttaacctgctcattgagtaccagcgcgcccatggattcccgccaaccacctatgaactgaccggcatgttggggtgccggtcccccaatgctgcggcaagtcatctcaaagcgctggagaagaagggcgcgatcaaaatcacccgtggggtttcccgcggtataagcatcgttaattttccccctcagagggaacttgtcataaattttaataccctcgttaaagtcaaacttagtgatgtcgcccttgtgtttttggagcgtcagcatgaagaaaaccgtattcgccacccctccatttttggtgagtttgaaccaccgtcaaaggatgaaaatgggtttacgaaaatgacgctatggagcctcatgtccgaactggggcagatatgttattgcggtggggaagtccctttcgtacttaaaattcccctggaggatgaatga

SEQ ID NO: 190462 - DNA, 792 bp, Klebsiella oxytoca
gtgaaaatatttgttagttggtcaggtaaccgtagtaaagccgtggcagagctgtttagtgattggttaaagtgtgttatccaagtttcacaaccatggatctcaactagagatattgaccgtggggcaatctggttttctgaaataaatgataaattaagggacgtctctgttggtgttgtttttctaacacaagaaaataaagacaaaccctggattttatttgaaaccggagcattagctaaaggattaacctcaaatagagtatgtaccttccttattgatttacaaccagctgatttacaagatccgttagcacaatttaaccacacccttccagataaatctggattatgggaattaacaagaacaataaatactagtcttacagataactctcttgatgagaaaatactagaaaaagttttcaatacatattggcctcagtttgaaaatgatttctcacaagctcttgaacataatcctataggtgaagtcatccctccccgttcagaacaagatattctttctgaaattttaaacaacactagagcactaacacaaaaaataaggaaacttgaatatgaagtttatataaaacctaacagcataaataaaacacttacaacaataactagtgagaccatacctcaagataatgaagatatagcaattcgtcgtgctgaagttgaacgtgatggatttatttacattagtacagaaaatggaaatcttataagaagaaaaaagagcattgattctactgcaacccaaactaaaaacaaaccttga

SEQ ID NO: 190463 - DNA, 306 bp, Klebsiella oxytoca
atgtcccagcagaaaaccgaaacattgagtttccgaccagcaagcgaaaagctaaccaaagaacttgatgggcgcagggtcattcttctgaacccctgtgatggctggcatgttgcccatattattgcgcttgaggaagatggcgaggtgtatcatgttggctcatatcagtttgctggggatgagtttgagcctcacgaattctatgttgcatgggccttattagcggattctctttccctggctaacaattttgacgatcagcgcttagggaggcgcgctggcgagaatgggtggcgaaaatga

SEQ ID NO: 190464 - DNA, 279 bp, Klebsiella oxytoca
atggtaaatgatccttcagcactggttaacgcactcacctgtactgtgattgttcttgctttgatgttttaccaacgcggcggatcccgacacaggccgggaatatcattcctggcttatctcatagtgctggtttacgccagcatcccatttcgtttcctatttggcctttacgagtcatcccactggctggtggtgctggcaaacatcctaatctgcgccgccgtgttatgggcacggggtaacgtggcgcgtctggtcgatacactgaggcactaa

SEQ ID NO: 190465 - DNA, 225 bp, Klebsiella oxytoca
atgtacagcagactgttagccatatgcctgatgacgatgttgatcgggagctgcgcgagcacttcacccgccccggtagtcgttgatacggcctgcagctgggtgcggattatctacctgaccgaccacgatatcgacgtgctggatatgcagaccaagcgcgacatcctggcgcacaacaaagcagtgcaggccaattgccagagcattacccctactcagtga

SEQ ID NO: 190466 - DNA, 3525 bp, Klebsiella oxytoca
atggcctttaacccggagctggggagcacgtctcccgctgtgctgctcgataacgctgagcgtctggataagctggtcaatggagatgcggccaccgttcccgaccgcgcaggtgatccgctgtactcatggcgtggaatccatcaaaatctgatcccgctgagtcgccagtacatgacactggcggcggcgcaggcggacattgcgaatatcccggtgggctctacgacgtattaccgcagcccggacgatagcgcactggctgttgaggttatgaacgttagcgggacattgcagcctactggccggaaaatgctgtcacaacaggcctggctacacctgatggctgattcctccagctctcttaaaacccctgttccggtgacattttcaggcgagctactgaacggggctactggatggaatgggtttaatatttgtccgtcccagtactatggtgggtggtcgattcctgccggggcgacgggatataactcctatgtttcacctaaaatcacgctgacaccttcactcgccagcggactggcgggcaagcgcgtgttgttcatttttggcgtcacccattctgctgcgctcagaagcgcaattgagaacccgtcaaagttagctccttacgcctggatcaatggggttgctgttactgatccggctttacaggctattgctatctcagataccgaatcggtggtgctgttcgaaacggatattacttccggcacgacggatattgctattgctctgcaatataaagtcagtgcgcccgccgctgcacagctgacattttttacacattccgcgttttaccgggtgctggatgcccggagctttatttctgcgctggatgcatggtcccgaagcaaagccgttccaccggtggatagtgggtcagtggtgatcatgccagccgtcatcgaactgtttaacggcgccacacgcgacgcagccacgggaaaaattacactgccagtcggggccacgggttacaacacgtactatggccggttcgatgccgtccataacaaccgtaatcgcgccggtgaaactatccgcctggtagcgatttttaacagctctacgaaattcattcagaccctaagctcatacaccatcggcgtggcgaaaaaactggatggtattcagtcaactggtgcgcaggtggcaggatcagagcgactgcgtgtcattgatgataatacgttcatgatcagtgctgattacgtcatttcaggcgctacatcggagctggtttctgtctattttcagctgaaagacagcacctatacggcaaccgcccgtgacttcacctcgctgtcggcatcctactttttcgtttctgacggtgattttcgtggtgactccgcccgtattattaatcagcggaagataacgtcaggaaatatggttaattcgctgctgagtgtcggcggtgaggtttttaatgggggcgtgctgaataagggaaccagaacgctgtctgttcctgcgggcagttccgggaataattcatatatccagccatttattgattacagcagcctggtgaaatttcccggagcacggctaaaactgtcaataatgtttgcaacgtcagatgatgtgattgtccagagccctgtttcggtgaatctgcgcgtaaacagcccggcaggtcagaataataccgctgcggaaatgacacgcgtcaaggctctgacgtctaaaatgctgctggctgaactggtatataccctgacaggcaccgaaacgaccctcgcgccatacctccagataaaatcctctaccctgcgttcagctgacgcagttttccagctggcagacatccgggctgagttcatggatatcaccgccctgggggataccctgaatgatcagatgctgtcatttcgcctgtctgcgctgaaagcggctattgataaagagatatcagatgctactggcggagtaacgtattacaagacggtgacgattaaacaggacggaagcggcgactatacatcgctggcggcagctatagccgcaaatggtggagggttcaccgcgttaacgcagatcctgtatcagttgcatagtggcatttacccggagcggaatattaatttcccggcctacatcactgtggacgggataggaaatccgtggataaaaggggagttgccagccgacgtggatccggcccagataccgctaaaccagactatctggatgaataacacagcgacaatccgcaacgtgaaaatcacatgtaaaaacatgagataccccattcactcagatgcgcaggcctaccctgacctgtctataaaaaacgctgtgctgaatttagaggggtgccatatcgagcattatggtaatgccgaggctcaggcgtaccaggactctgtttccagcggcgttaccgtctggtcatcgtgccatgcctggggcggcggattacattctggtgagaaaatcaactgcctgaatactgatttcatcagcccgacgacggcgttttattcccacagcaataaagattttgatgcaccatgccggattaccatcaggggcggtagtcttcggaatcgtgaccctaacgggatatcagcgctggctgtgcagaatctgggttcgggtcaggtcagttttatgaacatggagggggttactatccagggggcgattagtgtcgacagcaacacatggcgcgctgagaagctggaaaatcagctggcagacaggaatgcagaaatgcgaatttacctgcatggttgttcaccggtcgctgtccgctcaacgaacgacgcccgcgcgctgcaacttatcagtatcgacagtgcctccagcgcagtttgcgttagcgggtccgctgttcctgcactgttcgggctaaatccggtggtcataaaaggtgggattgattatccggctcgagtgctcagttcgcactcagtgaaaggtgaagtagctggcggcctcatcggtcagcgactgggcgactgcacggtggttaacaaaatcctgacggtaatatttgacggcggttctccggtaacgctgacgctggctgcaaactacaccgcaatgtcgaatgacgctgttgtgtcggcgctgaatgcgcaactcaatgacagcgctggccgcgcattcagtgtcatcacgccatacaactactcggcaccggtatatcagagtgacagggaagtgatcctgacgaataccagtggtgcggtcattctgaaaggtactgcagtagccttcaatggttcaaagctgaacggtcgccgggcaacgaatagcgatactcgttcagccattgcaggcatcgcgctggagaacattgcaccaggtgtgcaggggaggattcagggatcaggatatatcaataaaacctacatcgcttttagcggagcgccaccaacagtcttcctggcttcatgttcggtgaatgcagacgcgactctttctgcgggtggtacaacaccgcttttgcagagagtagcgacagacacatacgagatcatttaa

SEQ ID NO: 190467 - DNA, 756 bp, Klebsiella oxytoca
atggcaaccttaacgtgggaccacgcggtccagtttgttaatcagccggaagcggcgattcaggcgctgagcgggcaaaagctcaacgcggtggccggtgggcgccacccgggctgggggaccaggaatgcgctgagctatttcggcctgacctatatcgaatttctggcgattgccgatgatgcagagctgctttccgccgcggagacgtttttactctgccgggatgcgtcgcggctgctgccggataatgaagcgctgtatcgggtggcgctgcgtagcgacgatattgagcgcacgcatgcggagttgcacgagcagggcctgcgggtttcgccgatcgtcaacggccagcgcgacgatccgcagggcaacgttatccgctggcggatcttcaccattgacggcgattttgacggcctggtctatccctttattctgcaatggggggaagaggatgacgcccggttgagccgcctgcaggcacagggtctcgctgcgccgcatcctctgggggagattgaactgcagcgcgcggttttcacggtacagcatcctcaggcggtgcgcgaccgctggcagctgctgtttggctttgccccgcaaggcgagcaggggctggcggtgggcggtcgagagtttcttttccgtcagggcgcggcgaaccaactgactgaactggtgtttcgcgttgctgacccggcgctcaaaggccgacgctttcgcgttggcaacggcgaatatctttttgaataa

SEQ ID NO: 190468 - DNA, 1152 bp, Klebsiella oxytoca
atggctgaacaacagaaaaatgctcaggtactgaatggcatcaacgacgacatcaccgaattaaaatccctgaccacactgcggaagcgggtcgtcagcgatggagaaatagtatcgaaatccgcgaacgggttccggctctcaaacggcagtaccggcgtcatcctgcgtaatgacggccgggacttttatgccctgaccacggctgccggtcagtctcaggacgggcagtggaacaccctgcgccccttttcattcagtctctccaccggtcgcgtctcactgcgaaacggcgtggatatctccggcggagctgtcgtttcccataatgccggcatttccacctccctgaccgggcctgacccgctcattaacggccagacctatgatgccgcgcccgtgtacacggatttcactacaggtaaagtcaccacaagaatgatgatgggcgccagggtgaatgccggtcgtgacgatttcggcatactttcctaccgcgactggcacggtaaatggcatgagttgcgtcttcgccccaatgccgaactggatgccggacagtttattaaacgtaatccggatggctggttctgggcagggggaaacaaaaatatcagcagcactgagagagtaaccaacggtgttcatttgcagggcgcgagcgatttagccgccgacttttatcaccaggagcgtatcggacagcatcattttctggggctgcatgtggccaatggcggcgctcagggctggtacgaattccgtaacgacggccatgcctacaccaacggcgcctggagcagcagctctgattcccgcatgaaaacggacatcgaaaaaatcgataatgcgctggacagactcgaccgtatcggcgggtacacctacctcaaacaggggaaacccgaagccggggtgattgcccaggaagtggaggccgtgctaccgcaggccgtgacgcagacaacgctgacgctcaatgacggcagtgtgctgccggatgcgcgtagtatcaatatcaacggtgtggtcgccctgctggttgaagcactgaaggaagaacgtcaggcgctggttcaggagaaggaggccagactgtcgcttgaacaacgtctggcagcgctggaagaacgtgtgggtcgggagggctga

SEQ ID NO: 190469 - DNA, 2136 bp, Klebsiella oxytoca
atggatgagtatgatttcaacggtggggtaccaccattaccgggtaatgtatggtttcctgctgatgaagacggtcctgggcgttgggccgcgcccactacgggaagtcagactggtgatattctgactgtatggccgtcaaacggatatacccctcctgatacttcttatctgccaccatcaaccttagggcccggctgggctgattacgatatggcaggcgtggcttctgaccagggctaccttttatatggtgttccggtaagggtcgttctggatatactgacagaagagggtgactggcccggctggaccatcggtctctatgaagcttatcgggaacaggagcccgtgtctgccgccatggccactctcgaccggggactgatttcggggttacctgacccctccaggcctgccgttgtaccttatgcccggctggagccagaatccccgaacccggaaaaaatttcccgcgtaatgacaatccagcccttaaatgccgtcacagacgtgccggtaaatgcgttacccgcaccaggaggaacagtgaacgttcagcggcgtctgaccgatctggtatccggggggaatcagtacctggtggtgacaggaggaaaacccatgtctgttcgtgtggttgatgccagtctcgtgaaggacaagacaccacaatcagaccgattcctgaagaatacttatcaggcaaccattgcgcccgggcttccacctcttattttcactactgattatattaatgattccaggatgtttcccaagaattatgttccaaacgccagaggaattattagcggacagggggtttatggttcagccggctatacctcctctaccagaaatgacgatgtcattgtgagattcccggcagggagtggagccagcccgctgtatatatcctctgtagaggtattaaatcctgtgtcactacatcagcgtcaactggctgagacagatatcaggaacagaatagatgcggcgatcaaaaccgaggaaaaccgtaaatacctgtttggcaaagcaggtattcaggagacgccggcgttcactccggaaatggtgaaatcagccagcgccctgctgacggcaccggcggcgatgatgcttaaccgggcacctgccgggatacaactatctgcaatgggcacgggagtaatgactgctgtgggtgaatgggcaggctcgattgccggcgcgttatggcgaggggcggtcggaacggcggctgccagcaccgcgggtcccatggttgctgccgcatcgacgatatttttctcgcggcctgcaggggggggcagtgacaaggttccgggacgcgatattaatatgatggcggctcaggtcagtctttttaatacgggtaaggtgaaaatcgaacccgggatgaaaacagttgatctgccggtacgcggctttatctccacggacagtaatggacggcagtcggtgatgatggtgaaaactggctccggcggtgtacctgccacggtaccggtactgagtgccgtgcgcgacaaggccaccggtctggataaaatcacggtaccagccgtcgcgggcgccccgtcgcggaccatcctgattaaccctgtaccggtcggtcctgcggcaacatcacataccggcaacagtacgccggttccggtgacgccggtgcacactggtaccgatgttaagcaggcggacagcatcgtcaccacaacattgccggtggcggatattcctgcgttgcaggactttatctactggcagccggatgcgaccggtactggcgttgagccgatttatgtgatgctgaatagtcctccaaaatcagttactcataaacacaagcattatccgcctaaaggagtatcctggaaggatattgttaataaaactgctaatggagggagtgctaaatttaaaccagatgtaaatattcctgaaattgatgtagatgcatgggaaaatggacaaacaacagcaaaacatcccacatggaaggtcaaaaagtatgatcgtgtaataggagcttatgctggaaaagaaactcagtgggttgttgtaaaagaatctcagggggttattcactctcatccagtatcagaacaaaaagctaaggagtacatgaaatga

SEQ ID NO: 190470 - DNA, 300 bp, Klebsiella oxytoca
atgagaataaatcgtacagaaatcgacttcaatggtgggacagtaacagatgatacattatttataacggattttgatggaccagtagactatattgatgaagatatcttgctggtagaatatgcaaatgatttttcagtagatgtctcatttcatgaaggttcgaacgatttaagtgttaacgttatacgtggaagtgactgggataatcctgtatacagaaaaactatagggcttcgtgataaatctgtattgttacaatcaatcagagaagcaattgaaattgcagttaaaggttag

SEQ ID NO: 190471 - DNA, 1059 bp, Klebsiella oxytoca
atgttaaaaaatttccctgatgagaaatatatatctgatcggaattcatcttttattaaacgagtgttttttttacgtcaggttggagtcattctatgctttatcccaatatattcagttcttcaagagcaatcacaccaaaaaataacgattgccctattgactctgaatgcgcttacttggccaacagttgcttatcttgcaagtataatgtcaacggatatgctgtatacagaaaaaaagaatatgatactcgattcattttttgcgggtatttggattgcagtgatgcaagccagcccaattccatcattattcattgtttcagttcaaatagctgatcgctatgctgcgggtgggtggaaaatattaaagccagcattaacgtggatgatgcttagtttcctgatagtttggttagcaaatgatttcagatatacgatggatttcagtattcaaactgtattgctttctttacccttggctacctgttatcccatagtattgagtgtggtttcacgaaatttgtctattaagctgaggaaaagaagggagttactggaaatgcaggctttaatggatccggggttagatctaccaaatcgacgtttttttgaacagaaaatggaaagcgcttttcgggctactcgaaataaaagaatccattcatatcttatgctaattgacgttgataattttaaaaatatcaacgatacatatggtcatgaagttggtgatgcggtgttatcacgtatatcatcaatactacgagagtgcgcgggggagaaggacgtaccagcaagatttggtggcgatgagttagccattattgttaacaacagtactagtcagcaagttttatccatggttaatataattcagaaaaaagttaaagatctttcattgccttctcacaaggatatttactgtactatcagtatcggtatttcttgtgcagaaaataaaaattcaatcattgagtggatcaaagaggctgatgaaatgttatatcaagttaaacgtaacgggaagaatggctattgcatgcagaataattaa

SEQ ID NO: 190472 - DNA, 693 bp, Klebsiella oxytoca
atgataaagaacagtgtggaaatagaatcctgtagctttgttttagaaccatcctacaaaaaagatggttctattcattcatgggaaattcttacaaaaagtgtaaaaaaaaagaacgctaataattttcatgctaatgaaggcgtcttctgtttcagttccatgaacgacaaagaaatcatcgatgtgtttaacaaacagatattgataattgaaggaattgatgcattcaaattgaactttaagccagtttcattgaacgtcgacagtatcattagcgattatattctaaccgataaatatatttctgattacttaaaaaatcaaaaaagcatagcttttgaaattaacgagtattttcatgagttcaatactaaatgtactatggctgacttgaagtgtctttcaaaattatgtccagtatggctggatgattttggtagaggtttaaccagtttaacaattattgagatgtttaattttgaatgtataaaaatcgataaggattatttctgggaaatacaaaatgagagtggcttttttaaaaaaataaatgaagtgaaatcatactgcaattttttaattgttgaaggtgttgagacgatagaacaaagaaataaagtacattctgttgttaatagcgcttgtcagggacgattatggatggagaattattactatgtcgagagttaa

SEQ ID NO: 190473 - DNA, 297 bp, Klebsiella oxytoca
atgctggcgattggctttgcgaaagaagcgcagggccgctgcggcatcccgttttgccgtcaacaaaaagtcgatggtctgaccttcggtatcgactgcccgttacagatatttccactgtcccctgactctgatgtaagtttcatccattcgccaccagggccccacggcaggtttatgccgtcgaaatgccctatccagcagaggtaccagccgtataatccagcagtgaagagtgaaatggtcgacggtgataccgcgttcagccattatctcctccagatttcggaggcttag

SEQ ID NO: 190474 - DNA, 270 bp, Klebsiella oxytoca
atgatgaataaacttgatgcgctgaaattttttgttgccgctgcagaaacgatgaactttcgtgaagcagcagtcagactggccatttccccttcagtggtgacgcggactattgccgagctggaaaatcagctcggcgagccactttttaagcggaatacccgatcaattgtgctcaccagctttggtgagcttttcctgccgaaggctatgcggctgcttgaagactcagaggcctttttcagacggcccgagatgacaatgacatga

SEQ ID NO: 190475 - DNA, 540 bp, Klebsiella oxytoca
atgatttccgctaaacataatggtaatgccaatgtgatggccgctgcctgggtgagtctggtggggatcaataaagtcatggcgtatatcggtccgcaggcttatacccgtggattggtgaaagaaagtggtctgtttgccgtacagatccccgtagtcagtcagatggaaaccgttttgtacgcaggtgagcacagctaccgtgacaggcctgacaagaatcataaaataccgactttctacctgaaagagttcgatatcccgctggtagagggctgtgctggctggcttgtatgtaaggtaatacccaacgcggcgtatgactggaacataatctgtttatgggagaaattgccggtgcgtggagtgacgatcgggtttttcgcaatggacactggatatttgatgaagcacctgacgaattacgaaccatacattatgtcgccggggggcagttttatgccatcggcaaaggaacccggtttgaccatggtccgggcaaagactaatacgcgagtactgcttgtactgatacagtaa

SEQ ID NO: 190476 - DNA, 576 bp, Klebsiella oxytoca
atgaaattacttacgaataaatcattgatagcgtttttcttaattacttcattcaatgcattctccgctcaggaatcatctccatggattggaacaaaagcgggtgagaaagcgcctcagcaactcaacattccaaaagaactgtctaaaaatctagccacttttgatgaactggatttcaaagtgtattcgaagcaggattgggaaaacttgcataaaagtcatgctgcgaacattttggttcattatccagatggccatacaacagtcggtattcctgcacatattaaagaacttgagttcatgtggaccttcgcacctgacaacaggatcgaagagcaccccgtgagattcggaacgagtgatgctaagtggacagctgtaatcggtgctattaaaggcacatttactaagccaatgatactcgctgacggtaccaaaatcgatcctacaggtaagtcatacaacttacctatggcaactattggtcactggaataaagatgggcaaatggatgaggaatacctattctgggacaatgctgagtttatgaagcaaatcgggttgtcaaaataa

SEQ ID NO: 190477 - DNA, 576 bp, Klebsiella oxytoca
atgaaaaatcgtattatttctgtttcattgttatcatctctgttatttgtttgttctgtacaggctaaaactgtaaactataaacttgatgagtcgcatacctcagtggttatcagctggaatcatttaggtttctcaaatccgaccgcatctatccatcaggttgacggtgttgttaagttcgatccgaaaacaaaggttgtatcattagttgatatcaacattccaacaaccagtatcgacaccggagtttcagcactgaataaagagtttggtgaggctgattatttcgacacgactcattatcctgttgcacacttcaaaagtacgcagattacaatgaacggcaatcagtatgatgtatatggtaatttaacaattaaatcgataactaaacctattatcttgcatgcaatgcttaataaatctgggttccagggtatggagaagaaaaatgcggtaggtttcaatgccaccggtgtgattaagagatcagactttaaaatcgacaaatatgtaccttatgtgagtgatgaaataaaaatctccatttcatctgaggcgtattcagagtaa

SEQ ID NO: 190478 - DNA, 600 bp, Klebsiella oxytoca
atgaccagcaattttctaaacctagcaaataatcgccgtactatttatgctttgggaaaagatattcgtattcctgaaggagaactcatcagtacaattaaagaggccgtcaagcaggcaccttcggctttcaactcgcaaagctcacgaatcctgattttgctgggagagcagcatatacgtttctgggaactcacgcgcgaacaattacgtaaaatcgtgcctgctgaaaatttttcaggtacctccgacaagattgatggttttgcagcagctgcgggttcagtcttgtttttcgaagatcaggatgttattaaatcactccaggaacagtttgctgcttatgctgacaatttcccggtgtggtctgagcacagtaccggtattgcacagtatgctgtctggctggcgctggcagaaaagggagttggtgctaacctgcaacattacaaccccctggttgatgacgatgttcgcaaggaatggaacgttccttcgacatggaagttgcgggcacacatgaatttcggtgccattctttcacccgctgcagaaaaggcctttatgagtgatgaaaagcgatacatcgttgccaggtag

SEQ ID NO: 190479 - DNA, 165 bp, Klebsiella oxytoca
atgcttattctcctgacagtaaaaccgccaggcttgcagcagtgctgctggagcatattccggatgtgccggttgaagcactccatcttcctgtatcagatcatcctaaaatccggattatggctgaggcactttttaatgagccagatgaccggcgaacgttaa

SEQ ID NO: 190480 - DNA, 525 bp, Klebsiella oxytoca
gtgcgccctgaaagaataataatattaggcaatgctggaagcggtaaatctactttatcccgaatattgggagaaatgttaaattaccctgtgacacatctggaccggttattttggcgtccgggctggttaaagcctgaatctgaggagtttcgtgaaaaagttacggagtccgtacttgacacggtatggatcaatgaggggaattatgcccgtaggacgttcgacttgcggctatcaagagcagaccttgtaatctggctcaacacgcctcgaataacgtgtcttttcagggttttaatcagatcttttcttaataaatccagaactgatctacctgatggctgctcagaaaaaattaactatgaatttttagaattccttcgatatgtctggcgttttgatacgcgagacaggcctgagatagaaagacttcgaatcaaattcggcagcgacgttccagttatttatctgcataacagaaagcagataaagtcttttctggcaggtatacataataagtaa

SEQ ID NO: 190481 - DNA, 195 bp, Klebsiella oxytoca
atgaacaaaacagcacatgaagtacagacctgctggcttgagagccggcagcctaatgagcgtaacggtaatgaagcggaaaaattttcggatgaatgctgggagaagggtttgcggctggataaaagcccttctgtgcactatcaacttctgatggaaaccatccgctggacgcttatcccgcagcaaaagtaa

SEQ ID NO: 190482 - DNA, 573 bp, Klebsiella oxytoca
atgatgcgggaaaaatcccgacgtccgtcgccgctgcagcgccgggtactgattgtgctggccgccctcgatgcgaaacgtccggggccggtggcgacaaaggatatcgagcgggtactggagcagggcggggacgccccggtgtacgggccgaacctgcgcgcctcctgccggcgcatggaagccgcgggctgggtgcgcaccctgcgcgccacgaacctgcagctggccgtcgagctgatggaggccggtcgcggcattgcagagccgctctaccaggcagaacgcgaggctgaaatggcacgacaacggctgacagacgtccggcgtctgccgttacgccagacggctgccggtgatgcggtggagctgcagctggatgacggctattacaccatcagggaagcggcctacgtgatccgtctggacggtaccacctgtctgcagctgaaggatgccggcggcatacgccggataaaagagggcgatcccctgcaggtggccagctggtatcagacctgttttgatgcaggcctgccggtcatcgtccaggtgaatgagagccgggactga

SEQ ID NO: 190483 - DNA, 717 bp, Klebsiella oxytoca
gtgaatcagcgtaaatacatacagtccgtagagagggccatgctgcttcttgaaacactggtcacccgtaacgaaggattccgtctggccgaactgtcagaacagttttcactgaataaaaccactttacatgggttgctcgccacgctttcttcgcttggatacgtttcacgccgtgggcagtattatattgcggggctgcggttacgggatgttgcccggccgctcacggatacggaccagcaacttcgggaactctttactcccgccctacgcaggcttgctgtgctcagtagcgaaacctgttggctggctgtgccatgtggtacacgtgagtatctctatattgacgcgatcgaaggcggaagttcgctgcgtgtcgccagtcccagggggacacgggagggactgaccacttcagcaattggacgtgtctttctcgcttttgacgatgacctgacgagaaccctcagaaaggaaggatttattactgacaaactcaatagcgagctgctctgtatcgctaaatctgggtatgctcttgatttagaggaggcggaggaaggacttaactgcctcgcgctccctctgcgacagcatggttacgtcgtcgccgcgctgggaatggcaggcccttctcatcgcctgcatcctgactatctcagacgactggctgtcagagtgatgcgggaaatgtttgacattatcaaactttaa

SEQ ID NO: 190484 - DNA, 411 bp, Klebsiella oxytoca
atgttcgagaaaatttcacgtgatgccattcgtacaattacctcactggctcaggagcaacaccaggctgtatgtatcagtattgtggacaatgcaggcctgctgagaagcttcctgcgaatggacggtgctgtagccggcgcaattgatgtttcgattaaaaaagctcgcaccgcagccttgtttggttctgattcagcctccctggggcaggaagcccgtccgggagggaaaatttattctctggagtcgactaacggaggcttaatcagttttggcggcgggattgttttgcgggacgatcagggcaatattcttggcgctgttggcgtggccggggctacggtagatgctgaccagcaactcgctctgtcaggagccgcggcaacgtcagcagcaggcagggtgtaa

SEQ ID NO: 190485 - DNA, 1176 bp, Klebsiella oxytoca
atgcagcgtattcatcccggtttgctggcattgtccgtgacagcgtttgctattggtatggccgaatttattgtggtaggtattctgcctgacatcgcgacagcactgaccgttgatctaccccgtgccggcaaccttgtgggtttgtatgcgctggctctggctgtcggtacaccgttactggtgatgactgtcgctggtttcccgccaaaaagggtgctgacagccctgatcattatgtttctggctggaagcctgctttcggcactggcggacagttatccgcttttccttaccgggcgactgataaccgccgtcgcgcatggcagttttttcgccattggtgcaacggtagccgccaggatagctcctgcggggaaagcaggtaaggccatcgccgttatgtttgccggactgaccctgtccatggttattggggtatcgctcggcagctttattggtcagataatgggctggcgggtgccattaatcatggtgagtttactggctctgcttgcattactggcaacaatgttctggctgcccggcatcagaaatagcggatccgggaatgtaagggaacagttgcaggcactggcacatccggcaatcctgaccatgatgagcattactgtgttggggtttggggccagctttgctgcgtttacgtttgtgatccccattctgacgacactcagcggattttcttcggaagtcgcaagcttactgttgatggttttcgggggagccacactgacaggtaacctggctggcggccatttttcatcgacccggggctggtccgtaacgctgggcacacagattgttttgctgacagtgacattaatcgctctggccctctttcttcagtggaaagcggctgtcattgggttactcttcctgtggggaaccctggcatttgggctatctcctgcggtacagcagggcatgttgtcagtggctgaacgctacactccgcgggctgtcggatttgcctctgccctgaatatatctgcttttaatctgggtattttttgtggggaaaatataggaagtgtactcgtacaccataataagctcgcatacacacctttagccggggcggggatgtgtatgctttctctgctgcccctctggggtcttgtcagatatatcggctgtcagcctacaaaataa

SEQ ID NO: 190486 - DNA, 405 bp, Klebsiella oxytoca
atggcttctatcagatcactcactctcattctgccgttacttctggccgcctgctccagtacacagaccagcgtcgagcgtaacgccagccgtgccgtatccgctattaaccggattcatttcgatccgaatacccgcatgttaagggcagacagtattaattccctgaaacccatgatgcaggaactctacgaccagggtaaaaaagacaggtccgatggactgactcctgaccaggcccggcagcgagtggaaagcttcagccatcctgaggtcttatccggtgggcaaaaatcaagattcctcagccaggagtatgatgcggataatcccgaaaagcagcgtcagatccttctggacgccgggatatcttcatactgggacggctacaacggacgtccttaa

SEQ ID NO: 190487 - DNA, 696 bp, Klebsiella oxytoca
atgcctttgatccgaaatgccttcaggcggctgcattatcccgtcgatattattgcccagtgtgttcgctggtacctggcttatgccctgagcctgcgtaatctggaggaaatgatgactgagcgcggtattgtcgttgatcattccactctccatcgctgggttatccgcctggtgccgttgctggatgaggtctttcgccgacataagcgcacagtcggtcggcgatggcgtatggatgaaacctacatcagaatcaaaggtcagtggaagtatctgtaccgcgcagtggataccgacggccagagcatcgactttttgcttaccgccagacgggatgcggcagcagcgctgcgcttcttccgcaaagctatccgtaaccacggcgagcctgaagtggtgacgatagataaaagcggcgcgaatactgctgctctggccacgctcaatgccgacaaccctgagaaagaagccattaccatcaggcaaagcaagtatctgaataacctgattgagcaggaccaccgcaatatcaaacgcaggatacgtcagatgctgggattcaaatcatttcgccgtgcacagaccctgctggcaggtattgagttaatccacatgatacgcaaagggcagtatcagcatctgcaaggtgatggattgtcaccggcagaacaattttatctgttggctgcctga

SEQ ID NO: 190488 - DNA, 762 bp, Klebsiella oxytoca
atgaatgtgttatctacattttcgctaaaaggaaaaagagccctggtaaccggtgcgaccagaggaattggttatgtcctcgccagagctctggcacaggcaggagccagcgtcattataactggcaggcatcaagccaccctcactaaagcggttgatgcacttaccctggaaggtgctgaaatcacaggattacttctggatgtgacacaaacatctcgcattactgaggtcatttctggcatcggtagaatcaatattctgattaataatgcaggcattgagcaggtttgtccgtcacttgaagtaaatgaagcgctttgggacaacattgtcgggaccaacctgaaaggggcttttttctgtgctcaagcagtagcgaaaaccatggctagtactggaaaaggtggagttattattaacctctgctcattaaccagttgcgttggcgtatctggcgcagcggcctacggtagctctaaatcgggattggtcgggctaacgaaagcgctcagtacggaatgggcggctcataacattcgggtgaacggtatcgggccgggatattttgaaacagagatgacgcaagtattttatcaagatgcacagtggcgtagtactatgcagcaaaagatcccccttgggagatttggtgagttagatgacctcgcgggaagcgtggtatttcttagctcagaggccgctaaatatattaccggacaaactttatatatagatggcggctatttgtcctctatttaa

SEQ ID NO: 190489 - DNA, 966 bp, Klebsiella oxytoca
atgaaagcagtacgcttatatggtatcagggaagttaaaatagagcattctgctccaccgacgttaaaatcgggatgggctagagttcaagtacatgctgcgggaatatgcggatctgatttacacaatttcataaccggtaaatggtttagccggttgcctgttacgcccggtcacgagttgttcggagtgattgctgaaattaacgaaagcgaaagtctattcagagtcggtatgcgcgtcgtcgctgattctcgggtatggtgtggacgttgctttttttgccttgccggggaaaataacctctgtgaagaactaggctttgtcggtgaagtattcgatggcggattcgctgaagaagtgatacttcccctacaaaacttactgattgtccctgatagtgttcctgatgatatcgccgtgctgagtgagcctctgggtgttgcactccgggtgattaatcaactgaacccatctgcaggtgacacggtttgtgtagctggtggggggacgataggcggcttaaccgcattactgcttagccggctaaaaaaatgccgggttcagctactggaacctaataaacagcgttatcaattactttcatcagttgttggcctttcaccgcccggcacattttcattagccgttgaagcttccggacacccggccgcgctcattgatctcctgagtagtatcaggtctggtggacgcattgccctcgtgggtatttttcatcattcgaaggggctggatcttaataaggtagttgaaaaagagattactcttattggctgtagtgtgttccaagatgaacagaatgaggcattgcaggtaatggcttcactggcggaggatttaagaaagctgattgcgcctcccattactcttgatgagctaccggatgcctatatgtctctcatctcaggagactctcactatctcaaaacggtgaccaatcaatga

SEQ ID NO: 190490 - DNA, 1296 bp, Klebsiella oxytoca
atgactgaacttttacgcccaccctatgcagcggaagcgcgcaggttgacgcaggaaggcaagtgggagttggccagtgaaaagctcagccaactgatcaccgaagttactggtgaacaaacattaagcctgcagattaatcgtgaccaatatagtctgaattctttgaatgggcgtgtttcattggtaaatggccgttcctttttctttaagtatcatcatgaagagggagaagagcagactattcaagaatattaccgggcggcacttttgcgagatcacggttttgatgtagatatccccgtctacgcctgcggagaacctggacgccaaattctactgtataagcttcgcgatgataagcggctagcagatgtttgccgagagattgagaccaaatcggactgggagaaaataggaccggttatcgaagctcaacgttatgctgatcacaacattttatcccatacgttaccgaccttgcgcatggcgtcaactgagaaagtagcatctgaacccattcatcagttgttctggaatcggcttgtttcgcctggccatgacatcggccttggtggtcgtgtagccagcttttatgtcaatcaggaatttattcttggtgacatgcagttggactggcagacactgagtagtctccactggcgtataaatggcgtgtcatatgaaaaaagtctgcgagagctctttttagaggctggtcgtgagttagaccctcagaggttagcagatcatggagtcgttgttgctcacggcgatgcccataacgctaatgtatggtatgaaaaccatcacagcaaacccaggctggttagttttgatcctgcctttgccggaagttccattccagcgttgctggctgaaattaaggcaactttccataatatatttgctcatccttgctggctgtatgaagcggatgaagcggcagaacgttataacgtgagtgtagcgcgagatggcaatacccttactgtcaaccatgactggcaactgactcctttacgtaaagcattccttgaaagcaaaggggaattgtactggaaacctctgctgacagaaatgaaacgaaagggatgtctacctgataactggcatcaaattatgcgtcttgctcttttctgttgcccaacattagttatgaacttacggggtggttctgacagcgttcataatgcaacaagttcagccataggtttttccattgcagtcatgctgggttgcgatggggatgattattttagccgatggatgtccgctcttatgacggagaactaa

SEQ ID NO: 190491 - DNA, 1329 bp, Klebsiella oxytoca
atgtctccgacatttcatgacctttcgaattccgaagtactgccaacccatttattcaaacgcacagaatctgatttgtcatttttcatcgaaaaggtcaagccgataattgaggccgttaggtcagaaggcgaccaggctctaatccgtttcgctcgtgagtttgatggtgtgcgaccagagaccttttctataaaggcagaagagcaagagtttgaagacgcatttgcccgcgttgacccggaggtaatcgaatcaattcgtttctccgtcgaaaatgttcgtgcatttcatgaggcacagaaaccagaggaaatgtggtggaaggagatgagaccgggggcttttgccggtgatcgccatgttccgatagatgctgttgcctgctatgttcctcgtggtaaaggctcattcccgagcgtactgatcatgacagcagtcccagccatcgtggcgggagtcccgcttccggtcgtaatcacccctcccggccccgatgggagggtcgatgatgcaacgttgattgctgcgcgtcttgttggtatcaagaatgtgtataaatgtggtggcgcacaaggtgtggctgcagtcgcgtttggaactcagtcagtaccaaaatgcctcaaaatcgtaggacctggcagcccatgggtagtggctgcgaaacgtcagttatcaagcctaattgatccaggtataccagcagggccgagtgagagcctgattctggctgatgactctatcgatggtgcgctggcagcgcttgatcttcttatagaatccgaacatggcccagattcatcagcttatttggtaacttctagccctcgtgtagctgaagaagctattgccgcattacccatgtactggaaacaaattggagaaaaacgtgcagagttctcccagaaagttttgtgcggctctcacggaggtgtggtgctgacaaaggatttctctacagctattgagttcgtaaatcagtacgcacctgaacacctggaggtacttgcacaggaacctatggatgtaatgacgaaaattcgtaatgccggtgaaatattacttggcgaacatactccaatcactctgggtaattttgtacttggccctaatgctgttctgccaacaaacagcgcagcgaaaacgtctggtcctctctccgtttttgattacctcaagagaatctccatcgcctatgtaacaaaaagtggctacaaagatctggcactgcaagctaaacgccttgcagagtatgaaggattccctgggcatgctttagccgtttcggacattcgccaggatttgctaaagggaagcaagaatgactga

SEQ ID NO: 190492 - DNA, 753 bp, Klebsiella oxytoca
atggcaattttgacgcttaataaactggaaaaaagtttctcattgggcaagacccggcgtcaggttctgcatggcattgacctcacgctcaacgataacgagttcgtttctattgtcggctcatctggatgtggaaaaagtaccatgctgtcaatagctgcaggtctggaggatttcgataagggtgatgttcttgttgatggtgaatcaataacaggcccaggactggaccgtggagtggtatttcagtcatacacgctgcttccctggctgacagctagaggcaatattgagtttgctttaaaagcagcaggaacaccagccagaagatgccgtgaaatcgctcaagaacatcttgaactcgtgaaactgggcaatgctgcagaccactggcccagcgaactttccggaggaatgaagcaacgtgttgccattgctcgagcactttcctaccgacctaagattcttctgatggatgaaccgtttggtgctcttgacgccatgactcgccatcaaatgcagcaactacttatcgaaatctgggagaaacaccgcctcacagtaatgtttgttactcatgatatcgaagaggcggtcaggctttccgatcggatagtggtaatgggtcaaggatatatagacaccactttccatgttgagttatctcgccctcgacaggagggtataaatcgtgaaccagaattcattgaacttcagcatgaagtactgaaccgtattcatcaacactcctaa

SEQ ID NO: 190493 - DNA, 843 bp, Klebsiella oxytoca
atgagttctctcgaaactcagaaagtaaatgtccatgccaaaaaaaggcggtattcaaacttattaaccatagggaaagagcctacacgttctcagttcctcacaatctctgtagcagttttcgtgctgctccttcttatatggtggcttgcgacatccagcggcaccattaaacccattttcctgccaggaatcgagaatgtcctgcttcggatgataactcttgcgcaaaacggaacgttacagagtgatattgccagcagcctttatcgcatgatcattgctttcactatttcgtcatttatggcaattatcattggtgttttagctgggtgctatgggttattcaaggcgattgttgaaccgcttgttgactttatccgctatatgccagttgttgctttcgtcccccttaccatcttgtggacaggcactgatgatatacagaaatttctagtcatctggatcggtactttttttcaacaggtactgatgatgattgatgcgattaaacgtgttccatctgattttgtcggtttgggcaggacactcggcttgtcagaccgaaaaactctcctccagattgtcattccttccgcgttaccctcgatatgggatgcattacgcataagtcttggatgggcatggacatggcttgttcttgctgaacttgtagcatcaacttctgggcttggctatcggatcgtcgtttctcaacgctattttcagacagatacgattatcggctacatactcctgcttggtttcctggggctcattactgatcaaattatgcgtgcagctgagcatgtacttttccgttacaaccggagacgttcctga

SEQ ID NO: 190494 - DNA, 987 bp, Klebsiella oxytoca
atgtattctctccatacagtgaaaaaatcaattagtgcgtttttctgtgcaggaatgatgtcagttacaactctctctgttcatgcggaagaagccacgcatgtgaaaatggggattgaaccttggctgggttatggtcagtggcatattgcctcggctaaaaatctttttgaaaaggaaggtctaaaacaagtcgagatcattaatttcgctgaggataaagatattaatgccgcactggcgagtgggcagatagacgcagctaatatcgctacccataccgcgatgggaatgatttccgcaggtctcccagtgaagattgtgctattactcgaccagagcaatagcgcagatgcaattctggccactaaagatattttaagcattaaggatctcaaaggtaagcaggtcgcctacgaagaaggcacaaccagtgatattttactcagaagtgccatagcatctgaaggattatcctttaatgatataaaacctgttcctatgcctgccgcttcagcagggaatgctataatagcaggacgggttcctgttgctgtgacgtatgagccctatctgagcatggcccaaaaaagcgatacaaatcttaagattctatacagtggttcctctgatccaggattgatcagcgatgttctggtaatacgtgacgatttcatcaagactcaccctgatgccattaaggcacttattcagacctggggtaaagcgctagactattacaatgccaatacgacagaaggtcgcgctattatctctaaagcagtgggcacgactccagaagacttaaatacggcattcgatggcgtgaaatattttaccctaagcgataacaaagcacttctggctcacgacttcacaacgaaaacgttcccccatattcttaaagcagcaactgctgcgggcattatcacgcagcccattacaactgaacaaaccatcgatactcgtttcgcaaatgcgcaataa

SEQ ID NO: 190495 - DNA, 1143 bp, Klebsiella oxytoca
atggttattaactgtgagaacttacgtcgggcagcgcaacgtgcgctaccgggctttgcattcgattatgtagatggtggcgctgacaacgagcagactctgagacataacagagaagtctttgaacgttggatgtttaaaccaacggtattaaaggatgcaagtgtacgcagtctgcatacaccacttggaaatgacctattagctgcaccgctgctgatagctccaactggttacaatggcatgctgcgtcatgaggccgatcagatgctagcgcgagccgccgcgcatagcggcataggttatattcagagcaccgtttcgacggcatcactggaagagactgcaactgttagcagcgggccgcgctggtttcaactgtatgttctgaaggaccgcgctgtcacagccaacttgattgagcgagcgcgccattcaggctgctcggcgttggtagtgtcggtagatgcagtgcatttcggcaaccgtgaacgcgataaatcgcactaccgacggccgatgaagctttcgttccgtgcgctggcagatgtagcacggcaccctggatgggtgtggcgtacactacgtcctgcagggatgccgggctttggtaacctcaaaccttaccttccctcagagtttcagcgcggtatgggcgcggccacctacttcgcccaacagatggatcctacattaacctggcaaacactggaatggatacgcgaattgtggccggggccgttgtatatcaaaggtataatgacgactgaagatgcattagccgcacaacaactaaaggccgaaggtattgtagtatctaaccacggcggtcgtcagttagatggaacatttagcccaatgctggttttgccagacatccgaaaggcggtgggccctaactttaacgtgttactcgatagcggcttcagacgcggtactgatgtggtaaaagctctggcgttaggcgcaaatgcagtattactgggacgtccactattatacgcagtggctgtaggaggcgaagcgctggtgtcagccaccctagagtcgttgatcgctgaaatcgatcgtacaatggcacagttgggctgtaccgatatcactgaacttcattctggactgctccatcatgcaaggaattaa

SEQ ID NO: 190496 - DNA, 957 bp, Klebsiella oxytoca
atgagaaccacataccagcaaacgttgttaataaacttcgtaagtcgcgaagatatcgacgaatggcgaaatctttttttacctaatttccctgacttgcgtatcgcgagctgggatgacccttcagttgagcctgaaagtgttcactatgttttagtgtgggagcctgagagaggcaagcttgctcaattcccaaatttacgcgtgatattaagcgaggcagcaggagtggatcatattttgaatgattcgacagttcccgccaatattccaatcactcgcatggttacgccagaaactgagagcagaatggctgattatgtgactatggcatgttacctgcttgtacgccagattccgctggtgatgcaggcgcagaaaaggcagagctggaacaataagctaacaggcagactagtgaacgaaacgtcagtaggtataatgggtatgggacgtctaggcactgctgtagctaaacgcctgttggccaatggcttcactgtgcgaggctggtcgcgtaccgagaaaaattcccacggtgtacaatgttacgctgaaaacgatcagttagcagcttttcttcgcgaaagtcacattttagttaatttacttcccgacactatagcaacacgtggcatcatcaatgcagaacttctagagcaattacctccgaatgcaggactgattaatgttggacgcggccaccaattggatcatgatgcgttattggtcgggctaaacaacggacatttaagcggcgctgtgttggatgtttttccagtggaacccctaccgcctgaagatcctttgtggagacatccccggataatcattaccagtcacgttgcatcgttgatttctaacaccgctaaagcaaaacaggctattgagattattcaggctgatcgttctggattgccattacctttggtatttaatcgtgagtacggttactaa

SEQ ID NO: 190497 - DNA, 813 bp, Klebsiella oxytoca
atgaatgaactcagtattgttagtggcaaattgcaactgttgtcgatcatcggtgacccgatcgctcaggtcagcgctccactcatgataaatgccgccatccttgaaaaacaaatccccgacactttgatgatccctctccatataagctctgtaggtttgcaaaccgctgtgaatgctctgaaatgtattcagaattttcgtggtgccatcatcacgatgcctcacaaacaacatgcgctttcattaattgattcagccagtgaatctgctatggcaatcgggggatgcaacgtcatcaggaggaatgctcaaggtcaactacatggggatatgcttgacggtgaaggtttcgtatcgagccttttgaaaagaggcatcgatgtgacaggtaaaagagtttatctggctgggacaggtggtgctggctcagctattgcttatgcaatggccgccaaacaggttggagaattaattatttacaaccgtacacctgataagtccgctaacttgataagtaagcttttatatcgttaccctggtgtaaatatttattctggttccagcgagccagaacaggtggatatcgcgattaatgcgacatcagtgggtatgggggaaaacaaaaatattccattctctattgaaaaacttggcagtaaaacagtcgtttgcgatattgtcgtcttcccggacaaaacccctcttctttgcctggctgaacagcatggactccccatccatacggggagagctatgcttgctgctcagattgagctgatgcttgattttatgcttcatcaggtcgactaa

SEQ ID NO: 190498 - DNA, 1224 bp, Klebsiella oxytoca
atgatggacgagcaaaccctctatgcccatatcctcaacctgtccgcaccgtggcaggtacaatccctttctcttgatgaaacatctggttcagtgacagtgattgtcggcattgccgagcacacacaactgacctgtccaacctgcggtcaatcctgctccatacatgatcaccgacgtcgtagatggcgtcacctcgacacctgtcagttcaccacggaggttgaggctgatgtaccccgagttgactgccccgagcacggttgtcagacactaccggttccttgggcaggagtaggcagccgctacactttgctgttcgaagcctttgttctctcatggctgaaagtcagcaccgtggatgctgttagaaaacagcttaaactcagttggaatgccgtagacggcatcatgatgcgcgctgttaaacgggatcttgcccggataaaacaacctttatctgcacgtcatctctgcgcggatgaagtcggcttcaaaaaaggacaccagtacgtcaccgttatctctgacaggcaggggcgtgctttgcaactgacagatgatcgcggtgtagaaagtcttgccagttatctgcgtagcctgacggatcatcagcttgatgagataaaaacgctgtcgatggacatgaacatggcctatatcagtgccgcccgcatccatctccccaacgctgtagataaaatcgccttcgatcacttccatgtggcaaaaatgctgtgcgccgtcgttgataaaacccgccaggcagagatgaaacagatcccgtcgtctgacaggaaagacgcccaccgttcacgctatctgtggttttacagcaaacaaaaccgcttcggacgccgggcagagaggctagaagttgcccgtctggtgttaccccaaacgagccagtgttgggtgatgaaggagcttgcacgcgatctgtggcaccgtcgctatgacgaccatagccgtaagctgtggcaggaatggatggtgatggccaaagacactggcataccgctcatggtcagcgttgcccgcatggtagcaaagcgtctttacggcatcctgaatgcaataaaaaaccgagtatcgaacggcaatgcggagtcgctgaacagtaaaataaggctgctgaggatcaaatcacggggcttcaggaataaagaacggttcaagctgggtgtgctgttccactacggaaagctaaatatggcgttctga

SEQ ID NO: 190499 - DNA, 234 bp, Klebsiella oxytoca
atgagtgtttacgataacgacccgttaccggatgacacattcaccagagcacaggctgaagcggtggctgcacagtttgaaaatgtcgccatcgaagacgatcagcgttcgcattttcgcctggtggttcgtcagaacggtgaaatggtgtggcgcgcatggaattttgaagcggatgccgggaaatggctcaaccgttatatcgaacgctatggcatccgtaaaacgaagtaa

SEQ ID NO: 190500 - DNA, 231 bp, Klebsiella oxytoca
atgatgagaaataacccctgcaaaacggagctgaaggtggcccgcagccagcgcaataaactgcataccatctcttcccgacttaaagatatgacctgcgaatgggacgggctgagtggctggctggaaacagaaacagagcggctggttgaatatgtcgatcagcatattcaggcgctggatgaacaaataagggactggtctgcaggaaacagcgacagggagttctga

SEQ ID NO: 190501 - DNA, 1413 bp, Klebsiella oxytoca
atggaagttgcaacaataagcaagtcgcatagtgataattcttttaaaaaggaaatgaaaactcgtcatattatcatgctggcgctaggaggcgtgattggtaccggcttgtttctgacatccggatatacggttaatcaggcagggccattgggatcggtgttggtttatgcggtaggcgccgtaatggtgtatctggtgatgatgtcgttaggggaacttgccgtacatatgccggaaaccgggtcatttagtcgctatgccgcaaagtttatcggtccggcaacgggatatacggttggttggttatattggttaacatggacggtggcgattggttccgagtttaccgccgccggtattctcatgacgcgctggtttcctgagtctccggtatggatctggagtctgctcttcgcagcgtcggtgatgatttgcaatattgtctcggtgcgactgtttgcggaaacagagttttggctgtcgctggttaaggttatcgcggtggtcgttttcattgtcgtcggtgggctggttattgttggggtgtttcatcacgacagttctatgcagtacgggttggcaaatttcactcgtgaagggctattcccgacgagccccgcatcgatcttatcggcattattagccgtggcatttgcgttttcggggacggagctcatcgggattacggcgggtgaagcagagcacccggaaaagtcaatacctaaagcgatcaaaaccacgatctaccggctggtactattcttcatcggtacgatttttgttctggcagcgctgctgccccgagagaaagcgggtttggtcgaaagcccctttgtgatggtgtttgagttaaccggtttttcctattcggcggatgtgatgaactttgtgatcctcacggcattgctgtcagcggccaactctggactatatgccgcctcgcgtatgctgtggaccctttccgatcaggggcatatttcgacttcattctcacgtttaaccgccaaaggcacgcccgtctttgccattattttcagcatgatgggtgcaggcgcatctcttttgagcagcgtgctctctcccgatacggtgtatttagcactcgtctcgatctcgggactcgcggtggtgctggtctggataagtatttcagccagccagctcgcttttcgtaagacatttatcgctaacggcggcagcgtagatgatctcaaatataaggtgaaagcctttcccattgttcccattgtctccatcgtactgtgcgtgtgcgcgtgcatcggtattgcattcgatccctcccaacgcgtcgcattgtattttggcattccgttcgtcgtctgctgctactgcgttttctggctgaaaaacagaacgtcgggctatcaacaacaaaaccagagcctgtaa

SEQ ID NO: 190502 - DNA, 903 bp, Klebsiella oxytoca
atgcaaaacgtgagaaagctccccccactaaactggctgcgttctttcgaatcggcggcaagactcatgagttttacccttgccgcagaagaacttcatatgacacagggagcggtcagtcagcatatcagaagcttggaagcgcaccttaaatcacatctgttcatcaggctggcgcgccgtattgaactgacggaagagggactggcctacttgaccatcgtgcaggcatcaattcaacatttagaaatcgccacaaatgagatttttggtgaagggcatcgcaaacaaatcaaggttaaagggagtatcgcttttttcacctactggcttaacgcccgtcgtctgagcctgtttcatcaagaacatccggatatcaatatccagttcaacactgatatctggatgcgcgaggaaaacatcagcgccgatatggagattcgttgggggaagggccagtggcagggcgtcaatttcgtgcgtctgacccatgataaactttttcccgtttgcggaccaaaactactcaatcaattaaatttaaatgatattcatgaccttgagcatcataatctcatccatgttatgggctatgaacagggatggggagaatggttaaaatatgtcggctgcagtaccgtcaatacctccagaggaatgcagttcgacacctatgcctgcgtccttaatcttgttgagtcgggatttggcgtggcgctgggccgctcttcattggtcgaggatcaactgaaatcaggcacgctggtcgcccctttcgaacagcacttatcgacgaccgaggatttctatttgatttatccgaccaccggtttcagcaacccttttgccagacgttttgctgaatggcttgtgaggcattcgtcagggggtacattaatgtaa

SEQ ID NO: 190503 - DNA, 1140 bp, Klebsiella oxytoca
atgaataattttgatacgttacttgcggggttagatcactatacggatagcataacggggggattggttccttcaattcataccgccgtttcatccagaacaataatgaatgatgcagcgatcaattatattcgcagcggcaatccaaccacccaactggcggaaaatattttaaccaaaatggagggcggggcgtctgccgcggcgtttaactccggtgtttcagcggcgtgggcagttttgctgactcttaagccacatgatgccattgttgttgaaaaagactgctactatgaatttttcaaaatcatgagcgatttttgtagtcaacatcaaattacgatttattttattgatctatctgattatgatgccctggaaacggcattagccggaagagctatctcgtttgtttgggcggaaaccgccaccaatcccttatggaagatcgtcgatattgccagagtcgcccgtctcgccaagcgctacgcatcgcggttaatcgtcgactctacagtctcaaccccgcttgcggtacagcctttggcgctaggcgccgatatagtcctgcattccgcaacaaaatatttaaacggccacggagacctgactgcgggctttctggtgtgcaaagaaaacgattactggtggcagcagatattaaatttcagaaccagcgcgggactgattcttcagcccatggaagcatggctgctggttcgcgggatgcgcaccctggcgttaaggtacggtaaagctagcgctaatgcgcaacaacttgcaaactggatgttaacgcaaagcgccattgccgaagttttctatcctggaatagccgccaatgaatccgccgatctagccagagttcagatgaataatctctatggcgcaatgctgtcatttcgggtgaaaaacggagccgtggccgcaagaatattacctaaacttaccaagctattcagaaactcgacctcgctagggtcaacagaaagcctgattgaataccgaaaagataccgaaggagaggaatcatcttgtcctgacgatctgctcagactttcggtcggcattgaaaatggactggatttgatcaatgacttagcgcaagcgttcgatgcgttgcaaaaattaaaaatataa

SEQ ID NO: 190504 - DNA, 930 bp, Klebsiella oxytoca
atgaatacacctataacgccgttggcaaagcgtaaagaccgatatcgaggatatagcctatggctgatgctgacgctcatggtattattatggggattaagttggccagcgatgaaaacagcgctccatgatattcctccactgtggctaggaaccctgcgattcttaaccgccggaatatgtctgtttatcatcgtcgggtgtaaaaagcaattgaccgtcccatcgaaaaaagatctgccgatagtcttcagcgtcggaggccttcagatgctcgcctttacggcgctggggctgatcgcaatgcaatataccgacgtcagtcgggcggcactgctggcctatacaacgcctttgtggggggtgctcttcgcctggataatcaataaatcgctgccccagaaaaagcagctgctcgctttatgtataggcattatcggtattgccatcatctgctctccgctggagatagactggtcccagcaggggatggtaaagggcaatctgttcttgctactagcggcgctttgctggtcggtggtgatttttcacgttaaacagcatcaatggcatctgtcaccgctggcgctggcaccctggcaaatgttatttgcgacaataccgatgctgttgcttgccattaaatatgagggatggccacgtgagatccactggagtccgctgctttgcgcgttgattgttttcatcggaccgattgcgacctctgtttgtttcgtgatatcgacggagtgcggccgaaaagtatccagctttacaatgtcaaatttcacgttgggcgtcccggtgattggcgtcatctcatccgtagttttcctcggcagtcatcttacctttgtctttttgagcggcttaatcttggtgtttaccggggccatgatggcagtagccttttcatttcgggacgcttaa

SEQ ID NO: 190505 - DNA, 312 bp, Klebsiella oxytoca
gtgcatgttatatcacgagccccttttgatgaggcggcaagacactatccgaatgatgcagcggccatcgatgacacctatcgtgtactaaagcgggttgtcgcaaaaaaaccggatgagctaaagcgatactttactagtctggatcgcatgaaataccgggagaaatggtgggttatcgatatcggcggtaataaccttagaatgatgttttttgctgattttgagcgcggaaagatattcgtcaaacacataaccacccatgctgaatatgatcgcttaacgaaatattatcgggagcacaaagaatga

SEQ ID NO: 190506 - DNA, 417 bp, Klebsiella oxytoca
atgatttttagcgatgccattaaagctgcgaatgacctggccagtattgtccctctgctgggtggcagctcgtcccgcaaagattacgaagaggcacttaaactcgttgaatatcttctggaacatgatccggacagcccgctggttgatatgctgactgcccgcatcgatgcctgggaagataacgcggtggaatttgaagaatttaatacgcgcatcgaagcaggcaaaaacggtgtatcgttgctgcgggttcttatgcagcaacacgggctttcacagtccgatttcgaaaatgagataggtaaaaaatcgctcgtcagccggatcctcagtggtgaacgcagtctgacccttgatcacatgcgggcgctggcaaatcgatttcaaatcccggtctcgatgtttgttgactga

SEQ ID NO: 190507 - DNA, 348 bp, Klebsiella oxytoca
atgaacttacacctgaccgaatcatcagcccatccaggaatgctggctacagcagaatcagagcgcgaatactggctgagccggcagaaagcagcggttaaagccccctcagaaatcgacgttcacacgttccatgacgcgctgggcctgatgtatccgctcaactggtcaacaagtgagaacggcgagtgggaaacgttcatgctgcaggaaatggtctgcggtgacgtgacagagatatatgcccgctacggagccagatatttccggctgcgggatgtgtgcaacctgagccatgcacagatcacaacgcgcattaaggaggaattttacctgttccggaaatga

SEQ ID NO: 190508 - DNA, 588 bp, Klebsiella oxytoca
atggttcgccgtactcgcgccgaaatggaagtgacccgggccactctgataatgacggcccgtcaggtgttcagtgagctgggttacgctgagacctcaatggatgagctgacagcgcaggcagggctgacccgtggcgcgctctaccatcacttcggtgataaaaaaggattactggcagccgtcgtggagcagatcgatgacgagatggataaacgtcttcaggctatttctgataatgcagaggatccgtgggatggcttttgcagccgctgtcgggcttatctggagatggcgctggagccggaatatcagcgcatcgttttacgcgatgcaaaagcggcactgggtggcacttcacctgaatcgcaacgccactgtattgaatccatgcagcgcctgatacgcaatctgattgagctgggtatcgtcgacgacgtctccccggagggtctggcctcactaatatacggtagcctggaagaagctgcgttctggattgccgaaggtgatgaaagtgatacccgactggctcaggggatcaccgcgctgaacctgttacttcgcgggttacagcgtgctggctga

SEQ ID NO: 190509 - DNA, 264 bp, Klebsiella oxytoca
atggtcaaactgtatcgagatctgttttttgcacctgacacggactattttgccgcagccggtctgcttgcgcggatcctgttgccaatggcgggcatcggaattatcacgttattgtcgaagttacacggaagctacgcccttgcaggggcagtaaccgcaaccttttttctggcctacgctctgctgtcgccgcagatatcccgatatatggatcgatacagctatctgaaacagtcatatccgggcgcgataacacgatag

SEQ ID NO: 190510 - DNA, 1179 bp, Klebsiella oxytoca
atgagtacacttcccactataaaacatgttcgcagctcatggacggcggtcatcgctgttggactggcgacattctcagttgtcactacggaaatgctcccggttggcttattaacatctattgcaggaacgctgaacattaccacaggaagtgcaggtctgatgatttccctgccagcgctgctggcagccctgttcgcaccacttgtagtcattgccgcgggtgggttagaccgccgctggatactgtgtggtttactggcgttactggttatggcaaaccttgcttccgcgctggcacccaacctggtcgtcatgctggcagcccggatatttgtgggcttctgcataggagggatctgggctgttgcaggtggcctggcggtgcgtctggttcctgaaagcgctactggcctggcaacatccattatctttggcggtgttgctgctgcatcggtactgggcgtaccccttggcgcgtttatcggtgacgtcatcggatggcgctgggcatttggaagcatggcacttttcagtgcactggtactggggcttcacctgacggttatcccgccgctgcctgtgcccggttctgccagtataagtctgttcattgcacaacttggcaaccgcaaattactgacaggattgttcctgacattattacttgtaatgagccactttgtagcctttacctttgttcgcccactgctgatctcagtgtcagaatttgatacgcaatggataggcacgatcctgttcgcttatggtatcgccggcatagcgggtaacttcctggtggggatctattctgcacgttacacgacgctcactctgattgctattgcaataggccttgtgttgacaccgttgctgtttatatccgccggacaaacggtcactggcggtggtgtcatcttaattttctgggggctggcatacggtgggctgtcggtcggtctgatgacatggatgatgaaagccgctccacgggctgtggaggttgcagctgcgctttatgttggcgtatttaatacaggaattgcgctgggggcctgggcaggaggaaagatcgtggatacatttttgctgacagatactctttggctggcctgtgggctagcggttgccgctctactttcggcagtccttgctggcctcgcacaagaccgaacataa

SEQ ID NO: 190511 - DNA, 201 bp, Klebsiella oxytoca
atggattacatcactgctctggaagaggctctggggatggtggcggagaaaaatatgatgccgatacagcccggcgatgtgctggaaaccagcgcagataccaggccgctgtatgatgcggtgggattcaggccacaaacgacggttagccagggggtgaagaacttcgttgactggtataaagcctattacaaggcgtag

SEQ ID NO: 190512 - DNA, 834 bp, Klebsiella oxytoca; identical to SEQ ID NO: 148173

SEQ ID NO: 190513 - DNA, 921 bp, Klebsiella oxytoca
atgcccgggatgattaccttagttaaagcacttgcggtgcaggagggatataaccttaccgcattgcctgatgtgcgaatattgcgtgccgatcgtccacttgccagaacgccagtgctttacgatccggggatcgtgattgtctgccaggggagcaaacgcggctattttggtcagcagacctatttatatgatgaacagcactacctggcggtttcggtgccggtgccgtttgtgatggaaaccgacgcgtccgctgaacatccgttgctggcgatttatatgcatctggattttcatttggccgctgaactgatgttgcagattgaacagcatgacgcccgatatcctctcgccgcgccgcaaagcatgatgtcgagcccaatggacgacgcggtaaaaacggccgtgcggcacttgctcgaagtccttaacaatccgcttgaagcggcgatcctcggtcctgcacgggtacgtgagctctatttccgcgtattaacaggcgcacagggaaatgccatgcgcgccgcgctgaccttgcaagggcaatttggcaaaatcggtaaagtgctacagcgcatccatgctacctacgctgagccgttaacgctgacgcaactggcgatggaagccggaatgagtgtgccgacgtttcacagccattttaaagcgataacccggatgccgccgatgcagtatgttaaatcggtacgcctgcaccaggcgcggatgttgatggtgcgtcagcaaataactgctgctgcagcgagttacgccgtcggttatgaaagtccgtcgcaatttaatcgcgagtttaaacgcctgtttggtctgccacccgcagaggagattaaacgtatgcagcgatacttcgccgttccgcctgtacagcaagcgtcgatatttgtttcatcgcattaa

SEQ ID NO: 190514 - DNA, 261 bp, Klebsiella oxytoca
atgtcgcagattgataatgcaggaacttcctcatcgaaaatcaagcgtccctatcgaaagggggctcctgtacccgcaagagagcgccagcaagcctctttggctcgcagaagttcgacgcataaagcatttcatgcagtgatacaaagttctttaaaggacaagctcgtacagtttgcagatgaagaaggtatcactcaggctcaaatgttagaaaagctcattgagcttgaagatgaacgaaggaaattagaatcgtaa

SEQ ID NO: 190515 - DNA, 360 bp, Klebsiella oxytoca
atgaagctaccattcggaaaaatgataagaatgctggaagacaaaaactctcaggatattttacgaaatatattcagagatacactgacaagcagttcgttaatattattcctgatgacaccttccttatacttcaaggacagccccatcatcgtctggcttattattttaacaatgtcgatattaagctgcctgttcgttctctcctgggtaatctacactcttcgccccttatttgaagaattactgcaacgagatacaaaaataaacagagcgtactttgcgatatgggttgtcttaattgaattcggtataacgtttagcattagtcgtttattcatttcagtcattaagaattaa

SEQ ID NO: 190516 - DNA, 549 bp, Klebsiella oxytoca
atgaatattaagaaatcattaaatctgcggccttctgatttaagtaaaaagagtttatattttcaatgcatgatgtatgttgtgtttttaacgggcgctatcatttttactggaaaaaatcttgagtgtcttattaatggaatgtgtgttttatggggtcttttcgtaaataatttcggtctggctgtggtgctggtttttagtgtcttttttgctatggttctttcagtttctgctggggggtatccatatgatgattttaagccggtgttaatattttatgggaattcagtctctgttgtttgtcaggttttcgccctgctggttttgcgggcatggcagtgggatttttttgctgtggcaggaacgttccttctgactcagtttataaccggatatatgacaggtggcatccagagagatatatcagaaggcagggttctggatgatgcattccatatcatcgctgaactctgggtcctgttacccatgtcaattttttgttggggggtgtcatgggtttattatacagccctgtttaattcttaa

SEQ ID NO: 190517 - DNA, 351 bp, Klebsiella oxytoca
atggacataaaaatagataaagacagacaagacagactcctgacaatcagggaccttatccgggaaactcttttaggaaatgcggcaataatattcattgcatatattttatctctttcactgccccctcaaaacattccggactacattgtcattacattatgcctactaacaattttgggattgttatactggatgtttcaaatggcgttcatttatatcattcaactaaccaaggctcgcactgcccttttcttgtttatggtgtggatttttcttattcagtttgcaatctactataaattcgacgatatatttggagagaaactagcatacttattatttaaatag

SEQ ID NO: 190518 - DNA, 675 bp, Klebsiella oxytoca
atgtgtgcgatggatcgtagtcaaatcatagtgtacagtcaatcggaaatcatcaagcatcttgatgatttactttcaatctcatcaagtcactgctttatacgcgatgctcatggcgaattaatttatttgagccctctctttgaaaaaaacatgttgaatgacaatgaactaaaatcctggttctcgtcaatttctgttgatgttcggttagaattatttaacgccgagatcaattccttgtcagggatgggaccgtatatctttaagaatgttaaatcaataaattgtttgctaaatgtatttattgaatccatttctctaaatgatgctaaatttgtaagatgggttttcttttcagaatccacgagtttcttacctctggagaacgaacatagccgatcctctatacaaattgatgatatcttttgtttgagaaaaaaagtggatttagatttctggaaggtttttaacttgtatgcttatggttttactatatcaaaaatttctggttctacaaatttgactgaagaccaggttaaaaaattaataagaaaaattaaaaatgattgctttataaataacagggactgcttgggggtgttgattttgaatacacttaattatagccagcttgcttttaatgtaatcaaaatcctatctggcaagtgttaa

SEQ ID NO: 190519 - DNA, 141 bp, Klebsiella oxytoca
atgaagtcatgcaaagattttttcctgatgatgaaaataatgatgaagaataacataggatttttcgtggcaaagacgttgattgtgttaattaaaggaaaatccattcagtgtatgtgcgattcttctaatgatggttaa

SEQ ID NO: 190520 - DNA, 1554 bp, Klebsiella oxytoca
gtgatcactccatcctccggcggggttaaccccgccgctggtctggcgatgaaccagatcggcaaaagctttgccaacgtgactgcattaaatgcggtcacgctgcttctgaatcccggtgaaattcacggcctgatcggcgagaacggcgcgggaaaatcgacgctaataaaaatcctcgcgggcgtctatcgggccgacagcggcagcgccacccttgacggcgcgccgctgccgctcggcaatcccgcggcgattgaagcgctgggtatccgcgttattcaccaggaacttaacctgatcccgcactttacggtggcggaatcggtgtttctcggccaggagtaccgcacccgctggggcgcgctggaccggcggcgaatgaacgcggccacccgggcgtttttccgcgacagctggcagctggatattcatccccgccgcctgatccgcgacctcagcctcgccgaacgcaagctggtgcaaatcgccagagcgctgatcgacggcgcggcaaagctggtggtattcgatgaacccaccgcgccgctggaagcgcaggaagccggcctggtcacctccgcgattctgcgcctgcgggaacaggggatcgcgattctctacatttcccactatctcaacgaaatcgccgccctttgcgatcgcggcacggtgctacgtaacggcgaggtagtcggctaccccgaccgggcgcttctgcagaataccgacgcgctgatcaaaatgatggtcggccgcgatatcgaacagctctataccccgcgccagagcagcgcgcatcaggtcgatgccgctgccccggtactgtcggttcgccatctcagcgacgggcagcagttacgcgatattacctttgatattcagccgggcgagatcgtcggcgtcgccggactgctgggcgccgggcgcgacgtgctgatcgatctgctttacgggctacgccgcgcccgcagcggtacgataagcgttgacggccagccgaagcggctgcggacgccgtatcaggctacccgggccggactggccctggtgccgcgcgaccgccgccatcaggggctgattctccccttcaccaccgccgacaatatcaatctggcctcgctaccggagaccgccactttcggctgggagcaccgcggccgggcgctggaaaaagcgcgcagctggatcgaccagctctctatccgccccggccgtccggagcttccggtgcgctttatgagcggcggcaaccagcaaaaggcgattctcgcccgctggctgggcaccgatgcgcggctttttattcttgatgaacccactctcggggtggatatcggcgcgcgccgcgatatttatcagcgcacccgcgagctggcggatcgcggtcgcggcgtactggtctcatccagcgacgcgccggagctgctgggcctttgcgaccgcatcctggtgatgtggcgcggcgagctggtggccaatctcccgacccgggggctgacgctggacgcgctgctggtgacgattaacggtggacaggaacaacaggtatga

SEQ ID NO: 190521 - DNA, 981 bp, Klebsiella oxytoca
atgtcgcagaaaatgaaattattgcccatcgcgctgggcctgctctcgctcgcctccgtcaacgctctggcggcggatgccttatcacttcaggggaaaactatcggcgtcgccgtggtcgggacgcagcacttctgggatcgtgaagcctataagggtgcgaccgaagaggtagagaaactggggggtaaagtgatcggcgtcgatggcggccgcgataaccaggttcatgcgaataaccacgatattttactgtcgcgcaaggtcgatgcggtaattagcattctgggcgacagcgccgttgagcctaaattcaaagcgctacgcgatgccggcattccggtatttaccgtagaccacgtttcaaaatattcggtcaataacaccacctccgataactacaccctgggatcgaccattggtcgctatatggccgatgaactgggcggcaaaggcaacgttgcggtatttaacgcattctccagctccctgcgtatttgcggcattcgttatgaccagtggaaatatgtcctcaaagattatccggatattcacattattcaaccggagctggccgagcagtttgccaactcgccggaagatgcgcgtaagaaaaccctcgaactgctgagccagtatccaaaaggcaaactcgacgccatccatgtcgcctgctgggatcagccggctatcggtattgtccaggcgctggaagagaccggccgcgataaagacgtcaaggtcaccgcgatcgacgccggcccggaaaccctggagatcatggccgagccgggcagcccgttcgtcgccaacgtcgcccagcagccgcacctgattggccagacctccgccgataacgtcgcgcgctacttcgacaaacagaagctgcccctgcagacctttattccggtggtgccggtgaaaggcccgcaggaggcaaaagcggtctacaaacagctgggatatggcgaactgcagtga

SEQ ID NO: 190522 - DNA, 321 bp, Klebsiella oxytoca
atgcgtatgtctgtactatttgcgctgacgtctgtgttcagcgcgtttaatctcgtatttatgccattccatcccttgatgatgttatgggccttctggctctccatcgcctttattcttgtcaatgtgattgccgacagactgcgtctgtggtccggtattgcatgggggattgctgccgcggtattagtcgtttttatgcttaacggtgcacagcccaatgaagaaaaccgggtactcatcagtacattcgcatgtctcgcctcagcatggtatgccggggttcagttcagaaaagagatgcttgagtctcagtcctga

SEQ ID NO: 190523 - DNA, 507 bp, Klebsiella oxytoca
atgaattcatcaattacggttccggcggtctacgtgggcacgtatcaccagtacaactgcggcagcattttcggcaaatggtttgatttaaccgatttcgacgacgaagacgcgttttatgacgcctgccggacgctgcacgctggtgaggaagaccccgaactgatgtttcaggatatcgagggcatcccgtcacagtttgcctctgaatcatccgtaaagtgggcgtttattgaggctttccggcaggcacaggacgacgggcgtgcggctgcgtttgtagcgtgggcggagtataccggcgagtgcgactatgacgcctttgatgacgcgtactacggcgaagcggaaagcgaggaagattttgcttatggctttgtggaggacaacggcctgttaaacgaggtgcctgaatccctgcgcgtgtatttcgattatgaggcatacgcgcgggatttattcagtagtgactatttattccgcgacggttatgtcttcagaaactga

SEQ ID NO: 190524 - DNA, 180 bp, Klebsiella oxytoca
atgatatgcaatgagatttcgcatgcgaaatctcatctcagtgactgggtatcgagtcagaaacacttacggaaaatgttacgtaattcccacaccacactggacgtccagaatattctgcctaggtggttcactggaaaatcaaaactgcgctatcactactctggtctttccttctga

SEQ ID NO: 190525 - DNA, 843 bp, Klebsiella oxytoca
atgttggtgttcacagatgttcttagcatacatgatagctcggatggcactatgaagaataagacctttgcagaaagatttgaagaacttgatagggactacattgccgttatgtcgacaaaatatttgggaaaaagcgcgttcggtaacatagtacaggaatatattgattcagctaaaggcaataactggattgctagagcaaagaaattacttgaagacagttatggaaaggattctgattattacaatgagtttaatgataccaataagaacgcttggtctagtaattatcagcgcctagtggggcattacaaacctctttttgatgcagctagagacgatttgcccaattgcgtcattgctcagactaatacaactgaaagttccgggctggaattgattataaatattcttgagcgattccctgcattctgccgtcagttaagagaacgacacgacgataggacaacgtttgaaataaaagacgagtacgacgtacaggatctggttcatgctcttctcactctgcattttgatgatattagagaggaagaggcatcacccagttatgccggttcgtcatccagacaagactttcttctgaagaaggagaaaatagttatagaggtgaaaaaaacccggaaatctctgggcgcacgtaaaatcggcgaggagctgattatagatatgaaccgttaccgtgaacaccctgactgcgagacgctaatctgttttgtctatgaccctgaagtctgggttaaaaacccgaaaggcatcataagcgatcttgagcggggtgattcagaaggaaagaccagagtagtgatagcgcagttttga

SEQ ID NO: 190526 - DNA, 939 bp, Klebsiella oxytoca
atgatcatgaacgcgttcgaaaagataaaggtgaaacagcaatcttttgataccatgctagcgggttgcagaaattttggcattgaggaacgtttaaatagtatgataaaaaatatagaaataaaactttggcaaaaatatctaccaaaaatgttggaactccggacaacatcaataatccctagaagcggggagaaagctaaactggtgaatacgtttgtcatatatctatatgagaacggagaaccgaaatatctgatcgaccgtttggaagatgataaaataactgctcttatttgggatgcaactcagaagcgttttgataaagaaactgaaataacttaccgtgatgttgtatctttagatacagatattattcattattttggtgtcaacgaaataacattcaaatctataaatgattatgctctgcataatacaacgaaagcaatttatcttaaggtgtatttctatcgttttataaactggtatacgcggtacagatttgcaaaaaaggatcttattgttcatgaaagagttcagatattgcgcatgtttattaaaaatcatgttacatctgagaaagtcgacccctccatgtctgctaatgaattacttaccaatatgtatacgatgctttggtacatccatccaaaatcatcagaatacaggaagacgctacagttaaacctagattcattagtgattactggtgatttagtaaaggttggtaataattataatgttacaggaaaagctattgaaactatcaccaagtatgagcttgaagaaaacaggtacgatcaacagctagcaactcaaaaaatcactggctggctcacgtttgctattgttctcttaactcttttaacaaccgcaggcgcattagtgcaagctcatattattgaagtgccgacattgttagattttagaaaatag

SEQ ID NO: 190527 - DNA, 339 bp, Klebsiella oxytoca
atggaaaaggatttggggcgggaaatgggtaatacaacattcagatcattttacgatgtgatcagggagcttgagggagtgtatggccatcaggagctgtggctgtattcaggaatgacagatgtaacgccggaaaaagtgattaacgccaaacatagctggaagtcgccaaaaatcctgaaacgtaatggcagtattgttgctgaacgtactggtagctcggagtcatggcaactggttggtgactacaaaacaccactgtcccagcattgcgctccgccctggcaatcctgtctgatagaccacttttttatgggccattatattctcgtcgaatga

SEQ ID NO: 190528 - DNA, 696 bp, Klebsiella oxytoca
atgcagctgatccgaaaagccttcaaacgtctgcactatcctgttgatattattgctcagtgtgttcgctggtatctggcttactcactcagcctgcgtaatctggaggaaatgatggctgagcgcggcattgtcgttgatcattccacacttcaccgctgggttatccgcctggtaccgttactgaataaggcatttcgacggcataagcgcgccgtggggtgccgctggcgaatggatgagacctacattaaagtcaaaggtcagtggaaatatctgtaccgggcagtcgatactgcgggccagaccatcgatttgctgctgacggctaaacgggatactgcggcagcgctgcgtttctttcgcaaggccattcgccggcacgacgaacccgaggtcgtcaccatcgataaaagcggcgccaatactgcggctctggccacgctcaatgccaacaaacctgaggatgaagctattaccatcaggaaaagcaagtatctgaataacctgattgagcaggatcaccgtaatatcaaacggcggatacgtctgatgctgggattcaaatcgtttcgccgggcgcagacgatactggccggcattgaagtgctccacatgataagaaaagggcaatatcagcatccggcaggtgacggaatgtcacccgcagaacaattttatctgttagcttcctga

SEQ ID NO: 190529 - DNA, 993 bp, Klebsiella oxytoca
atgaaagaaataaatataaaccgcacgaggagtgaaataccttcgttagcaatcgttgttccttgttataatgaaaaagacgcctttccatactgcgtggaggggcttgccactgtattaaaaaacctccttgcaaaagaaaaaatcgctcgaaatagttatatcctctttgtcgatgatggcagtaaagacaacacctgggaacaaatcaaatccacatcgcaggaaaagtcgttcgttcgcggtttgaaattatcacggaaccggggccatcagatagccctgctggcggggttagcaaacgcggatacggacgttactgtaagtatagatgcagacttacaggatgatataagttgcattgagaaaatgatagacaaatataatgaagggtttgagattgtttatggcgtacgcgacaacagaagtagcgactcagtattcaaaaggacaacagccaataaattctattctctgatgtcaaggctgggtgtcaatcaggttcctaaccatgcggacttcaggcttcttagccggacagcgttgacagcattaaaggattttaaagaacaaaacttatacttaagggggctaatccctttgttgggttataagtctacccgcgtttattatagcagagatgaaagggttgcaggcgagtcaaaataccccttgaaaaaaatggtagcactggcgttagaaggaataacgtctctgacaattaccccattacgtatgatcgccgccactgggattatcacatgccttctatctacaatagctgcaatctatgccctcattgagaagatccagggaaataccgttgcgggttggacatctgttatgattgcgattttcttccttggcggcgtccagatgctttctttagggataattggtgaatacgttgggaaaatatacatggaatccaaaaaccggccaaaatattttatcgaagaggtagcaagatacgaaatgagaggcgagcaatga

SEQ ID NO: 190530 - DNA, 1458 bp, Klebsiella oxytoca
atgaacaccatggacgaacgaatgacaccctacactaaaagagttattgcaatgctttacctcgcggcaattttcttagtttacagcccaaccattatatttagttacgcattttcagatgattggtcgacactttccgatgttttttcagggaaaggttctccatttcaatgggatatgcaatccggcaggcccttgtatgccattgccagacgacttgcctttacgctagttcacaatatcgatgaccttgcctatcttagatttttcaccataataacggtatttatattttgcttgttcctctttttatttatagaaaaaagaaacatattcaagcgtaacataacaacgatcaccttccctttattaatatgtttggcacccgccatacaagtatatagctcctgggcgacatgtttcccttttgtactatctatactccttgccggaataagttatgcgacattaaagcccaccaataagaaaacgacaattataagatttgcagcatccgtcattattttatggtttgcatttgccatataccaaccaacggcgatggcatttttatttttcgtcatgcttgataactgcctgaaaaaagacaaaccattttccatcagcgttgttttaatcagtggcgcagttttatttatcggcatgcttgctagtctgctattttcaaaatttgtacctgtatggttatatggcagttcaattgaacgtgccgagttaacgaataatctacttgagaaattacgatggtttgtcaaagaaccattgattaacgccatcaacaactttaatataaccccgggcaccttattcacaacgctgtcattaataatttgcgcaataggtttattttcaataataaaaggcaaatcaggacctattaaggtgctcatgtttattatcatgggaattggcgcctactctccaaacttattagtcaaggaaaactgggctgcatataggtcgctgatagcactggaatttttcacgtgtgctcttatcattattggggtggatgccttgacaagcaaactcaatgtagcaaaaaaaacgctccccatattgacggtattcgcaatgatcgctgcctcatacaatatctttaatggtttcattatcccacaaaaatcagagttaaacgcattagcaagcgcactttcctacaaggtgggaaaaacatttacaggggatgttctttttgacattcaagatcccgcctataatgcctttactaaaacacaacgttatgacgagttcggtaatatttcacttgcggccccctgggctatcaaggggatggcggagcaaatcttaatcagcaagtccatgcatttcaggcttccagaaaatgttattctgacggcaaaggagcaatgcgccactgattgcatcattataaaaacgggcgatgccatgaggagttcaacctccaactattga

SEQ ID NO: 190531 - DNA, 1215 bp, Klebsiella oxytoca
atgtatattccgcgccccgcaaaattgctgtttaccatcgatgacggctggaatacgttcctcgaaaaatttggtgaccgcgtcactccctggacccgcctctgcgttgagcgcatgctcgcctgcggcaccgccgccatgggagcgaagcgatactgctgcgcctccccgtactgcacccactcccgcttcttctgccagacctgtaaatcaaaaggctgcagctcatgtggacataaagccacggtgcagtgcattacagagcaacagcatattttgcccgactgtgactggcagcacatcacctttaccatgccccacctgctgtggccctttttcaacaacaactggcccctgctcaacgctctcttccgtgcagccacacgcgccaacttccggtgggcccgcaaacagggcgtggaggtcggtattttctgtgccctgcacacctacggtcgccagctcaaccagcatccccacattcatctctccgtcacccggggcggactcgatattaagcacggcgtctggcgcgacctcttctttaagaagcacgctgtagaagaaatctggcgcggggccgtcatccgcctgctgcgccacagccataatctgattaatcccggcagcctgccggggctggggcatatccacgacaacaggcagtggcagcggtatctgcaggcccagtacggacgtcgatggaaggtccattttgcgaagaaaactcgcggagcctggcggagcgtcaaatacctcggtcggtacctgaagcgaccgccggtgtcggctgcgaagctgaggcactacagcggcggtgccttggtgcaccactattacgacctccggacgcaccagtaccggcagcagacgctgccccaggaagagatgatcgggcgctatatcagtcatatcccggcgaagcactttaagatggtgcgctactacggatttttgtccaaccggaaacggggtgagctgctgccgaaggtgtatgaagccctggagatggcggcgcggaaaaaaccggagcagccagacttcgcctcgctgatgaaggcgttcctgcgcacagacccgtacaaatgcatcctgtgcggcaaccgactgcgatttaccgttgcgcaggctggcaggctcgcatcggaattagtggcagaaagactgcataacattgaccgtaaacgatggctgctgtcacagactgcaggataa

SEQ ID NO: 190532 - DNA, 237 bp, Klebsiella oxytoca
atgataaagccggaaaactccggctttatcccgcagggggaaggaggagctgaaaatcgcctgctacgtttatggcctgaaatccagaacggcatttctgaaccactgatacgtctccacatcgggaggaggcgggagtttaacccgtgtaatggcggacattaccgctttacagagctctgcatcacctccggtcggagttgccatgagcaccagaccatccggcgagagaagtaa

SEQ ID NO: 190533 - DNA, 2535 bp, Klebsiella oxytoca
atgataaatgcttttgaaaaatccaacctttggcaattaactttgggcttggacgacaatgaagatattgaaagattgaggaatagctattttgactttagaagaaaaattgaacccttagtaaaaaacattgaatttgaaatccctgggctaaccatccatgatatatctcacatagattcactttgggaagtggccgatcaaataataggtgaaactctttatttaaaccccattgaatcatatgttttagggggcgcattcctgttacacgatgcagctcatgtaagtgcagcatacaatggtggtttcactgctttaaaagaaagagatgaatggaaagatcttatctcactaaaatacaataatactgagccagaaaaaaattccgaatcagaaaaaatggctttatttgaagtcgttagacaattacatgcaaaacaagcaagaaatttaattcaacattcttggaaatctgaaacaaaccagaactattactttcttatagctgatgaagagattagagactattactcagaaataattggggaaatagctgaaagccaccattggtcagcaaaaaaagtcaatgacaatttctcaggaagaataattaacccccctgcattcttcaaaagtacaaattgggaagtcgatcctctcaaaattgcatttattctgcgtacaactgatgcatcgcatatagattcgagaagagcacctacctatgcatacaatatccttaccccgcaaggcctttccaaggatcattggcatttccaaaataaacttggtagagctaaattggttgatggagaaaaccttagaatatcatcgggttcctcatttaacgaggatgaacgtaacgcatggtggttagcattcgatacagcacgaatgatcaatagagagcttaaagatgctaatagttttttaatcgaatcaggccgccctcctttagcagctaaatcagtattaggcgcagaatcaccaaagtctttttcaaaatatgtactagcaaataattgggaacctgaagacatttcagttcatgtgagtaatcttccaaggctaatttcaacattaggagggaaagcactatatggggaaaataaatacgtagctctaagagaattaatccaaaatgggtttgacgctatcactgcagctcgaaaccttggctatcttgaaagttttgaaggtcatataaccatccaactaaataaaattgacaacaagagttggatgttaaatataactgataatggcttgggaatgagtagatatgtgttatctgatgtcctgctcgattttggtaaatcattatggaaccatgatactgtcaggtatgaacacccaaaacttgcgcagactggttttagttccattggtcaatttggaattggtttttactcggcattcatgatatctaactatgtaaaaatcataacgcaccgatataagttgaaacctgatgaatccaattcccattggaaattaaccttccctaacggccttgaagaaagaccattcatttcaaaaccaaatagccaagaggaattaaaaaaacatggtactactatctcacttcgcattgaaaatgacactctaaatgatttattaaaaaaaaaggaaggagaaataattagtgaagaggaagcacatgacgaactcaaaaaactaataatgtggatatttcctgcttgtgaaatagacttgcatctaatcactaaagaaaaaagagaaaaaataatatccgcaaatgattggctgacaatatctgacaaagatctacttataagaataaacaataaaagaacagatagcaaactttatccattgaagattgatgggcgtactgtcggacgtgtaagaatcactaaccattcttattattttagtgatgaacattcacctttgattgtatccttcaaaggcgctcgtgcaggaaaaatttatggtctcgatggtttatgcttatcgtttgaaaataacggaaaagcagagagaaatgatgcattaccgaactatcctcttgaaagctgggttgattgggctaaagaaattgtcaattcagaaccaatgctctcgattcaatctttacttaaacttcacgttctcttgccaaatgatgatctaaatgtttggttagacagtcataaaagatgttcgttagcagagattaaaaatatgctggttgtttcagatgaaattctctttcatgacggatctatcgattacgatgacgatgatggcgtaagaagatcagatttcgaaggtgacttaacgctcgtaaataatattttaatcataaattcaaatttaagctattatttacacagcgaattcacatttgagaaattaattgaaaaatttaatcttcctagtattagttatgtagaaaaactagaaggtttgattaaagagatttggggggattttgaagaaaaaagtgactacgaaacaattgggttagttaacggcactgaaataataaggtctgtgacaaaatattctaaatttacctctaagtaa

SEQ ID NO: 190534 - DNA, 735 bp, Klebsiella oxytoca
atggcgcaggatgcctggattgtgcaattgcagatgctattaaatcatatacccgtcaaggatattatggttaatgcggttggaagttttgttggtggtatagcactcatttggctcgcaatgagtaagcatggagttcgtgttttaaggtcaaagttagcaagacctaatgttcgtatcgaacgacgtagaacacctgaaaatatattcacagggatagagcttggtgctccatctcgctgggttgagcagcaactaggtgttcctaaccgcataggtgataaatggtggggatacaggtattcagactcactggtttctctgacattcaacacaaatgattctatcgaaaccattgcagtggcattgattgaccctgatacaactttcgaatttccatcttggcacctttgcttcccaccgctgggaagattaaccctaaaagaccttatggaagaggaacacttaactttggagtatagggaatcctcacggcatcaagaactcgtagtttcaggaagagaagggccaccaggagcatggaattatgttgcctttggggcattgtcgcctcatgtccctgggcagttgttaccgagtgatttcgaatgggatagggagagtgaaactcttctgagcaactcacaaaacgtaaaaatcaactgggcagcagtttcaagcacctcatacatctatacttttccatgggacttaggtttaaagcttcaagcttga

SEQ ID NO: 190535 - DNA, 729 bp, Klebsiella oxytoca
atgatcccggcgaatctgtcactggtccccctgagcaaagagtgtcgtgctgcgatgcaggccatcgcggaagtggagagaaaattagagcgtggcgcctgtattgctgagtttgcttatgcccgggcgttcttccgtatcctgaacggcagcaaacgtgtcaccgtgaaggatatcggctggttttctgcgggaatgacagaacaggagctgcgggggaaaaagcaggcctggctgacggcgatcgacaggctgattgagagccgtggcgcgtgttgctggttaccgttgtcagcccaggatggctggcgactgttccctgatacacagtttcagtggtcggaacgctgtcgccggcagagtgaactcagtgctgaaaaatacacccgccagcggcgtaaagaggaaagcctgcgcgaaaccgcgtaccaggcgctgacgggtcaggcggaaatcgaactggcttttcataccccggaaacggtcagcagctggagtgcgcgctggtcgtgtacagatatacgccggtatgacctggaggagatgttctggcgctggagtgagcgtttcccgtcacttgagccgatggagcgctggacgatggcgaatcagccgttctggagtgtgatggttgaaactaatgcgctggcaaaagaaagcccggaacatgtcaggcaactggaacgctggatggtaccaaacaaactgacagaccggagccggatatga

SEQ ID NO: 190536 - DNA, 432 bp, Klebsiella oxytoca
atgcgcaatgttattacccccgaagtactgaacaccatgaccccacaggaattcgaagactggcgcgaaggaggggaggatttacgccgcgaactgacccatgccgtgatgtgtgacctgaactgcccggataactgggatatgaacggggagtaccgcagcgagttcgggggctttttcccggtacaggtccgttttacgccttcacacggtaactttcatctcgccgtgtgcagtcccggcgatatctctccggcctggatggtggtgtttgtcccggccagcggtcgtccgttctcggttatcagcacgctgtcggactggtcgccggaagccatcagccacacgctgagtctggttgcccggctcgatgccgatggctacagtcaggccagtattatcagcgtgctggcaatggagggcgctctatga

SEQ ID NO: 190537 - DNA, 2001 bp, Klebsiella oxytoca
atgtcagtgaccaagtctaaagcaaaaaaccccgcgaaaaccagcaaaagaactgctgaaatatccgaaaccgctgccctgaaagccgcacttgaggccgcacagattgagatggtgccgctgtcggcgctggtcaaatccccgctgaacgtccgcactatcccgtatccgccggagagtgtccgggacatggctgactccattctcgcggtcggcctcattcagaatctggtggttcataccctgccggacggcctgtcgggcgtcgcggcgggcggtcgtcgtctggcggccctgcagcttttacagcgcgagcagcgcatcgatgccggacatcttgtcatcgtcaagcgcatcagcgacgaactggcggtggtggcctcgatggtcgagaacaacaaccgggtggcgatgcatccggcagagcaaatcaccgggttccgcacgttgtctgagcaggggaagaccccggcgcaaatcggggaccagctgggctacagttcgcgccacgtccagcgcatgctgaagctggccagccttgccccggaactgattgccctgctggcagagaaccagctcgacgtggagcagtgtcaggcgctcagtctggaaattgacccggcgcgtcaggtagagatttaccagcgcgtgaaggcacagcacagctatgcccccgctcacatgctgaaacgcgccatcacggacaccgaaatatcggttcgcgacgcccgctttatgtttgtcgggcgtgaagcgtatgaggccgcagggggcgacgtgcgcgaggacctgttcagcgcgcaggagggagacggaacggcagacggggtgctggtcgggcgtctggtgcaggagaagctggagtccaccgcgctggctattgaaatgcaggagggctggtcatggtcactggcacgggaaggggcggtgcggaactacggtgacgaccgcgagcattatctggtcctgccggagccggagggcgaactcagcgctgacgagcagcagcgtctcgatgaactgtacgccacgcaggaagccactgaaacgtttgaggacgaagccgcgattcaggtgctgattgacgagactgaagaggcagcatcgatccgggcatggacaccggagcagaaagcggcctgtggcgtggtggtcagcctgagtgacggcgagcttcgtatccagcgcggggtgcagaagaaggtgcaggaggcggtcgctgacgggcaggaaagcacgggtactcaggcctccctgcatgtggtgagccgcagtaacccggatgcggcagagggtatcagccttccgctcctgaaaaaaatgtcgtccgagagaacgctggcggtacaggctgaactggtcaggcagccacagaaagccgtggccctgatggtctggcgcctgtgcagttgcgtgttccactactgtatcaccacccggcacccgtttgtgatgagcctcggggttcaccacagcagcctgaccagcgaagccccgaccggagaaaacggtcaggcatggcagtctctgatgcaggagaaagcccgtctggaagccctgctcccggagggctggaagaacgatttcaccaccttctttgcccttgacggcgagaccctgatgtcgctgatggccttctgtaccgcctgttcggtggatggtgtccagacccgggaacacggacatacccgccgcagtgaccttgacggtgttgaggcggcactcaggttccacctgcgcgactggtggcagccaacggcggataacttcctcggactactcagcaaaaatcagattgtggcggcgctgaacgacgccggactgaccggggccgcctcggatgctgaaaaaatgaagaaaggtgacgccgccagtcacgccgaacagtggctctccgggacccgatgggtgccgggatggatgcagtccccggatgccgcaacgccggaagaagcagacaccacgcctgacactgacgaacccacctcacacgctgcctga

SEQ ID NO: 190538 - DNA, 249 bp, Klebsiella oxytoca
atggaccacaacgttttgtccccccttgaatccctgccggatggcacgttcacccgtagtcaggcgcgagcggtcgcggcgcagtatcagaatgtggcgattgaagatgaccaggggacccattttcgccttgtcgtccgtcatcaggatgacggcagcctggtctggcgcgtgtggaattttgaaccgggcggtgaggccctgatgaaccgttacatccgggactacggggtacgtaaaacgcaataa

SEQ ID NO: 190539 - DNA, 558 bp, Klebsiella oxytoca
atggcagcacgtggcattaataaagtcattctggtcgggcatctggggcaggacccggaggtgcgttacatgcccaacgggggcgcagtggcaaacctgacgctggccacgtctgaaacatggcgtgacaaacagagcggggaactgcgcgaaaacaccgaatggcaccgtgttgtcatgttcggcaagctcgcggaagtggcgggcgaatatctgcgtaaaggcgcgcaggtctacatcgagggccagttacgcacccgtagctggcaggacgataccggagcgacccgctacgtcactgaggtactggtcgggcagaacggcaccatgcagatgcttggcggtcgtcgtgagggcggtccgactgagagcgccgcaccgcagcagcccgcgcagccgcaggatcctgctgccccggctcaacctgctcaggccccggctaaatccccgaaagcgaagggcggtaaaaaaggccgtcagagcgccgccccgtctcagcttcctccccagccgttcccggacgattacccgctgaccgatgaggatgcgcccttttaa

SEQ ID NO: 190540 - DNA, 1968 bp, Klebsiella oxytoca
atggtacataagactgagccagttagagagttagagattaaatatgatgataatggccatccttcttggtgttcttttccatcgcataagaatgttcaggttcgtggagcttgcgatgtgccgcctcatctgcctgggcttataatacttgtccatggtgttaactccacaggtgaatggtatcaaaaagcagagtctgcattatgtgcaggattgaataaacgccttggacttgaaggcactaattttgagttaaaggctaacatatatagtggggatgacaagatagaattagatgagaaaggcgtcgaaaaaagaactccaatgtctccattagtagaaaggaaattagtcactgacaatggccggtcacctgtaattcgattttattggggctattcatcaccattaggtgacgaagataagtttgttattcctttggtaagtattaagggtgatgactatcatcagatgaagcgagatggcatcccattgtatgatattttgaaaaaaggtccttatatatggggcggcggtccctttcaaaatggcacgaataatcttcattcactttggagtaaaaaaggattcaatgaagatttagccaatatacctggtgcaaaagttcaatatggtaatgaagacaaagatcgcttactaaccacagcaccaccacgaaactattatgctcatgccgcgaagcggttagctgatttattggatcttattcgagagaaatatcctaaggatacagtcaccataatttcacatagccaaggaactatggtttcaatggctgctactgcactggcaaataaagcacctgatactctatttataatgaattcaccttatgcccttcataatagtcaattgaatgccttttcaatgcctcctgaagaatgtatttctccatctggtcgagaaagtactctgtcagcaataattgataaagttgcacttcaatcaacacatttatcttcgttaggctatgaggggttgtgtgtaggtcaatcacaggataataaaaactggaagcccgatataactcttgtagcttctgacaaaaatgaaacgagaaatatcccggaaagagataatcacgggaggacttatgtttatttcaatccacatgacagagttatgggttccctccctctgcattcggtagggtggcaaggtttcccaaatgatgaaaaagggaatcctcatccacttatcacccagcataaggggtatttattccagcgaatgcttgccagaaatacaccttgtggtatagctcccgagtcaaaaactccatttggtcgattgccagatggtaaacccttttgggatgatgaaggagatgaatatcagagcagtggttttgtgtacccagatccacctcactggcaaactgtatttattaatgccgaggaagtccctgagccaattaaggaaaatgaactaagtgatttcgataaaacaagagttggtgctgagcatggcccacaggaaaaaaacggttggggagagcgtgatcctaaaactggttataagaatgacgatacttacgataatttcattaatttgtatcccgatcaggatatcgttattggtgtcaaaaaacaatcggaatatggtacttacggtagcgtaactccagtaacccgtaaggagacgtttgacgaaaaagatcgcaggatacgttcatatgtcgcacaacctacagatcatagtactttacccagtaatttaaattttatggcacgagtcgttgcttatgatttacccattggttactgtgaatcgggttgggatagggcttttatcactgatctacgccgtcgagcagactggactcagggactggatacatatttaaaaaccggaattccaaacaatgttactgagccagaaataatcagcacagaaacagcattggaagaaatgattcgtgtgaagaccaaagaatacggatattga

SEQ ID NO: 190541 - DNA, 912 bp, Klebsiella oxytoca
atgagatactatgtcgcaataccaactaatggtggggaaatttggcagtcagttgtagataatattaaaaaatatgcacctgatgatatctttgttcatgttatcgactcaagtagcaaagataatacagctgaaatagcaaataaagctttatttgatgtggttacgattcctagtagtaattttaatcatggtggaacaaggaatttagcagtaaataattttattaacgaatatgatattgtgatttttctaacccaagattcgatacctcagtctggttttattgaaaaaataattgaggtttttgaagatgaacaggttgcatgcgcatatggtcgacaactgccacattcaaatgctaatcctttagcaacacatgcacgatattttaattacccagaaaaaaattatgtatgcggattggaaaatatacctaaaatgggtttgaaaacagtttttatgtcgaattcattttctgcctataggttatctgtttttagtaagctagatggttttccctcgaatacaatattatgtgaagatatgtactataccgcaaaggcaattcaatctggttataaggttgcatatgtatcaagtgcgatggtgcaacattcccataactatacacctgttgaagagttcaaaagatattttgatattggtgtatttcatagaaatgagccatggattagacgtgatttcggaggtgcagagggtgaaggaaaaaaattcattatgtcagagttgcaatttttacttaaaaatgcgcctttatgggtgcctttggcatttataaataattttatgaaaatagtcggctataaattaggtcaacagtatcaaaagttacctgctaagttggttagaaaacttagtatgcataaaaggtattgggattttaattaa

SEQ ID NO: 190542 - DNA, 135 bp, Klebsiella oxytoca
atgctgctgatgcatctgctgtacgagtcgcagaagcgcatgatctttccttggaaaatcatcaaggcaaacaatttacaccatctttgggtcgtaaatatgatttactactcgttatggaaaaagaacatttag

SEQ ID NO: 190543 - DNA, 357 bp, Klebsiella oxytoca
atggcaagaccacccaaaccgcccgcctaccttgatgaaatcgcggcgcagcagtggaaagcaaaagcgaagcagctggcggagcgcggtgatctgacgcctgccgactggaacaaccttgagctgtactgcgtcaattactcgatgtaccgcaaagccgtggaagaccttgccacgcggggattcagcatagtgaacagccagggcggtgagagccgtaacccgtcactgagcgcaaaagcggatgccgaaaaaattctcataaaaatgtcgtcgctgctgggctttgatccggtaagccgccgccgtaatccggtagaaacggaagaggaggacgagcttgaccgtctggaatga

SEQ ID NO: 190544 - DNA, 144 bp, Klebsiella oxytoca
atgcttccgcaaccgctgacaggcggcaccgatggggtgggggaggttttcaggacaaaaaccagactgcaaggcaccacccgccccctcaaatttttacgcacggtgatttttttgaaaataaaacagacaggaaaacagtaa

SEQ ID NO: 190545 - DNA, 213 bp, Klebsiella oxytoca
atgagacaggttccttttgaagtcctgatgcacgccgaagaagcactggcatacagcaatcaggctctggctatgctggaaatctggatggactccctcggcgaaggtgatgaacacaaatctaactgtgtggccgccattttcagcttggttcatgagtcaaaagatcgtttgcagaaagcgcaggaggcttacagtgaaaaacgcgcctaa

SEQ ID NO: 190546 - DNA, 195 bp, Klebsiella oxytoca
atgcgtgagccaatcagcttagaccaggcagaatacaaatcagcgctggccgcttcactcttcgaaaccatcctggaaaaagcctctgctgaatgttcagaaacgctgctgaatctgatttctattgcgtgtgattttaatcaggaaattcaccgggcattaatcgctgagctgggtatgggagaaacgaaatga

SEQ ID NO: 190547 - DNA, 225 bp, Klebsiella oxytoca
atgactgtccacgacgctgcccccaaaagcaagcggcacaatgggggaaacaggtctgccatcaaccgcattatgactcatgtggttatgcgcccttctcgcttaattaatatatttaaaataaatgaattcaattatagcattcatgtctgttatgtatttcctgatttaactacatttatgcgaactattttttacatttcgtcatcggcttatgaaaaataa

SEQ ID NO: 190548 - DNA, 129 bp, Klebsiella oxytoca
atgaggaagctgaccgttaagccgctttcttttgggtatagcgtcgtggacagtcattcatctgtcctgtgtttcaacctgccgtatgaagcaaaaacccccgccatttctgacgagggttttctttga

SEQ ID NO: 190549 - DNA, 192 bp, Klebsiella oxytoca
atgcattccttcggccttaagattaattatcttaataaatgtagactcacatttttcttcgctagccctgagcccaaattaagcggggaatggatttcatttccttgtcactttattaaaaaaaactccggatatccagaggtaagtgtcaaagagttaaagcgtgaagtttttattttcattatccaataa

SEQ ID NO: 190550 - DNA, 135 bp, Klebsiella oxytoca
atgaacaacaacgaacagccatccaacacgactaccgagcaggtaatggaaaataccgacctagtttttaatggctacgtcacagatgagcatggagaaaccctcgctgagttttctggagttcttgttttttaa

SEQ ID NO: 190551 - DNA, 630 bp, Klebsiella oxytoca
ttgagacacagtatatttgttttattctctatttttttgttaacgggatgcctgtctagaggtcaacttcaggacggagcagtatcaaatgctcgcacaccacaagaaaagagagatgtgcttctatcttacgcaaccggggagcactcggcatcatgggagagatctagatacttagattacggagaagaagatgataactttataagcaatctggtgattacttgttcggcaagtgaagatcgagattgtgttaaaacgttttataataaaaaagcagatgaagcagaaattaatttcagaaaaaaatgcttttcagataacaattgcaagaaaaatcttttagttaatgagaattcaagagaactaaaccagcaatataatcttctaatttcttataatagatttcaatctggagatgcagattatatggcccgcatgatctgcggtgccatctccaaaaatcaacgcgcaggaatgcctcgctaccaatccgaaggaattatccgaggaattagtggaatagagcccataagcagggacatccttgttaagattggcgatgcctgctgggtgttaagctcgtatggctaccacgacccaatgacacttctttcatccccaagatag

SEQ ID NO: 190552 - DNA, 711 bp, Klebsiella oxytoca
atgaatacagtatctaatagaatcaagtacttgcttgaatcagaggggttgaagcaaaaagagcttgcggaccggttatcaactagcgcccagacagtaaacaactggattaaaagggattcgatcagccgagaagctgcacagcaaatatctgaaaagtttggttattcacttgactggttattgagcggcaatggcgcgccaaaaaagcacaattcaaacaacatcgcccccatcgagaaatggggccatatagaaccgtgggatagcaacacccctatagaatcagatgaggtagaaatcccatttttgaaagatatagagtttgcttgcggtgatggtagggttcaatcagaggatcacaacggctttaaacttaggttctctaagtcaaccttgagaagagttggcgccaacagtgacggatatggagtcctctgtttcccggcttcaggggatagcatggagccagtgatacctgacggggccaccgttgcggttgatacaaataataaaaaaattattgatggcgagctttatgctatagctcaaggcgaactaaaaagaataaaacaattatacaggaagccaggaggaaagattttaataaggagtatcaatagagactatgaagatgaggaggatgatgaagttaatgtagaaattattggattcgttttttggtattctgtattgagatatagaagataa

SEQ ID NO: 190553 - DNA, 228 bp, Klebsiella oxytoca
atgatcaacaaaaagagtgccaaccaaacccctcttgacctcgccattaaagctgttggtggctctcagaaggttttagctgaaaaagtcggtgtcacaccgcaagccatcaacatgctgaaaaagcgcgggggaaagcttcctctttccgaggaaaagatgcggaagtacgagcaggcaacaggcttatcgcgagcagtcctttaccccaaaatctttgccgcctaa

SEQ ID NO: 190554 - DNA, 285 bp, Klebsiella oxytoca
atggagaacgcaattaaacgcaataaggacaacgcacgtcgcatcgagacatggctgctgaatcgcatctctctcatgggagggaaaaaagtggccttggctgtaggcgtcaatgagtcgcaggttacgcgctggaaatcatcgtgggtgccgaaaatggcgatgttactggctgttcttgagtggggtgttgtcgacgacgacatgtcccgcttggcaaaggaggtggcaaaacttctcagaaaagagatggccccaaagtgctcgcaacactttgaggcctga

SEQ ID NO: 190555 - DNA, 147 bp, Klebsiella oxytoca
atgcctaacaacaatcaattttaccaggtagaaatccacaaaagcattacccgtgatcgctttatccgttctgtgaatccggtcgtggcagtgaagctgcgcgccatcctggaagaactgaaacgtaaggaggtccgccgtgggtaa

SEQ ID NO: 190556 - DNA, 627 bp, Klebsiella oxytoca
atgactgatatcaccgaactggcgcaaagactgaaagcggcggcagagaaggccactcaggggaactggagagcattccaataccacgacggtcgttgtggtattggcggaggccataacgctgaaattatggtgtgtgagcacatcagcaaagaacgcccgcatgatgctatgttcatcgccctggctaaccctgccaacgttctcgcgctggtagaggctctggagaaggcgcagcgtgcgaacgctgcacaagacgaccatatcaaccagcagcaggaccgcattgagcaactggaggagggtgccaggcaaatcaactcatggcgtcggctggcgaagcagaatatcgctgagcgtgaaaaggatatagctgaactggaagctgcccgccagcgcatcgccgatctggagtcccgcaccgtcaccgtgaagatgccaaagccacacgcccacttaatatggattcaggcaggtcatgcgccagatgattattgggatgatgtagcggtatctcacagcgagaaagaccgctgctgcgatggttccgaacgctatccggtttatgcacgctgggaaattgaagagatgctgaccgccgctggcatcgagtgggaggctgagtga

SEQ ID NO: 190557 - DNA, 318 bp, Klebsiella oxytoca
atggctgagttacgagcaggtgggctggctttaatcatcgatagcattgcacctgaagatatcggcaaatgcgtgcaaacagttagcctcattccaacattagggcgctttaattccccgcaggggagaccgacgataaacagttctgaaatcgcctcgtggcttattaccggagaggtgaccgcaaaactgggggaggaatcccctgcatgggcaggaaagggctgggcgctttacccgccgcagtatctgatgcccatcgacggcgacgacttcagcaatgaaggccagcacaagaaggatcgtgagcatgcctaa

SEQ ID NO: 190558 - DNA, 606 bp, Klebsiella oxytoca
atgcgtaaaccagcacgtcgtaaatgcgcccactgccgcgagtggttccatcctgcccgggaagggcaggtagtgtgcagttttgaatgcgccagcgcgatcgccaaaaaacagacagcaaaagcccgtgaagcggcgaaggccagggcggtgaagctacagcgccaatccgagaaggaggggcgccagcggcgtgctgcacgtcgaagtgagctgaagccaatcagctactgggtccagatgactcagcgtgttttcaacgactggcggcgcgaaatgctgctggctgacgggaatggatgtatctcttgcgggacaaaaaccgcttttgcgtggcatgctggtcactaccgcaccactgccgccgcaccacaactgcgattcaatccagataacgtctggctacagtgctccgcatgtaatgtccacaagtcagggaatatcgaagcgtaccgttccgctctggtcgatctgatcggcgaagagcgcgtgcttgcgctggaatccaacaacgaaacccaccgatacacccgtgaagagctgggcggcatccgcgccaaggcccgggcagaccttcgcgcactgaaacagcaggaggcagcatga

SEQ ID NO: 190559 - DNA, 123 bp, Klebsiella oxytoca
atgaatttaaccgaatcccaaaggtacgaagccgaaagcgtagccagagccaatctgccgccagtagcaaagcacagccagaaccagaccaaaaccaaacagccattaggagaagcagcatga

SEQ ID NO: 190560 - DNA, 780 bp, Klebsiella oxytoca
atgaatcttgaaagcacagttaaatttcactctcctaaatcaccgcaactatcagattcaccaagggcgaccgcatcagattctttaactggtactgatgttatggcggcattcggcatggtgcaaagtcgcgccccgcttggattcagtgcttttagcggaaagatgaatctgagtgatgctgataaaaagaaatccgttcagttgctaatgcaatacgggataaagcactgcgataaggtggcagccattcgcaagcttgagactaatgttaagggcaaggttctgcaaactctcgcaacttttgcatatcaggattattgccggtcagcagccagccaggttacctgctcatgctgtaaaggtcgcggcgtaatcaggaaggaaacactggtagttaagcatcccggatgtggagaaaaaacgcctgcaaaaacagcgaatgaacaggtagaagagacgtgcaagaaatgtagtggccgaggcgtcatttcaacatcctgcgtgaagtgcagaggaagaggtatggcattggatcgcaagaagtcagaggagcagggtgttccagttatgagcgcttgccgtcaatgctcaggcaggggatatgagcgccttccggcagcgtcctgctatcgatccatccgccagtttactgacgctatttcaccaggtgtatgggacaaggccgttaagccattctatgagactttaattgcagagattgaaaaggcggaatcagcggcaaatgcgattttatcgaaagttactagcaaagtttga

SEQ ID NO: 190561 - DNA, 672 bp, Klebsiella oxytoca
atggggcccacattgtcaatgaccgctatgttctgtgccgcggtaggtagctcggtatcagtatcggagtcgctgtcagcatcagaatcactatccgcgtcgctgtccgcatccgaatcactatctgaatctgaatccgagtcggaatcactgtcagaatcggaatcgctgtcggagtcagagtcgctgtcagagtccgaatcgctgtcagaatccgagtcgctgtcagagtccgagtcgctgtccgaatccgagtcactgtcggagtccgaatcgctgtctgaatccgagtcgctgtcggagtcagagtcactgtcagagtcagaatcgctgtctgaatccgagtcgctgtcggagtcggaatcgccgtcggagtcggaatcgctgtctgaatccgaatcactgtcagaatcggaatcactatctgaatcagaatcactgtctgaatcagagtcgctatcgctgtcagcatccgtatcactgtcggagtctgaatcactgtcagcatcagaatcgctttcagaaaccgaagagtggtggtctttgtttgaggtgccggcgaacattgccgcaatacccagcaaagccgcgccagccatgacccaaccggcaatactttgtcccgcgccaccggtcgcgatgacttctgaaagatcgctaatcagcgaatag

SEQ ID NO: 190562 - DNA, 954 bp, Klebsiella oxytoca
atgagaccagacaaaaacatcaagagcagaattttaccactagaattttgcgatctccaaaaagccagtagtatgctgggttgttcagtcgatgacttgtttcattgggctgaaattaatgcgattagcctttctcttaggcttgattatttcccaagttttctatcctttgatcacgtaggtgggaaggatagcgcagagctatttgaatcactaatttcagagtacaaccaagttactctaagtgtcgaaaggcgcgtttcatacttcatgcctgacatgaacaatccagaagtatatagagatggaaataggatacatgttaaaggatgggcttttggattgtgggctattaggcctaataaaatcagtgagttgagttctattggccagatagagcttaatgaagctctcgttgttgaccagcatatggatttgtatattaagcatgacattcgcgcctttctcagggctgagaatgtatttagggaaaaaacactccctatattggttaggccttctcatggtgaccccaaccctgaagagattataaatgccattaataagaaaatagaatatcacacaataagcaaagatgacgtgcttctttcaaggcattggattaaaaaacttcatgattgcattgaaaataatgagggcatttataattcatttgatttggatggtttctcttatgaagagaaagaaatgtttgacattaataatgtacatggaaacgttgaaatatcggcacgtaaaagagaagaggtttataaagcagcaatttattggcttttaaatgaccctgaatcgtgcaaaggaaagaaaggtgatattacacaacaggcttgggcaaagcgcatagtcgaggggcgacatgagaaaccgatatccttgggtgaggacaagataataaaatgtctgagagaggctatgaagggtgacaagaactga

SEQ ID NO: 190563 - DNA, 372 bp, Klebsiella oxytoca
atgggtattaaaggcaggggcatgaacaacatccggcgcaacatcaatgtgctggtgagagatatagccgggcgccgggcataccgcgctgttcaggcagcattgcacgaaggttcgttggttgccgccctctatactccgattgataccagtaccctgataaattcacagtatcgggaagttgtagccagagggacgagaataaccggccgtatcggctactccgcaaattatgcaatttatgttcaggatccggctataccgcaaacgttcaggcgttcgacggcaaagaaagagtttctgcagaaaggtatcgaggatgcgaagccgcagatggttgccgctatcgttcgcgagctgtcaaaacgctga

SEQ ID NO: 190564 - DNA, 543 bp, Klebsiella oxytoca
atgtaccagctaaagataaccatccgagacagcaaaccaccaatatggcggcgtgtgctggttccagagcaaatcccctttagtgaacttcacgcggtgatccagttggcttttggctggaatgacgaacatctgtatatgttcgagaaaggtcgtaaaggtgatcccggtagcgagtatcgcgtatggggtgaggatgaaagcatgggtaacgcggcaatcacgccactatgggcggcgctccagaatgagggggacaggctggtttacacgtatgactttggcgactggtgggattgcctcgttgtgctggagaagcgaacacacgatactagtaagcagcccattggctgtctgcgcgggaaaggcaccaccccggcggaaaactcaggtggtttgcatggatacaatgaattgctcttacaggccagagattctgataatcctcaacaggccgagatccacaatttcctgatgctggatattgagcgccgggtttacgacctgagcagcatcaacgatagattgcaggctcttaactga

SEQ ID NO: 190565 - DNA, 360 bp, Klebsiella oxytoca
atgagaatgaccagccgcaaaaaagagatactcagttactttgagccggataacctcgagtgggtatcgggtgagatcggcgctccgccactcgatgtgtcgggcgtggcctacctgcttcacggcatgggatcgttcgataaacgacaccagctcgaatcaacccgccgcacgctcgaaagcatggttgccggtggactgcttgagcgaatgacagtgtatgaatcgcggcaggtacggcgcggcggtgaaaccaacgcaacggtcgtgcgttacggtttacccggtcagtgcgctgttatgcgcgatactggcggcgctgataacgcaatatcaggcgaatatatgcgggtcagttaa

SEQ ID NO: 190566 - DNA, 396 bp, Klebsiella oxytoca
atggaaaatgaaggcgacaacgtcatcactctggtgcagccaaagcgtgacgaagaaaagctgttgaacatcaccgtaattgacaagaaggactacaggcagcagcactgcaagcatcgtgctatcgaagtttgcgaaacagaccggattgtacgttgccttaactgtgggtgcacggtagacccattcgagcacattctcatggtggcgactaatggcgagcatatcgttaccgagattgagcaacttcaccaacgccgtgacgaactgcgcgaggcagtagctaaccttgagcgcgaagagaaaaacgctaaggcccggctacgctctgccagaacgtcaatcctctttgctgagaatgacctgaaaaacactgagcaggggataaagcaataa

SEQ ID NO: 190567 - DNA, 654 bp, Klebsiella oxytoca
atgaccaataaccagttaacagatgaacgcttggtaaaaattctctctgaaacccaagcgacaataatggagcacaattcacgctgcgttcgtggctctgtggaagttgatgcgcggctgtttgagtcgatgcttatggagctacaggaacgccgcaattccgagatggacagcgatccggtggcgtataccgacgagcgcaacctgggctatatcgaccgagggagagagacggcgtatctgtggggtaagcagaacacagaggtgggagatatcgcgctctatcgccacgcgcagcagccggtagataacacgttcatccctaaaaatttggacaaagcgttaggtgtcgttggtgtcgcgctaccagaatcaaaagaggagttcaattttcagattgagcgatggatacagcgattgattgaccgggttattcgttactctgatgaattcaaagagcagccagcggcggcagtgcctggccgctccatatttgaaaaatggtgggaatcacagaacggagcgcccctcgatggctgggattcgctaaggacagctgacggttattgtgatgatggaattgatgggcagtttgaagcctggaacgccgccatgctcgcagccgccccgcaggaggtaccagatggaaaatga

SEQ ID NO: 190568 - DNA, 837 bp, Klebsiella oxytoca
atgagcaagcaaatcaaacaccctgcaattcgttaccacggcggtaaattccgcctggcaagttggataatcagccatttccctgagcaccgttgctatgttgagcccttcggcggcggagcatctgtgctgcttaaaaaagagccgtcagaagcagaggtctacaacgacctcgacggtgacgtcgtcaaccttttccgtgtacttcgaaacccggaaacggcgcagcaacttgttgacgcctgcgctcttaccccttactcacgcgacgagtttaactgcgcgtatgaagacagtgaaaaccgggtggaacaggcccgccgcctgattgttcgtgcaactatgggattcggcagcgctggcgcaacaaagggtaagacgggttttcgtctggataccaagcgtaatagcgccaccgcgcaacgtatttgggcgcgacaacctgacaacctcgcagctgtggacagccgctttgctggagtactggttgagaatcgaagcgccattcagtgtatgcgtgaccatgacaccgtttctactctgcattttgttgatccaccttacgtacatgagacccgtgtagagacggctaaaaacagcgcttaccggttcgaaatgaccaatgaagagcatatggaacttcttaacgtgctgaaagagctaagcggtgcggtgattgtttgcggatataacagcgatctctataacaatgcacttaccggatggaagcgggtaacgcgcactactgccgccaatggctttgccggttcagtacagcgcacggaatgcctctggcttaacccggcagcacagcagaaacaggagcgtgcagcatga

SEQ ID NO: 190569 - DNA, 417 bp, Klebsiella oxytoca
atgaacaacgacggattaacactcaaccagctggcagaacgtaatgccgcattggtcactgaattagtgaaattacgcaccgagcgtgaccagctggctgcggagaatgtggggctgaagaaaacgttgtccaccatcgccaattctgaagagtaccacggtgacatggtggtgtgtgacttcgacactctggtaacagcggcatgttcagcactgcatacccccgccaccgatcgcatcgtagccgaagccgaggcgcgcggggtagagaagttcgcggcagagcagcgaggcgtagcggagcgtttgaaaaaacgcggcggtgatgtggtgatgagcagtattaaattctgtttagaaagtgcagaagaggctgaagttttcgcccagcaactgcgtgcgggggccgacaaatga

SEQ ID NO: 190570 - DNA, 825 bp, Klebsiella oxytoca
atggctaattcattcagacaaatgcgagacggcgacgtcatcaagcgcaccgatagcggcatgttcatccggattgatgaactgcatgtcaaaccaaatttcaatcgccgcgaggacgacgagcgtacccgccaggctgatgacgaattatttaattacctgatgaatggtggaaccgtcccgccgctggaagtcgttgttcgtgatgagggtggcgtttggattgttgaggggcatcgtcgccaccgcgcatatctgcgctgccgtgaggcaggaaagcccgttgagcgcatccagattatttccttcaccggcaatgacgttgagcgcatcgctcgcatcatgacgagcaacaaccagctgcctctgaccgcggttgagcaggccgctgtagtgaaagacctggccgcattcaacctgacaacagcggaaatcgcaaagctggtgcacaagtcgatcccgacggttgagaagctgctgacgctcagtacggctgaccacgcgattcagaagagcgtgaaatctggtgaagtatcggcatccgtagcggtagaccgtatcaaagagcacggtgaaaaggctggcgaagtgctggagcaggataaggccaaggccgctgctgctggtgtaaaaaaggtcactaaatcgtttgtgtcgccggaaatcagcgtgaagaaagcgcgccgcgcggtagaactgctggcgctggctcaaatcagtgacgaaggagttatcgccctggacggcctggcactggctgaaatgctggaaattatcgacgaacagaaaaaaatcgctgcggatcgcagtaaggcggcagcatga

SEQ ID NO: 190571 - DNA, 1641 bp, Klebsiella oxytoca
atgttccttgccctggataaactcgtcaatcaggggatacgcaaagctattgttgcggtccctgaaatgtctatcggaggttcgtttaaagatactgaacttacgaagcacggtttctttgctgactggaaagtaaaacctgaaaataatctgtgcattggcggtggagaggctgggaaggttgaagcctttaaacgatttatggcgagtcctgacgacattatggtctgtactcatgccactctgcgttttgctttcgataagctgaatgttgaatcgtttaatgactgcttggttgctattgatgagttccatcatgtctctgcggatgaaaacaaccgtttaggcaatctgattgatgctctgatgaaaggttctaatgctcatattgttgcaatgactggttcttacttccgaggggataccgtacccattttgcaacccgaagatgaagcccagttcacgaaagtgacctatacctactacgaacagctcaatggataccagtatttaaaatctttaggcattggctaccatttttatcagggttcatacatcaaggcactaccttcagtgctggatgctagcaaaaaaaccatcatccatattcctaatgttaattccggtgaatcaacaaaagataagcatgccgaggttgacgccatcctggatgtgctgggtgaggtgcaacaacaagaaccagataccggtatctatctagtgaaacgcaaaagcgatggcaaattattgcgtgtagcgaatctggttgatgataacccggcagaaagaccgaaagtacaggcgtatctgcgtaatatccactctgccgacgatattgatattattattgcgttaggtatggcgaaagaggggtttgactggcctttctgtgaacatgtgctgaccattggttatcgcagctcgatgacagaaattgtgcaaataattgggcgtgcaacacgggattgtgagggcaaaactcacgcacagtttactaaccttattgctcagcctgatgctcaagatgatgacgttaaagtatcagtaaataacatgcttaaagccatcaccacttcgttgttgatggagcagattatggctccaaatattcaatttaaaccacgatctcattggactggcgagccgttacctgccaatacggttctagttgatgatcatgcattaccagtatcagacaaggttctaacaatccttaatggcggtaaaaacgagatcctggcggcgctaatggcgaatgagcaggtggtcaaagaggctattaccgagtcaacaccacctgaggtaattactcaggtagtgttaccatcggtgatacaaacgcttcaccctgacctgactgaatacgaactagaacaggttcgcagtggtattttgcagagcctttttgtaggtcaatgtggtggtcttattgatgaatctgatttaccgacagatgctattatcgataacactccaggtcagagtaccggcaattcgaatgactcattaaacatcaataatcagtttataaaaatgggtgataaattcatcaacattgaaaacttgaatattgacttaattgatgcggtaaatcctttccacggtgcttatgagattttatcaaaatcagggctttgttga

SEQ ID NO: 190572 - DNA, 2679 bp, Klebsiella oxytoca
atggctgttaatcaggcgaaaatttttgaacacctcgaacaactggttgaaaaccctgagcaagacgaatttatctacggctttttaaccgcttttgagttccctaaatctaccctgagtcagattcggcaaggtggggcgcgtaatgttgcgaaagagccaggacacgttgcattaaaaaataaactctactaccagccagtagcggataatgatgatcttgaatctgcttttgaccaacgtattgccgatgcggcggttgcaaaaaataagattcgctttgttctaatgacaaattttgttcgctttttagcctgggacacactgacacaggagcgtctcgatattgagtttgaagagttgccccgcaactatggttttttcttaccgctggtagggctggagaaggctattctcaatagtgaaaacccggccgatgtgaaagccgctgagaagatgggaaagctgtttgatcttatcaaggagcgtaatgatttaagtaaagcagaagatattcacgcgcttaatgttttcctcattcgtttgttgttttgcttttttgccgaagacactggcatctttgaaaaaggtcagtttacttccgcagttaagagctacaccgccgaagatggcagtgatttagatcagtttctgacagacctgtttgccgtgatgaacagcaaaccgaatagcaaattacgcctgtcacttccgattcatatagccgcattcccttatgttaatggtggtttattcgccagtgatgagcctgttccagagttggggttgaagggcagacgtatcttacttgaatgcagtgcaatggactggagtgagattaaccctgacattttcggcagcatgttccaagctgtgattgatgtggagcagcgtagccgcttaggacagcattacacttcatacagcaatatcatgaaggttatacaaccattatttctggagccattgcgttcagagcttgaaaaacaacgcacaaacacgaatggtctcaaacggttgcttctccgtctggggaaaatgaaagtttttgatcctgcgtgtggttcagggaacttcttgattgtcgcctataaagaactacgtcttttggaaatgggcgtgattcaggctcttttgcaatgcgacccacaatccatttttatgagcggtatccatctcgaccaattttacggcattgagatcgatgattttgcctgtgaaatagcccgcctttccttatggcttgcagagcatcagttaaataaacagtgggaagaacatattggttcagcgccaccagcgttgccgttgcgatcatccggtaaaatttggagcggtaatagcctgcaaaaagactggcaggaagtatgtccaaaaggggttgatgatgaagtttatgtgataggcaacccaccttttttagggacgctaggtcggtctgatcaacagcgtgctgatatgcaggctgtatttagcggcttcaaatcattaggtggcctagattttgttgcatgctggttttggaaaggtgcgcagtatatccaaaacagccgagcggaactggcactggttgccaccaactccctttgccagggagagcaggtagcaacactctggccacctattttcgctctggggttatatattcatctggcatatccgaccttcgcatgggaaaacaatgcccgcgataaggctgcggtacatgtcgtagttgttgggttatcaggacgaagtaaaacgcgtcagctctatcagcaggttgatggggtttggcatagtaagcatgtgaacaatattagtccttatttggtcgaaggtagtaatattgccgtgattgcaaaagctaaaccgatggttaagggaatagcaccgctgattcgaggcaatggacccacggacggcgggcatttgctattgaatagggctgagcgtgatgcattactccaacaggagccgcaagccgctcgctggataaaaaaaatattaggaactgacgagtttctttatagtcaagatcgctggtgtctctggttagtggggattactgatgaagaacttcaactgatgcctaatgtatacagccgcgttcaaaaagtggctgaaatgcgcagaaaaagccctaagttaagtacacaaaaaaaagcaaacacaccacacctcttcgatgagattcggcaacctacatctggagattatatcctaataccgagagtctcctctgaacgcagaacgtatatccccctcggtttttttaactccgatatcatcagttctgacagaaactttattctaccaaatggtagcttatatgaattcgcgattatgacttctttaatgcataacgactggatgcgtctggttgcaatgcgtcttgaaaatcgttacagctacggcaataaagtagtctataacacttttccttggcctgttgtgagtggggaacagagcaaatatattatctcgttggcaaaagtagttttgcttatgcgtgaaaattaccctgaaagcacattggctgagttgtatgatccgctgaaaatgcctgcggatcttttggaagcccaccagacgctggatcaggccgttgatcgtctatatcgtgacaagccttttaaggacgccactgagcgtttgagctttctgttggaacgctacgaagctatgactaaggcataa

SEQ ID NO: 190573 - DNA, 234 bp, Klebsiella oxytoca
atgctgaatctgctggatggtaaacctgttccggagaatcgcaacgatctttccgtcaggctcgatgctcatatctccaaacagcacgcttccgtttacgaagacgagtatgttgagatacgttacttccagaaaggcactgggcacatcatctttaaacgctctgatttgattgataagatgaacgaaatagttgcccgctattttcctgcaaccctaccacctcgtacctga

SEQ ID NO: 190574 - DNA, 282 bp, Klebsiella oxytoca
atgcgcctgtccgggctacaaaatccgcaggcggcgcgggccggtagccccggtaagcacagcgcgaccggggaacattcccgggtggcggctgacgccttacccgggctacacgctcacaaccaccatcgggccggtagcccggacaaggcgcccctggcgccgcctccgggatgcagcgcgctatgcagcttccgcgccaccggaggggaaatcgggctgcctggccggaggcaacgagtatacgcgaagagcgccgtggagtggcgccctgtcgcataa

SEQ ID NO: 190575 - DNA, 318 bp, Klebsiella oxytoca
atgggctttccttcgccggcgtcagactacgttgagcagcgtctgtctgttaacacgatctgcaatgtcggtcaaaatacgctcctcttcgagcggtctggcggttacgttgtgctggatatctctctgaagccatcgcaaggtagtcaggttctaatccagcacggcggcgggacggagcttgccacgctgagaggaaggtcgctgattaccgaagatggtgaagcgatcgagggcgaggccctggacgatgttactgtcatcggtgtagtgacgtttactatctgcgatgtgcgccaggacaatgcggttgtttag

SEQ ID NO: 190576 - DNA, 240 bp, Klebsiella oxytoca
atgcatcgtcagtcaaacatcaatcaggcattccgcgagtcggtattgcgcaactccaaaggctaccagtatctgtatacaaaggattttgtgtcagcgctgcgccggcatgggatgcactttaccgactcagaggctaatgcgtggatatctagagagcagacgtactttgtcgacaaaactaccgaccatagcgaaaacaggctgtggatgatggccaacatggggagggtgatctaa

SEQ ID NO: 190577 - DNA, 507 bp, Klebsiella oxytoca
atgaccatggttgacgggcagttttccagctcaacctattttgccggggtgaaaaacattattaccgacaacgtcactgagaatgttcctaagcgtcgctatctgcattatcaggtgtatgcctggaacaactacctgatcggatgcaaagcagcgggacgggcatcggtccttaacatggaaacctatgcgttaaatgctgtatcgggttacggtgggctgaaggaagtggactactgcatcgcggagtctcgtcgcgggcagccgacaacggttggattcctgctgtatcctctcctgcattctggtgataactcctgcctcgaagcagctgagcgcctgctggatgcttttgatgagtacggtgggtcaaataccaatgggcagattaagctgtgggatctggatttcttctcagaaatttcaacgacattctcagaatatacctttgcctgcaatattatggctgatgcatggatgcaatactggctggataacaaccagtag

SEQ ID NO: 190578 - DNA, 579 bp, Klebsiella oxytoca
atgctggcacggtttatggtgcgctatccgggcgtgaatctgcagctggaagcgactaaccgacgcgttgatgttgttggagagggcgtcgacgtcgcgattcgcgtacgtccaaggccgatagaagatagcgatctggtgatgcgtgttctggccgatcgcgggcaccgtctggtcgccagcccccggttggtggagcggcaggggcagcctcaggttccttcagcgctaagcgattggccggggttaagcctcggggcgggcaagcatcagcataagtggcagttgaccggcccggagggggcaagggcggaaatctactttactccccggctggtcaccacggatatgctggcgctccgtgaagcggccattgccggcgttggggtggtacagcttcctttattaatggtgcgcgatcagttggccgccggagagctggtggttgtcctcgatgagtggcaaccgcgcagggaggtgatccatgcggtgtttgcctctcgtcgcggattactcccctcggtcagggcgctggtggattttctcagcgaagagtatcagcggatggaagaggattag

SEQ ID NO: 190579 - DNA, 1434 bp, Klebsiella oxytoca
atgtctgttttgacaaatgctaagtggaatactttctctcagttttttaaaatgttggtccagcttgttaatgtaatttatcttgcaaaaataatcccaccagctgaatatggtcttatggccatggctttggttataattaatctaggcattcttttacgagatttagggacgtcggccgcaataattcaaaggaaaagtattacatttgaattaataaatactgttttttggctaaatgtttttatggggttagttttagcccttttaataatgatttctgctccatttatatcttccttttatgagcaggagaagttatttctagtattgatcttattaagccttacttttcctttatcaagctgcgctgctgcacatctcgcgttactagaaagaaaatcccattttaaaactatatcgtttattgaagtgtcctcttctttaacagctgttattgttgcaataacaatggctaatatggggtacggcgtatttagcttggttggccaagcaatagtccttaatcttatgtccgctatacaattctggagagcttcaaactggcgtccttcaataaaaacattcatcgattttaaagaattacgtggtatttttggattcagcgctaatctttcgttgtttaattttattaattatttttcaagaaatgctgatagctttattattggaaaatatatgtcagctacaattttagggagttataatttagcttatcgattaatgctattccctattcaaaccttaacatttgtagccaatagatcattgtaccccgttcttagccgccatcaagataataatgatttgatttcaagtaattattttaactgtgtctttgttatcctagttatcaccactccgttaatgagtgggctggctttttatagtgtgccctttgtaagtttggtatttggagataattggttcttaactgctgaaatattgcgttggttggcgcctacagctattatacaagcagtgctaagtacgactggtgccgtttttatggcaaaaggacgaactgatattctaatgcgtttaggaatattcgggacttttttacaagttggcgcttttattattggtgcacaatttgatataaatacctttgccttttgttattttattgctaacatcatcaattttttcccggtaatgtatctcctttttaaagttattgaaagtagctttttgtctttcattggtaaaattttaccaatctttatatcttcgttatgtatgcttatctttttatatgttcttagcgtattttatccggttaaaagcattgtgagttttgtatttctttttagttttagttttgcaggggctatatcctacattataattttatttttgctttctcggatatttagaagtttcattatctttaaattgataaaaaaataa

SEQ ID NO: 190580 - DNA, 336 bp, Klebsiella oxytoca
atgtatggtggtgtggcaaactttttttatactaaattaggcggcaacgagaaagttaagacttttatagaatcgaagttatgctcttgggtggctttgattctgctgatgtatttattcttttcatctggttcaatatttgatttcgatatatcctttgtggcctttttgttctttatgctggttgtcttaggtaatgatttatttggcgtgttgagtttgttttcttctaaaatccttggtaaaataagctatagtatatacttgttgcatggggtggttatttattctttgttttttgttttgtttgatataaacatgcatggttttttttga

SEQ ID NO: 190581 - DNA, 360 bp, Klebsiella oxytoca
atgttaaagctgttcgctcgctacgcttcagttggggcggttaacactctcattcactggataatttttgctgctctttactcacagggcttcaaccagtcgatgtcaaactttgcggccttctgttgcgcggtaaccttttcatttttcgcaaatgccaagtggacatttgacgctgagaccaccacgtttcgctacataatttatcttttctttatgggcggcatggcatctacagttggaatgtatgcggacaggtcgcactccagccctgttattacgcttattgctttttctgccatcagcatggtgtgtggattcatttattcaaagtacattgttttcaaggatagaggatga

SEQ ID NO: 190582 - DNA, 918 bp, Klebsiella oxytoca
atgaaaatatcccttgtcgttccggtatttaatgaagaagacgccataaccattttctatagggaaatccgtcattttcagcccttccagggggaagaggttgaaattgtctttgtagatgacggtagcactgacttcactgctgttctgatgaaagagatggcgcaggaagatagtctggtcaaaaacatattctttactcgcaactttggtaaagaagctgcgttatttgctgggctagcagaggccagcggcgaggtggtaatacctatagacgtggaccttcaggacccgctggaagtcattccgcgcatgattgagaaatggcgagaaggggctgatgttgttctggcaaagcgcatggataggtcttgcgatagctacctcaagagaaaaagcgctgaatggttctaccatcttcacaacttaatcagtaatcctcaaattgaagagaacgtaggcgattttcgtcttatatcccgagaagttgtcgaacacatcaagctgctgcctgagagaaacctttttatgaaggggatactatcctgggtaggtggtaagacagatgtggttgaatacgtaagagccgaaagagccgcaggaaaaagtaagtttaatggctggaagctttggaatctggcgcttgaagggataacgagcttctccactttcccgctgagaatgtggacgtatatcggactcttcgtagccggttgctcatttttttatggggcatacatgattgtggataccctttgttttggcaatccggtgaagggatatacatcgataatggtatcgatgctattccttggcggcgttcagctgataggtattggagtgctcggcgaatacattggccgcatttacatcgaaaccaagaacagaccaagatacattactaagtcaaaggaatga

SEQ ID NO: 190583 - DNA, 1473 bp, Klebsiella oxytoca
atgatttcaatttttaaaaagcaaccgcgcacattctctttcatgtttttctgtgctttgattgcactttatgtgatgcctataatcttaacgggcaggctctacattgatgacttgggtcggactctgtatggatattccggatgggggttaaacggcaggccgttaagtgatgcaataatgcagtctatgagcttaggcggtgaactgctagacttgtcaccactcaatcaaatattaagtgttttgatactttgcattgccctgtattattatgctgcaaaattttttggcgaaattagctttataggatcgcttgttatatgctttctgttcatagcaaatccattctacattgagaacctttcatacagatttgactctttaacaatggctttgagcatggtgttactgctaattccatactcagttgccagcaggcgatacataagcgacctattttctattcttatgattataggatctctttctctttatcaggcatcaataggtctgtttgctattctggctttgattgaatctattacggcttcgaacaaaggcaacaaacatattgcttcaatgatagcaagaagggtaatgcagctgtttatagccttcctgatatataagacattcatatcttcttacttcgttaaggattactataacataactcactctgaagttattaagttaagccatgaatccttatcggtgcttattgagaacatcaaaagcttcctatggtttttgaatagctattttcatagcatgcctgtcgcattaagggttttaatcccctcagcaattgcatattcaacaattaaaatggcttatgaaatctataagataggctcaaaagataatgctatagctcttttaatcctgatattatcaccctttttagttctggtattttcaatagcacctatggcaatacttaaaagcccagtttttgcaccaagggttcttctctctttttctggtgcagctatgttttatgctttcctgatgctgcgaaatataaaaagccctgtaattttgacttttattttcgctccgttagtttggattagctttgtttacagttactctttttccaatgcgtccaagagccagtccataactgatgagataatagccacctccgtatttcaggaaacatctcaccatgaatttagcctcaaatacgttactgttaatggagaaatgcctaagtcaaggcaattgctcatggcggaaaataaactaccgcttatgtcaaagctcgttcctgtttacttgagttatgactgggtttggggagcggaacttctaaatcactatggaatgaatttagagttcaaagtattaggaagtgaaaagaaaaatatgatatgtaaaagcaccctgatcaccaagggaagcatttactcactttactcattcaatgatattctgatcattgattttctaagaactaagtgctga

SEQ ID NO: 190584 - DNA, 402 bp, Klebsiella oxytoca
atggccgtagaagtgtatgcagtgatcgactctgaagggaatgtggtcagcacaagtttgtgggacggagaggcggaatgggcgccaccagagggaatggaagctgttaaaaccggggatagtggcgcaggtatcgggtggacctataaaaaaggcaagttcacaccgccaccgccacctgaggtgccaaaagaagatttgatttctcaggctgagcagcaaaaggctaaccttatagctgaagcaagccagacgatctccatacttcaggatgcggtagacctagacatggcgacagatgaagaaagaacacagttaactacactgaaaaaatatcgcgtgcttttaagccgggttgatacttccaaggcgcctgatattgactggccgacagccatataa

SEQ ID NO: 190585 - DNA, 918 bp, Klebsiella oxytoca
atgcctaccaatgattttaaagcttttgcaactggaaacagcgcaaacgtaatttctcaggctgattatttagcccttgctgcgttagtaagcggattttcatctggtaaagcttcttccgcgcagataaataaagccctacgccagagcacggttatggcgtcggtccttgcgcaattcatctcagattctgcaggtgtggatgttcttgataatggaaatacggcttccattcttgcgaaccttaaatcaggtatgacggctcttacgccggggcggcttttaaacgttcaggtattcaccgctaacggatctgtcaccaaaacagccggcgcaaaaaaatggaagatcagggttcttggtggaggtggcgggagttcagcggctcccgctacaggtaccggtcaggtttctgtaagcaatggcggcggcgcaggtgcatatgctgagggtatctacgacgtatcagcattatcatcggccacggtgacgattggtagcggcggcgtggggggcacagcaatttcaccatacggaggggatggcgggacaacatccgtaggtactcttatctcagcacctggcggcaaggcgggattgccagcaggaccggctacccctccattccagcccgtggcaaatacaaactcaaatagcccaaccaactggaatatagttggctcatctggccccggagccgaagctgctgttgcggtgtcaaccaattacgctgcgggatcgcgcggtgcgaacagccagttaggtgtgggtgggtcgatacctgctattaacaataacgccaatacaggaggcggattcggttccggcgcatctggctgtgcaaacggaccgtctcagcccgtaaatgctggcgctgcgggcaggtcgggaattgcaattattgaggagtacgcataa

SEQ ID NO: 190586 - DNA, 1200 bp, Klebsiella oxytoca
atgtctttggacctcgacacactcggcttatcggcaacggtaaccgctgaggggataagtgcgcccgactatcagaccgttctggacaccatcaccggctattttcagcagatttatggcagtgatgcctatctcgacccggacagcaaagacggccagatggtcgctctggtggctctggccatccacgatgccaacaacacggccatttctgtttaccggtcattttctccgtcgacggcgctggacgatgcattaaccagtaacgtcaaaattaacggcatcgctcgccgggctgcgacaaactctacggtcgatgagctgatcgaaggtgaggccggaacgttaatcacaaacggctctgtgaaagatgccaacggcatcatctggaatcttcctgctcaggtgacaattggtattgatgggacggttattgctacagcgacgtgttctgttgctggcgctgtggcggcccctgccgggtcagtcaataagataaacaccccgacacgtggctgggtatcagtaactaacccgcaagcggccacggtaggtgttgctgccgaaacaaatgatgaattgcgtgtccggcaatcacagagcgttgctttaccgtctctgacgccgtttgaggcggtagatggtgcgatagcaaatatcagcggcgtaacgcgacacaagctgtatgagaacgatacagataccactgatgcaaatggcctgcctccgcgctcgatcgcggccattgtcgaaggtggtgatgctacggtcattgcaaacagcattcgtggtgtgaaagggcagggcgtaacaccctacggtagtacggtgattgttgtgcctgataagtacggaaaccctcacccggtaggtttttcaaggccggtcgatgtgcccatttacgtgaaaatcactatcgagcctcttacgggctacacatcccacgtcggcgaagagataaaggcggctgtatctgcctacattaactctctggcaatcggcgccagcgttcttctcagtcgcgtttactcaccggctaacctgggcgtcgttagtggaggcaatgcccggtattacgacattaccgaattgctgattgggacatcttcggcaggagtggctgcgaccaatatcgtaatagctttcgatcactccgcatcctgcagggttgcggacattaatctggaagtgtctgtatga

SEQ ID NO: 190587 - DNA, 654 bp, Klebsiella oxytoca
atggccgtatccgataaaacccgtagtggtgcgctggcggaggttctggcgtctgaacggaagacactaaacgaacagttgcgcgttgcgctacctggtatcatccagtcattcgaccccgcatcaattacggctgttgttcagccggcgatccgctacatcgagcgtgacaacgacggcaacaaaagcacaaaggactatccgctgctggtggatgttcccgtcgtctttcctcgtggcggcggctgtacgctgactttcccgatcaaagaaggtgatgagtgcctggttatctttgccgaccgctgcattgatttctggtggcaaagtggaggtattcaggagccagtagacgagcgcatgcatgatttatctgatgccttctgcattgtcggcccgcagtctcaggcgaagaaaatcggcggtatcagcaccagtgcggtagagctgcgcagtgatgacggggaaacaaagttgagcctcaatcctgccagtggagctatcaacggcacggcgccgggaggttttaacctgaacgggcttaaaattctttcggacggccgcctgcagctggtggatggctcaatcgttgataagcatacgcatggtggcgttgagtctggtggcagcagtacagcaccactcggagggtga

SEQ ID NO: 190588 - DNA, 531 bp, Klebsiella oxytoca
atggctaacctgaaaacgaaactcagtgcggccatgctggcgcttatcgctgctggcgcatcagctcccgtcctcatggatcagttcctgaacgagaaagagggaaatagcctcacgtcataccgtgatggctccggcatctggacgatatgtcgtggagctaccagcgtagatggcaagcttgtaacccagggaatgaagttaacccaggccaaatgcgaccaggtgaatgctgtggagcgcaataaagcgctggcatgggttgatcagaatgtgcgggttcatctaacacctcctcaaaaggtcgggattgccagtttctgcccctataacatcgggcccggtaagtgctttccttccactttctaccgcaagctgaatgccggtgaccggaaaggcgcctgcgctgaaattcgccggtggatttttgatgggggaaaagattgccgcgtgcgttccaacaattgttacggccaggtctctcgtcgtgatcaggaaagcgcactggcatgttgggggatagaggaatga

SEQ ID NO: 190589 - DNA, 309 bp, Klebsiella oxytoca
atggaccgtctgattcgtgaaatgtcgtatctctttactaagcagcggtttatggaactccaggagcgagcgcatgaaatcgcaatgagtaacagcgaacacctggaatgttttggattcattaacgacgccattgatgaatttctggaggggctaccggataaccttctttaccatgaaaagccccttatgcattacatggtgatgcgcagtctggccttgtgggatgacggtgaagaattaactaatgttcagtgggcgcaccctggctggttcggcacagccgaaaaaggagacaccatccaatga

SEQ ID NO: 190590 - DNA, 1872 bp, Klebsiella oxytoca
atgggcccggctgaactatccgaaaaactgtgggacaacgccgaaagggtggcgaaatatctgctgcctcgcgggcatctggaagggaaagagtggtgcgcgggtaacaccaatggcgattctggcaagagcctgaaaattaacctgagcgggaaaaaggcgtggtcagattttgccagcggtgacagcggcgatctgctcgatttatgggtgctggtgcgcaactgccagctgcatgacgccatgcgggaggctaaagaattcttgggcctgaaagatgacgatcatcacttcgaggccaagaaaaaaacattctcccggccgacgaaaaagggcgtaaaaaaagcgaaccattgctacgactatctggcctcgcgtggaatcactcgcgagactgctgaccagttccgcgtttctgatgcggtggtttggtatcacgatgaaaaccgcgaagtggcggcggtggcgttcccgtacatccgcaacggcgaactgctgcaggtgaagcggatcggtatcgaacgtcctagcgggaaaaagctcattatggctgaggctgactgtgagccaagcctgtttggctggcaggctatggatgccaaagcccgcgctgtcgtgttgtgcgaaggggagatcgactgtatgacctactcgcaactgggcattagtgctctgtcggtgccgttcggcggagggaaaggagccaaacagcagtggatcgagtacgagtatcacaacctggaccgcttcgacgaaatctggctcagtctggacaatgacgaagttggacgcgaagctgcgaaagaaatcgcccggcgcctgggtgagcatcgttgtcgtctggttgagctgccgcataaagatatcaacgaatgtctgatggccgggatgagcgaggatgatgtctggcaatgcctgggtacggcgaaattcttcgaccctgacgaattatgctctgctggcgatcttctccaggaaaccattgacgcgtttgagcatcgcgatgttggcctgttcaccagcccatgggcgtcattaaacagcaattttaagttccgcgccggtgaattgaccctcgttaacggggtaaacggacacggaaaaactgaactggtggggcatattgccgtagacgccatgagccagggcgtacgcgtttgcattgcatcgcttgagctgaagcccggaaaaatgctggcccgcctgacccggcaaacaatctgcagaaaatccccagaacgtgcagaaatcgtcatgacgaatgagtggttctccgatcgtctgtgggtgttcaagctcaccggtaccgcgaagtccggacgcctgctggaaatttttgcctacgcccgccgccggtatgggattgacctgtttgtgatcgacaacctggcgaaatgcggactcgacgaggaagactacggcggccagaaagaattcatcgacaccctgtgcgacttcaaaaacgagcataactgccatgtactgcttgtcacccacgcccgcaaaaccaacgaagcggcgccaacggggaaaatggacgtcaaaggcactggcgcattaaccgacatgcccgacaacgtgatggccgtctggcgtaacatcccccgcgaactggcgcagcgcaaagctgtgcgcatggggtatgaaagcctggacaaggacgaacaaaccgctattcagatgccagcgtcaatgatccgcctgctgaagcagcgagaaggggaagggtggataggtgacatcggggcaacctttgactcccggtcacaccagtttctggagggcgataaaggcccgtataactatctggctggcgagcaacaaagcgaactcgatattgagtgggaagccggaaatgcagcgaggtattaa

SEQ ID NO: 190591 - DNA, 918 bp, Klebsiella oxytoca
atgagcagcaaaattcaggggtatgtgtgggatgcctgtgctgtctcgggggtcaaaggtacacgccttatggtcatggtgcgccttgcggattattccagtgatgaaggcacgtcttatcccggcgtcaaaacaatatcacgtcagataggcgccggagaaagcactatccgaacagccttgtcggagctggaagcagagggatggctgcggcgagagaatcgtcgaaacggtaaccgcaatacttcaaatatgtaccatctcaacgttgagaaactggaagaaatcgcacttcagcaaagagcgttccttcggctggaacgtatcaaaaacaaccggtttgaccctccagaatctgacgcttcggattttgaacagtcagaatctgacgcgtcagatatgagaggctcaagcgcacttgacccttcggaatctggcaaaaacaaccgttttgaccctccagaatctggaggacatgatccacaaggtttaaaacctgatccacaagtaaaagatcatgaaccacaagaagcgcgcgcaaagcgccagaaaaaaacgtcattcgaccctgcaaggctaaaacctgaaaacgtcagtgatgaagtctggcaggactgggttaagttccggcgggaaacccgaaaacccctgaccgaaacaacctgcacataccaggctaagcaactcgctggccaccagaacgccgatgaggtgatccgtcgctctattgctggtggatggcaggggctttttcctgaacgcgtgcccaatcaaccgccagcgccagaggtcatttcgaccagcgtgggtaatggcgcgggaaatacttggtacacgcagtccaacgacggttccgcagaggtgtttatcaatcaggccgctattgaccgccttaagcgcggagctaaccgcccatga

SEQ ID NO: 190592 - DNA, 198 bp, Klebsiella oxytoca
atgtcacgcgctaacacgtcactagatccgattaaggcactcgatatcgattatcgcgatccgcgaggtgttgtcgtgcacgtcactgggtggaaccgggagaagcaacaggtgtatttcaccaggcagggatacccgcatgagtgcatgcaacctgtctggaagtttcaacagtacttcaagaggttaatttcatga

SEQ ID NO: 190593 - DNA, 261 bp, Klebsiella oxytoca
atgtcaccgacgatagctccgggtgatttgttatttttagataaaacaataacttactttgatggtgacgggatttacgccttttgtttcgaaggtgaatgttatgtaaagagactgcaaaaaataggcagcaaaattgtagtgctatctgataacactaattatcaatcctggagcattgagaaagatgctttagatatgctctacatccagtcaaaagttatctcatcggttccatttaacattaacagattcggttaa

SEQ ID NO: 190594 - DNA, 414 bp, Klebsiella oxytoca
atgaaaactccagtccaaatgcttgaagtgttcgtatcagacataatcgaaaacaccgtgctacttgaaaatatttataaaaaaagtaacgaaaattacgaaacagattgctccttaaatagcctcattcgttcgatgcaaaagactgtagataatatgaatgaatatattaaaacttacagcaacgagaccattcaccacaagcgagctgagatcaaaaatgatcttgccgatgatatattcgatgcggttcttactgctaaaaaacttgagacagttacacaaacttatagtgagtcttattttactagttatgataatgacaatccttcgtgccatatgtctgctgtgatttgtgactacgcacataaactttgtagtgacttaaaaagtatcgaagaaaagttaaattaa

SEQ ID NO: 190595 - DNA, 210 bp, Klebsiella oxytoca
atgtgggcccctgcaacagatacctgcattgaagatgcagcgttatcagcaaataaccttaatgaattattagatctgatgcacatgagttttgaaagaatgaattctcttcaatgcgaggcattgctgggtcttgctcttaatttatcagccgaagttgctatttggttaaaggaggaggaaaagcgccgtgaaaacaaatctgattga

SEQ ID NO: 190596 - DNA, 813 bp, Klebsiella oxytoca
atgtcacatagtttatacccaactaccttgtttcattttactgaaaagttagataccttatttgagatacttgactcaagtgattttcgaatttcttttgctagagaatttatacaaggccagagcacgaatagaaatttcggtataccgatggtttcattttgtgatatcagactaacacagcttacccagcatactgaaagttatggacattatggcatcggattatctaaagattgggcaaacgaaaatgggcttaatccagtaatttacatgtccaagcactcttctgttttcgataattataatctagagattaggagtttaaaatcagaacttgataagttattaaagcacgttgaagaaatgaaatcttcaggtacaaaatctcaattaactaatgcaaagcggaaatataactcagcgcttctaagttacaagagaattgtagatcctttgcgatacatgaagaattaccaagcaactttgaaacggcgcaatggcccggagatacctaactatatttttgcagatgagagggagtggcgatttgttccagatatagaaaactcaactggaaagccagtgatcgctgctccgaaaaatatatcaactcaagatggcaagagaaaatataacgagttttatgataatgacaggttgccattttctcataaggatattaaatatgtcattgtaaaacatgaaagtgatgttgaaaagatgatggtctttctgcatgaaaagtatggttcaaaaagtagcttgattcctagggttctctcaactgaattgatagcgaatgatatgtaa

SEQ ID NO: 190597 - DNA, 1122 bp, Klebsiella oxytoca
atggcaattacggtctattctcgtacattcaaaaaggaattggacatagttcaattgctaaacctttactcatcaaataacgtacttaattttagtgatttcaaggaatttgttgcgtttgatgcagagtgcccaatttgcaatgtaagcggtgcaattgttgtttcagaaggttattcgaaaacaactaataaaatagttagccaatctcatttttcgtttagaacaaaagacggaacagacgcgcacaaaatattttgcgatcattacaatggcgatgataagcaaatagattcttcaaaggatggctttataaaattaggcacttccggctctgagattacaagtataattcgagagcttgtatgtagaggtattgaacatgaagagttcaatcaggaagatattagaaacatgcgacggtggtttactgaattacgccaatcgggcactttttctgttaactacagccctcacatgatcaacctagtaagagccagcatgtattcccgcaaaggagaagatacatatattgtcgatgaagagagaaaaaataaatcttggtttgatataaacgatgaagtttatcgttctttaagattcaaatacccatcattgatgatcgatatgaccaataagaataatgctattttctataatcttgtgaatagcaccacatttactaaacaagcatatcggttagtagcacgagatcgaggttatcaggtttatgatagaaggttgcttaaagataaatatgaagcaacgataaggatagcacaaaaaataaccaggcatcacgagtttcttttcagaaagatcaggagtttatccgctgttaaaaaaaacaatccccttttggctgtatctgccttgcttctttttgtttctgactgggatgaaacaactgcaatcaacaaattcatcaaattatgtggtgtaggaaaatctaaaaataatgatgagggaaacgtaattggcttaaacccctttattcattacgatgcctggaatgttattcatcaacttaaggatttaatggttacacttccagacttctcgaaccttgatgaagaatttgccaaagaaaaagctagattaactgagctttataagctctag

SEQ ID NO: 190598 - DNA, 306 bp, Klebsiella oxytoca; identical to SEQ ID NO: 166489

SEQ ID NO: 190599 - DNA, 507 bp, Klebsiella oxytoca
atgagtgatagtgcttataatatgtattcattagccgtgtctagtcttgcattgctactgtcagtgtatacgttcttcaaatcaagaaaagatattaaatttgcacaagagaatgcaagtgaagcattgaaattgcaacatggtacaattgaacttcaaattcgaactggtataactaacgcaagaaatacaataaacaacttaacacctatattaacaccatacttagcaaaaaaacaagcaggttcattgagcgtcgaggaatcttattctcttgatttattatataaaacttatgattcttgtattgaagatcttctcaaccaatatgatgaagcatgcaaaaaatatattgatggcaaagttgacagagcaatgttcaaagagacatattttcatgaaataaaaaacataacatcaagccaagacctttcttcctattataatatagaggcaacaaagtacacatccaccttaagggtgcgcgatgagtggataactgaatga

SEQ ID NO: 190600 - DNA, 1752 bp, Klebsiella oxytoca
atgaaagatcttcgttacttcctaaaggaaagttatatcaatagcagggccttagttattggtataaacaaatataagaatgtatcccctctcgcatatgcagttaatgatgcattagaaataaagagtttactcatcaatgaattcgatttcgaggagagtaacatatcatttcttcttgatgaaaacgctaccaaagaaaatatattaagagcattttccagacttacaagggatgatgtcgaactagatgagaggattttcattttttatgctggacatggtgaaacacgaactggaatttatggtgaagttgggtttcttgtgccgcatgatgcaatcacagatgatctatctacctttatacgctgggatgaacttaccaaaaatgcagagttgataagagctaaacatatacttttcgtcatggatgcctgctatggtgggttggcattaacacgaggaataggtccaggaagtactcgcttcttaaatgatatgatgttgcggtattccagacaagtgctgacagccggtaaagccgatgagactgtcgcagattctggtggtcctttgccaaatcattctgtattcactggccatctaatagaaggccttaaaggaaaagcattaaccgaaaacggcgtattaaccgccaatggtttgatgacttatgtttacaacaaagtatcaaatgataaatcttccaaccaaagtccgcattacggatatattgatggtgatggggattttattttcaaatctccttcttggtccaatgacaattcagaggaaacaacgggtaatgatagattaatttcgattccctattttcagacagaattctctcctttaagggctgaagataaaataagaaaaacaaaacaattactggcgaatgattcatcctctatcgagttacatgactttgtgattgatgaggttaaaaattttctttctgaaacaagtgaagattttttctcagtaaacgggcagtttactaaagaagagctccttgagaggatttctaaatatgaaaacatatctaaaaatataatactaatagtttcttgtgtttcatattgggctcgaacaattcatattccattattaagtaaagcattagctcgtgcaaccgacagactggaaagaggaagtggtttaactatatggttaaatctacggtggtatcctttaataatgcagttttatgctttggggatagctgcatttgaaaataaaaaatatgacacattatttaatattttctttataaaattagactcatcactttcgagcaatggtaagccgttatatttctctgaagccatttccaatgccattcttgagctgactaggcaagatgtgtttaagcagctccccggttttgaaaggcatttcgtaccaatgagtgagcatctccataccatcttgcaaccattaattgatgataccctgtttattgggaagaattacgaaaatgcttttgatgattttgaatgtttctttgcacttgtcattgcagatctgcatcatcagcaagagcgaacagtatggggacctatcggtcgttttggttggaaagaaaaaagatcgtacaattctccattatctaatatgatcaaggaagccaaagaacaaggcgttaactgggcgccattaaaatgtgggttctttgggggggatatttctaggttctctttagttgccgatgaatatttaaaaggaatatcaaacttgcattggtattaa

SEQ ID NO: 190601 - DNA, 915 bp, Klebsiella oxytoca
atgaatgatgcaaaaaaaaagagggtagatttaaacaataattggccaaaagagttactattcccaagcgaagtgctattaaagcaaaagatgagtgataatgatctttgccaaatattttcaccagctcaattaaaacataccaataatacagagttccataatcttcttagacactaccttgagtgtttaaatcagttgcctttaagaccagacatcgcttttgattgtatctggaaagcattggatgcagagtttttcaggcttaagaatatatccggctctcgcaatggtagattcagtgtcttttataatcatatcagcaaaagttctgacacatgcaatagttatgcttcactaactgatataattccgttgcaaacgtgcgaatttgttgctaagaggatatttgaaaacaatatttcgtataaatctaatcctagcgataacaatgtcaaaagttttagaaatagagtgattggtagtttaactgaatcggtctacactgatctgctcaataagtatgagcctgactggctatctgataaagcaacaacgcaacgtaatgtaggcagattacttcaacgacttttgaagggtgatgaactaagtattgtaaatgagaagtatcaacttactactgaaaatagagctctcttcttaactgcggtcacgatgcctcagtttcgtaatgaacgttttcatggggaaactaaccctccgtttagaagtagttctgcaaaacttaaaacatatgcccatgcatattatattttccatgttgcatacattcatttgcttgaagtttttctttatcgtaatttcaatgtaattgacattgctaccacgcaaaaagccatcgatgaaaataaagaattattcttaaaagtatttagtggtgttatcaataaataa

SEQ ID NO: 190602 - DNA, 162 bp, Klebsiella oxytoca
atgatttatttcagagccgagtggaaacggggtgctctttttaagtttaaaattcaaaacaaactaaaaatacatattagcaaaactaaatacatacactttcataataaaaacgccactgtagatttattatttattgataacaccactaaatacttttaa

SEQ ID NO: 190603 - DNA, 915 bp, Klebsiella oxytoca
atgcacattctcgtcaaggaattcataaggaaaagggccatttcagaaagcatggagttaaataaacctttgcacgatgggttatattatctcgaaaaactaaatgatatcattgagcgttcttgccgagaaaacgtagaaaaacttgtcaacgaagttcattggccatcaatgcatgatatgtatagaagaaattatgaatattgttgtggagtatttggcgcctttttaattggtcaaattccatcatgtgaagccctttgcagaacagcaatagagggtagtgttaatttacactatataagtctgggagattcaatgaccaagcaaatttcctacttcaaaaatcacatagaaactgaacgtaaacagaataaaaactggaagcgcagcattgaagattctacatattctgatgaggctaaagctgaacacctacagagaatttctgataaagatctcactttagatcactatgaatatgcactaaaaacatcatttgcgttaagcaacattgatttcgatatagttagtctaaaatggcccagtatttttgaacgtttcaaagaaataggacaagaagtaggatatagaaccatttatgcagccttatgttctcaggcacataatgatgcggaagactctctaaataaaataatggctagaattacagaaaatgtaagcggaatggaagaagctcaatggattgagcaatacaatttttctctatatatggctcttactgctttagattaccacacattcgcctcaataatgtacattgcaaaatttgagattgacgtaaaagaaatgatagagttaaagcatagtattaccaattcaattttatatataattgataacggtcctcgtatgatctcggagaaaataaaaatagaatcggcgaaagtttaa

SEQ ID NO: 190604 - DNA, 222 bp, Klebsiella oxytoca
atggaagacagcattatgacagaacaaatttctttgcttgatgaccaactggtggatatgcggttcctcacgaagctaacgggacttacggataaatggttctataagctgattaaagatggtgacttccccaaaccagtcaaactggggcgcagttctcgctggttaaagagcgaagtagaaaactggcttcaggaacgtattaaccagtcccgtaaataa

SEQ ID NO: 190605 - DNA, 909 bp, Klebsiella oxytoca
atgattaaaattgatcgttcagccgagccggtaccgacctcactaactatggcgggtaatgttgttgataatgaacgtagtgccgcgcaaagctattacacagctgtaccagctcctagtaaaacttataaatttaagcgatataaagaagatgatatcgtcgaagctttagaacgcctttttcatgggaaatgtgcctattgtgagagtaaatacattggcacccagaaaatggatgttgagcattaccgccccaaaggaaaagtaaatgaaagtcggacacacccaggctactggtggctagctcttgattgggataatttattgccctcgtgcacagactgcaatcgacgtcgcggacagaagatcgctgttttagaggcagatggaactattgtttttaccgattcgatggaaaatgctggtaaggaatgtgcctttcctgtttccggcccctaccgggcgtggaatagccaagataacctcgcccttgaagtccctctattgatcaacccctgccaacatgatcctgatgaccatcttagttggcatatcagtaatacgaaggcgccgatcctattggcaaaattattgggggcacagccggatcagaagggggtaagtagtattgaaatcatggggttaaatagatttggactggtgaatgagcgggcagcagtgttacaacagattgaagttcaagtaaaaaatatttaccagctgatagacattacagcgattatgccagcctgtgaagcgagagatcgctgcctaataaagattgggcaggatatcgaggaattgcatgcctgctataaacctaaccggcagtatgcctcaatggtgaaatcctacatcgaaccgcatatgaaaacgctaaagcgatatcttgttgggttgttgccatga

SEQ ID NO: 190606 - DNA, 2154 bp, Klebsiella oxytoca
atgagaaagattaaaagactcaacgccgacatcccagacgatttaaaaccggctcgtattgttcaagaagaaagcgagttgagaaaatattttctccagtcacctaaattgcgtagtcacagccgtcctcccattaataaagaaattttttattctgaaagcgtttggtctgcattgcagaaaaccttccatagccgctgtgcttggtgtgaaacccatgttgcgtcacatgatggggaaattgtccattttcgccctctcagtaacgcaaaagggctaaaggaagaggaaagtctggattcttacggttggttggcatatgtgtgggacaatctttttttgtcgtgctcagggtgtaatcgtgtgcgtcgtaattacttccctgttgggtccgcacgagctccagttctttcgacgtggagaggtgcaaacattctagaaacggtattgttgattaacccctgtctggatgaccccattcggcacctgtcgctcagtcgtgatgggacactggtggccttaacagataaggggcagcacaccctcatgctttttgatctcaaccgaactgacctgattttttcccgaaaaaaacaaatcaatcatgtccattccttcttctccggaagggaaggttctgtcgatgaattccaaaaattttatttaagtgatgattgccctcagggtatagtaaatttgatcatagctatgtttatgaaggagcatgttggggggagaccatgccgttccacaaacaaagtcgaatcctttatcaacgacagcgtgaaacttgggtactttccatttgataacaatgcggataccccagtagagatatttgaggaaattgagcagctgagttacagggatgttgaatatgacaaatttgccagcatcttagattatgaaagtcaggcctctcgtcatctgaaaaaaatcgatattcatcattttaaaggccttggtcacttcaccctgaatctgaaacacagtgagtcaaaatctcttgccccttgtatgatgctactaggagaaaatgcgacaggcaaaagttcaattcttcaatctattgcactagcaatgatgacagcagctcagcgtaaaaaactgaacctgctctatgacgactttattgcccgggacaatggtgagtggactgtagatcatattcagcctgctgcgattagtcttacatttaatgatggtacgagtagcatgtttcgtatcgatgaaaatttcaatgccatcggggaaggtgttagcaacattgtttttctggcatatggggcaagacgctttgtgaaaccacttaagcaaggaggcctaagaaatagtattataagcaatacgttattcaatccagttgctctgttgtcaaatccaaccggatggttacaagaatgtgatgatgacgtatttctatcagttgctagggcaatgaaggagatccttgctctaaaacaggatgatatcattttccgcaatgaccaaagacatatcatggtccgtgcgcacaagcgtaacacaccgcttgaaaatatgagtgatggctacaaagctttgttttatgtggctatcgacattatgcgtcatatgcttaagcgttgggacaacctggaatatgcttccggaattgtcataattgatgaaattgaaacacatctgcatccacggtggaaaatgcaggtagtgagcgctttccggcgagcaatgccaggaatccagttcatatttacgacccacgaccctctatgtttgcgaggaatgtttgatggtgaagtgcatgtgttaaaacgtgatgaaatgcactcaatcaccgaggaagacgatctgcctaggtttcagggattgagaacggaacaacttctaacatctgagtattttggtcttctaacacctaatgatccggatcttgaacggaggctagaagatattgccggacaagagggagaccatcaggcggaatatattcgtcaggtagaacaggaactcagtgaaatgactgtgcttggcacgactctgagccagcgtgtagtccatgaggcattagcgcgatatttgatttccgtaacgcgaaagcagcctgaagccaaagatattaaagaggatgccatcagagctatccttaacgtcctggttcaaaaaggttattga

SEQ ID NO: 190607 - DNA, 669 bp, Klebsiella oxytoca
atgagtaaagatgacgtacaaaaggacattagcggactgatcgtaaatgcttttcagcgagaattctggcttaacatccaagaagaactccataccgcatacgtggctgcaaatgcgcttacaatgggaagcatcgcaaaactaggtgagccagaacaatcacgctttcgccctcaagctaggcattacgtactgaatgcagcttttcgaagagctgcagaaaactcgggtattgtttgttgtgacgtggacacgacacctaaaggtgagagttacatcatagtgaactctgcaggagtgaagattagtcgaatcgggctgaactatgatgaaaagtgcattcgaggtgcaaaacatcgttctttattagcagaattaaacgagagttttgaaggatatacgccagatttatttagcgaacgtgatcaatcagaaggtggagttggcactctaggaatgttggtcttaaatatcaacccacctcacggtcattcgcaagataatatgctggacctaaggattgtcgttccctttacaaatatgaaggggtatcactttaaccgttcagtaagcgagctgcttgagctttaccatactgaacaagctgtagtcataccagacaaggttattccacagctgaagaaacgcctgaaagaacaggaaggctaa

SEQ ID NO: 190608 - DNA, 1206 bp, Klebsiella oxytoca
atgagagtgggaataacgggatttcagccggaaaggttaactcagcttcgtgaagctcgaggattatctaaaattaatttgggtcgtttggttgaccgttccccctctacgattacgaaatgggagaatggcagtcattctcctgatgcagaagtcattgcgatcttgggacaggttctgaactgtcctgtcacatggtttatcaaaccaacggtgaaaaaagagaacaatccagttttcttcagaactatggcaaacacagcgaaagatttgtgcaatgcttctgagcgttacatggggtggttgcaggaggtttctgcaactttacaggaataccttgattatcctgaagttgatgttcctcatttagaggttacagattaccgtgcaattgatgatgaaatgatcgaagtgatggctgcaaaatgccgtcagcagtggggattaggtatagcccctattaccgatttgcttttgattattgaaaatgccggagttgtatgttctcgttttgaacagggaagcgcaatgatggatggatattctcaatggaatgagtcagagagtcgtccttacattattcttgccagtgacaaagataattattacagaagtcgttttgacgctgcacatgagcttggacacgtcgtattgcacagatatgtcgaaaggcttgattctgtcaattttaaaccaattgaggagcaagcacataaatttgcagcatgtttgatgttaccagaggaagcattttcggtagaattacctccgtttccaacgcttgagaactttatttcattgaaaactcgttggggaatgtctgctcaatccatgattcatagagctaaatcattggaaatcatttctccgctagaataccagcgcctatataaaagcgtttctgcacgaggctggagaaaaggggaaccacttgatgatcttcgcaaaccagagtcagtgagattgctgcctcgatgtataaatttgttgtttgaaacaaatacattctctaaatcaaccttacttgaaactttaagcatgtcccgtgttgatgccgaagatattctttctcttccacgcggatatttagcagataaaccattacttgatattaattcaaaaattaaactcaagaatagtctgacacctgcagtaagagaggatgagaaatcaaatgttgtcaatttgttcactcgcaaatcttaa

SEQ ID NO: 190609 - DNA, 1263 bp, Klebsiella oxytoca
atgctcagactttcacctcttcaagttcgtcaaaaagtgacaattgatgacattttttctgaaccagacgatcttggcttactcgtagtcgaaccactaaaaatatattcccctacgggtaatctgcctgtaagcagattagaagaaattaatgcattttatgtggttcatgggcgtccacctctacccgattcggaggaatttaaggaaacgttgctagcacagcgtttgagggctctcaaggataacaagcaatatcgcgagatgttgcagccatttgatattcatggcttactagcaggtgaaaataacgagaatactcttgaatcatctgtatcattctcagttcctcccgtcgaggttgataggtcggagttggtcacctctttggacgatatctttgctgatgacgatgatggattgctctcatttgctgagcccgatattttcacgttaaaacatgttccggttgaaaagaaaacacagccggacgaaattgccaaacgacagccgtgccctgatttttatcgcttttccccactgtttgagacagtccaaaatggtctgaaaacgggggcgttttcatttgttcgcttccgccatgagttaaaaattcatgaaggtgatttttttattctcaatggggttatgggctatgtagataaagttggtgagcgattggaggaatatggaccttggaatgcccgtttgcatttggtgtttgaaaacggaactgagatgaatatgcttttcctctcgcttacgcatggtctggtacgagatacagaaggtcgtaaagttgttttgaatggacagtcaatacgtccagatgaagctccgattccgacaggatatgtctatgtcctcgccacgcatagcgaccagccagctcttcaacgttttaaacctgatttgtataaaattggctttactgaaggaactatcgaagagcgcatcaaacacgctgaaaaagataaaacattccttgaagcacccgttcgtatagtcatgactacacaatgcttcaatatcaacactcacaaatttgaaacgcttattcacggttttttaggtaagcaacggctcaatatcacattacggggtttagatggacaaacttatcatccccgcgaatggtttcatgcgcctttagcgactgtgctctcagtgatcaagtacattcttgacggtacaatttcgcaatatcgaatggacaatacgacagggaagattgtggcgaagaaagatactggtcattcgtga

SEQ ID NO: 190610 - DNA, 1272 bp, Klebsiella oxytoca
atggcgctcactgacgcaaaaatccgtgcagctaaaccggatgaaaaaccttataaacttgccgacagtggcaacatgtttttgctcgttcaccctaacggctcacgctactggcgactccgctaccggtttctgggcaaagagaaaacgctcgctctgggggtctatcctgaagtctcgttatcagaagcaagggaaaaacgcgatacggcgaggaagctgatagctgagggaactgacccgtgcgaacagaaacggatcaaaaagtctgtacctgaaacagctcagacattcgaaggcatcgcaaggcagtggcataagagcaacaaaaaatggtcagcctcacatagtgagaagatactgaaaagcctcgaaactcatgtgtttccctttattggctcacgtgatattaccaccctcaggactcccgatttacttgttccagtaaaggctgccgaagccaaagagatctatgaaattgcagcgcgccttcagcagcgtatcactgcaatcatgcgctatgctgcccagtcaggcattatcacctataaccctgccgtggatatggctggcgcattaaccacggtgaaacgccagcaccgccctgccctcgccttaaatcgcatttcagagcttcttgaacgactggatgcatacagaggacaacctctcacccgactggcaactaaactcactctgcttatcttcatccgttccagtgaactacgctttgccaggtggtctgagatcgactttaagaaagccatgtggaccattcctcctgagcggaaacctattgaaggggtcaagtattcccatcgtggctcaaaaatgcgaacagagcatcttgtgccactctctactaaggcgctgaatatactacagcagatccacacgatcagcggagaacatgaactgattttcaccggcgatcacaatccatggaaacccatgagtgaaaacacgatcaataagtctttacgcgtaatggggtatgacacacaagctgaggtctgtggtcacggtttccgaacgatggcctgtagttcattgattgagtcaggattatggtcaagggatgctgtagagcggcaaatgagtcatatggaacgtaactctgtacgtgctgcttatatccataaagctgaacatcttgatgaacgcaggctgatgctgcaatggtgggctgattttcttgatgcaaacagagaaaaggccatctcaccttttgattatgccaaagtgaataatccctttagtaatcatcgttaa

SEQ ID NO: 190611 - DNA, 492 bp, Klebsiella oxytoca; identical to SEQ ID NO: 178364

SEQ ID NO: 190612 - DNA, 3414 bp, Klebsiella oxytoca
atggcagagaacgccggcggcatttattacgatattgagatggatgtacgcggtctgctgacttcgcagcagcgtgtaaatcagcgccttgatctgatggagcgtggctttgataaaacatcacgctctattgataccacagagcgttcgatgtcgagcttgtcccgtgttgcggttgcacttacagcagccctttctgtccagcaggtggctgaatatgctgacgcatgggccacggtaaataacaaattatccaactctcttcgcccgtctgaacaacttgctgaggtaactgagcgcgttttcaacattacgcagcaaactcgcagcagcttggatgctacagcatccctatatgcacgtttagagagagccaccaggcaatacggaaccagtgctggagatctggcaaaattaaccacgattatcaatcaggggtttgtggtttcaggcgcaacggcgcaagaggctgaaaatgccattattcagctatctcagggcttggcctctggcgcgttacgcggtgaggaattcaactcggtaaacgagcagggcaaccgccttatcgtagcccttgctgactctatgggggtcagcattggtcaaatgcggaatatggcagcgcagggaaaacttacaactgacgttgtggtgaatgggcttctttctcagggctcggtgatcgggaaggagtttgcgaacacaaccacaacaatcagtcaggccctgcaggttgcagggaacaacatcactaagtttttcggtgagaactccacggtaaaaacaggggctgcaattttcagtgatgcggtcgttaccatcagtgaaaatattggcggactgagcgcgttgctgactggtgtcgcggctattcttgggagtcggtatgtcggcgccttaactatggccactgcggctaaaatcaaagcagctgccgcatctcgcacgctttcagcagaagaatcattagcagctcaggctaccgcgaataaagcagctgcagacctcagggctgcagcggtcgcaaaagaacgggccttagatgagataaggctcgcagaaatgatgcggcttactgctatcagcgaaaccaacgctgcggcagctgaacagcgcttgtccgttgccagggttgcggctgccggtgcggttgataattataatcgagcactggcggcaaacagggctgctcaaatggctctctcatctggtgccagcctggctagcagggctctcgggttaattggtgggcctgccggagcggcaatgcttgctgctagtgcaatcctttacttttcacagcgcgcaaaagaggccaggaatgacgctaatgcccttgcagatagcgttaacgacctgagctcaaaattccagacgatgtcgcatacagagctggcggcaacgataggaaagctaagccaaagcctgcctgaattaagtgacgcggtatccgatgcacaaaaggaattcaatgacgcgacatctgctgtccagcgacaacagcgagaaattgcaaactggggtacgaatacaacgagagggcggcaggctgccgaggcgcttggcggcgcacaggataacctagctatagccacccttgagctggagaaggcccagaacaggctaagccagacccaaaacgctattaacattggtcgcgctacgctgaacggaacgatgaagcaaggtattgatttgctccgcagggatggacaggaagcgggaattgctgccggcatgatgagcaagttgggagatatgattaattttgctgccaaggcaaaagacaaattcaactccagcagcctcatggttgaacgcccgaaagatgttcaggagtatctggataagctacaggatcaggtaacacttcagagcgaacttaatgacaggaagcgagcgcaattaagggctgagcaggatattaggaaactcggtggatcagaggcggatgttaaccttgctcgtgacagggcagccgctgaatatgatgctcagcaagctcaacaaagcaataagaaagcgaccaaggaagcagcttcagaagccaaaaagtttggtaaccagcaggaatcagtaaaccagaaactttccgacctgaagcagcaatcagaattggctgcaggctctacgcaagagttaagccgtgagcaggctatcctgaatgctcagcaatccttagggaaaggcgcgacgcaggagcaaatagctcttgctggaaaatatgctgctgaaaaatgggatacggccaatgcgataaaggcccaggctgcagctgagaagcttctccctgaggcgcgggagaacgcaagctacaagcaggacgttctagatctgaataccgcgctcgcggccaagaaaattagccaagagcagtataacgaaacttctgaacgtttagaggctgcacataaggccaatctcgcaaaaattcgcgcgcaacaggctgtaactccgcaacagcaggccgccggtgatgtagatccggtgcagaatctggctaaccagcacgcccaggaactggcgcttatccagcaatttgagcagcaaggcgttatagctcataaccaggctctgctgctgaaaaatgcggccgacatgcagtatgaaaaagcaaggactgatgctcagtgggcattgttcactcagcaaagcgtgggctatgaggcactgggcgccgcggtagatgcgtttggtagtcaggcttccaatgcattaactggcatcattaccggcagtatgtcggcctctgatgctcttcagtcaatcggaaacacgatcctgaacgacgtcatcaatacgttcgtgcaaatgggtatccagcaggcaaaatccgcgattatgggggcaaccgctcagaatgctgcaatcgccaccacgactgcggcgcaggtcggttccttggccacaacgacggcagcaagcacagcatcagctgcaactaccacggctgcatggactccggccgccctggttgcatccatcggatccttcggtggtgcggcagtgattggcctaggtgcgctgattgccgcactggcggttggttcgtcccttgctggtaagcgtaaaaacggcggtcctgtgtcggcgggttcaacgtaccaggtaggtgagggcggaatgcctgaaatctacaaggccagtaatggcagccagtacatgatccctggcgataacggttctgtcatcagcaataaggatttgcgcggttctggcggcggcggggcgctgcaggtgaccaataacgtctacaactacgccagcggcgtgcaggttgacactcgcagcactcagaacggtagcgagttgctgattgaaacgtttgttactgatctgcagaacggtgggcccatgtccggacagatggaatcgacctttggcctccgccggcaagcatcaggcgactactaa

SEQ ID NO: 190613 - DNA, 507 bp, Klebsiella oxytoca
gtgaaaaaacttatttttgcagcaatggctttggttgcatttagcacacacgcgaaagattggactccttcatatcaaaacgatgaaatgcgtggtacagctcagaaatttctaactattgactctgaaaactctgccgattttgatttcccctataatggtggctctgagatgtcaattgttctgcgctccaaaaagaccactctgaaaaaggggcaaagcccggaaggcctgatgccaacagaggctctattactcataagtaaaggccaatttttatgcaattcgtatgatggttgtcatgtgtctgttaagttcgaccaggacaagataaaaacatactcaatgaatgaggccgcggatggcagcgctgacgtgattttcttctctgcaccctcagggttcataaaaagcattaaatctcataagcaagtaattatagaggcagaattttaccaggaaggtaaaaagcagtttaagttcaatatagataattacccaaggtag

SEQ ID NO: 190614 - DNA, 222 bp, Klebsiella oxytoca
atgatttatccacttgatgcgtcctatgctcaggaagtgctgagaaaacattatcagtatgcggatatcctcgctaatccccacaaaagtcttgcggcaaagaccacggggctcattactcatgacaggtatctatcgaaatgggatggcgataaaagcacgtctgaaattcgcaggaagttgtcgagaaacaccgaagatattgaaaccatggcggcataa

SEQ ID NO: 190615 - DNA, 384 bp, Klebsiella oxytoca
atggccgtagtgcagataacagcagcgcagatcaaacagcagttgtctgcgctcggctataccaccgttcctgacttcatgattgacgcctacctctgcaaactgtcgagcatccaggcgtgcttagatggcgctgggtacgacgagtgcgaccagatgctgattcaggcttacgcagtgaccctgatggtgctgacggcttattcgcaacgaattaagtcgcagggagcgccgtccggagcgtcacgctcgtttgaatacggcgacaacgttctcaacatgcgtgacgcgctgcaggctctggataagtcaggatgcacctcggaattgccgatcgacgtcggtcaaaaggttggcctgttcctcgttgtcggtggctgctga

SEQ ID NO: 190616 - DNA, 513 bp, Klebsiella oxytoca
atgagtgttaccccacaagaagttggctctttttttctaactcttgttgttccgattacaacaggggtggttgccgcctggtttactgctagctttgctttaaatcgcttctaccatgagaaatggtgggagaagaaacactcatcttataaccagttaattgataatttatttgaaatcagagctatatataaaaaagcaaaaattttttacgaaagatgctacaaagcccaatggaacaatatgcctgaaccagagggcgattttgattggcgtaggttttatgaagtgagcgcgcaaattcatcgattctacgctatagcaccgatctcccttagtcctaatactcgcctactcctggctaacttctttaagaatgagtcagattctgattacagcgtttatgaagaaggctacactgatttcgttgcgtacgatgacatggccaggaccacacaaaatcttattgatgcgatagttcttgatgctaaaaccgaactcaaattcaaataa

SEQ ID NO: 190617 - DNA, 1440 bp, Klebsiella oxytoca
gtgagtaacgatacagaaatgcaagtcctcgctgggctcattgtgaatagccttaacgagatgaatcgcgcccggcaactgtatgcggcaggattcaataaatccgggaataccaaacgccatcacttatggtgtgagtttggttaccctgaacggctggactttgaccacttttacaatatgtacgagcggaatggcgccgcttttggcgctgttcataaacttctcgactcatgctggtcagatagcccggttatcgtcgatggcgacgaaacgaagaagtcgaaaaagaccactccttgggaaaagaacgtcaccaagctcatgaagaagcactgggcgaaagtgaaggatgcggatcggcgcaatctggttgggcattattctgcgctaattcttcagtttgcggacagcaaggagtggggggagcctgtcgaccgcggcgtgatgcggagctctcgcgagcgtggtctggtgaagatgattcccgcatgggaagcgcaggttaagcctggagagcttgagcaggaccagaagtcgccagactacggcatgccgaagttctattatttccaggagcaacaagtcggtgataacggaaatatttccggcccgatgcgttccatcaaaatccaccctgaacgtatcatcatgttctgcgagggctcagaagacgagacttcgctggctggcattcctttcttgagagctggttacaacgaccttctcgacatggcaaagacctccggtggtagtgctgagggcttcttgaaaaacgccagcaggcagctcggcatcaatatgtcgaaagacaccaagatcgacaaaatcatggaggatgcgaagaaggctggttactcaggtttggccgaggcgctaaatgcagctattcagaagcttaactctggtacggattctgccctggtaacgcaggatggagaggcaaaagtattgtcggttgcagctgcagacccgagtccgacctggacagtttcggcaaaccagttttcttcatcagttcagatgccattcaccatcctttttgggcagcagacgggaaggcttgcatcagaccaggataaaaacgaccttgcaaagcgttgtaacggccgtcgaacaggattccagtctggtcgtgtaacggcggttatcgagcgactgtggacggtagaggttatcgagccgccgaagtctggtgaaatcaccctgacatggtctgatcttcttgccccaagcgagaaagagaagattgccaacatgaaggaaatggcggcagtagccagggatacgcagcaggcctatggcacgccagcagtcgatgagaacgaggtgcgagaggtgggcgagcttgaaccgcgcaaagaggtcactccgcccaaccccgatgacaaggtgacaaccgatgatcctctttccgatgacccaggagcaaaagagtaa

SEQ ID NO: 190618 - DNA, 651 bp, Klebsiella oxytoca
atgattaagccggactgggaggccatcgagacggcgtaccgggccggggtgatgtctctccgtgaaatcgcatcgcagcacggtataagcgaaggtgctatccgtaagcgagcaaagcgtgacgactggtctcgcgacctgaatgcgaagattcagcaaaaggctgatgacttggtacgcaagcgggaggtacgcaagacggtacgcaatgaaagcactttgaccgaacgcgtactgatagaggcgacagccgaggttatcgcaacggtacgcatggagcaccggggagacatccggcgggctcgcgaactgaccaacacgctattcgatgaattggccggagagtgtggcaacgtggccgcgcttgaagacctgggtgagatgatgcgatcgcctgatgacaaaggtatggataagctcaacgatctctaccacaaaataatcagtcttccttcccgcgttaaatccatgaaagacctgagcgacagcctgaaaacgcttatcggcctcgaacgagaggcatacagcattgagaataaggctgaaacgaaagaggtcacgcataacatcatgctggtaccaaccagcgataacgtggatgactgggaggcggcggcgcagaaacaacagggtgaggtgctcggtggatga

SEQ ID NO: 190619 - DNA, 192 bp, Klebsiella oxytoca
atgtcagaagaaattcgtagagttatcttgagcaatacacatgataaaaaagaaggcacttttatcaagtacgcgcctattgaggtatatgacgactcagggcagatgagaaccgcagaaaaggcgatcgtcgagacagatgatggaaaggtttataccgttgacccaagtaaaattcagtttttgaagtaa

SEQ ID NO: 190620 - DNA, 186 bp, Klebsiella oxytoca
ttggaaaaagcagatagtgaaaaaaaccgttatgaccgcgctagttttgaagaggccgccatgccgttgatcaagtggctgaatgagaatgccaatcctcacgcctccgtaatcgttgatgtgaccaacgccacgctgttcaccggcgaaattggtgtccacacggaagagtttattaaggactag

SEQ ID NO: 190621 - DNA, 345 bp, Klebsiella oxytoca
atgcaaaagagcagatcgcactggacgcatcgggagccgcgtcagatatcaaagtggctgttgcgaatgatgattgcactaatcggcctgtgcctgctggcgcagttaagcggctgcaacaatacgcgaacggtctacgtcaaagtgccagtggttccgttaccgtccagcctgacagctgacacccctcaacctgcagtccctgacaatctaacatggggccaaagcctggatttgaatgtcagcctgctgtcggcgctggggcaatgcaaccgggataaggctgatatacggcaggcggaaatagaaagagcagcgcaagccgttaaccccactaagggatga

SEQ ID NO: 190622 - DNA, 495 bp, Klebsiella oxytoca
atggcaatgtcaccagcgctcagaaatagcattatcggagccctgggtacgggcgccatcggtatcgctaccgtcatggtatccggcaaaacggggcttgagggtcgcgagtacatcgcctatcgagacatcgttggtgttgtcacggtctgcgatggccacacgggatcggatattgtctggggtaagcggtacacggataaagagtgcgacgctctaacccggcgcgatatacagcgcattgccgcacaggtcgatccgcatatcaaagtgccgaccacagaaacccagcgcgcagcaatttactcatttgcctataacgtcggcgccactgcaaccattaattccacactgctgaaaaagctaaattcccgtgaatatagcggtgcctgtgcagagttaaagcgctgggtatatgccggcggacagaagtggaaagggctgattaatcggcgtgaagttgagtatcaggtatgcacctggagccagaaatga

SEQ ID NO: 190623 - DNA, 204 bp, Klebsiella oxytoca
atgcaacgcatggataaaatcagagagtggctcagttattgggttggaggcctaacgaccatgggtggcgttctttccctgaacgactgggcaatcatcatcggtatcgtctgcactataggcaccttcggtgtgaactggtactacaagcgcaaagagcgcgaggatagattaaatggcaatgtcaccagcgctcagaaatag

SEQ ID NO: 190624 - DNA, 396 bp, Klebsiella oxytoca
atgaatcagaatgacttcatcgggcttgttaacggcaagccctgggctaaccgcgcgtgcactttcgaagagctggattgctggggcctcgtcgtactgtattaccggcatgtgctggggctggagctccaccacgtcgccgggtacgagtctggctcagatttcatcacctgctacgaagaagagttcgaacactggcgccgggttccggtgccggtttccggctgccttgcggtgttctattacggcaatcagccggcgcacgtcggcgtgatgattaatccggggaaatgcctgcactcccgcggcgagttcggttttgtccgcacggatagcgccgtcatccttcagaaaatctataacaaagtggagtatctggtgcatggttcgatatga

SEQ ID NO: 190625 - DNA, 3651 bp, Klebsiella oxytoca
atggctgagaacgctggcggcatttattacgacattgagatgaacatacagggccttcttgtagcccaacagcgtgtgaatcagcgcctcgacatgatggagcgcggtttcgatggcacaacacgcgccgtcaataacactgaacgctctatgtccagcctgtcaggcgtagccgtttccttggctgctgctctttctgtgaagcaggtttctgaatatgccgatgcttgggcaactgtaaataacaagttagctaactcactgcgacctaacgagcaactggctgatgtaacagagcgcgtattcaacattacacagcaaacgagaggcagtttagatgccacagcgtcgctgtatgcgagactggaaagagcgacaaggcagtacggcacaagtgcgggcgacctttccaagctaaccacaattatcaaccagggatttgtcgtctcaggtgccacggcgcaagaggccgagaacgcgattattcagttgtcgcagggccttgcttctggagctttacgcggcgaggaattcaactctgtaaacgaacagggaaaccgcctgattgttgctcttgctgactcgatgggcgttagcatcggcgaaatgcggaacatggctgcgcagggcaagttaacaaccgacgtggttgttaatgggcttctatcccaaggagcagtgatcggaaaagagttctccaatacaacgacgacgatcagccaggcactgcaggtggctggtaacaacataactaaattctttggtgaaaactcaaccgtaaaaaccagcgctggaatttttaatgacgcagtcgtgaccgccagtgaaaatatcggcttactcagcggggcgttaactgccgtggctgcaattatgggaagccggtatgttggtgctcttgcaatggcaacggcagcaaaagttcaagacactgccgcatccatagcacaaagcaaagcctctgcagtttcagcaaaagacgctgagattgaggctgccgcaaaattaaggctggctgaagttgaaaagtccgcgaccatttccgcattaagccttgctgaagggcgtctggcaacaatacgcgccactaacgcctcggtagcctctgaagtacagttggcagaggcccagacggcggaaatacgcacccagatggcgcagattcaatctgagaaagcccttgaggcgcagcggctgaaggcgcaaatttcagatcaggggcgcattgcgacagcaacgaggatggctgagcttcgccaggctgaggcggccttaacaactcagttagcaagggctgaatccgcatcacagaacgcgagggctacagcgattgctcaggcagaggcgcaagtaagcacatctcgtttagcggcagctgacgcaacggcagccgctacagcagcaaatgcacgctacatagcatctcaggaagccgctactgtagcctccagagcggcatctgtagctggagggttgctgaaaggggcgctagggttaattggtgggcctgcgggtgtcgcaatgcttgctgcggcggccattttctatttttggcagaaagcccagcaagccagagaagaatcccttcgttttgcagatagcttggatcgcgttaacgactcaatgaaggcgatgaataatacacaactacgtggaaccatcgccgatgcgaataaatctatacgtgcacagaaggatgaaatatcgaatctccaggccgaagttgattccttaagatctcgttatcaaaacttcaccccagaggctcaggcagttgctaacgcaatgggtcagggtgccgactttgctcgccagcaagctgagatttcagatcagctagatcagaaatctcgcgaccttgcaaatgctcaggaaaaactggcaagaactcaggacaccgcagcagaagcgagcagaacccttacaaacaacatgctcacatcaatgggcgtgcatgatgggcttattgaaaaaggctcaactcttgagaaggtacagggggcggtagcaaaagcgttcggattgactgcggatgaaataaaccgtgccaatcaggctggtcaaaacttcaatccaaaagcactgcaaatatcccctgctacagccgagggtgagaaaaacatccttaatcttaaagagcaaaatgaattgcttaaaattcgggatgagcgaaccagggcggtgagaaaagccgaaatggagcaggctaaggtcactaaaaacaagaaccagatcgaagagcaaggcaggcttgctggtgaaaactatgacctgcaaaaagcggaagaagctcgacaggaggcgcaaaggaagggtgagcagcaggataagcgttctgctacctctgcggagtcaatagcacagaaacttgctagcctgaagcagcaatctgaattagccgccggctcaacacaggagcttagccgcgaatcagcgatgctgcgagccgagcaatcactaggcaaatcagcctcagccgatcagataaagcaggccagaacctacgcagctgcagtatgggacaccacggcagcactgaaggctcgcaatgctgtaccagagctaaaggaaaatgccgactataccgcacagaaatcccagcttgagatgcttaagggtgtaaaggatgctcagggaaatctgattatctcgcagaaacaatacaaccaggcttctgagcaattagaacagcagcaccaggttaatctggcgaagatacgcgctggccaggttgtgacaccacagcagcaggctcagggagaggttgacccggtgcagcggctcgccaaccagcacgctcaagaactggctcttatccagcagtttgaaacccaaaaaggggcgctcacagctaacggtcttgcgttgatgaacgcagccaatacgcaatatgagcaggcgagaatagccgcgcagtgggagatattccgcaaccaaagcacaactaacgaacttatggcggcggcagttgatggttttgccagccaggccgccagctcgatgacgggattaatcaacggtacgcaaagcgctacagaggctttcaagaatctgggcagcgccattcttaatagcgtcattcaggctctggttgaggttggtattcaatacctgaaaaatgccgcgatggcgatgattgccgataagatgacctccaattcatcacagcaagcaggagctcaaaccgctgcagcgtgggctcctgccgcagccgcagcctctatcgccacattcggtggagctgcgattgccggtattgcaggtatggttgctgcttttgctattggtgctgcgctcgctggaaagcgaaagaatggcggcccggtatccgctggctcaatgtaccaggtaggcgaaggcggcatgcctgaaatctacaaggccagtaatggcagccagtatatgatccccggtgataatggttctgttatcagcaacaaggatttgcagggcagcggcagcggctcgctgcaggtcgtgaacaacgtctacaactatgccagcggggtaagcgttgacacgcgcagcagccagaatggaagcgaactgctgatcgaaacgttcattaccgacatggaaaccggtggcccaatgtcaagccagatggagtccacctacggcctccgccggcaagcattaggcgactactaa

SEQ ID NO: 190626 - DNA, 573 bp, Klebsiella oxytoca; identical to SEQ ID NO: 59972

SEQ ID NO: 190627 - DNA, 405 bp, Klebsiella oxytoca; identical to SEQ ID NO: 59973

SEQ ID NO: 190628 - DNA, 426 bp, Klebsiella oxytoca; identical to SEQ ID NO: 59974

SEQ ID NO: 190629 - DNA, 1290 bp, Klebsiella oxytoca
atgttactggcaggcgctatttttgtcctgaccatcgttttggttatctggcaaccgaagggattagggatcggctggagtgcgacgctgggcgcggtactggcgctgatctctggcgtagtccattttggtgatatccctgtagtgtggaatattgtctggaatgcgacggcgacctttattgccgtgattattatcagccttctgctcgatgaatcgggctttttcgaatgggcggcgctgcacgtttcacgttggggtaacggtcgcgggcgtttgctgtttacctatatcgttttgctcggcgcagcggtggcggcactgtttgccaacgatggtgcggcattgattctgacgccaattgttatcgccatgctgcttgcattaggtttcagcaaaggcactacgctggcatttgtcatggccgccgggtttattgccgatacggccagtctgccgcttatcgtgtccaacctggttaacatcgtttctgcagacttctttgggctgggtttcactgagtatgcgtcggtaatggtgccggtggatatcgcagccattatcgccacgctggtgatgctgcatctgttcttccgcaaagatattccgccaacttacgacctggctctcctgaaagcaccggcaaaagcgattaaagatctggcaaccttcagaaccggctggatagtgttgatccttcttctggttggctttttcgtccttgagccgttgggtatcccggtcagtgcgattgctgctgtaggggctgtcattctgtttgcggtggcgaagcgaggccatgccattaacactggcaaagtgcttcgcggtgcgccatggcagatcgtcatattctctctgggaatgtatctggtggtctatggtctgcgtaatgccggactaacagaatacctctccggtgtgttgaacgtgctggcagataaaggactttgggccgcgacgtttggtactggcttcctgacggctttcctctcttccatcatgaacaatatgcctaccgtgctggttggtgctctctctattgatggcagcactgcaacaggcgttatcaaagaggcgatgatttttgccaacgtgattggctgcgatcttggaccgaaaattacacctattggtagcctggcaacgttgctctggctgcatgtcctttcacagaagaacatgaccatcacatggggatactatttccgcaccgggatcgtcatgactctgcctgtgctgtttgtaacgctggccgcgctggcgctacgtctctctttcactttgtaa

SEQ ID NO: 190630 - DNA, 363 bp, Klebsiella oxytoca; identical to SEQ ID NO: 59977

SEQ ID NO: 190631 - DNA, 354 bp, Klebsiella oxytoca; identical to SEQ ID NO: 59978

SEQ ID NO: 190632 - DNA, 345 bp, Klebsiella oxytoca
atgcgaaaactggttaaattcagaccttacgatcttggttttgatccctattttttcatttatggtcaggccattgatatcgtcagaaatgaaggtctggtgagtacacttaaaaaactcaacatttttaagatgaatattggccttgaatcaggatctgaccatacgttaaaaatgatgaaaggcaagagagattcagttgatgtgaattatgcagcgctgcgaaaactcaaagaagcaggtatctatgtatatagttcattcgttctcgggactgagtttgaaacggactcaacgttaaggggaactattgagtggatcaaaaaatcatacatgaaggattaa

SEQ ID NO: 190633 - DNA, 948 bp, Klebsiella oxytoca; identical to SEQ ID NO: 170880

SEQ ID NO: 190634 - DNA, 1398 bp, Klebsiella oxytoca; identical to SEQ ID NO: 170879

SEQ ID NO: 190635 - DNA, 1473 bp, Klebsiella oxytoca; identical to SEQ ID NO: 170878

SEQ ID NO: 190636 - DNA, 960 bp, Klebsiella oxytoca; identical to SEQ ID NO: 170877

SEQ ID NO: 190637 - DNA, 1500 bp, Klebsiella oxytoca; identical to SEQ ID NO: 170876

SEQ ID NO: 190638 - DNA, 975 bp, Klebsiella oxytoca; identical to SEQ ID NO: 170875

SEQ ID NO: 190639 - DNA, 1593 bp, Klebsiella oxytoca
atgagtaaccttaacaactacccggtagaagcatttccttctgttttacgtggtgtaattaatgcgttgcatgaagacacccttatccccgttgaaatgattggcagcacggttctggcggcattatccctgtccctgcaaccccttattgacgtggcctctcccttcggaaataaaaagccagagccctgctctctttattttttgatacttgcaaagtctggcgaggggaaaagccctctccgcgaattacttatggctcccttcgaagagttcgcttctgagttgcatgaggaatatgagaccctacttgatacctacaaaaaagatcatgctatctggtcatcaaaagaaaaagcactaaatcgtaattatcagaaagcagtaaagaatggcggggaaggtgaagttgaagaacttcttctgcgcgagcatcaggctgctgagccgaaaaaacccagagcatttgaaatgttttatgaagatgcaaccccagaaggtatcattcagggactcagtgaatacccctatgcaggtgtgtttgcagatgaagctattactttctttaccggccagctaaaaaacaatctggggttgctcaacaaaatatggaaaaacgaaccccttcaggtctcccgaaaaaaagaaggtactgtacgcattaatgcctacctgacctttcttctaatggttcagcccgaagtatttgaagagtatctggaacggcatggaaaacgagctgtatccagcggatttcttgcccgttttttatttacagaaacagtaagcactataggtcagagaagaatcaacctgaaccaggataattcaaggcaagcactggacaatctattcactcatttaaataaatttctgatagagcaaaaggaacatttttacgataccagcaaatcccaaaagacactaacattaactgaggatgcgaaaaaattatttgaagggaaagtaagtcagcatcaattaaatatagcccaaaaccagtgctgggagcacatcccggaattcgtgtctaaagcaggcagtcaggcaatacgcatagccgctatttttgattgttattctgaaagtgatatatcagaacaatatttaaagaacgcatttgcgattactgaatggcaccttaatcaggcagctaagtatttttataaactaagtgcgcaatatcaacttcagcaagatgtataccagttgttcgactggataaaaaatcactttgttaatccgactggtgtaatgaaagtcactaattttcaagcagggcaagtgactgatgtaagacttaatccctggcagccgttctcaaagaatgaactggagacgcatggtcccgccagactcagaagaattgaacgtttaacgcctgcactcaatcaactcattcagctcggtctgattgtcacaatatgctacccaccacaacgtgcgatttatatcgcggcagcacaaccagatgcatatggtaatctttatcccctcaaaccatttttcactccatttaacatggtagactacagaaataatgccactccaccactgagtggatacgattccaacagactgcaatggcaataa

SEQ ID NO: 190640 - DNA, 210 bp, Klebsiella oxytoca; identical to SEQ ID NO: 122304

SEQ ID NO: 190641 - DNA, 630 bp, Klebsiella oxytoca; identical to SEQ ID NO: 122303

SEQ ID NO: 190642 - DNA, 885 bp, Klebsiella oxytoca; identical to SEQ ID NO: 122302

SEQ ID NO: 190643 - DNA, 237 bp, Klebsiella oxytoca; identical to SEQ ID NO: 122301

SEQ ID NO: 190644 - DNA, 729 bp, Klebsiella oxytoca
atgcgcgccacgaaccctgcgccccgacacgacaggctggcactcaggctgtcagttattattagccggctttttgctggtgaatccctttcactaaaagcgctgtccggtgaatttggcgtatctgaacgcaccctgcgccgggatttctctcagcgtctgctgcatctggatctgactggcgataacggctgctggcggttacgaacaaacccgatgcgcgaccatactcctggtgcgctggcgtttgcccgcaacaccggaatagcccgtctcattccctcacagagccgccatctgatgcagctgttgatggatgaaaacggcacatctccatgcctgataggccatgcacagcagcccgcggggatcctcccggactgctttgagcgacttgctgaaggcatttaccaccaccgtctggtcagcctgttggttaaggggattcgtcacgaccaccttgagccctaccggctaattttctcacatgcagactggtatctggtggccagccagtatggtgcgatacgggtattcagggttgaggaggtaacgtcggtctccttgtctgaacgctcttttcaccggcgcagtgaaaccagcgcactcattgtagacgcggatttcatcaatgcccttccgcattttcactttatcagcaacgtcattcataccttccgggagctttctcccgaacctcacaccagaccaaaaggagttaaaacatga

SEQ ID NO: 190645 - DNA, 504 bp, Klebsiella oxytoca; identical to SEQ ID NO: 122299

SEQ ID NO: 190646 - DNA, 267 bp, Klebsiella oxytoca; identical to SEQ ID NO: 122298

SEQ ID NO: 190647 - DNA, 468 bp, Klebsiella oxytoca; identical to SEQ ID NO: 122296

SEQ ID NO: 190648 - DNA, 543 bp, Klebsiella oxytoca; identical to SEQ ID NO: 122295

SEQ ID NO: 190649 - DNA, 819 bp, Klebsiella oxytoca; identical to SEQ ID NO: 122294

SEQ ID NO: 190650 - DNA, 465 bp, Klebsiella oxytoca; identical to SEQ ID NO: 122293

SEQ ID NO: 190651 - DNA, 372 bp, Klebsiella oxytoca; identical to SEQ ID NO: 122290

SEQ ID NO: 190652 - DNA, 231 bp, Klebsiella oxytoca; identical to SEQ ID NO: 122289

SEQ ID NO: 190653 - DNA, 378 bp, Klebsiella oxytoca; identical to SEQ ID NO: 122288

SEQ ID NO: 190654 - DNA, 612 bp, Klebsiella oxytoca
atgtcagaacttactctcaccgaatccgaagtgttaaccgacaataccgatgtaatttgctcgaccagcattgaacgtatcgtcaccggacgcaacgcggcgctggctcaaattgaaacgctgatacagcaactcgacgatatctcgacactgactagcaacatcggcggtggtaaagcaaatgaatggggagtacggcaataccgttacgactgctggttgatggataaaccagaaacagcgataaaagccatcacccaaaatatcgatcgcagcatctggaaagacctgatgaataagtcgggaatgctggcgctcatggacgcacaggcacgcgacgagtggtacaacagcctggaaaaggacgatattcccgctatcagtgaagagaatattctcagcacctttgagcaactacatcagagtaaagcagaggtgttcgagcgagggatcattaacgtgtttaagggactaagctgggattacaagagcaacagcccctgcaaattcgggaagaagatcatcgttgatggtctggtacaatatgaccgttggggatttcacttccgtcatgggcgtagacgtgagcagtttgatcttacccagcaatag

SEQ ID NO: 190655 - DNA, 984 bp, Klebsiella oxytoca
gtgctgagttcaaagtatgcagagcacaccccgctgtaccgccagtctgaaatatacggccgccagggtgtggagctgagccgctcactgctgtcgggctgggtggatgcgtgttgccggctactgtcaccgctggaaggggcgcttcaggactatgtgctgactgacggtaagctccatgctgatgacacgcctgtcccggtgctgttgccaggtaataagaaaacgaagaccgggcggttgtggacgtacgttcgtgacgaccgtaacgccgggtcagagctggcgccggcagtgtggttcgcttacagcccggacagaaaaggtatccacccgcagagccatctcgctggcttcagcggtgttctgcaggcggatgcgtacgccgggttcaacgaactgtaccgcaatggacagataacggaagctgcctgctgggctcatgcccgccgcaagatccacgatgtgcacgttcgcaccccgtcagcgctgacggaggaagccctgaaacggatcggtgagttatatgccatcgaggcggaaataagggggatgccggcgaagcgacgccttgcagaacgtcagcaaaaagctaaaccgcggctgaaatccctggaaagctggctgcgtgaaaaggtgaaaacgctgtcgcgacactcagaactggcgaaagcgttcacgtacgtactgaaccagtggccggcgctggcttactatactgacgacggctgggccgaggcagataacaacatagctgagaatgcgctacggatggtcagcctgggccgcaaaaactacctgttcttcggttcggatcatggaggagagcggggagcgctgctgtacagcctgatcgggacatgcaaactgaacggcgtggagccagaaagctacctccgttatgtccttgacgtcattgctgactggccgataaaccgggtcagcgaactactcccctggcgcgtagcactgccaactgaataa

SEQ ID NO: 190656 - DNA, 2844 bp, Klebsiella oxytoca
atgagtctgaaaccttggcgcgagattgcgcgcccgcatcgcgatgtactggaaggcacctttaaacagtcggaatttgcggcagatattactcaggtcgctaatggctctgcaccagcagaatatcaggatgctgagcagttttttgcgcgcacctttatcacggaagggatgcgcttgttattgaggtcggtcgccgagcggctggcaggcaagggcggcgacccagtgatccaactgcaaacggcttttggtggcggtaaaactcacaccatgcttgcggtctatcacttagcctcacgcacagtgaccacggatcgcttgcagggtattccgccgattttggatgcggcagggattcatgacttacctggtgcccgagtggcggtgatcgatgggattaacttgtcggtgagccaagcgcgcacgcacggtgtgatccatgctaatactctgtggggggagttagcctggcaacttttgggcgatgaaggctatgagctagtggcggacagtgaccgcgacggcacatcgccgggcaaagagcagttagtcaaattgctgaccaaggcggcaccctgtgtggtgttgatggatgagctggtggcttttttgcgccagttggaagtgggcaagcagtttaatgccggaaccttcgactccaatatcacctttattcaggcgctgactgaagcgatgaagtcggtacccaatgccatgttgttggcttctttgcctgagtcggccttggaagtgggtggcactatggggcagaaggcgctggattcgctggagaaatattttgctcgggttgagtcggtatggaagccggtagccactgaagaggcctttgagattgtgcgccgtcgtttgtttgagtcggctggtgatgccactcaggtgcagggtattgcgcagcagtatgctgatttctatcgccagcatgcgcaggagtttccgaacgaaacacaatccagccactattacgaccgactgtgcaagtcatacccgatccacccggaggtatttgaccgactttatgaggactggtcgacgctggataagtttcagcgcacccgtggggtgttgcaatatatggcgatagtgatccatcgcttgtgggtcgcggataaccgcgatgcactgatcatgccggggtcgttgccccttgatgacagcaatgtgcgtggcaagagcattcattatttgccacaaggctgggaaccggtcatcgaaaaagaggtggatggttcgcgctctgaagcggcagatatcgataatcaagatacccgttttggccaattccacgctgctcgcagggtgatgcgtaccctgtttttgggtagtgcacccagtacaggcgatcagatgcatcgcggcctgctggctgagcggattatgctgggcgcctgctcgcctgggcaaacagtggccacctttaaggatgtgttggttcggctgcgagatcgtctgacctacctttatggcgataaagatcgtttttggctggatactaagcctaatctgcgtcgggaaatggaaacccgtaagagtaaagtcagtgagcgtgaagagttgacgccgctgcttaagaagtcagtaactgcgtgttttggttcccagcactgctttgccgggatacatgttttcacaccctccagcgatgtgcttgatgaatacggcaatggaccgcgtttggtggtactggagccgtcggcattttctgcttatagccgtagtagcagtactaaccaggcattcaaagcagctgaggtgatcttgtttaaacgtggtgagcaaccacgtgtgaaacaaaatcggctgttctttctcgctgccgattatgacagtctgaatcgtttgaaagatcaggggagaacgtatctggcctggcactctatcgttaccgatatcgaaaacggagtgttgaatcaggatctagcgcatttaacccaagccaaggggaatcgcgatacggcgaagaagcagtttgatagcttggtccgcgacacttataagtggctactggcgccgctgcaggatcccggtcagccgctagagtgggaggtgtcgcaaatctcttccagcgcacctaaattaattcaggaaattgaaagtaaactagctgaagaggagtggttaatcaaggagtggtcaccggttcatctgcgtaatttgttggaaaaatactattttgccaacgggacagagtcagtcagtgcagtgaaggtctggcaggatgcctgtcagtacctctatatgcctcgtttggttaatgaccaaacattgcgtcgaactgtagaagaggctatcaagagtaccgatttcttcgcttttgcgtccggtctgcgtgacgatcgctttgaagggtttgcttttggcaaatcatccaccgtgtttttagatgagaacagcgttctgattagccgggatgctgcgctgcgctatcaagccaagctggagcaagaagcccgtgaaaagagtgaagaagagcgtaagaaggttgatccggataaagacggccgtgatgggaccgataaggacgaatcaggtgacggcaaggacacggatacaggttctggaactggtcaagtgattataacagagagccagaaaacacggttttatggttcagtacgacttgatgccatcagagccaaaatggattttgctaatatcatggacgaggtggtgcaaaattttgccagccaatacggtgttgaggtagagctctccattgagattaatgcacgctctgagaaagggtttgatgcaaatttacagcgagctatcaaagaaaactgcagtatgctgaaatttggtaatgctgaatttgaagagtaa

SEQ ID NO: 190657 - DNA, 2913 bp, Klebsiella oxytoca
atgactaccatcaaatcccccaaaaaactgatcgaggtggcgctgccgctcgatgatatcaatgctgccgcagcaagggaaaaatcaattcgccacggacacccctctagcttgcatctgtggtgggcgcgtcgtcccttggctgctgcaagagccgtgatttttgctcagatggtcaatgatccaggctaccagcagggtgatggctttaagtacggcgtgaacaagcaggaagctgccaagaagcgtgaaaagctgtttaacatcctgcgcgagttggtgaagtgggaaaacaccaataacgaagcggtgctcagtcaagcgcgggcggccatcatggagagctggcgcgaaatttgcgccctgaataaagatcaccccgacgccgccgagctgtttaaccccgacaaattacccgactttcacgacccctttgccggtggcggcgccttgccgctggaagctcagcgcttagggcttgagtcctatgcctctgacttaaacccggtggcggtcaccatcaacaaagccatgattgaaatcccgcctaagtttgctggctgtgagccggtggggccagaggtattgagcgctaaaaccagcaagaaaaaggccactaaagatgcctttgacgactggtctggcgctaaagggcttgcggaagatgtacgccgttatggcaactggatgcgcgacgaggcgcaaaaacgcatcggccatctctaccccaaagtattggtaaccgaggctatggtcaccgagcggccagatttggcgccctatttgggtgaagaactaacagtgattgcctggctgtgggcgcgcaccgtcaaaagccccagcccggcattttctcacgttgatgtgccgctggcgtccacctttattctctcttccaaggcaggcaaagaggcctatgtggagccggtggtgcaaagcgatagtttttattttgttgtcaagcagggtaagggctctccagagctaaaggatgggactatcagtcgtaagggcggtatttgtttgattagtaaatcgcctatggaattcaaatatctgagagcagaggcaaaggcaggacgatttggtcggcgtcttatggctgtggtagccgagggaaagagcggtcgagtatacctatcccctaacgtagtgcaggagcaaatagccaattcagtcgaggcctcggagtttgtttcttccaatatttgtcattggccggggcggacaaatgttgtcgaatatgggatgactcgctttgatcagctttttaccgcaaggcaattagtagcattgactaccttctctgacttggtgggggaagccattgcccgctgtcgtgaagatgcgctctctgccgggatggcggacgatggcgtcggcctcgatgccggtggcaccggcgccactgcctatgcgcaggctgtgggggtatatttatcttttctaattggtcaggttgcaaaccatggttccactatctgtggatggaaccatccaaatactcaaatgcgcagcgtgttttcacgtcaggcgattcctatgacatgggattacgccgaggcaaatgtattttcagactcatctgggagttttaataatttatttgatagacaaatcaaagggtttgaggctttaaataatacaacttttggctctgttttgcaggcagatgctcaaactcagtccgttagtacgaacaaggttatttcttccgatccaccttattacgacaatatcagctatgccgatttgtcggactttttctatgtctggctgcgtaggtccttgcggccgatcttccccggcctctatgccaccatggcggtgcccaaggcggaagaattggtggcgacgccgtatcgccatggaagcaaaaagggcgctgaggcgttctttttagacggcatgggtaaagctattcaccaactggccgagcaggcccacccggcgtttccggtgactatctactacgcctttaagcagtccgagacaaagatggacggcacctccagcgccggttgggagacctttttgcaggcggtgatcgatgccggttttaccatcaatggtacttggcctgtgcgtacagaaaaagaaggtagagcgattggaaatggtgccaatgccctagcctccagcgtggtgctggtgtgcaataagcgcgcggcgaatgccgacagcatcagccgccgtcagtttatccgcgaacttaaccgggtattgcctgaggcgctggatgaaatgacccagggcagcatagatgccctagggataagccaatcagcggtggcgccggtggacttgtcgcaagccattattggccccggaatgggcatcttcagtaaatattccgcggtgctcgaagctgatggcagcaagatgagcgtgaaaacagcactgcaactgattaaccgttttttggccgaagatgattttgaccacgacacccaattctgcctgcactggtttgaacagcagggctggcgcgtgggtaagttcggtgaagccgacgtgttagcccgtgccaagggcaccagcgtggcaggcttgcaagaggccggggtgataagtagcggccaaggtgaggtgcaactactcaaatggaccgaactgcccaccgactgggcgccagagcgggacaaccgtaccccggtatgggaaggactgcatcagttgatccggattctgaacagagaaggcgccagcggtgctggtgctatgctggggcgactatcagacaagagcgatgcgatccgctcgctggcgtatcgcctctacaccctctgcgagcgtaaaggttgggcacaagaagcccgcgcctataacgaattggtcaccgcgtgggatgcaattcaaagcgccatgaccaacagtgggcaagtgggggaaagctatagcctggatctctaa

SEQ ID NO: 190658 - DNA, 450 bp, Klebsiella oxytoca
atgaaaattgaacaagttagattaaaaaactttcgatgttttgagcagctcgatgtgactttccacccgcagttgactgtgttaatcgcccccaatggtgcgggtaaaactacgatccttgatgcagtacgcattgcgctatggacctttgtcaaaggctttgatctgggtagccaaacaggcaagtcggccaccattcagattgaagatatgcgtattgaacgccgcgaacaagaaatgaaaccgataatacccacactgaccagaaggcagcgtcatccagtcgtacaaacacgtgacatgctggggttgaataaggatccaaatctggtcagtgaacggaaaaaatggttcacccaagctgttgctgtgctaaaaacggcgccaggcgatatcgaccaatttttgcaattagcgccatttcgcgcactgattgcagcatctatctaa

SEQ ID NO: 190659 - DNA, 3543 bp, Klebsiella oxytoca
atgctcaagctcgaagagatcaagaaagatgctcaggtccgcggcattgtcgaagggcaagtggttcgcgtggtgacagtggagcagatcggtgagcacgctctgactgtttactacaaagacagtaagggcgtattggcagaacgcatgttgtttcgaagtgatgagatggcgcttgagctcgcgacagtgggccgagcatgggcgtttgatgctgacggaggcgatttcaaactggggctggaagcatatcggatatcacaggctgctctgtttgatccgatgatggctgttaacatggccaatgttgaccccttgccgcaccaaatttcagctgtttacgaatatatgctacctaagcagccgctgcgctatgtcttagccgatgatcctggcgcgggcaaaacgattatggctggcttgttcatttctgagctgctgctgcgagctgatgccagacggattatggtggtatcgcctggctcactgaccgaacaatggcaagacgagctatttgaaaagtttggcctgcaatttgaaatcttcagcaaagaaaagcaggagcagtgtgcaacgggcaattttttttccgaaaccgatcgcctgatttgccgtctggatcagctttcccgtagcgaagatctgcaagaaaagctgcgcaataccgactgggatttgatcattgtcgacgaagcgcacaaactctcagcgaactattttggcaacaaaatcaataaaaccaagcgcttcacactgggagagctgcttggatctatttgccgccattttttgttgatgacagccacgccacacaacggcaaggaagaagactttcaggtctggatgtcactgctcgacagtgatcggttctatggcaagtttcgcgaaggcgcccataaagtcgatattactgacatgatgcgcagaatggtgaaagaagagctattgacctttgatggcacaccgttatttcctgagcgtcgagcctatacagccaactatgatctttctcctctcgaagcaagtctttatgagcaggtcaccacttatgtaagagaagagatgaatcgagccgacaaactcgacaacaagaaaaaaaacacagttggctttgcactaacacaattgcaacgacgattggcatccagcccggaggcgatctatcaatcgttaaaacggcgtcgtaatcgtcttaaagacaagcttgcagaaatgaagctgttggcccgtggccagaaggcgaaacaaacaggtgtggctgaaacgcttggtagctatacagtgactaaacagctcgatttaccggataattgggacgaactggatgaagacttaagcgctgaagagtacgagctttacgctgagcaagtagcagatcaggctactgcagccgagaccatattagagctcgacgctgaaatcgagtcactaaaggctctggaacaacaagctctggtgttggtgcaatcaggcaatgataaaaagtgggaacagctatccgctttactgcaagactcgccggaaatgaaaaaccgcgatggtagccgtcgtaaactgatcatctttaccgagcataaagacacgctcaattatttgcgtcagcgagtcagtgatctgcttggccagtcaaacgctgtcagggtgatttacggcggaaccaaccgtgatgaccggcgtaaaattcagagtgaatttcgcagtgaccccaccgtgttggtactgattgccaccgacgctgcgggtgaaggtgtcaacctgcaaaacgcaaacttgatggtcaactatgaccttccatggaaccccaatcgactggagcagcgttttggcaggatccaccgaattggccaaaaagaggtgtgccacctgtggaacattgtcgccaatgaaactcgtgaaggtgaagtattccaaaaactgttcgccaagttagaaattgagaaacaagcacttggcggcaaagtattcgatatcttgggggaggcgttcgacaacgtttcactcaaacagttgctaatggatgccattcgctatggagaagatcctgctgtgcgcgccagaatggaccaagcaattgagggggcactggacagcgaccacctcaaggagatcatgcgccgcaacgccctagtggaatcccacatgggaatggaagggttgtacgccatcaaagagcagatggaaaaagccgaagcgcgccgtttgcagcccttttttatccgagccttctttcaggaggccttccaaaggttggggggggatttgcgcgagcgcgaacaaggccgatacgagatcaggcatgtcccagctgttatccgcgagcgagatcgcaccataggggaaagccgtacgccggtactaccgcgttacgagcgggtctgcttcgaaaagcagttaactcgtcctactggcaaggtgttagctgagctgttgcacccggtgcatcctctgatgcattccgtgctggaccttaccttgcaagcccatcgcggcaaactgaaacagggcgccgtgttggttgatccggctgatgatggtgatgaaccccacctgatcattatgttggaacactcggtcagagaaacggcggaacaagcaaaaagtatcgcgtcccgccgcttgcaatttgttgcgatagatagggcctgtcaggccagttatgcaggctgggcgccacacttggacttagtgcccatcagcgagggggacttggcactagtacaagatattctctgctccccttggttatcccaaccactggaaccactggcactgcagctggcctctgaaaaactggtgccagagcattttgctgaagtaaaaaaccggcgtgagctgcaggcagacaaaactttggcagcagtacatgagcgcttgatcaaagaaatcaactattggcaagaccgctatctcaaacttagtgatgatgtgaagtctggcaagcagcccagaatgcagccagaaaacgcgcgtcggcgcgttgatgaacttaccgcccgtttacagcagcgcacagctgaactcactgcgctcaagcaggtggtctccagcaccccagtggtcattggtagtgctctggtgatcccgcaagggctattggccaaacgtaagggggagattgtgtttagcaccgatgcagccagccgtgcccatatagaacgggccgcgatgcaggcggtaaccgatgcggaacaagcgttaggccacatggttattgatgtagcagcggataaatgtggatgggatctcaccgcgcgcccgccactcaaaagtgatggctccttgccacaagatcgtcacattgaagtgaaaggccgcagcaaaggacagacgaccatcaccgtcagtcgtaatgagatcctctatgccctcaatcaggcagacaaatttttgctggccatcgtactggtagagggggacaaggctgaaggcccgtactaccttcgccagcctttcaccaaagagcccgatctgggagtggcgagcatcaattacgacttagcggatttgctggcacgatccaccgatgctgaaggaagcttatga

SEQ ID NO: 190660 - DNA, 1254 bp, Klebsiella oxytoca
atgaaaaaagaaaatgtaattaaccgtgcaaaaggcgcactctttggtctggccgtgggcgacgcgctggggaccacgctggagtttcagtccaggcccgctgagccagtcattaaaagcatgatgggaggcggaccgtttaaactgcgtcccggagagtggacggacgataccgctatggcactctgcctggccgacagtctgattgatgccaatagcagtgaccccaaagaccagatgcagcgctatcttgcctggcgggacagtggatatcagtcctgtacgggtacctgctttgatatcggatcgaccgtggctcaggcattaaggctttttgagcaaacaggcaatgcgcttgcgggaagcaccagcgaatacagtgccggaaacggcagcctgatgcgtgtcgccccggtggcgctttttacccacaaaaagccactcagtatcgccatgtcgctggcgacagagagcagcctgactactcatggcgaacaacgctgcattgatacctgccggtatatgacctttctgatccataccctgctttcagccccggatttgcctgcaaaagcagacctgctctcctctgagcacacagcgcttttaccctggctgggggagatgcatgcggataccctggcggtaattcagggcagctatcgcatcaaaaaacgcgatgagattagcagctcaggctttgttatcgactctctggaggcggcactatggtgcttctggcacagcggcagttttgccgaaggcgctttgctggcagccaatctgggcgatgatgccgatacggtggccgctatttacggccagttagccggagccttctatggatatgatgcgataccccgggagtggtgtaacaccgtggcctggcgcagcgtgctggatagccgtgcgcggctgctgattaatcgtccctctccacgggtaattcggaattttattgatgaatgcagaccagatcctgaatacagtttttcaatgacctccgatttatttcataagcttaccgtaatctttgactggtcagagtggttacaggtgtttgccaatcagcgatacggcgagaacccgcagaatattgccagtgctcctctggcagactgcatctcccttatcactacaattgtacgcaacgatcgctttttcgacggcattgtcagacagtgcgcgtcggatggaacaatcgatgcattactgcaacgcctagggcactttgcaggcaaggagttatcatga

SEQ ID NO: 190661 - DNA, 927 bp, Klebsiella oxytoca
atgacccgctatgcctttttcggtgatatccatggtcagtatgccaaactgcaggctctgctagctattctgcaggccgagtcagcggactggttttatgtctttgttggcgacctgattgacaataaaagaggcatcactgagagccagttaaacacgctggaaaccgtgaaatctctggttgatagcaaaaaagccctttgtctgatgggcaaccatgagtttaatgctgtcggctgggccctgcgtcatcagaaaaccgggcagccgctgcggccgcatacggaaaataaccgcaaacagcatcaggcttttcttgatgcggtgacagaagactctgctctgcaccagaaatggattacgtggttccagagcctgccgctgtatgctgacttcggtgccatcagagcggtacatgcctgctgggatgaggcggttatccatgctattcagccctatctgaaagccaaccatgccatcgcagaggcttattgggaggaggcatttgagaaaaactcgccgctgtacaacatgacagaaacgttgttaaaaggccccgaactggctctgcccgaaggcattatgtttcacgataaaaccggtcagccccgcaaaaatatccgggttcgctggtggctaccgcaggcgacaacctatcgtcaactggcccaggtgccgcctgacgctgagtcgctgattccggatctgccacttgataagacttactctcctttatcatctgagatcccggtggtgattggtcactatacgctacacggcgagcctacgccgctttcagaactgataatttgcactgattttaacgcagccaaaggggataatccgctggtagcttactgctgcatggtagaagacggatacttgtcatcacaagggtttatttccagtaccggaaatagtgtctag

SEQ ID NO: 190662 - DNA, 1800 bp, Klebsiella oxytoca
atgattaaatcagtattcaactatccggtgtcaaccttgttggatattgaagccggggtggtgtatgccatcccccgctatcaacgggagtacacttggggtaaatggcaatgggatgctttgtttgaagatttgttagaaaatgaccttaattactacttgggatcgattatctgtatcaaccaaagtacagatactctggctctgcagcagttagagttagtggatggtcaacagcgaatgaccacattgtcattattgttagccgccatttatgcaagttacaaccagttaggtattgaacttgagatggatcagcagatagagctgtataacctgaagcataaattggtgctgaaaaagcatgcggaccagcccagattggtacctcaggtgcaaaatgccaaccagcaggattacttggcggtgttgaaagaggcaggcattcttaaagaagctgagtcggtttccaatgcaggtaatcgtcggatatttcgtgcctatcgacattttttaacacgtattaaacagtatgtcagtgaaagcgaaaccccattgcaggcactaaatgcgctactcgataaagtcaatgcatctactctggtaaaaatagaggtggcaagtcattcagatgcttatactctatttgaatcacttaacaatcgcggcgtgcctcttaccgcgattgatttaatgaaaaacaagctactggcgaagatcgaacagattgagccaggcagtattaataagtcttttataagctggaccaaagtgatggaagctttgggggatgattatggggtgcaagagcgtttcttccgtcagtactacaatgcgttcaagcctgagttaaaagatattgtcaatgtaccagtagcgactaaatctaatcttattcaaattttcgaaaaattgattgctcatgacccgcaacaattcctacaagctatgcgcagtcattctgactggtatgcgcagattgtaggtaattgcgaagtttcggatgaacctaaactaacaaaactgcttaaaagtctggatagaattcaaggaactccttcttatctcttattgctaatgttgtttgctagacgacagaacttagcattgagcattgagcatattgaaaaagtggtcactttgctgatcaacttctttgtccgtaggaacactactgatgtgcctgctactcgggatttaaaccgcatatttatggagttaactgaaattctgcaaagctgccgcggtgagcaggttgtcagcgcgattgctaatactctagggtctgtcagtacctctgatgagcatttccgccaagcgcttagtggaaatctatacgaagacaatagctgggtctgccgttttatcctgtgtgctcttgaagaaagcatgatgactaaggagaatcaagtagacctatgggcagtggaaggcaagcaatatgtgtggaccattgagcatgttttcccacaaggattaaatatccctaattcttgggtagatatgatagcagatggcgataaaacgttggcggagcaatatcgtcaaagccatgtgcataaacttggtaacttgactatctccggatacaacagttctttaggaaataagtgttttttggaaaaacgtgatcgtacaacccgggataaacgtcctgtaggctacaacaatggtttgtatctaaatcaggagctggctattactgatacttggtctatagtgcaaattgagcaaagaacaaccgcgatggtagataatgcactaattctgtttagtttaccgagtgtcgtcgggagataa

SEQ ID NO: 190663 - DNA, 1707 bp, Klebsiella oxytoca
atggaaaaaacgctgaatatctttaaagcgcagcaagcgaagaatctcgaaatcctcaataacctaagcgcgtttttacaacagggtgagacctttggtattcaaatggaaccacatctgctgcagaaattagcgatcgcgaaagagaacgctgcaaacggcaaactgcacattgcgttgataggcggcttttcggaagggaaaacatccattgcagcggcatggatggagaaactggataaggcgagcatgaacatcagccaccaggaatcctctaatgaggtcaaagtttacgatgtcggatctgatttcgtcctaatcgacactccagggctgttcggttttaaagagcagtttgatgaaagcacacagtcgatggaaaaatataaagacatgaccaaaaagtatgtcagcgaagcacatttgatactgtatgtcatgaactcaaccaaccccattaaagagagtcataagcaggatcttgagtggctgttccgcactctaaatctactggatcgcacagtgttcgttcttagccgctttgatgaagtagccgatgtagaagacgaagacgattatcagtcgaatgcgcgggtgaagtgccaaaacgtcgcctcgcgtctgcaggatcttattgctctgacaccaaaagagcgcgatacactaagtatcgtcgctgttgcagccaacccgttcgatatgggtacggactactggctgcaaaatccggaaaaattccgcgcgttgtctcatattagtactctgcaaactgcaaccagcgaaaagattgtactcagcggcggcctacaggcgttggaagaagagactagaaagagcgttattcgagacatactaacacgcaaactcccggtcgccatcaagcaggatgagcgcatccgtgaggaggtcgctgatctggcgacaatccatcaacgcatgcgtaaagagatgagcgcgatgcagtctaaaatgatagatatccgtgcgtcgttacgcaaatttgtcaccgattacttcgccgatctgattatccaagccgaagggctgagtatggaaacctacgcggcattttttgaacgcgaagttggtgataaaggcatagtgttgtcgacgcacctgcaaaacgaattcgatcgccgacttcaatctgtatcgcaggcgctcgataaaatgcagactagctataactctgaaatcagccactacaatggcactcttacagcgatgggcaaacaaggactggaatatgtggtgaacagcaaaataattaacaataccacggtgatcgccacgcgcgatggtgtggtgtcgctggctaaaatggttggactggatctgggaaaaatgctgaaatttaagccttggggcgcagtaaatctagctaaaggattaaatggactactttcctttgccggactcgctttagaagcttgggactcctttgaacaggcaaaacgcgaaaaagagtttgccaaaaacattcaaaaaatggtgactaactttagctctcagcgtgaagagttgatcaacctgctgaactcagatgactacgaagagcgcttcttctctggatatgtagtgatgaaggaagaattagaagggcttgagcaaacactgcaccgtagtcaagagcggcaagcccagttcgcaaaatggcgtgagcaagccgaggctatagacgccgaatttacccgggtatacgcctga

SEQ ID NO: 190664 - DNA, 2202 bp, Klebsiella oxytoca
atggtaattaagacagtgactccaagcgatgtttaccaaaacatatctctggaggtagatcacatactgcaaaacctagcgcagaccaccagcgatccatcgctacaacaagctaacgataatgcttgccaacagctagatggttttcgtcagaagcttaacaaaaatatagaaagccttcaaaaaaatgctgaatgggatacttttacgattgccttttacggcgaaacaaacgcgggtaaatcgacggtcatcgaaactctgcgcatcttgcttaatgaaaaaagtaagctttcacgccagcaggcattccgcgcttttcaacaaacacataagcttactgacagcgatatcgaaatcttgcagcgcaatttgctcgagaatgaaaaacgtgcctctgagctagagaaagccattgaggcgatcaatttggaatatatcgatcgcgaacaagctttccagaacaaaattgatgctatcactgcactcatcgcagcacagcgcaaacagttttctctctggcgtaagttcatccatctatgggtgaaaacgaacgagcaaaaagagaaagaggcccagctggcccttaagcagtccttggagcacgaaaaaagtgaagctttggaatttcttcaggcaaaaaaaagggagtgcgattctcactccgcctccttgcgacagttacaatctgtgcaaaagagcaagctggaggaattatctcggctggccgatggagaaattatcggtaccggcgtgtcagatttcacgatggacactgccctgtatcctttcgaagtaggaacgcaacgcttcgctctcttggacgtgccgggcatcgaaggcaaagagagcaaggttttggcgcaggttcagcaggcagttgaaaaggctcatgcagtgttctacgtcaccagtaaacctactgcgccgcaaaaaggggatgaaaatacgcccggaacgctggagaagatcaaagaccatctgaatgcacaaactgaagtctggacgcttttcaacaaacgtataactaatgtggttcagttgaatcggccaagtcttgtcagtgatgatgagcatctcagcctcgacgatctgaacaaaaaaatgagccagcagctgggtgagaattaccggaatactttctcagtcagcgcattgcccgcttttctaagcgtggcggagcatctggtaccaagttcagataacgccaaaagacgaagcaaattattagaaaaattcgatcccgaagatgtgctggaaaaaaccggttttaaaggcttcttagcattgctgaccgaacagctagtgtctgacagcaaagctaagatcacccgttccaacttcaataaagcgcgaactaccgtagaaaatatcatctccgagctgtcatatctgcaaaaagagagctatggcaggcttgctaagcagctacaaaacgatacagccaatgcccatcatttactggatatcgcactggagtcattaagaaaccgtctaattagtcagggcgaaaatgcggtggatgaattccgcagccgcgctcgaaaacagatatacagtgaaatcgacgatgatatcagtaacgatcgtttcaaagatagactggaaacgtcgattaaacaacagcatgaggtgttggaaagaactctgcctgatattttcaaaaatgagctggatacgttcaaagatgaaattgaatacaccgtgcaacgctttcagaaatatgcgcaggatattctagctacatatgcgaaaattcagaagcagaaatttgacaacgattttgaagtaaagatcgatatcgataacggactgaaactaaccagccttgtagctactgtggtaggaagtgcactaatgttctggaatccggcgggatggttgatcttagcacctgccttagcaggcatggtattcgctgcgtacaaagcagtgcgtagtttctttagttcctcatacaaaatcgcgcagcaaaagcaatctgccgatgacaatctcaataagattgcccgcaatatgaagtctaggattgaagaaggcattgatagcgtctttccggagctggaagagaaaatagagcaacttaagctcatgctagaagaaccaacccgtcaagcatcgcaaattaacaagatcctgattaatgcaatcactaatttacgcagtctgtcacacagacttgccttctcaggagagcaataa

SEQ ID NO: 190665 - DNA, 222 bp, Klebsiella oxytoca
atgacgacacaaacaactcccgccaccagcctgttgaacgaccagcttgttgatatgaagtttctgacacagttcacgggtctcactgataagtggttctacaaactcatacaggacggtgagtttcccaaacccattaaactgggccgcagttcacgctggttacgcagtgaggtggaagcctggatgcaggcgcggattgaagattctcgtaccgcctga

SEQ ID NO: 190666 - DNA, 525 bp, Klebsiella oxytoca
atgagtacttatcaccttgaagaactggaaatgggtatcgctgaattacctgatggccgcctgaccaatgcggtgagagaacaggcccgctggcagccagcacaaccagtttccttttactgccgatactgccacctgcaggtgtatcccagccgacgtaagcaatacgtgttctttgctcatcccgttactgatgaatatcgggactgtccggaggtacaggcaacgatcagctatctgaagaggcaggtggaactggctgcacagttcaaggggattaatccgctcaaacctgtcacagaatggtattgcgtctggtgtcatcggttttataccagtccagagtggccggtcaggagatgttgtccgaaatgcagggagggtatttacagcataccaacgagtcaggtgattgacgttcatggttattcaggctccgttatgaataacgcgcacactgaacctctcgcagtcggtcctttgctgcgactggccgaaccggatgctgactataaggcgggataa

SEQ ID NO: 190667 - DNA, 567 bp, Klebsiella oxytoca
atgagcttaaccttcatccctgaattacagagagtattacatcgtcatcagtcagacctgtttaagcgttactcgaaaatcctgatgataagagtggaccttcactggtctgagaatactgaccgatttgattatggagacgaacatcagtttacagatgacgtgagccatttaatgttacgtctgtcagactatcccggcgttattggttatgcctgggtactcgaagagagtctggacaggggattacatggacatgccgccatttacgtgaatggtcagcagcattgtaaaaaatggggctttcaggatgtcacagaaaccctgtggagagccgtgactgacgcagaagggtatgtctatcactgtcctgataaaagcgattatcgatacgctatacgccgtccggtacactttgatgataatacgggccgtaaagccatgcgctacgtggtgaactatttagccaaaacagagcagaaaccttttgagccgatttaccatatctcccgcctgcctgatatcagtgagaaaccgaccggacgtccccgggctcgtcgtcgctaa

SEQ ID NO: 190668 - DNA, 855 bp, Klebsiella oxytoca
atggcttttaaagatgactttaaaaagtattcattccacagcaatgatataaatgaatcgagatatgttttacataggctaaataaatccttaaacattattgaaactagcaggtatttagaaaactcatccaatacagaattaatatggagaataaatgaaataatcaatgaggataatgctgagaaatacgtcagggaatactcttcagactacaaaaagacatatgctgaatttgtaaatgtcgatctgtcatggataaagagtgattttaatgcaggtttgtatttatggtttagcttgtttgtttctaaatttgaaagtaacagggaaaggttgacagcagaagaaagggaatggtttaagaaggcaaggccaatttcatcagaaaacattattgtagatattacgacctacgccttgtcaaaagtaaaacaaataccatctattaaaaatgaggttaattttattcataaagaatatcagcagttaacagggaggaaaaggcttgggtggttaaaaaatgacaaagagcaggcaacttgggcatatcggtacctggaagagaaggatcgtctatttaaacggctatacatgggtgacagcgtaaatgcgcttgattttatcaaggtgtactacgatttacatatcgatgatagtggggttagacttactttcatagaaatgagtaatgcttggaatcagcagagatatcgagtcaaaagaaaacaggatgacaaaaaagcactaagcggctatataagcattgaggccaagtcaaagctaaaagaaatagcaaaaaaagaaaaactctctgagagcgaaatgatagagtttcttattatgacctactaa

SEQ ID NO: 190669 - DNA, 432 bp, Klebsiella oxytoca
atgtttactcttcagcaagagcctaccatcatcaaaaccaatctcgtccattcccggggtcgtagtaccttctggcgtttctatttcggcacggtacctggctgggagcgtttagagggcgatatcttcaacctgatggacaggatgtgtgaggtctatcagggcgctttctgggaattcagtatgctgtctaatggaggggcatttatctggcctgatatgcccgaaacctcgctgcgtatgtttaatccgcataacggccataaagcggagttaagtctggaagcagccggtatcgcggtatgcctgatggcttacagtatctggtcgttcaaaacagaaagtcctgtgctggtggagtatttttaccagttgcgtgactacgctattcagcatccggaacaggcgaacatctttcatctgattgactga

SEQ ID NO: 190670 - DNA, 822 bp, Klebsiella oxytoca
atgtcccgtttagcctcccgctttggcaatgcctgtacgattcgccgtgaccgtccgttaacgaatgaagagctgtaccgcactgtacccagcgtgttcggtgaaaataaacatgaatcccgtagtgaccgctatacctacatcccgaccattaagttgctggatagtttacagaaagaaggttttcagccgttctttgcctgccagacccgggtacgggatgccagtcgccgggagcacaccaaacatatgctccgcttacggcgtgaaggtcagattaccggtcagcaggtacccgagattatcctgctcaacagtcacgatggctcatcgagctatcagatgttacccggcctgtttcgctttgtttgtcagaatggtttgattaccggccagactttcggagaagtgcgtgttccccataaaggggatgtggtggagaaggtgattgaaggagcctatgaagtgctgggcctgtttgaccgcatggatgagcagcgggatgcgatgcagtccctgctgttatccccgcccgcacaacaggcactggccagcgcggctctcacctatcgctatggggaggagcaccagccggtgacacccgagcaaattctgactccccgccgctatgaagacaataagccagacctgtggaccacttatcagcggatacaggagaacctgattaaaggcggcctgtccggtcgcaatgccaaaggaaaacgcagccatacccgtgccgtaaagggcatcgccggagatgtgaagctcaatcgcgctttgtgggtgatggcggaaaatatgctgcagttggcatcctga

SEQ ID NO: 190671 - DNA, 495 bp, Klebsiella oxytoca
atgcattataccagtgagtcttctcagaatttcacattacagcccagtgaacagcgagccatcaaacgggcactgagcatactggataaacatctacgtgagcccgggattgcctttacctccacccaaagcgtcagagactggttacgactgaaaatggtcgggctggagcgggaggagtttatggtgctctatctcagtcagcaacatcagctgacaggttatgaaaccctgttcaccggcactatcaacagtaccgaagtgcatcccagagaagttgtgaaacgcgcattgtactttaatgcggcagccgtcatttttgcccacaatcatccttcgggagagataacccccagtcaggcggataaaaatctcacccaacgtctggtcaatatcttacaggtggtggatatccgggtgcttgaccatctgattgttggtggcaggcacgtcttctctttcgctgaacacggcctgatacgaggtgaactatga

SEQ ID NO: 190672 - DNA, 213 bp, Klebsiella oxytoca
atgaatatcatcagtaaatctgcggcaatgaaaattcaccggcagcatacagattctcgtcttgctcgctattgtcggggaaaatacaaatggctgggccacagccgcggtagagaggtgacggagtgctctggtatcctggcggtatatgttgaacgtcgtcaggacggtcatggcccttatgcctgcctgatgagtgtcactttaaattga

SEQ ID NO: 190673 - DNA, 132 bp, Klebsiella oxytoca
atggatcattgtgatctattgcgagggggatacgatatagtagaggctctgagggaagaagggctatacgttatggtttacattctcggagtaagatttattgctgagtatacaagtgagtatatattgtga

SEQ ID NO: 190674 - DNA, 261 bp, Klebsiella oxytoca
atgggaaagaaaatagttgttcttggcgatgctacctcgcatggaggtaaagtagtctctgtatcatctacttttgaaattgaaggtaaaaatgttgcactgctgaatgattcggtgtcctgtccggaacacggttctaatccgatagtggaatgcgatatgagttatgaggaaaacggtaggggaattgtggcgcatggttgtaagagcgcctgtggttccgtgatcttcgctagtttgccggatgtggagataggttga

SEQ ID NO: 190675 - DNA, 225 bp, Klebsiella oxytoca
gtggtggtgttgatcgccaccgaattgattatgcgcggtgcgaagataaaatccacgtacggcgatgaaatagttgcgccggaaatggattccccctccagcagcgtcagtttctccaccgtacccagactgtccgtgatagacagcaccatacgccggttattcgtcgccagagacaatctgctcagtctgaaaatcgagggaccgttaaaggtggcgctgtag

SEQ ID NO: 190676 - DNA, 249 bp, Klebsiella oxytoca
atggaaatagaaaaattgattgatagatattttttagcattagaaagaaaagtgatccgtgaaatttatgataaacagacacgagaagaattagaaaaatttatttttaagtgtaatggtgagtttagagagtttgaaaggcgatttaatacaatatgctctactgaatattatgaacaacaaagccttatcttttatattaattatataaatgcagagtttgagcagagggagaagttaaattattaa

SEQ ID NO: 190677 - DNA, 702 bp, Klebsiella oxytoca
atgacaatatctaagaaaaatagcgaattgagagagcgatttaaagagtattcaagtaataaaaacatatttgatcttgctgatttgagatatgaaatattaaaaatatattttgattttaaattaaaaaacgatatgaatgagcaagaaagaaaatctcaagactcaagaagaaaagcacatttaacagcattaaaaaaaagaattaaaagagaaatcgtttcgaaaatagttattgatttagtaaaatactacaacatagaaaaaacgacttttcattttttttctcatatatgtactgagattttagaaagaaatgtagataacagatacattctaaataatttttcaaatatgattttagacgaaaaaaaagagttaacgaaattaagtgaaagcagaaatgcttcaaacaaaatgagtttagaaaactcttattccgaacttgtttctatgtcacatattaaagacaaattatttaggaatgacaatttcaaaactgcatatttaaaatgttatggttgtgcaaatgaggaattttcaagatttaaagtttttgcttttccagacaattttgagacattagattttttatttgaagaagaaagaataaaaaaagaagaaaaagagatatctaaaataatgattgaacaagttgaagaagaacaaaaaatacagccaataaagaaaagaagattataa

SEQ ID NO: 190678 - DNA, 1122 bp, Klebsiella oxytoca
atggattttaaaataaaaaaaatgactgttaaggatagcagggaaatcaaaaaaagatttgaagattgcattaaattagcagaggaaaaagggttacaggttggctctgttttaaatatggaaatgcaagatagattaaaggaaattaatttaaaagtaaaaaaagaaacagcagagcaatataaaaagctgtttaattataaattatccgtgaatgcagaagatattattcaacacctgttagaatgcaatacaagaaatagttttgataaaacaagaacagcatttaggttttgcatttgtgaaaaaattcaggaattaaggaatgaggcagatcgagcaagaaaacaaaaaaattttgatttaatgaaagaaaaaactcttgaggcatataaattatttttcttttttgagcgagattttttgagcgaaaatcgcgttacttggaatgatatttcgtatagaaaaatagactccaaaagtaaaaaaaagactatgaatagtgtttcaagtatcaaagcaatttttgaagatttgaagcaaaagccggagcttttcgaaaaatattcaatgatacttgctatttcaagtttgaccggttgccgtccggctgagatccagaaagggattagcctggaagtaagcccaccactattaaatatatgtattagcggggcgaaatttggagaggatcgaggtcaagaaaaaagaatattgaaattcaatataaatgaatttgctgaaaatgagcagttcaaattgattatgtcaaaaataaagcaaaataataaattagaatataaatgctcaaagcaagagtatgactcattgagacaatatttatatattaatcataaaggattttctttatatacattaagacatagggcagcaagtgaattgaaaaaagacggtttttcagaagaaatgatcgcagcttttttaggtcatagagtaaccagaagtttagaaaattatggctatgccaggtctgggaaaggtggtccaaaagttgctggagttgagcattcaaatgccattaaaagcaatacaaagcgatttgagagcaaaaccacccctactgggggaaacccttcccgtactcgtaaacgagccttatag

SEQ ID NO: 190679 - DNA, 2898 bp, Klebsiella oxytoca; identical to SEQ ID NO: 7675

SEQ ID NO: 190680 - DNA, 474 bp, Klebsiella oxytoca
gtggcaaagcaaaagttcagaatcaccaactggtccacctacaacaaagctctcatcaaccgtggctccctcactttctggctggatgatggggcgattcaggcctggtatgagtcggcaacgccttcatcacgaggaaggccccagcgctattctgatctcgccatcaccaccgttctggtgattaaacgcgtattccggctgaccctgcgggctgcgcagggttttattgattccatttttgccctgatgaacgttccgttgcgctgcccggattacaccagtgtcagtaagcgggcaaagtcggttaatgtcagtttcaaaacgtccacccggggtgaaatcgcacacctggtgattgattccaccgggctgaaggtctttggtgaaggcgaatggaaagtcagaaagcacggcaaagagcgccgtcgtatctggcgaaagttgcatcttgctgttgacagcaacacatga

SEQ ID NO: 190681 - DNA, 561 bp, Klebsiella oxytoca; identical to SEQ ID NO: 182638

SEQ ID NO: 190682 - DNA, 438 bp, Klebsiella oxytoca
atgtctaatgttgttgaattctccaaggacagaggcacaaatattgaagtcactaaatttgttcagctcattggtgagtcaaccgtggacattggtaatgacaaagttatcctcactccgtcgaaaacgcttaaggatctgtatgttggtgaatacaagatcctgcttaagctgagagcccttaaagcccttgcaaggaaagagtcagcccaggccctttatacgttcattgaggctctgccacctaatccgatccctgtcagcattgagaggttcaggaagcgtttatccctcacttccagacctgctcttcagaattcaacggtaagaaaagcacttaagcaactggaggacattggataccttgaataccaggagcttaaggaaggcaacaagatagcgtttcaaatcatcaagagaaatccctccctgaagtag

SEQ ID NO: 190683 - DNA, 360 bp, Klebsiella oxytoca
atgtacgccaaatctttcatcgcccttgacggtaatggtcgtctcaccggagccagaacagcacaacggtatccgtatgaccgctacacctgccacctgtgcggcagtgcgctgcgataccatcctgaatacaacactgagcgaccgttctttgaacaccggtccgacatgttgacagataacgggcgacagcattgtccgtatgtcaacctggaagcgaaagggacccgccatatccggcagctgcaatggtatgtaccggatgcccgtccgctggtttaccgcgccgtctggcactgcagtggttgcgacagtaattatcacggttcaacgctgggtggaggtcattaccctgcataa

SEQ ID NO: 190684 - DNA, 177 bp, Klebsiella oxytoca
atgatcgttcttctctccggcatcatcgataaattcggtgagtttacgcatacgctcgcaatgaaagtgaccgttcccactaagctctgtacgtcgctccagcatttcagccagtttctggctcatggcgctgatactgtcattcagggccgtaagctcctgatgatcagcccgtag

SEQ ID NO: 190685 - DNA, 2457 bp, Klebsiella oxytoca
atgttcagcccgtcgctggcccctgaggataatgccgcgggccatgaacaccgctggtccgctccggcggtctggcagggcgtgacggcggactgcgctcaggcgcggggcgtgcgggcagggatgccgtggcagcgaacgccgggcgtcaccctgctgacgctgattgccctgtggggggcgggcagcgtggtctcctttgccgttaaccgccaccatatcgtcagcgcggcggcgcgggcgcagcagctggtgaatcatcccgcggttaacgacccgcagctgatggcgctgcaggccctgcgtaacgatatcgggcgcctgcagactcaacaggcgaatggcgctccctggtaccagcgcttcgggctggaccacaatgcgccgctctccgccgccctgatgccctggtacggccaggccagtaaccgtctgatacgcgatgcggccatgcaggcgctgacgcagaaactgaccgtcctggcgaacctgccgccgcgcagcccgcagcgcgccacgtcagctaaagcgggctacgaccagctgaaagcatacctgatgatggcgcgcccggacaaagccgacgctgccctgtacgcgcaggtgatgacaaccaccgcgccatcccggccgggactctccccggcgctgtggcagagtatcgccccggaccttcacgccttttacatgcagagcctgccgtcgcagcctgcctggaaaatcacgccggacaggcagctggtcacccgggtacgtcaggtgctgctggagcagattggccggcgcaacgcggaaagtacgctgtatgagaacatgctcacccgggtgcgccgcagctacgcggacatgacgctggaggacatgacgccgcagaccgacgccggtcgcctgttcagcacgccggagtcggtgccggggatgttcacccgccaggcgtgggagggcggggttcaggaagccattgataacgccgtggcgtcccggcgcgatgaaatcgactgggtgctgagcgatagccgtaaaacgctgtccggcgacgtctccccggaggcgctgaagcagcgcctgacggcgcgctacttcaccgattttgccggtgcctggctgaacttcctcaacagtatccggctgaacccggcgcacaatattgccgatgtcaccgaccagttaacgctggccggggacgtgcgccagtcgccgctgattgccctgatgaacaccctggcttaccaggggcagaccgggcagcagaaagaggccatttccgcatcgctggtgaaatcggcgaaaaacctgctgggcggtgatgaccggccggtgattgaccagcaggccgccggaccggcggggccgctggacagcaccttcgggccgctgctgcagcttatgggtaaaaacagcgcgcagagcgtgatggcggcggacagttcgctcagtttacagacttacctgacgcgcctgacccgcgtgcgcctcaggctccagcaggtggcaaacgccgccgacccgcaggcgatgatgcagctgctggcgcagacggtcttccagggcaagagcgttgacctgaccgacacgcaggagtacggcagtctggtggcggcaagcctcggtgaagagtggagcggtttcgggcagacgatgtttgttcagccgctgacccaggcctgggagacggtgcttcagccgtcggcggccagcctgaacgaagcgtggcagcgctcagttgtcgcgaactggaattcagcgtttaaggggcgttatccctttgctgccgcgaagagcgacgcctcgctgccgatgctggcggcgttcattcgccgcgataccggacgtattgaccgtttcctcagcgcgcagctgggcggcgttctgcaccgggagggcagcacctgggtggcggacagaacccgcagtcaggggctgacgttcagcccggccttcctgaacgcggtgaaccagctcagccagctgtccgacatcctgtttaccgacggcagccagggtatcagctttgaactgcagggggtggcaatgccggaagtggtggaaacacagctgacgcttgacgggcagaaactccactattttaaccaggttgccgactggcagagcttccgctggccgggggtaatcaataaaccgggggcgatgctgacctggacgtcgacggcggcgggaacccgtctgtatacaaaccacagtggcccgtggggcgttatccggatgctggagcagatgcagcggcagaaagcgggggacggactgtaccggctgagcgtcaccgcgccggacaggcgacagcttcagtggctgctgcgtacggaactgggcgacggaccgctggcgctgctgaagctgcgaaacttcagtctgccgtcgcagatattcagcgtcggtgtcccggcgccaggccgcacggatgaatatgaatctgacgttgtggaagggagtgaataa

SEQ ID NO: 190686 - DNA, 192 bp, Klebsiella oxytoca
atgaaagtagcggtaattaattacagtggcaatgttcgtaaaaccttaatttcatcttacctgttagccccgcgcctgactggtgcaaagttctatgcggtagagactatcaaccagtctgcttccgatctgggtattgaaaatgtgaccagttttaaaggtgacgacttctcacgtttgattgaggggtaa

SEQ ID NO: 190687 - DNA, 417 bp, Klebsiella oxytoca
atgccaacaataaccgcaaaagtatcagatgaacttttggcctatatagacctggtttcaggtggtaatcggtcagagtatctgcggcgctgccttgaagctggcccaggtgatctggagtccgggttgaaaatagttaccaaccagctgagcgacgtaaatcgcaaactggattacctttttgaccgtgcttcagatgcggattttggctcactgcgcgatgagctgaaggcaataaccgaaacgctatctggcgtaacattcccaccggcaggacagatgatgttgcatgaatcactcgctattgaaacgctgatcctcctacgttcgatagcagaaccgggtaaaaccaaagcggcaaaagcagaggttgaacgtaacggctataaagtctgggaaccaaaaaaggagcgctga

SEQ ID NO: 190688 - DNA, 345 bp, Klebsiella oxytoca
atggaagatagagaaagaggcttagcatttttatttgcaattactttgccgccaataatggtatggtttctagttgctaaatttacctacggtattgacgcatcaacggctaaatacctgataccgtatcttgttaaaaacactttttcgctatggcctttatggtcagctttaattgctggctggttcattggtattggcggtctgatcgcttttatcatttatgataagaggatggcgaataagccttgtcagtcgttgcctccgggtctcacgtgcgcaactgcatgccatggcccgtcggtcgaaggactggcaggatcgtcggtgcaagcgcaagcctga

SEQ ID NO: 190689 - DNA, 1293 bp, Klebsiella oxytoca
atgcaggccatatgtgtccccggcataggggcgcgcctgacgtacccacagactctcttcccccggctgccagtggtcgcggtcgaacagcaggttgaccttataacggccgtcgcggtcgatatggccgtagatatcgttggttttcgtgctggtcacccgcgccggcagcgtgccggccatgaccggcctgtcgcccggttgcggacggaagccgtaattttccgagaacgggatggccgtaaacgccacctcatagctgcggtcgcgacgggcgcggctgtggatgccggtaatcaccacgccctggcggaaaacctccgtcacctcagcgcctccggtgaccttcagctcccggcccggcgccagcgccgcgctgctggtcctgccgctcagccgggtctggtcgttcaggtagcgctcgtggcgcagacgggcataaaacgccccgctctccggctccgggttgcgctggccgtcactgcccggcgccaggtagttatccgcccagtgatacgcctcgccgtaggtggtgacgtcgccggacgtcacgtccgcgctctggctcatctcctccggcgcgttgcggtagttgtagtcccgggtgaacaccgactgctgcaccacgttatgctggcttttcagcgcccacaccgactcggtaccgctgtcgtgctggccggagggcggcaccgacggcagaatcagcccctgctcgtagtgccgctggtcatcgtaaaactccaccacgtcaatgttcagccgggtgtcggcggtgaagcggaaccagataccgacctcgcccagcaggcgggtgataaagcgcaggtcgtcctcgccgtactgcatcacctgctcgcgacgcggatacgcctgtgccagggtgaaaacaaagtcctccccgcgcatggcgtggcgggtacgcaggatatgctccacgatatccggcaccgacatatcctggtaaatccggttctggtggctccgggagagcagcgccagacgaggctgcagggtcagggaatagtgcgtttcgtcgcgggatgcggaaaggcgctcaaacgccgtcaccacgccctgaatcgtgcgcaccggctgctgaatgttaatcccgaaaccctggtccgccggcgcctgcagggtgaaggtcgcgtcctgcatcagcatctgctgcggcgtgatggttttgtcggcgctggtgaactcaattacgtatctgaacggttcgctcagggcctcctcaccttcaaagctcagcacgtccagaagagcgctgcagccgcgcaccgttaa

SEQ ID NO: 190690 - DNA, 981 bp, Klebsiella oxytoca
atgagccatcaactcaccttcgccgatagtgaattcagcactaagcgccgtcagacccgaaaagagattttcctctcccgcatggagcagattctgccatggcagaatatgaccgctgtcatcgagccgttttatcccaaggcgggcaatggccgacggccctatccgctggagaccatgctgcgtattcactgcatgcagcattggtacaacctgagcgacggtgccatggaagatgccctgtacgaaatcgcctccatgcgcctgtttgcccgattatccctggatagcgccctgccggatcgcaccaccatcatgaatttccgccacctgctcgagcagcatcaactggcccgtcaattgttcaagaccatcaatcgctggctggccgaagcaggcgtcatgatgacccaaggcactttggtggatgccaccatcattgaggcacccagctctaccaagaacaaagagcagcaacgcgatccggagatgcatcagaccaagaaaggcaatcagtggcactttggcatgaaggcccacattggtgtcgatgccaagagtggcctgacccacagcctagtcaccaccgcggccaacgagcatgacctcaatcagctgggtaatctgcttcatggagaggagcaatttgtctcagccgatgccggctaccaaggagcgccacagcgcgaggagctggccgaggtagatgtggactggctgatcgccgagcgtcccggcaaggtaaaaaccttgaagcagcatccgcgcaagaacaaaacggccatcaacatcgaatacatgaaagccagcatccgtgccaaggtggagcacccgtttcgcatcatcaagcggcagttcggcttcgtgaaagccagatacaaggggctgctgaaaaacgataaccaactggcgatgttattcaccctggccaacctgtttcgggtggaccaaatgatacgtcagtgggagagatctcagtaa

SEQ ID NO: 190691 - DNA, 240 bp, Klebsiella oxytoca
atgcgaccggtctgtcgcaacgtcgtgcctgcaggcttacaggtttatccctgtcgacctgccgctatgaggctcaccgtccggctgctgatgcgcatttatcagggcgcatcactgagctggcactggagcgcaggcgttttggctaccgtcgtatttggcagttgctgcgccgtgaagggcttcatgttaatcataagcgcgtgtaccggctttatcacctcagtggcctgggcgtaa

SEQ ID NO: 190692 - DNA, 510 bp, Klebsiella oxytoca
atgggcatcacttacgcagaaatcaaaaagaaacgtgaagatgttgaagcggcgcagatcgaaaggtcaaacattgtttattcggaagctgagcaactggttgagcagtatagaaaatcacttggccttgaacgggaaacatggacggacatcaagggcgtagcttctccttacgtctcgacaggctacgttactggcgatagtttcagaaagtccagcttacttgagatcgatcttgaaaaagattactcgtttgattttgaaatatcgacagtaacggatgattcgccgcgtggcgggagttactccgtagtgagcattgatctgcgccttcatgacgccagcgggaccattaaggttgtggtcaataatggcaaaacctttcttgtggaagaaaaagaaaacaaatacgcggacgtctgcgaagagataaaattacaggtgctttcttcactcaacgaccctgcattggcactcacagaacatttcaataccttcatacccatctaa

SEQ ID NO: 190693 - DNA, 786 bp, Klebsiella oxytoca
atgcttccgtctggaataagaaagataacaaccattcataattatccggatgttgattcgatttatagacgtgggaaaataataggtggcttactgtattatttgcaaagtaaagccattcgactcttctttaaagttgcatgttctgattccgttaagcgatattgtcaatctcagttgaagatggacaatattgttgcaatacctaatggagttccttcaagtcagcttagtttgcgccctttcaaaagtgatgtaacacatttctactatttaggaagcttgtcgcgtagaaaaaatgtggtcgaattaattagcggctttactgaatggtgtctacataaaaatgccgtgttaaatttaattggtgatggggaattatttaacgagctttctagtaacttcgcaagtaataacgttattttttacgggaaaataactcatccagaagaaattgtaattaattttgattgtttcgtttcatcgtctagagcagaaggtatgcctcttgctcttttagaggggctaagtttggggaaatcatacatatgctcaaatatagaacctcatagtgaggtgtatcaagctgatggaggaggagctggggttctgtatgaactaggtaataaaaaatctttaatcaatgcctttgagtggtattattctaaccagcataaagtactattatcagaaagagcaaggcaatgctttgatacgcattatgatatgaaaatcatgtctcagcgttatgatattttatataaacaaaagcatcaaaaatattaa

SEQ ID NO: 190694 - DNA, 231 bp, Klebsiella oxytoca
atggcggtgatcaatgccaaacgcgtataccgcatcatgcgtcagaatgcgctgctgcttgagcgtaaaccggcaataccgccctcgaagcgggcgcatagagggaaagtggccgttggagaaagtaaccagcggtggtgctccgacggcttcgggttcagctgtgataacggtgaaaaactgctggtcacgttcgcgctggactgttgcgatcgcgaggcacttcactga

SEQ ID NO: 190695 - DNA, 516 bp, Klebsiella oxytoca
atggcccgcgtgctgacctcaaagtatgcagagcacacaccgctgtatcgtcagtctgaaatatacggtcgccagggcgtggaactgagccgttcactgctgtcgggctgggtggatgcatgctgccggctgctgtccccgctggaggaggcgcttcaggactatgtcctgactgacggtaaactccatgccgatgataccccggtccaggtgctgttgccgggcaataagaagacgaagaccgggcggttgtggacgtatgttcgtgatgaccgcaacgccgggtcagcgctggcaccggcggtgtggttcgcctacagccccgacagaaaaggcatccatccgcagacccatcttgcggggttcagcggtgtgctacaggcggatgcgtacgccgggttcaacgagctgtaccgcgatggccggataacggaagccgcctgctgggctcacgcccgccgtaaaatccacgatgtgcacgttcgcacgccgtcagccctgacggggctttgttga

SEQ ID NO: 190696 - DNA, 276 bp, Klebsiella oxytoca
gtggcttccatctccatcagttgtccctcctgctcagctactgaaggcgtggtgcgtaacggtaaaagtactgccggacatcagcgctatctctgctctcactgccgtaaaacatggcagctacagttcacttacaccgcctctcagcccggtacacaccagaaaattattgatatggccatgaatggcgtcggatgtcgcgccagtgcacgcattatgggcgttggcctcaacacgattttacgacacttaaaaaactcaggccgcagtcggtaa

SEQ ID NO: 190697 - DNA, 276 bp, Klebsiella oxytoca; identical to SEQ ID NO: 56170

SEQ ID NO: 190698 - DNA, 258 bp, Klebsiella oxytoca
atgtatcagcgtatttacggttgcgactggcgtaatatctggctggtgggcgacctgcacggctgtttcgcacgcctgatggcggcccttcgtgagcgcaagtttgacccttaccaggatctgcttctttcggtgggcgatctgatcgagggccacaaagcgcggagtgtctggatttactgcgctatcgctgggtttacgcggtgcgtggaaaccatgaacagatggcgctggaggcgcttgccgacggcgatatga

SEQ ID NO: 190699 - DNA, 753 bp, Klebsiella oxytoca
atgactacccgcttttatgttgataacggtgtgacagccacgcgttaccttgacacttacccttatccaaacgacatcacccaacttccggccttaataccggggattatcctgcaggctgattttgacgtaaacgacactgcatcattaaccagaaaccgggttggagctgccatgtccgttgttggctctcctgctctgggtgattacggagtcagccttactgaggctaaccaccttgatacgaacatcgacatagcagcatataacggcagcgatctgacaatgatgacaatagctgtccatccaggggtaattggtgctgttgtgggccgggtgcaaatgaacgcgccacagcgtactcgtggcacacaaactacggctacagcgtggagagctaaatggttgacagcagcaggtgcagcacaacaggcagacctcataccgtctactgccgcaactgatggcgaaatggcagtcagtcggtttgtgcgaaacaacggtagcggatcaatgctgactaagctcgatttaccacgcacattacagtcagcaaccggtaccgcagcgacgactccttatgccgtaccttcgtcaaaaattctgcttggcggttcggtcgagggaaccactacggccactatcttcatgcgggcatgcctgattgtatccagggcaataacggatgcggagatggcaactatttacacctgttacaaaagctactatcagcttaaaggtaaaactatctaa

SEQ ID NO: 190700 - DNA, 1881 bp, Klebsiella oxytoca
atggtagctaagtcgatcgtcgacattgacgtaaatgacgacaagtttgtcgcgtttatggagcggtttcgcgaataccagagcgcgctggaggatttgccggaagcgtggcgcgtggccgccgtcggcattggcgagggcagcaaagagaccgagaaggccaaaggtgaggcgaaggaattaggcgcggagtttaatgccgttgcagaggccatactgaccattaacagcggtctcgaccggctgaataacaacctcgacgactcgaagaaaaagcaggatgagttcaacaaaagcgctcgctctggaaagggattcatcagcgacgccacgaaggacgccaaatcgctggccgctcacattaaagatgcgacagtcagccttctttcctggggtagtatcgtcggggtcttttctggcgttctcggcgtcggcggcctgttcgggctgaaccggctggcggccacgaccggtgcccagcggtttacctctctggggcttgggaccagtatcggtgcgctggactccacggccattaactaccagaaagcgcttggcaaccctaccgggacgctcggcgctattcgcgattctcaaatggacctgtcgaagcgctggacgtttcaggcgatggggattaacaatcccgaccaggacccggccaaactgctcccgcagatgatccgcaacgcgcgcgatatcttcgtgcagaacggcagtacgctgcagggggcgcaggcgcacggcctgaccaacttctttaccctggatgacctgaaccgcttcaaaaacatgagcgatgaagagatcgccgccatggagaagcgtgcgcagcaagactcgcgaatgctgcaaattaccgaccagcaggcgcgtcagtggcaggacttcaacgtccagctcgactacagcagccagagtatccgaaacacgtttgtgcgtggactgggtccgcttacgccgcaactgagcaaactatctgatgcgttgtcaggcgcgattgataccgttctgaaatccccagagctgggtaagtggattgatgctctggcagtaggtattaagaaatttggcgattatcttgcttcgcccgattttaccagtgacgtaaatgacttcatgtctggcgtcaaaaagatggccctggctgtcatggatgttatcagggtatttaccggcgaaataagcgtgggggattttgctaaaaagcattcaaccatgctcggtaacgagacagtgaaagacccaaatggtggtccagactatgtccctggtagcgaaagtgacccgcgcgtgtggggcgttctgaagtggggggaatctgcatccggagttgcacctactcagtacgatgattacttttccgaagcggctgaaaaatacaacgttgacccgcgatggcttaaagctatcacagcagcggaatcctcatgggatcaaaatgctgttagcaaggccggtgcaaaaggtctcatgcaggtaatgcctggcaatttccagccgggagaaaaaccttttgaacctcgcgataacatcatggccggagccagggttttctcatgggccatgcagcagtcaggcggtgactttgacgaagccctgcgttattacaacgggggtaatcgcaggggaagtagtgaaaatatagcctatcctgggcgcgtcagagaacagtatgctgccatgtacggcgctccgaagagcaatgagcctgctggtaatgataattctgagattgctaaaaatacccagaaaactaatcagcttctacagcagattattgatggaaaaacaggcggaagcggaagagagattgtcgtttttaacaacacaggtgggaatgccattgtttccggcgcccttatcgcaggggggcaataa

SEQ ID NO: 190701 - DNA, 435 bp, Klebsiella oxytoca
atgatcacctttcatctgggtgttatcgacattccatacgaggacgaagacaccacgaccggggatgttgctgagtatctggaagaaaagtaccagataatgcagacgttctttgaccgctacggcaatgacattgctgacctgatgagcaaagacctcgccgcatcgcttgagaacatgttcgcaggcgctccgccggcgcaggacccgctcgctgagtcaatgtcaaaagttcatgatctctttgtgggtttcctcgataacacagaaatgaacggcctcccaggcgtgccaacacgccgcgcgcttgatggtatatcgaagcgcttcaagggcaaaaaagggccgccgcgcccctcgttcattgacaccggaacctatcaggcagcaatgcgagcctgggtaagcggggtgctgaatgccttccctgagtga

SEQ ID NO: 190702 - DNA, 375 bp, Klebsiella oxytoca
atgaaaggtgaaatccacgatcacgcctgcataaactgctttaccgataaaggtccatgccttggcgaatgcaacgtttatgacgaaaaccgggatctcgctgcaggaataatgcaggaatatttcccgaacggcggaagggactgggatcaaatcctgagcctattcgatgccatttccgcagggaaaattccgggggtacaagctcaggcaatgcagtcaaaatcatcctcctttgaagacgtcgtgaagccggtaatcaaatggcttaacgaaaacgccaaccctcatacatcagtgaacatcgacgcaaccagtgctcagctgcttactggtgaaataggcattcacacggaagagttcattaaggactga

SEQ ID NO: 190703 - DNA, 144 bp, Klebsiella oxytoca
atgaatgtaaccgaaacccgaaggtacgaagcagagagtgtagcgagagccagcctgcctcctattgcaaagcacagccagaacaaaactaatcagccgaataaattcgttcgcatctatcagaccctgggagagacagcatga

SEQ ID NO: 190704 - DNA, 165 bp, Klebsiella oxytoca
atgacagacgctgtatttctatcggcatatctgattgccgttatcttctttctgatcagggaatcggttaagcacaagaggcttaaaagggcgtacggcataaagattagagccattagatatgcggaaaaataccgcatgctcaaaaggctaatgagggattag

SEQ ID NO: 190705 - DNA, 588 bp, Klebsiella oxytoca
atgaccagcaaattaaccagagaacgcattgagccaatcgctaactttcatcgcgcaatgacgctgccgccgtctcacgatgaaattgaagagctggccagcatggcgctggacgcaatggacagcgagccggtggcgtggattgttcacgcccgcactggtgaccaattaaccacagatggcggctatgttgccaatgctgaggggatattaggactgcattccactccgctctatcgccacgcgcagcagccggtagtgccaccaatgcagcactgggaggaattgtgccgtgagcatccggacatgagcattggagatgcgattatccgtgccgcttggtggaatcactgccgcgccgccatgctacaggctggtgccctcaccaatgaaggtaccatacaggctggcaactctccggtgattccggatggttacgtgatggtgccgaaggagccgacgaaagcgatgattttgtcagcgatgcgagacaacgaaacgggagaagtagcggaaatttatgatttgatgctcgcagccgccccgcatgacaccccccgctctcaactcgctacagagcgtcgatag

SEQ ID NO: 190706 - DNA, 435 bp, Klebsiella oxytoca
atgacaactgatatcaccaaactggcgcaggactggaagacagccgcgcacaaagccaagcaggccaatgacctttacctggaagggaaaatcacgctgtctgaatgcgtcgtagagacaaaggattatctcgactactcagacaacccaaataacatcctcgtgctggtagaggcgctggagaaggcgcaggccaccgaggctcactgcaatcgcggatggagagaagcgcatgagcaggaggctagggcggaagcggcagagaagcgtatcgccgacctggagtcaagagctgtgaagattgtcgattgtgattttggcgccgttcagcacatgtctggtggcagcacagattactgccatggctttgtggacggaacgcagaatgctatccgggcgataagcgccgctggcatcaaatgggaggatgagtga

SEQ ID NO: 190707 - DNA, 426 bp, Klebsiella oxytoca
atgagcaagcgacgctacaccaacgaaaaaccacgcattgagaaaaaaattaataccgcagctatgaagattttgattgctctcatgccacgccaatacaggcgggaagtgtggtcacgcggcgaaggaatgatttattcaaactgcacgtggtaccagacatgggaagtcgtcaccgttgactactggggggaggcagatagccgagaggcgtttgatattctccacgaccagctaatcatcgaaaccactgattgggatggcattgggcatgcgcatgacgccgaaaacgcaaccggggaagaacttgataaagagcagttttattcaccgtggaggcttagcaacaaaattggccgtgctgaaattattcgtcactgccgccagttggtaaaagaaggcgtgaaatgggagcgtgcagcatga

SEQ ID NO: 190708 - DNA, 957 bp, Klebsiella oxytoca
atggctgatctggacaatggctacctgcgccttgctaaccagattcaggatgccttgtgtgtagtggagctctcagggcgcgaatttcgcgttctgaatgcaattgttcgcctgacgtatggctggtcgaaaaaagaagaccggatcgctaacagcctcatagcagacaaaaccatgctggcggttaagcacgcttctgaagcggttctcagccttgcttatcgaaacatcatcaaggttcgcaggattgggcaaacacgctacatcgggatcaatacctgtctggatgcatgggcttataccaaaccaaaatgctccaaatgtccggttagttttccggtcgctgaggttgtaactcaggttatcaatatccctgaaactagggatagcaaaataaccgctccaaccatccccaaaaacagggataaccatccccaaaaacagggagagctatccccggaaacagggaacaccaaagacattctttcaaagacaaatataaaaacagatctaacccctatagtccccgctggggacgagtgtgaaaaaccagctggcgaagagtctcttcgggaagatccaaaggttgaccctgtaagactggttttcactcactggcagcaagagcatgaccacccgtctgcaaagctggacgacaagcgacgtaagcgcatcaaagctcgcctggctgaaggcttcaccgtagacgagctatgccgggccataacgggcgcaaaaggcgatccgtggctcatgggcaaaaacccttccagaaaactctatgacggcattgagacgcttctgcgtgacgcggctcaggtcgaaaagcttcgtgacttgtctggtgatgcacatgccatggctatcgcgaaggggcagtactcagcaacaacggctcgcaacctcgaaaccctccagcgctgggctggcggcactgattcaggagaacttttctga

SEQ ID NO: 190709 - DNA, 972 bp, Klebsiella oxytoca
atgagcgaaataatggatttagtcgtcatcgagaaaaagaacgcgatggcggttttcaccaataacgaccaactcgatccgcttatcgaagcgatcgaaaaagaggctcgcagtctggtgcctgacgtgaccaccaaaaaaggccgcgacgccatcgcatccatggctcacaaggttgcacgctctaaaacctacatcgacaacgcaggtaaagaccttgtcgctgagttaaaggcgctgccaaagcagatcgacgaaagccgccgcgttgtccgtgagcgtctcgacgcgctgaaagatgaagtgcgtcgcccgctgactgaatgggaagccgagcaggaacgcattaaggccgaagaagccatgaacgcccttcacgtcgaagcactggccatgaatgaagacttcgatcggcagttggcagctcgtattgagtctgaccacgaaatggctctgctgatgaatgacgctttcgaccgtgagcaggcagataaagcagctgaggctgagcgccagcgcattgcccatgaagaagaaattaagcgactggcagcagctgcagcagcccgcgaagttgagcagcgcgcacagcgtgaacgtgaagaagcggcgcatcgtgaagctgtgttgaaagcacaagctgagcaggcagagcgagatcgcattgcagccgagcagaaagctgaggctgacaagcaggccgctatcgaagcggagcgccgcaaagctcaggaagaagccgatcgcatccgccgagaggcagagcagcgtgaacaggcccgcctggccgaagagaagcgcaaagctgatgatcaggcgcgccgcgaagccgacgttaagcatcgcaaagctgtcggtactgaaatcgtcaaggctttgctggccaataccagcctaacccgcgatcaggcgattgaagtcctgactgcgattaaagacggaaatatcccacataccaggatcagctactga

SEQ ID NO: 190710 - DNA, 210 bp, Klebsiella oxytoca
atgagcaatcccactgatgatgaaatccttcaaatattgcgagagcacaactggtgcatgacgtatgtcgtagcctattggttgcgacaaaaatataaggaaatcaatactccttacgtgcttcgcaggctgaagaaaatggaagtggcaggaagcgttaagcgtgtaaaaagtttttataagcgacagattcgctgggaggcggtatga

SEQ ID NO: 190711 - DNA, 327 bp, Klebsiella oxytoca
gtgggctttccatcgccagcatcagactatgtagagggacggctaaccgtcgataagatatgcagcatcggccctaatactagggtcgtacagactgaaactggttatgccgtagttgatttctccgttaaaccaaagcagcaggacacggtattgatccagtactccggcggtacagattttgcgaaagtttttgggaaggcgtttattactcgtgatggagaggcgctggaaggcgaggcattggacgacgtcgtagtgttaggaatagtgacattcgttattaaccggatagggaaggatgatgatgattctccagttatatga

SEQ ID NO: 190712 - DNA, 522 bp, Klebsiella oxytoca; identical to SEQ ID NO: 150523

SEQ ID NO: 190713 - DNA, 186 bp, Klebsiella oxytoca
atgaagaaacgcttttataaagtggtggggaagacctgtcataagattcatttagaaatgaagagcatcagtgatttggtggatttaaagcctaacaagatttattccattcctcgtctaattacacgagcaagacgttatattatgattaaacagatagccgaaagattaatgaaaagtaattga

SEQ ID NO: 190714 - DNA, 828 bp, Klebsiella oxytoca
gtggtacatatagttaaatcaactattggaaatgattctgattataatactcctgcaagcaaaatttataattacataaataatactctttgtagagagtatggtgtatttaaacttcaggagtatgcttcagaaaattttgagtatatatacaattttttcctgaaggaaaaagaccccgaaaaatgccttgatgtaattgagcttacctttaaatgcatcaatggatatgtcaggcaaaactcctgggaatttcgtgattgccaccaatctccagatgatgctatagaggagctaaataataggttcagagaatcaggcattggctaccaattcgagtctggagaggttgtcagagttgattcacaattcattcattccgatgttgttaaacctaccctccagattttggggaattctcaagaattcgcaggggctaatgatgagttcctctctgcgcacgagcactacaggcatcaaaggttcaaagagtgtcttaatgattgcctgaagtcgtttgaaagccttatgaaggccatccataaaaaacgctcatgggaatatggaagtactgatacagcaaagaaactaatttccagttgcctttcaaatgggcttattcctgactacatgcaaaatcaattttcatcactgaggattttactcgaaagtggtgtaccaactatcagaaataaagagggtggacacggtcagggggatgaggtgacgaatgtaccagagcatcttgctagctatacattacacctgacggcgtctaacctactatttttagcaaaatgtgatgagaatttcacaaagaaaaaataa

SEQ ID NO: 190715 - DNA, 249 bp, Klebsiella oxytoca
atgattggactcgtgcccttgcatcgcgctggtgaggtctggggcggggttatactcagctcgatcggtgactattgcgtaacggaaaacttccccacagcgctgcctaacttttcttgccttttcggtagcgccgcgcccctcaatgcgccgcagcacattcaacagttcaagcggtttgatttcggctattggttttttgccaatgtatgggaacacatctttattgaaggcttcgaggatgtctga

SEQ ID NO: 190716 - DNA, 138 bp, Klebsiella oxytoca
atggtgtgcacggaaaccgtgcccggtgacttttccgttatagccaatccgcttaaagacttggtttatgctggcttcactcattgtttttcgcggatcgttacggcctgggaacacaagcgggtaattgcctgttag

SEQ ID NO: 190717 - DNA, 771 bp, Klebsiella oxytoca
atggaattgtattatgaaagctcggatgagaaagatgcctcatatcttctttcttatataaatgatgttatttttcctacttcagtcgattttttcgaaaaactagaagataatatgttgagattgcatcatgttttctcatttaatgcaattcttgctcatgcgacggattatattgtttatatcgttaacaaaaaagtcagtataaaaagagtagattttctaagaggttttgatgaaagatactctgtagatggttgtagtttcattaataataagttcgagctattagatgctgtgaataattcatttaaacacgttgagttaaaaaaggaacgatatcctgaactgataaaaagatatggtaatctttcattccactgcttaaaagaaacttctggaaaagttttctttagaatgcctggctatcagtttgattattcaagagtagttctaaggccaattgcaaaaatattcgattgtgggctcaaagataataatgatatcgatgattttataaatggaagaatctgtgggagttgtggttatggtcatttttcatatgactatgaaccatatgacgcaattgatagaatgatagattactgtaacgcacagtgtatggactgtggtgagtatgcagatgactgtgattgtcatgattttgaatataataaagaaaaaggtaaatataaccctgatttagatcctaacttcgatttcgatgatgttatatctaatattagtggcacaagggagtggagtaagtga

SEQ ID NO: 190718 - DNA, 831 bp, Klebsiella oxytoca
atgattgatgatccattaccaaacgattggagagagcttcaagcaggtgttcagcgaatttttcgaaatgtgggtatgaaggctgttgttgaagttgatttacaaaccccacggggttcaattaacgtagatgttcttgctattgataccagaagtgttgataaaataaaatatattgtggaatgtaaaaattggtctaattcaattccgcagtcagtagtccattcctttactactgtaatgcatgaaacaggtgcaaacatcgggttcatagtcacaaagcagggactacaacaaggagcaattcagtatacaaaaaatacgaacatcatcggtatgacatatttagagttccaggagcgatattttgaagcttggtggaaaaggtatttctgcccccgcattggtgatgcggctgatgagcctttccaatatgtcgaaccattcaattctctaagggatcgtgaatatgataggctcacgcccgaaaaacaggactgttttgatcggctgagaaaagataccgaaataacagtaacgttttttaccatgtttaatgttggcataatgccaaagttatttaaaaaaagtgatatcctcatcccacaaaaaaacctggatgaatttaagtcaaaactttcaacgttattaagttttaaaattaatacggattgtcgttcttttagagatcttttagaagcaattataaattatctattagaagttaaggaaaaatttgatgcaatatttggtgggtctatatttgaacctaaacatggtttatcaggggtgacttttgacggtcccccactggatgaaggtatatattaa

SEQ ID NO: 190719 - DNA, 1116 bp, Klebsiella oxytoca
atgaacgaaatatcaattccgattctaatttcaaactttaaaccatttagattgatatgcagggacaaattcgacagatggaatccaagtttagaacagataaacaagtcaacttatgattatgttaaattgcacagagtaagcaaatttttcgatgcaaatttgccaaggaaaatgcccgcctgcctcggttttgatggcagtctaatcttccccttcattgaagaattccaaaatgatgactttgtcattgaggaatttaatcgaattcttgcctctatttttattggtggcgtttatgttgaatcaatttctccactggatgtttcaaaggggacaataaataccattggttactaccgctactctaccactcacagcagcaattcagatttccatcgagctataggggaatgtgatgcaggatccttagcttcaataaaattattagaaccagatataatggacgctgataatatcatttcagcttacaattatgggcatctaattctctcgaaacttacaaacgtttcacctacccttcttattggttcattcacgtattatagacatcatcaattacgtgagtctttagctcatgcttggattagcattgagcaaatattagaaattatttggaaccaaactattattgagaatgccaaaaatataaacatccaaaaaaggagaaaatttctagaatcacagcaatggaattctgcacataaaatcgaaatgctctatcaaaataactttatatccgaaaccctgtattcttatttaagcatagccagatttgcacggaatgatttcatacacaaaggcctaacaccatcttatgacgattcactttcggctttaatgtctttaatactacttctagaagttgttttattattaaatgaaattaattttgacaaaaatagacttgaaaagaatttgataaataaatcaaatgacttcactcttcatatatatacccctgcacgagaatcgcacaaagttgaaggtataaaatactggagagagttaaaaaaaatcccaggagataaaaattgggagggtgaatacgagtcatttcctgatataacattatcccccttagatcctgattaa

SEQ ID NO: 190720 - DNA, 171 bp, Klebsiella oxytoca
atggcgctgaccgtggcggctgaacgctatccgcaatacggatttaaaaagctttttcaggtgctgcgcaggcagggcaaaagctggaaccataagcgcgttcaccggatttactgcctgctgaaactgaattttcgccgtaagggaaaacagcgcactgccagtgcgtaa

SEQ ID NO: 190721 - DNA, 264 bp, Klebsiella oxytoca
atgggtattgagtgcgtcgaagccccgatatccgccacatggtatctttttattggcggtttctccagccagccgtggctgtacggctggctggcggtcgaggcgctacaggggaaggagtcggttatagcgggcgatgtaatctttgggattaatttccagctttttgccatcgtgatggtgggcaacataagtacgcagtaccaggccgctgttttgcggcgtaattgtccagccctgttgacgatatgcatcttcggttga

SEQ ID NO: 190722 - DNA, 753 bp, Klebsiella oxytoca
atgcagagcagaaccgtttaccactggcagagccggcgggatgatcgggcgataaccctgcgtatccgggaaatagcggaaacccggatccgctacggttgcccgcgtattcatattcagctgcggcgggaaggctggcctgttaaccacaagaaaacacaccggatttactgtccggaaggcctcaacctgcgcagaaaacgcccgcgcaggcatgtcagtgcagcacatcgtcagcaacgtccggtcctgaccggtgtcgatcagtgctggagtatggatttcgtgtcggataacctgtttaacggacgacgtttccgggcgctgactgtagtggataattttagtcgggagtgtgtggcgatccatgccggaaagtcgctgaaaggtgaggatgtggtcggtgtgatggaagggttgcgggtgctgggcaagcgcctgccggtacgtattcagacagataacggcagcgagtttatttcgaaaattctggataaatgggcgtatgagcacggtgtcacaatggacttctcccgccccggaaaaccaacggataacccgtttattgagtcatttaatggcagtctgcgggatgaatgcctgaacattcactggttcctgtcgctggaagatgcgcaggacaaactcgacaactggcgcagggaatataatcatgagagaacgcattcatcattaaatgacatgactccggctgaattcatccgaagtctccggaaagacgaggatctctga

SEQ ID NO: 190723 - DNA, 387 bp, Klebsiella oxytoca
atgagcgaagcggacgccaaagatctggggattgaggataacgactggatcgaggtgttcaacagcaacggcgcgctgaccgcccgcgcggtggtcagccagcgcgtgccggccgggatgaccatgatgtaccacgcccaggagcgtatcgtaaacctgccgggttcagaggtaaccgagcagcgcggcgggatccacaactccgtgacccgtattacgccgaagccgacccatatgatcggcggctatgcccagctggcctacggctttaactactacggcacggtagggtcgaaccgcgatgagttcgtggtggtacgtaagatgaagaatattaactggttagatggcgaaggtaacgaccaggtacaggagagcgtaaaatga

SEQ ID NO: 190724 - DNA, 1443 bp, Klebsiella oxytoca
atgaccctgtcttttactacccactggcgtgatgaactgccggatttttacaccgctttagcccctacgccgctggagaatgcgcggcttgtctggcacaacgctccgctggcgcgaacgctgggcgttgacgcgtcgttattcagcccgcagaagggcgctggcgtatggggcggcgaaacgctgctgccgggaatgtcgccgctggcgcaggtttacagcggccaccagttcggcgcctgggccgggcagctcggcgacgggcgcggtattctgctcggcgaacagcagctcgctgatggtcgtcgctttgactggcaccttaaaggcgccgggctcactccctattcgcgaatgggcgacgggcgggcggtgctgcgctcgacgatccgcgaggcgctggcctcggaagcgatgcatgcgttgggcattccaaccacccgcgcgctggcgatagtggccagcgatacgccggtataccgcgaaaccgtcgagcgcggggcaatgctgatgcggctggcggaaagccacgttcgtttcggccattttgagcatttttactaccgtcgcgagcctctgaaagtgcagcagctggcggattacgtgattcgtcaccactggccgcatctgcaaaatgaagcggataagtaccttctgtggttcagtgacgttgtcacccgaaccgcggagatgattgcctgctggcaaacggtgggctttgcccacggggtgatgaataccgacaatatgtcgattctcggcctgacgatggactacggtccgtacggtttccttgatgatttccagcctggctttatctgtaaccactccgattatcaggggcgctacagctttgataatcagccggcggtagggctatggaacctgcaacggctggcgcagacgctctcgccgtttatcagcgctgaggcgctgaacggcgcgctggatagttaccagcaagcgctgctgacggcgtatggccgccgcatgcgcgacaagctcggattgtttacccagcaaaaaggggataacgaactgctggacggcctgtttgcgctgatggaacgcgagggcagcgactatacgcggaccttccggatgctcagcgccagcgagcaggagagcgccgcctcgccgctacgcgatgagtttatcgaccgcgagacgttcgatagctggtttaccgcttatcgcgcgcgcctgcgtgatgaacaggttgaggatgcgcaaaggcaggcgcggatgcgcagcgtgaacccggcgatcgtgctgcgtaactggctggcccagcgggccattgaacaggcggagcagggggatatgagtgagctggagcgcctgcatagcgcactctctcacccctttgccgatcggacggatgagtatattcagcgtccaccggactggggaaggcgtctggaagtaagctgttccagctag

SEQ ID NO: 190725 - DNA, 288 bp, Klebsiella oxytoca
atgactattgaaaagattgtgcaggtattaaaaaacgccggtgttaatttggctactattggcagtgaagcagaccgtaaagcacgtattgaagaagttaagaagattgaagatgtacgtgttcatcatggttacactaaaggtcagatatatgacgctgtaaagaccactggcggtaagatttttaatgtgacatataacaagcttctcactattgagaagccggcaagcacgcttaaaggttctgctgtaacgtctcctgtgggggcagcattcacacaacattag

SEQ ID NO: 190726 - DNA, 510 bp, Klebsiella oxytoca
atgaatggtatagatttaattaatgttttccatgttgctggtttacttgctgcaatttgtatgtgttcatggggtaaaggtgaatcaggagataagacgcttaaagcacgtaacatgttaaacaatgccgtgtgggcatatgttgcaatgttcatcctaacctttgccagcgtattccttaattcctatatgctttggggccttactacaggatatgtagagcatttagtttactatttctgcatgatgtttatagctcctgcttcaatgtattcatgggctgtgctgttccgttgggctggtaattcagcgaataaagaaaaacgctacattaaaaactctctattttttgttagcttctttttactgaaccctattgttgttgtgttgttctctaagcttactggtgaagtagttcagtttattcatcagtcggcaattattgtaattggatttattgtgctccgtaaaactaaaggttataaccctgctttggaatttatgaaatga

SEQ ID NO: 190727 - DNA, 492 bp, Klebsiella oxytoca
atgaaactgaaaactatttcagcggccttggctgctgtagtaatggcgtcttcactatctgcttgctgcttaactgtggacggtaaaacacaacctgtagctattaaaactaatgcacctgctttatattctgtcaaaaatgcagatggtgtagaagtggcaaatggcgttgcacctgcaactgtcaatctaaagcgtggtgatgctccttatacagtgacactgaagcgtacacagaatgatttgccagttacaggaacagtaacagataaccttaatgggtggttatggggtgatgtgctttgcggaattattatctgtggtggtgtagaccttgctacaggtagcgcgtgggacttagacaaaagcgttacagtgaacacaatagcgaatagtaatgctatgcagccagatagcccattgaacactgtacacactgcggggagccagcccgtaacgattaacaacactataaataacaaacagggctaa

SEQ ID NO: 190728 - DNA, 150 bp, Klebsiella oxytoca
atgtggacttcacaaatgccttcgattattgaagataaaatcagagttaatattaggaaaatgggaagttacaccccgcatgagtgttattatgattctatcagggctgttaatcttcgggaagaaatatcacagcgtaacaatgcttag

SEQ ID NO: 190729 - DNA, 186 bp, Klebsiella oxytoca
atggggctatacatgatgcatgggtggaagcgtgtgcaagctgattggagtgcccccgagctcgtagaccttcgaaaaggcctcgccgtgaggacagaaactgtctaccagagcgtggtcactccaatcaacatttggggcgcttttgttcatcctaattatggtgggcgtagcggggaagcctaa

SEQ ID NO: 190730 - DNA, 240 bp, Klebsiella oxytoca
atggattggcacgaagcagacataattgcagcgcttcacaaggaaggcatttctcttgccgctctaagccgggaaaacggcttattagattctacgctagttaacgctcttacagggcagtggaccaaaggcgagaaaatcattgcaaaggctttagggcttacaccgcaagagatatggctaagtcgctacttcaatgaatgtggaatacctattcagcgtacactcagaaagcgataa

SEQ ID NO: 190731 - DNA, 1302 bp, Klebsiella oxytoca
atggaattgacgcacttcaccaacaactcaaaaaagataatttgtagccttgggctatttatcatttcactgccagtaggcgccgcaggatttgactgcgcagccaaaaatctcaatccgacggaagccgccatctgccaggattcgtatctctcagggatggataacgcattaaataagtttttcaattcggcgctggagaatagcgttaatcacggcaccttgtacaggcaacagcgccaatgggtaaaagagcgtaatcagtgtggagataacgtcgcgtgtattaaacgagcatacattgacagaaataaagcgctgacggaggttttaccttatttaagcgttgatgaagcgtttgttcgcgatggagatttactcgaccctcccatggcgcaggatttgcaaaataaagatgggtttaccgttaccgaggaccgctggcgggttaagttaatcgtgcctgaatgggttatttcatccgcgaagtttcacctggaaggcgccaactggcaggtgctgacgcacagagtggtgaatggcgacctggttatctattttcttgtctccgggcaatcgcgggaccaacagattaactacgtcgttcgcgttgaaaacggtttacatctacagattgttgctcgtcacgcttttccttactctgacgatgtgttcattcagtatcagccagagggtaacggaagtatcgtctactccgtattccaccgtcccgatccagagctgggcgatagcgatgacggcgctgattatgccgtagagacctattctgttgatgcctccagtaatacggtttcactgacggacagtaagacccgcagtgaagcaggcatcaataaagaaacgtgggttggctactgtggaacccaagagtgcatcagccgggtggcgtccccggatggaaaatggcgtctggcatcgcgtgatggcactaagggcgagaaagatgaaggcatgttttattttcctgtcgataaaccggaccaggggattaacgtattcctgacacaggccgatacatccacagataatggttttggctatatgcgtaactatgtctggggggatgagaatacgttttattttgataacgaaggtgcctatgcctgcatctggaaagctgatattaaaaataaagttacccagcgtatcttaccgattgaagggatgcaacaaccttactacctgaattataataatgaggatatggtcattgcctcataccgctattattctgaaaaaaatataatgcaccattacgagatttatatcgctaagaaataa

SEQ ID NO: 190732 - DNA, 1344 bp, Klebsiella oxytoca
atgagtggggggaaattgccggaggggtgggtagagtgtgaattatctgcattaggtcatatcgtcactgggaaaacgcccagtactaaggaaccttctaattttggaggcgatatcccttttatcaaaccaggcgatcttgatctcggtggttatatcacggcaaccgccgatactttgacggagaaagggttagctcttgttccaacactcccaaccaattcaatcgttgttacctgcattggaaacttaggaaaagttggaattaccactataagatcagcatctaatcaacaaataaatgcattgatcccgtcagaaaagctaaatgttaaatttatttattatcaaattttgacattgaaaccatggttagagtctcaatcagcagcaactacgattgcaattgttaataagagcaaattttcccaggcaccatttaaattcccgccaatatcagaacaaaaaatcatcgccgaaaaactcgatacgctgctggcgcaggtagacagcaccaaagcacgtcttgagcaaatcccacaaatcctgaaacgttttcgtcaggcggtgctggctacagcgatgagtggaaaattaacaaatttacctaccgctaataattttaaaataaaagatattgcatgtgtaataggtggtttaactaaaaactcaaaacgtaacaatttcgaaaaaaaagtaccataccttcgtgtcgcaaatgtttatgaaaacgagttgaagctagacgatgttacagaaataggcattcaacctaatgaattacacagagtctcattggagtatgaagatctattaatagtagaaggaaatggtagccttgatcaaattggtcgagcagctatttggcgtgaagagatacaagaatgtgtacatcaaaaccatctgataaaagtaagagctaacaaagaaattttatatcctacttttcttcttttctacttcatgtctccacaagggaaagaagagatcgttagcagagctacatcgggagccggactctacactctaagcatatctaaaatttcatcaatcaatgtacctgtgtattcgctccctgatcaacacgaaatcgtccgccgcgtcgaacaactcttcgcctacgccgacaccattgaaaagcaggtcgacagcgccctagcccgcgtcaacatcctcacccagtcgatcctggcaaaagccttccgcggcgagcttaccgcccagtggcgtgccgaaaaccctgatctgatcagcggtgaaaacagcgccgccgccctgctggagaaaatcaaggccgaacgcaccgccagcggcagtaaaaaaaccacgcgaaaaaaagcctaa

SEQ ID NO: 190733 - DNA, 3531 bp, Klebsiella oxytoca
atgctgcaaggagttcaacctttgacaactcagcaaacaaactttgatttcctggcagaatacgatccgctattggttcaaatcaccgccaccgcagaacggctattctccagcgatccaaataccacgctgatgaagctacgccagtttggtgaagcgctggcgcaaaatattgctgcccggttgaatattagccgggaagataatccaaaccagcaagagttgctctacaggttggacagagaattacagtttgatcctgccatccgtcagttatttcatacgctgagaattgaaggtaataaagcgacgcatcagttccagacccgtcaccgtgaagcgatggatgcgctgaaagtcgcccgtgcgctggcaatttggttccaccagacatttggtgatgccggtagtcagtttaatccgggcccttttgttccgccgtatgacccaagtgaacagctcaataaatctcaatctgccatcgaacaactcaaacaaaccttattggcagcgaaccaaaagctagaatccagcgagcatcttcagaatttacttaaacagcaaaaagaagaatatgagcagctggctcacgaaatggatattgaggccagagaacaacagcaattgctggaaatgagccagcaggatctgcaaacgctccagcaaaattatgaagcgaagctcaccgccttgcaggcgcagcttgctcagcaaacacagcaagccattacggcccagcgcaaagagtttggccgcaagtccagctatgcccgcaagcacatcattaccgaagagctgacgcggatcctgattgaccagcagctaaatgaatggggctggctggcagatactcaggaaatcacctggaaaaaaggcttccgccctgaaaaaggggtgaacaaagccattgcagaatggccgacttttgccgatgacgaacatggcagagcagattacgttcttttctgcgggctcacccccgtcgcaaccgttgaagcaaaaagaaaaaacgaaaatgtggccgggaaaatcccccaggccgagcgctacagcaaaggttttcagtttgacgcatccatgatccccgcctggtctgaagaagggcgcatcaaaggctgggaagatggtgtgaatagcgtttatcaaattcctttcgtgttctcttgcaacggtcggccttatatcaaacagtccgccgaacactccggcacgtggttccgcgatgttcgctcgcctgacaatacccgctatccactggaaagctttatcacgccagaaggtctgatggaccgcctgcatcgtagccgggtggaagcagaagccaaattgcatcaagagccgtttagctatcttggcttgcgtgattaccaggtcaacgcggttaaggccgtcgagtccgcactggaacagggctcgcgtgaagcgttgctggctatggcgaccgggacaggcaaaacacgtaccattattggcttaatctaccgctttctgaaggccgaacgctttaaacggatactctttctcgtcgaccgctctgcgctcggtgaacaggcgcaggatgcttttaaagaggcttcgctggaacagaaccagacgctttcacaaatctataatgttgccgagatgggtgatatggcggcagaagcagaaacccgcgtacaggtcgccacagtgcaatccatggtcagccggatctatcgttccggcacgccgcctgcggtagatacctacgactgcatcatcatcgacgaagcgcaccgtggttatacgctggatcaggagatgaccgagggcgaactctctatccgcgataacgcccaatatctctccagctatcgtcgggtgctcgactattttgacgccgtaaaaatcggtctgaccgccaccccagccaaacacaccagcgagatttttggtcaccccgtttatgtttattcctaccgggaagcggtggcggaagactggctgattgaccacgaacccccggttcgctatgaaacccagctcagcaaatacggtattcactttgagattggcgacaccgtcagtgccgtggatgcagaaacgggggaagtcgataccagcgagctggaagacgagctgaatttcgacgtcgatgccttcaaccgtaaagtcatcaccgaagattttaaccgggtgatctgcgaagagctggcgaaagagatagacccttccggcgatgaaaaaacgctgattttctgcgccacggacgcccacgccgatatggttaagcgccttctcgatgaggccatgggcgcggtcaacccagactttaatcaggccgcgattgagaagatcaccggtaagagcgatcaggtcagcaagcttatcaagcgtttcaaaaacgaacgctaccccagcattgggatcaccgtggatctgttaaccaccggtattgacgttccggcgatcacccatctggtgttcctgcgtcgggtaaaatcacgcattctgtacgagcagatgatcggccgcgccacccggcgctgcgacgatatcggtaaaaccgtcttctggatccacgatccggtggatatctacgccacgcttaaggatgtgaacaccatgaagccgctggtgaaaaacgcgggcgtcagcatcgagcaactggttgaagaactatcgaatgacgatgtgctggaaacggcgctgaacaatccgggcgatagcccaacagaaacgcaggcggatagcttgctcaatcagctcagccagaaaattatgcgcgtcctgcgtaaagcggagaaaaaggccgaaaaacgcccagaaatccgcaaaaagcttaatgaactggaagaactttggggcgtggagccaaagcaattgcaccagcatctgcataagcttggcccgcagcaagcctcggcgtttctcaagcagcatcgcagtttgattcgtcagttaagcgatgtcggagccctgctgggcagcgagtaccgcccggtgatttcagaccatgatgatgaactcatcagcaaagagcagacctacgggcgctaccagaaacccgccgactacctgcaaagctttaatgagtttatctccacgcaaatcaaccagtccgcagcgctgtcggtggtgattaaccgtccacgcgacctgacacgtgagcagttaaaagagatccgtcttttgctggatgaagcgggctacagcgaggctagcctgcgctcggcggtgcgaacccagagcagccaggatatcgccgccaccatcattgggcatatccgccaggccgccctcggtgaaccgcttattccgttcgaggaacgcgtgaagctagcgctggacaaaatctatgcccagcatagctggagtaaattacagaaacgctggctggaacggctggcaaaacagctggtccatgaagtggtgctggataaaaacttcgtaaatcacctgttctccgccgacggcggaacaaagaagctcaacagcctgctggacaaccaactggacaccattctcgatcagatgagcgatgcattgtgggcaccaaaatccgcctga

SEQ ID NO: 190734 - DNA, 1740 bp, Klebsiella oxytoca
atgagccggagtgaaacgcagataacgtggatggccgaaaatgtgctgtcatgggagacggtcagcggacacatcactcagcgggatctgaaccgatattatttacttgacgtttatcttcaggctcatttttcagattatgtgttgctccccggatggtttagtgaacattcgcatcttgcccgccctgaaaaacgcgattttattgcctctctgaaacgatttcttctgtcttaccgtcccgccggaaggttaaccattttccgttatctcaatatgttttttatatggcagtcagtcaatcagtatgactatggcacggctgaaggcgttgaaatgtatattaaacatctcatgaacgatattcgtcggcgaaaaatttcagtcaggatggcaagacactacttgtccgtggtcaaccggtttttgcttacgggcgggcagattcagaggcggtatgaatatgaattcttaccgaaaggaacgtatcagcagcagggaagggatagctataccaggaatgaactttccgagatcctgaggcagttgtcatccatgaatgagttccttgcgggatgtatccgggagcatatcgctaaatcggaaaaaggggtgcggcatttctcaccgtctttgctggcacctgtttatgaagcgtatttccggtatccgggagagaacggggtcagcagggcagagatcatcatcagggacgttctggaaaattactttcttacttctttttttctgttctgttaccacacatggggaaacacctctcaggttctgggtctgacgcgggatgatatacatctggatgaaaagggtatcagcactgattatgtttataaggggagagcgaataagtatatacgtctgacgataggtaaatcggagtatgtgaccaaacgtgcgggctattactggtttctgtcttttatcaggctcagggacgacatcgttaactatctggtttccgcagataacttccctccggtacaggcgctgtttctgagtgagccgcaggtgaaattccgtaagctttattctcttaatcccagtcatctgactaaattttctaactctgagggggcgtgggccacgatgcggcagcttaatccctcgcttccatcaattaccgtttctggcttgcgcaaaacgtctgagcagtatacggacagaacattaaagaatggtctgattacggcggaaaaagcacagcataactggggcacttacaggcggaattatgctgcaggtaacccacagggggcgaaggaaaacttcagtgctgcacttgatacgcttatgaatcaggggattgcgacacgtgcgttatccgagcgggtaaaagttgctgatgagctggggatcgatctgcgtggaagcgatgagggtgtggatcttttattgaatggcctgggatgtcgatcgcaggagccgcctacagatattgaattgcgctttataaaaaagcaaaaacgatttggccggacaccaaaggcttgtgcggatttttctcattgtgtcgaatgttcaaaaagttgcgttgtggaaacgctggagtctgtatggctcctgctgtcattcaggcatgctatcgagtatggaaaaccgttgtacatcggttcggtcaatgctgtggagcgttatgaaacgttactcctgaagattgatttacggcttgggctggtagatgaggcgatcctgaaaaaagtgatgccgggcgcgataaattaa

SEQ ID NO: 190735 - DNA, 792 bp, Klebsiella oxytoca
atgtcacttgatcttattatgggcgacacaattttcgaatctggaatcggcatcgatttgccggtgaatgacgggttgttgtcgtttggtctcggtggggatctgtttggcgtaaaccttgtggacggaggagtacaaccgacgatagttggaaatccgacgcgtattgatgcttactcaacacttcttggtccgaatggttatctcgatttaaatatcaaagaaaccgaagcatttacgtatttttccgtgaataagctttgggtgtcaggtagtggtggtaactctcagttcattggcacctttcaaagctttgccagcgatgggaccactgccgttgtaggttctggtattgttatggagtcggatgggaaacgtgatgttattgcggctatgatcaatggttcaactaatgcctcctattcaaacaacgcctttatcaccgatgccagtgaccttccaacaactgaggcagcagcagaatggcgatgcctggccgctatgtttgaccctactggcgtctataatccctctaaccttcgttataaatacatctgggataaaacgaaaaataaggttcagagcggcgggacaacaagcacaaccgacgttcgtgacctgcgtgggacagcaactatccgtgtgggtaacaccgggccgcgaatcacgcaaaaccgttcattcccatatatgggacacgctgtgtttaatcgggcattgacgtcaactgaaatgacattgatgtacaacaggtttagggatatcggagaaatccagggaatgtcactctag

SEQ ID NO: 190736 - DNA, 2406 bp, Klebsiella oxytoca
atgtcaaatctgaaagatgtccctgagtgggctgaaggtatttatcaactcactgtagagactccggttctcggtaagcaggaagatgttcctggcgatggcccatcgaatatacaggcacaacaactggctaacaggaccaggtggctccgcctgcagcttgagtcagccagtgattacagagagtatacgtttttcaaaactgcttctgatcctgacggtactcgtgcaggcctcgccggtactccagaaggaaaaatatttcgtgttgttcagggggccgatgacacacttgcctttatctattatctgaatgatggggggactgccgttaagcaatccggtttattaggtcagggctcaatcaccaataccattcgcttgtataaaactgaacaacaggctattgatgatttatctgctggaaatatattgccagaagcaaaatgctggatagacagtgaagatgattttctttcacatgagtacattaatgtcggcggtactctggaaccgactggaagagttcaaccatcaaaagaatacgtggatgacgtttctggaccggtcagatttctggacagtaaaagtaatgcaacctttttccatagatggaaagataaggtcgggacggttattgccgggtggaaaagctcgtccaatggctcagtgttttttgacagccggatgttgaaatttggaccgaatggtttttttggccaggggatggagatttccgcagatcaagttggcaataaccaaatcaaagccgtgaaaggtgctgatggtatcacccgtgtgattgataagcgtggtgttacattcgctaaaatcaagaacggtgtggtgacattatcaaagctgaaactcgacctgctctctaatatgagcatcagttcaggtaataccatatggaacattaaaaagtctggctcagatattaccgtgtctgataaacgcggcatcataggattcagacttgatgccagaggttatctgcatggaaacttcattaatgcgaataaagacgacaggcagttaaccgaggaagatattttgtttaggctggaggcgcttgctgctgcaaaacaggccaacagatataaccgtatttataacgctgaaccgagaaccagaaagaaatataagataatacttctgtatggtcagtcttttatccctgcagcccagagcaactgtgtcctgactccccgtagccgttacaactcggtcatgctcggccagtcaccacgggggatgtttttcagcaatccaccagagggaagtgaagtgtatggcccagtgggtggagaaaataagttttatccccttggtgaggtatgccaggacacttcaggaaatatagtggtgcaatccgggtatggtgaaaccatgtgcacgtctattgcagacgaatttaagcgtatgcacaaccagtcaattggtgttgaagacgatccggacactgtaatttgtattggagcctgcggtgttgctggtcgttctatagcccaactgagcaaaggtgcctctcctgaattatataacagagtagaaacgttcctttctggcgttgctgaagctgttacagctgagggggctgaatgggaggttgtggcaataatttatggtcagggtgaaaatgataacagtcagtccatgacgttctatcagcagaagtccatcgagatgcgtacgaatttgatcgcttcatgtaaggctgcttctggtcagaaacacgacccaggatatttcatcaaccaaattggcaatacatacataaatgggatgggcgtaccactggcccagagtaaactgcctgagctggtcagcagaaccgtccttgtggcgtcttatcagggactcccaaatcctggtgcgcatctgtgcgctaactcataccgtgctctgggatgtctgtatgccagagagatatggagatattacgatagcaacggtgacttcacattcagggctgtcaaagcctgccaccggggcaacgtggcatatgtttcattcaccccgcgtgttgcaccgcttagtttcaaatcgtcatacaacaaatgggacgaaacgatgtatgacgacaaaggttttaccattacagatggctcagggagtctttctggttcagacctgacggttgaaatagtctcagacagagtggtcaggttaacggctatcagagactttaccggtcccgtaactattcttcttggcgataaagcgcatgctggtatccataatctgtgtgactcgtcagttgaagaggctgggattaactgggaatacactggcactgtccagggccagtacgtacaggaaaacattgcagctctcgtgaacaaaccttactcactgactaattatgctgctatagagcagatatcttcggaggctatctaa

SEQ ID NO: 190737 - DNA, 813 bp, Klebsiella oxytoca
atgagggaaaactattattatggtcagggtaaggtgttcctggctccgagagataataaacgtgcattccgttgggtcggtgatgtttcatcattgaaaatagcgttttcgtatgagcaacaaataacaaaagcatcacgcggcgggcagctctatcagaatcagaggatcattaccggggccagtggttcaatcagttctacctggcataatttctcagttgagaatctggcactgttattgggtgctcaacaggtggatgagccgttttcatttaatgagcagttcgccttacctgatgggatagttaaaggagatattatcgcgctgccccatactacggtttttaacgtcagtattaacggactggagcgagatgtagattatgtcgttgaccgccagttcggcacgattgagtttattgtagctcccgagtcttcgggccttatagcggtatatgaacacctgtttaaccagtggctaccgtttttctctgcgaaaacagaggacttttatttacgttttcagggggtgaatcttgcagaaggttcgtcacctgtgctgctggaactgtaccgggtctcagttgaccctctggccgcgctggaaatgattagcagcgggaatgacctttcaggcattgatatgacctcgataattcttcccgactttaatcaacatagcgagacagcattcagctttttcggacgggtgcagttcgttaatccgtcatcatcacaatctccgcaaacagctctgatgtatgacggacgggctaactatgacggccaatatcaataccgaggtaagtaa

SEQ ID NO: 190738 - DNA, 1200 bp, Klebsiella oxytoca
gtgacgatttcgtttgagatgctgacagctctgtaccgtcgcatggtattccaggaggagttccgtgtcggtacgctattgctctcagatcagtcagattgtgaccagattaataccttgcttgatgatccacgtgagtatgggctttctattgatacagggactgtcgctccaggcaacacgatcaacctacgtgttacgccaccacggagtggactgggacttgtgtttgccacatacgaaaaattactaaatgctccaaagcatcagtgcctggaaccagctaattacttcatcctcgaaacaaaatttcgtaatgatgatgaagatatccccgttttcatcagcaattaccggaagattctggagttcgttaacctgctaaaagaggccgctgcctactttgacagctcaacttgtcagctggtttttctgaaaaaagaagttatcaagctattgccacacttcgctgctgaaaacgtacaaaatttgcatcgtgagcatcttgctaatcttttagcttgtttcaacgatgatacccatagggatcagaagctagatattctgattgaaagtatccaggccgttagtgatggagttgattcaccacgagtattcgcatttttactggacaatattcagcgtctgcatgacaagttcctgaaagggtatcgtatatactcttctggattctcttatgacaaagtcatggatcagctgcgtgccgcaaaagtcgaagaaatgggtaaaatccacaaggcgttttcggatatccagaaccatatacttggcattcctgttgcctcagttattgtggctactcaattcaaagtagctacgagatggtcgggccaggggataacaaacacaataatccttctgggatgcatttttgctgcgacgttaatctggctggcactttcaaaccagatgcaatctataaaggccttgggcgaagaaattgaatacaaagaaaagcagattaataaagaatattctttcatcaaagatgatgtagctggtgtatttcgcagtatttctgcacgactagcgacgcagaaacgtacgttctggattatcaggggggtcttgatcataggtatcatcacagctgttgttgtgtattgttggtacacaaagcctgttctttactggatagagtttctggtggcgaagtttttccctctagcttgtagctga

SEQ ID NO: 190739 - DNA, 1008 bp, Klebsiella oxytoca
atgtcagagcaggccattgaagtcaaacatgtcgtagttcacattcttgataaggaacaaaatggggatgcttctgagcgacttagccctgaagaaggtatgatcactgaggcttctcagcgcctgatccacgatatctgtgcaaaatacgcaggacgcacaggtaaaggttatggctattttgaaggcgatacggataactatccgatggaacgaatggctggggattttctggaaggtgttgatgatttctaccaaagttcctgccggatgatgcatcacctgacggaacgctcacagcgagaaaatatggctactggtggttatgttctttttgcaaacatcgtgataggacacaatgaacacctgctgatagctattgtgagtgccaccatcgggtcaactgtcactgatgattttaacatccaggacagtacctatcttgatatcgctaagctgcgcatggctgggcgcattgacttaaccgcatggaaaagtgatgcagaacgctatatcagttttcttaagggacaagggaatgtttcaaactactttaaacagttcctcggctgtaatgatgttttaatcgccaaacgagagtctgaaaagttacgtgacgttttaaaagcatttgcagcagagaaagagcttgacggcgctgaaaaagacgcgtttcttaagagcgcgtttgaacacttacatgcgttaagtaaggctaatgagccacttagtctggaaacctttgttaatgccgtttggccccaggctccagaggagttatcaggtaaacttgctgccgaagagctggagttatcggatggctttgttcctgatggccgcgtcatccgcgctttggtatcttttaaaggcaagtccaaatactgggaacttaagtttgaccgggaagggaaaactgaaggctatattgattatgatccggcaacaaatattatcaccctacgtaatgtaccggatgagttcagggaaatgtggatgactgaggtttaa

SEQ ID NO: 190740 - DNA, 129 bp, Klebsiella oxytoca
atgaataaaaaacttatagctgaagcctcccgctttcagtcatcgcaagagcgaaaagggttctggtggttaattctggggactgtagttgctgctttaattgttttattcatttttaatttactttga

SEQ ID NO: 190741 - DNA, 210 bp, Klebsiella oxytoca
atgattattggcgcacttattttaaccattatcggccttttactcgctatcatggctgggtctttatcggcaaataatctaagccctgtaccagccatgctgggagtcatcggttcaattattgttattgcagcacttgccctggctcatggtccgggcaaggtcaatgccccggattcgccccttgttactcaggaggcaggtaaatga

SEQ ID NO: 190742 - DNA, 312 bp, Klebsiella oxytoca
atgagtacatatgaattaatcaagtttgcgattcagaacaaaaaacagatcactgcagtatataaaggttactatcgcgaaatgtgtcctcatgctattgggacaaaaaacgggcgcgagcaagctctcttctaccaatttggcggaaatacaagttctggtcctgtgaatccaaattcacctaataattggcgttgcttacgtttagcagatctcgaagatgtgcaatcgagggacggtgagtggcatacagcccataaccatagccaagcccaaacatgtattgatcatattgattgtgaagttaaataa

SEQ ID NO: 190743 - DNA, 129 bp, Klebsiella oxytoca
atgctgaaagagtatgggctgcagtacgagaagcggagaaccaatcagggaatgcagactaacctggctctcagggaggaaagcaattctgactggctccccaaatgcggggatattggagaaaaatag

SEQ ID NO: 190744 - DNA, 675 bp, Klebsiella oxytoca
gtgaatgccaccaaatctgcatggcttgaagcacgtcgtcagcagaaagcggcagcggataatattgcgacaatccgccagcgccgcgctgaaatggaagccacgacgaacgtccttaatgaggagtggcgcacgctatttcgtgaaagtcagggcgtagtctcaaaggaaatgaaaaaactgtgcacggaaattgccctgggacgagaaacgcttgaggattttgatgaactgctggcagcccaggaaagcgaaaatgcatttttaccgcagaaggctgcgcaactggccggacagtatatccacgctcacgaaaaccttctgagtattcgcgcaaaacaaatctgggacgattttatgcaggcgcatggtaaggcgctaatccagacgctgagcctgctcaaatccacaatggggcgggaagccagtgctgttaccggggtggtgcattccgtaaacgatccggacacacttctgcaaggctttatccgcaaacatatcaccgaaccggcactctctaacgacgcgatgccggaacaggatccggtgtttaaactggcgggcgttgccccggattatgcggcccgtctggatttcagtaaacagccctctccggcagctattcataaaatgaaggttcgtcaggaacgtactgagaaggagaaatcagtatga

SEQ ID NO: 190745 - DNA, 552 bp, Klebsiella oxytoca
atgacggcccgggccactcctgcgcaggcgcttactagttttcgaaatgcccgtattatgtgggctggacatagtgagagccgaaaagccgctgaacaacagatagaatccctcctcactgccacggaaaaaccagcagattatgcccggcaacttgaattacagcgggaacgtctggatgtgctgagatggcaaattaactgtgctgcgcgtgagtgtatttactcgcagcatttactgatggaggcctgtacagaagacgctctcagcaattttatgcaggcgaatggagctgccctgacatcagcgctggctccgtttcttaaggggcgcggagggctggaagttgcgtcccgtatgttacgcagtgccctggctcaccagttggcaataaccccgcctgaaattgccggggattatcgtgagattttggatgaatctggtgtgatgccagatcccctgatgagtcgtgattgtcagcgttcttataccccggcacaacatctgcgctttcagcaacgcctgaatgacattaacgatatacaggagtga

SEQ ID NO: 190746 - DNA, 291 bp, Klebsiella oxytoca
atggcgattaaatgtcctttttgccagtccatttcacatggtcgttccagcctgtacgaatcgaacacggttaagaaaacgtactatcagtgccagaatctggaatgctcctgcacttttacggcgcttgaggcagtgcataccatcatcactcgtccgcagaaagaaggagaatcgctcgactcgccggatcagcattatcagcaggagccagcagacaaactcccccggacactgaaccgctatggttcgtcatctaaactttccagccgtcagcaagttccggcctga

SEQ ID NO: 190747 - DNA, 942 bp, Klebsiella oxytoca
atggacgcactgcatgtcgcgcttgaaaatctgattagagatgatggtcaaacactaaacagctattttagtgaagttaaagttaactcattggttgaaaatactaatgcaacttgtcatttccattgccttaatcttgatggaaatggacgtcctcgggtagacgctttaatccaattcttgaacgataaagtagttgattatgctattccaaggaaaaaaataaatgaggcggtgcaatattttaacgaaacacaatcaacagccaaaataacgaaattagcaaaccaagcaaaaaaattatttactagacttgcaaatagtggagaaggcggggaattcatcctttttttatttgcagagcaattccttagatttccgcaaattatttgcaaaatgagtctgaaaacgagttctcaaatgcattaccatggtgcagatggaattcatataggcgtagataaagataataaaaaattatgtttatactggggcgagtctaaactctattcaaatctgagcaaaggcatttctgagtgtatggatagtatagctcctttacttcaaagttctatgggaatagaaggtgctgagacacgtgatatgcagttgcttgaatcgcacttaaatgttgatgatcttgaattagaagaagcgttaaaaagattcttagatcctgataatccagattttaataaattggaatatagagggatatgcttagttgggtttgatcttaaagattacccacaagggcccagttcaattgatatcagtgaactagttgctttgattaatactaaagtcgggaaatggtcagctagtgtgcaaggtggcatagttaataaaaaacttgatcgctttgctatgcacgtttttattcttccatttccttcagtaaaagcatttagggctagtttaattaaagcattggagagctga

SEQ ID NO: 190748 - DNA, 2583 bp, Klebsiella oxytoca
atgtcgttgcgagatttatctgggtggttgattaataatcaagggttcttgaggaaatatcaggcattagtcgctaactcgataaaagatcaattttcagagttaaaatcagatgtaatcccacagattagttctgaggatgtcggctatcttttaacatgtgctagttctttggctttctcaagtgatgagaaatgccaagatgcagccttaagaattgcacagtattgcttattgaatgaaaaaagtgaagcaagaaaagatagtgctgcattgattcttgattcattatctaataatccagcaatacaacttgctgaaaatagggggtatcttaaccctgatttcgaagagagattacccttaaaagctcagttagaactaactaaaagaaaaattctatatacaattgaaattgatgctgataaacatatttatgctaataggtttcaatcagagttttgggatgcggtccaagaaaattcatgggttagtgtctctgctcctacttctgtaggaaaatcattcatcctcgaatcttgggtagagcagtttgtaaaaagtaatcagaattgcttagttatttatatcgtaccaacaagggcattgatttccgaagtttattctgaattgcaaaaacgtttggatcctaatctaacgaatacagttaatattcagacactaccattgagtaatgtatatcagagcgaaaagtcaaatgtctttatatttacacaggaaaggttaaatttattctataatcatttttcacagattccaaagatagatgtattagttgtagatgaagcacacaagataggtgatggtggaagaggagttattcttcagcatgtaattgaactgacttgtctaagtaaccctgattcaaaagttatctttgcaagtcctttcacattaaatcctgaaatattgctcagtgatgctccgacattaaaaaataaaagaactataaaaagtgactatgtaaccgttaatcaaaatttgatatgggtggagcaaaaaccacgtaagaccaaagattggttaatgtattattttgcgaacggtgaaaaacgcgagttaggaaatttttctttagaaaatacaccatctcctgaaagtaaaagattgccttttgtagctctttgtttaggtaaggggacttctggtaacgtaatttacgtaaatggagccgctgaagcagaatccacttctaagctaatatctgcaagtatagaaaatgagactgaggatgaagaaattttagctctcgttgagcttagtgagacaattatacataaaaatttcgcattaaatcgcactctaaaaaagaaagtagctttccattatggcaacatgcccttaataataaagggcgagattgaacgattgtttagtaaaggtaagattgattttttaatttgcacctcaactttagttgaaggcgtcaacatggcctgtaaaaatatttttataagaggccctaaaaaaggtaatttaacaccgatgcgagaggaggatttttggaatcttgctggcagggctggtcgttggggaaaagaatttcaaggtaatgtcatctgcatcgatagcgacaatgaaaaaatttggaatggagaacctccaaaaaccaaaaaaaatatatttataactcgcgctacggatgcgatttcccatgacatggatgagttggtttcctatattttttcagagcaccattttggtatgtcagagcgaaatcctaatctccagagtctatttggttatttatgttcatcattttatttttatgatggcttggataataatccttatatggaaaagtataacatcaaaaacatcgatgttttaaatgaggcaatatttgatgtttttgattctttaacttttccacatgaattagttgtgcggcatcctggtataagcccgcttttaatgcaaaacctttgggatagattttcacgggatacaaacaaacctgtagagagattactgctttctgaaccaggtagtaatgatgcgttagattcatatgtatccgcattctctagaatcagtgatactctgagtaagaagttaggttataattcaaaaggagcttatgtacaggccttattagtttctaagtggatgaaaggttatcccctagcaagattgatctcggatagaataagatataacaaaaagagaaatattgcttttaaagaagcaactttaatacgaggggttatgaaggatgtcgaagagatcgctcgctatcaagcgcctagacttttaggatgttataacgatttattaaaaagcttttatcttgcgataggtcgcatggacttagcaaaagatgttgaagatatcggtgtgtatttagaacttggtgtaagtttaaaaactcagatttcattaatagggcttgggttttcaagaactgctgctgtaatgatttcagagcttattcctaatgatagcttagatgaagaagaatgcattaattggattaaggacaataaaattgatatggaagaactgccgcaattagtacaaaacgagatacataatatatttcgtgcattttgggttgaatag

SEQ ID NO: 190749 - DNA, 459 bp, Klebsiella oxytoca
atggagaataatctagattatttatgttatgaattctttagagagttttcacgttatgaatattgccttaaagcatgtgggcttcatcataaaataaaagatgccaaagcggactgggatgaatatgcaaagcaagtttctgaaaccataaataacacaactgacccagagctaattgctgcaatcgcttactttaaagaacacccaccaaaaaaacaaatcataaaagatggctctttaatttgggatgattctttgccgcaagaaaaagatatggcaaaatttatctttttgctaattcgccgtgtaaggaacaatctttttcacggaggtaagtttaacgggaaatggtttgaacctgaacgtagtgaggcgttactgcaacatgggcttgttatattgaggtgttgcggcgaagagcatattgaagtaagcaaagcctattccggaatagtctag

SEQ ID NO: 190750 - DNA, 501 bp, Klebsiella oxytoca
atgaaagaaaataaacatgttgagaaatttaagtcaagccatttgaattcaggtgagtcagtcattgcgtgggcggaaggatatatcggtaaaatgatggggagtggaaaagatgcccagcataatggcgcgttaattgtgacagaaactagagttgctttttatcgtaagggatttattggtgaggtaattgaaactatacctttaaaatctatcacctctattgagagaaagtcgacgcttggtcatagggttataagggtgcatacatcccatgatgaccttgaatttaaaacattcagcaaagagtcagaactggccctcgttgaagcaattgagagcgggcgagggttgagaactgaaacagtagcacccgaaaaaaataaggcgagtaacgacccttttgaacaactcaaaaaattatcagagcttaaagatgctggggtgatttctgatgaggagtttcaggctaaaaaaagtaagttgatggatctgatttaa

SEQ ID NO: 190751 - DNA, 336 bp, Klebsiella oxytoca
atgcgatcattatttgctattggattacttgttctctgttcaactgcgttcgccgccgagaaaacgcaggcgttagatggagcatcatttggaaatacatggcctctgacttttgaaaaggctatggtttcctgtgttaatggtgcatatgcttttgttcatgataccgctacagataaccgctatccgcttaacggtatggcttccagcgctgttaagtccggaaaaatggaaggttacgatttagatacagtatggaaagatgatcctaattattccggtgtgaaaatgtcaatgtcgccggttttagattcagccctgaatctctgtaaataa

SEQ ID NO: 190752 - DNA, 858 bp, Klebsiella oxytoca
atggataaagaagagcagtccgtcagagatgtcattgatagaatccttgtttcttatggagttagaacaagacaggcttactctgacctcgcaaaaattccattgccaaccattagtaattgggtcaagcggggtaaggttcctggagactacatagtccaatgtgctctcgatactggtgcagaccttaaatggcttatggaaggtggtgaacttacaaatgtaagatttgagcccggcaattaccctatgcagggaatacgactgatgaaggcaatgcaaagctcaggcgggaaagagattttgcagcgcatcatgcaggcttacggcttcaccatgcaaaaggagctgggcgaccatctcgatataccatccggcacgatgagtgcttgggttcgccgtgagcacttcccgggggatgttgttatcgtttgtgctttagatacgggggcatctttatactggcttgccacaggtaactgtggactttatgaaagtaatgtgaccttacccacagagcaaacggcattagccacaataagaaaataccgccttgaaaacggtgaattaaaaaaaataggtaactggttggctgacccgtcaatgattcctgataatcatgatggtctgatgtttgttgaaggtatgggtaaatcttggctggttgatacttctgcgaagaatattgctaacggccgctggatcatcagtattgatggtgcaatggatgtgttcaatgtgattcggctacctgggaataaagttcggttgtccaatgattctgctgagtttgaatgcaatttatctgatattacaccatcaggtacggttatttttacaattgagaaacatatataa

SEQ ID NO: 190753 - DNA, 228 bp, Klebsiella oxytoca
atgaatcttcaaattgcaatccccaatggcccggacttcctctcatatgacgagtttgcaaagcagtacggatgcagcctgaacaccgttaaagagatggtaaagcgcggcgaactgctactggtgccccgtacccgcgagggtggcctcggccgtatcaacatgattgccttccgtacgcgattactcgctcaggcgattaattcgcgctatgccgtattccagtaa

SEQ ID NO: 190754 - DNA, 390 bp, Klebsiella oxytoca
atggctaataaccagttaaccgacaaacgcgcgcgtctgcgcaaagccgctcaagactatcaatcgtcgctgtcgtggtatcaagagaacctagatagcccaaacgcagagcaggattgcgatgagtcgaccgcggcatttaagcgcgaaatcgggcatcgagaaacagacattattgccgatctgttggatgaaatagacgagctcagggaatgccgaaaagctcgcattgctcctgatggctggatagcagtacctgtggagcccactggcgatatgctggcgcgtatcaagctttctaagatttggacaaccgaagcgctaaccgccagatataaagatatgctcagcgccgctcctcgcgctccatatgaggagataaccaaatga

SEQ ID NO: 190755 - DNA, 273 bp, Klebsiella oxytoca
atgagcattcatatcaccattggcgacaagtgggttattaccagcgaccagtatcaattcatcctgaatgaaaagaaagtcgttaagtcgggtaaaaaagccggcgaggaatggctcgacactatcggatattacccgaaatttaatcagcttatttccgggttgattcatcaccatattcagcattcatcaattaccacgcttgacgcgatggccgctgaaatcgagcgtatcggggaaatgtgcgcctcttcaatcaaggcggcgtcatga

SEQ ID NO: 190756 - DNA, 282 bp, Klebsiella oxytoca
atgagaaaaacgcatcaactaaaaatccggcctgagtttttccaggctgtcatcaatggaacgaaaaaagccgagtttcgtcttgctgaccgtgcttttgctgtaggggatttactttgcttaaacgagtacggtcactgcgagtatgacccgcaaaaggtcgggtttacaggcgcatttgtctatgtgctggtaactcatgtaactgaccttggcgagtgggctcctggctatgtgatgctaagcatacagcgtagacaaatgggggaactatgcgggtaa

SEQ ID NO: 190757 - DNA, 231 bp, Klebsiella oxytoca
atgagaataaacatcacgttggacaaagagcaaaaattaggccagcaggtggtcgatgctttacagaatgaactaacaagcaaggtgagatgtgctttcccatccacgcgggttacggtgaaaaaagggtctgtaacgggggttgaggttatcgggttcgacaacgaatctgaccgagaggcattagatggcatcattcaggaagtatgggaagatgagagctggcgttaa

SEQ ID NO: 190758 - DNA, 732 bp, Klebsiella oxytoca
atggatactttaatagcatttttatctctggctctctttattgcttttatcgtggggttaatcaagccgtcgctggttcgaatgcctaaccgtaagcgctcaagtgcggtttatcttggtggctgtctggcgctgggcgttattggctcaatcttatggccgactgaaaaaagtcagcctgtggcaaaaactgaagcaccggcggttaaagctgaaccggcaacgccaacgtttgagtacgcagacaaaacgctcaaagaatatcgcaacgaaccaaaacaaacccggcacgatatagttaaaggctatgtgggcttcaaaggtgtaccggccagctctgctgatgcattttatgcctgtatgagtgagtacacttttactaaagatgatgcgttaaagctcggtgatgtgttggggtggtgtttcaacgatttcgagaaggatccacaatcactgaataataaaatcaaccttgacgcatttcagggtaattttagcggttgggatggctcttatcgcccgttagagaagctgataaaagccagcatgaatgatgattcctcttataagcatgtttcaacggtctaccatttgattttgaataaagacccgcatgccgttgtaaaaacaacgtttcgcggcactaatgcttatggtggcgtggttaagcaggccgtagcggcacgcgtcaacgtgcgaacaggtgaagtcgattcgatactcgacaattaa

SEQ ID NO: 190759 - DNA, 618 bp, Klebsiella oxytoca
atgaatgtaaaactcttcggcattatcattttatgtattttgatgtttactttaggtttcttcattggtgggtttaaatgggagtgggctgaaagtaaacatacgagtgaagtcgcgctatgggcaatgcttggtggttggctatctgcatttgcgacgttggtcgctgtgatggtttcattgtacatggcatatcaagcggttcagagcgagatcgaaaaaatcagagttattcatggaataagtggtgtggtttcccatggcaaaggtgtaaattgctcgctcacaattcaaaatatgagaaatctgagagttaatattacagggatttatttctctctgggtaaatcttctggccgttactcattggaaaaaacagttcaactgaataatgtatctttatcacataagggcgagagagcggcattttgtttcgttattgactcgggtgtgacgtggtgggggatttattcattatttgataaagacgaaaaaataaattttaagaagggaaagattttcataacgaccgatctcaatacttatgaatttaagctgccaaaccattacctcactgcctttgaggatgcttattcgtattttcaaacgattaaatag

SEQ ID NO: 190760 - DNA, 2319 bp, Klebsiella oxytoca
atggtcaacatcaacgaaacgcccgcatgggaagaaactatcaagctgattgagcgtctggagcgtgtcgccggggggcgtgatggtgcggtcaatattcaggcgagacagctggcgaaccggacgctgtttctgtaccgggaactgatgtccctgcaactggtggcctatgatgccgcagcggtctttgctgataccgcagcggggttgctggctacgtcgccgggggaatactttaagacgccgggcgatggtcagtcgctgcttatctggcagaacaataacggccaggcgctcaaagtggcagagctggcagggccggaatccattaaggcgattcaggcgtcggttgccagaattgccgcgattaacgcatcgtctatcgacaaactgccgggcgtttccgggctggcgatggacggcaccggtaaggtcgttttccagcaactggatgacggggccagccagtttccggcgctgatgattggtgatgatattgaggccgttcagtctcagagcggcatgatccttcgcagccgggccagcgggcaggagtttatccatatcaaacgcaactccctgataacgccaggtcaggaactcttcctcggtgaacatggtgttgcggaggcgcaggccgaccgacaggggcgtactttcagcgagaccgcagcggacggcacccggttgtttgccgctatctcgattggcggtattgatatcgtgcagaccgggaagggcctgagtcttatccgtcgccaggacgggcaggaaatcagccagatccggcacgatggctcaaccgtccagaacggtgtttatacgttctataccgataagtacccgggttacagcgagattgaactcgaccggcaggggcgcgtgttccgtcagcgccggactgacggcacgttagaggaggccagccagcagagtaaaacggatacggttacgccgccttttgcctacgccgacgggggcagtatctatgccatcaacggcgggagcgtcacccgactgaccgacgacccggaaggggtggaaaataccgagccggcctcatttccgacctttatccgctggttatctgcgcgcgacggtgtgcgccgggtgcatcgaggctcgtttgacggcaagcgccgggtgcgggagtccagcggcagtctggtgcatatcatcggtaccggccagtcactggcaccgggcggctcgacaaaggcgcaggcacccgtcaccacggcagcacaggcagattacggcatcctcgcattcgccagcgggccgaaggtcgattaccgctatgacaccctcgacagcgagctgctgacgtcagttattccctgccgggaaaataccggcattcgcccggggcaggaatcaccggccagcggtatggcctggcaggttcaccagatgaccgggaataccgtgctggtttccactgcggcaagttccggcaccgccattgatgacatttccgcaggtaccccgacgttcaccggcgcaacggcgatgattgaggccggggcggcactggcggcagaaatggggatggagtatgtcccggtactggttctcgtgcatggcaaccagaatgccgcgctgggtacagcggcggacacttaccggcaggcaatggagcgcctgcgtaaacagtatgagtctgtggtcaacagcgtgaccggccgcgaggacagtctgatgatgtttgccgggcaactcgcgaacgtcattccctatggcggcaacgcgggcgatacaaaaaccaatgcgatcggcattgcgcagtatcgcgagtcccgcgataacccgtttattaccctggcgagcacgcagtatgcgcgggcctactcggacggcgaacacctcaccagtaacagctaccggacagagggggaagttatcggggcggcgattggcacctggctgaatgacggggaatggtcaccccttacccctgatgagagcgggattgtgcagacgaacagcacgataaccatccccgttaaaggctgcacaggtgggcttgtcgccgataccgtgcgtgtggctgaccccggtcactatggtttcaccctggcaggtgctgagattgccgccgttgcggtggaaggcagtgacgccagcgcgaaaatcatcatcaccaaaaccagcaatgcgatggcgacggctgtttcttacgccaccaccggcacggcgggcaaaaatccgggagcgcagaccggctcgcgtggctgcatcagggattcccgccccggcgtttccctgtcgggcgaccccctgtttaacgacctcgtcgtttttactcatacattctga

SEQ ID NO: 190761 - DNA, 771 bp, Klebsiella oxytoca
atgactgcgtatacgcgtgtaacacttaacccctacatgacagccacgcgctatctgcgcaagctgccttatccgaacgatattaccgaaatcccgtcgctcgtctccgggctgattatccaggcggattatgacgttaatgacccgggttcactgacacgtaaccgcgtcagcgagaccgcgatgacggttgtcggtgcgccggagctggtgacgtatggtgtggtatgcgacgaacagaactacatcgacaccaatattgatatcagcgcctacaacgccgacgacatgagcatgattgttattgctgaccgcctgaccgcaggccaggcggggctggtcggtcatctggtgctgaccggcacgcaacgttacaggggggtgctggcggcagcggataagtggacggcaaaatggttaacgtccggcatcgtcaatcaggaagccgctattgctgtgtccaccccggagggttacagcgagtttgtggccgcccggtttattcgtgatgccggtgacggcagcatgatgaccaaagtccgcacccagcgtaacctggcggaatttacccgaacagcagctatcaccccggcgaatatgccctccgccacaatgaaaatcggcgcaaccgccagcggttccggcacctcggcggcgactgtccgggcggtactggttttcaaccgcgcgttaagtgatgaggaaatggcgctgatttatcagatttacgccaattactacgaataccacgaagccggattcagtctgtga

SEQ ID NO: 190762 - DNA, 210 bp, Klebsiella oxytoca
atgagtaagtacaacgtggattacgccgcctggcgaaaccggcaggtgatttatgagggagtgctgaccattgagcttcccgatgatatgaccgccacggatgacgttatcgccgaacaggtacatgccaccctggccgaaagggcggcgcagtacggcggcagctccccggatatggtcaacgtcaattcctttgaaaaaactgagtaa

SEQ ID NO: 190763 - DNA, 1071 bp, Klebsiella oxytoca
atggcaaaatacagcgcagtagtgaccgccgccggacgggaaaaaatggccgctgccgccattaccggccagccggtgggttttgcctttatgggcgtgggagacgggggcggcgtggtgccatcgcctgacccggcacaggtcagcctggtgaatgagcgctatcgtgccgcactgaacagagtggttatcgctgaccagtcagccaacattattcgcgcggaaatgattatgccgccgcaggttggcgggttctggctgcgtgaagccggactgtttgatgaggatggcgtgtgtctggcggtggcaagtctggccccgtcctacaagccccttctggccgaaggttcggggcggttgcaggcgctgaatatctggatcgccgtcagcagcaccgccgacgtgcagctgctgaccgacccgacagtcattattgccacgatggaagaggtgagccgcgcaaaaagtgaggcgaaagattacgctgataaaatcgtgggagacctcgacacggatattcagcagattattaccgacgccattacagcggcaaagcgtgatttctgggaagacgataaccccgtggggacgacgcgattttttaatcagaacgtcaacccgaatgaaaagtggccctggtcgaaatggctgtacaccggcgaaaacaaaacgatccgcgtcggcaaagcggacggttcagatgtcggcgcgaccggcggcagcgataccgtcacgctccagcaggccaacctgcccgccgttaagattgatgtgagtggcgaaaccagtgaacaggcggagcagaagataagaacatctgaagacggcgaacacaatcatggtggcgtagccggtaaggatgacccgtgggaaataggcggggatgtgcggcagctctttaacccgaaagagctgggtgtcacggacatgggcgggaagcatgaccatgaggtaattgtgccctcgcataagcactcgacaagcggcaaaactgccaacctcggcgaaggtaaatcgttcagcgtggtggaagcgcacaccctgctgatgtgctggagccgcgtcgcctga

SEQ ID NO: 190764 - DNA, 1248 bp, Klebsiella oxytoca; identical to SEQ ID NO: 112676

SEQ ID NO: 190765 - DNA, 837 bp, Klebsiella oxytoca
atgaatactcgcattcacacaacgttggccgtgtgcttactcctgtgcgttaacgaagccattgccgataagacggggtggatgtatccaatgcgatatgtcccagggagcattgagttccatccggacggttcgtcctcgtttgaacttggtgcagttgaaagtaatatctggacaaccctgggggaggcttcgtcaaatgtcgctatacccggcggacggctggaattttatttgactgtaaaacgcaatggagtatggcggtacgaattgttgccgacttcacagggcatttcggctaatacctggggtgaggcgctcatgacgactcccccgagtatgcctagaggtcgctttacggtgagcggtgattttgattcctactcatgtacccggtttggcgttctgaataatgataaaagcatcagggtggtacccggcgcgtcagtcgttaatatccaggcttcgtcctgtactggggggaccgatccggtgaagccgccgccgccaggatattgctatatgtcggagccctcgatcacatttgcgtttggcacaatgaaaacggaggaggcgcctggagcctcaatgacgcgggatgtgggtgtgacctgtgtaggaaataatgtcaactacacgctgtcgacaacacccattaaaattgtcctgtccaacaatctcgaagcaaagattacggtcgacggggccgcacttggcaaaacgtttaaggggtctgatggtgcaaaccgacatagcatgaccgtcacgttgtctggaacgccagaccgcgcgggagcattcagcggaacggctgtgatgcgggtgacctacgcgtga

SEQ ID NO: 190766 - DNA, 1035 bp, Klebsiella oxytoca
gtgggagatatcgctgttttagccactggcgatgggacgaacaccccattacctgatagccaaattttgggtcgctggattaagtctttaatacagcatgcgtcactcagtccggcagagatcgatgtacgcgaaaacttgctgttatcgcgtaccgaggtgcagaggctgaaggatgaactcgctctgcgtcaccgggaggaacagcagttaagccgtaccctggcggatcgaagcatgacttttgagacagcgtccaaacagctcgcaggggaaattgaaaagaatttcaagcagcagcaagaggtgttgacgcttaccgagcgggccaaacggctggcagagaaaaatgcccagtggcaagtattaaccacaaaattgcagtcgagcctcaaagaagcgcagtaccccgcgctgccctcgtcagacgatgaactggaagattttgtcgccggcatggcgatgggttttgacattttgggcgtgctcgaacagcgcgatgagcaaggtgtgcacgttgataaggaactctttctggccggaattaaggaaacgatccgcggtgaacgccggctgtctcaggaggattttgagcgccatctgaaacgcgccaatcagcgagtagaggatgcgatacgcaagatcgcaaagcaaaaggaggcgcgtgatggcgaatggctggcgaaatttatcaaagaggaaggcgctcaggctgccggtaatcaggcctggtataaagtcatttatcgtggagaacagtcgctcgcggatgagaacgctgaaagggcgctaaccatttcggtcaatcgtcgtcttgcggatggtaccgtgattgcggactccgatataacggggctggtattacaagaaaagttgtccgaccttcccgaatggcttcaggtggtagctaaagatattcatcttcatggcgaagcagagttagccgttaaggttgatgagtatggcgaccctcgggagcagggtaattatattgagcattggcgcattcgtgtagttgagcagcacctattgtaa

SEQ ID NO: 190767 - DNA, 534 bp, Klebsiella oxytoca
atggtaaaaatatcgcattctctgatgttgagtggattattggtaatatcgccgctgtctttggcagccgaacaggggcgaggcttggtcacaatgaatggacaaattcaggagtcggcctgttctattcatactgacgatgcctggcaggaaattccctttggtgtcatctcttataacgatctcaatcaagaaggccaaacggtcattaaaccctttgcggtgcggctggtgaagtgttcactggagcggagtagcggcgacttatggcaaagcgtaaacgtgacatttagcggagaaactgagctgtctcgccccgatatttttaaagtgagaggcgaggcgcaggggcttggactgcgtatccacaatcagactggctatgtggctcgggatggagaccctatgcctgccgtcatgatccaaaatgaaaataatgaactacgttatttattatctttagtgcgcgatggaaaatcgttatcagaaggcgactggtacggaattattcgtttcatggtgacctatcagtaa

SEQ ID NO: 190768 - DNA, 2172 bp, Klebsiella oxytoca
atgacttcagtcacaactaagaaatcgacgatgccagaatcagatgaaattgatttaggtcgtgttatcggtgagttaatcgatcatcgtaaactaattatatctataacatctgtttttactttatttgcattactctatgcattattagcgactccaatctatcagtcagatgcattaattcaaatagagcaaaagcagggaaacgctatcctaagcagtctcagtcaggttttaccagacgggcaaccacaatctgcaccagagactgccttgctacaatcccgaatgattcttggcaaaacaatagatgatttgaatcttcaaattcaaattaaacaaaaatacattccagtggttggccgtggaatagctcgattaataggggaaaaaccaggcaatattgagattactcgtttatatttgccaggtagtgaagatattagtaacaatgccccaactattctattaactgttaaagataaaaaaaactatctaatcgaaagtgaaggtgtggaaataaatgggactgtaggaacgttgctaaatgaaaaaggaatctcgctattggtcaatgatattgatgcgcaaccaggcgttcaatttattattacgcaattaccccgtttaaaagcaatttccgatcttttagggactctgagtgttgccgatttgggcaaagatacagggatgttgacgttgacgcttaccggcgataatcctaagaggattgctcatattcttgatagtatcagtcagaattatcttgcacagaatatcgctagacaggcagcacaggatgctaaaagtcttgactttctaaatcaacaattaccaaaagttcgtgctgaactggatttagctgaagacaagttaaacgcttatcgcaagcagaaagactcagttgatttgaatatggaagctaaatcagtacttgaccagatagttaatgtagataaccaactaaatgaattaacattccgagaggccgaagtttcacagttatatacaaaggaacatccgacgtataaagcattaatggaaaaaaggcagacgcttcaagatgaaaaatctaagcttaataaacgagtaagtagtatgccatcaacgcagcaagaagtgctgcgattaagtcgcgatgttgaatctggtcgtgcagtatatttgcaattgctaaataggcaacaggagctaaatattgccaaatctagcgcgattggtaatgttagaattattgataatgctgtaacggatcctactccggtcagacctaagaaagctctcgttataataattggttttattttaggactacttatatcaattgcattggtattattgcaagttttcctacgtcgtggtatcgaatcaccagagcaacttgaagaaatcggaataaatgtatacgcaagtgtacctatatcagaatggctcgcaaaaaatttacgccagtctggcaaactacgtaaaaatcaatcagatacattgttggcggtggataaccccgcggatctggctgttgaggctattcgtggtctgcgaactagtttgcatttcgcgatgatggaggcaaaaaataacgtactaatgatatcaggagctagtccaagcgccggtaaaacttttattagcagtaatttggctgctaccattgctcttacgggtaaaaaagtattgtttattgatgctgaccttcgtaagggttatgcgcacaaaatgtttggtcacaaaaatgataaaggtttgtcagagtttttgtcaggtcaagtagccaccgagaaggtgattgataaagtagttggtggcgaatttgattacattggtcgcggacaaatacctccaaatccagcggaattgcttatgcatcctcgttttgaacaattattaaaatgggcttctcaggaatatgatttggtcattattgatacacctccgattttagcagtcactgatgcggctataattggacgctatgctggaacgtgtctattagtcgctcgctttgagaagaacactgtaaaagaaattgatgtaagtatgaggcgttttgaccaaagtggtgtagtagtcaaaggttgtattcttaacggggttgtgaaaaaagccagcagttattatggatatggttataaccattacggctattcttattctgataaaaaagcagactga

SEQ ID NO: 190769 - DNA, 450 bp, Klebsiella oxytoca
atgattgatgtgaatctggatttttccgggctgcaggatatcgcccgagatctgcaaaccctcagcaaagccgaaaacaataaagtccttcgtgattccactcgtgccggggctgaagttctccggcaggaggtgattgatcgtgctcccgagcaaaccggcaagctgaagaaaaacgttgttgtcgtcactcagaaaagccgccgtcgcggtgaaatcgcttcaggggtgcatattcgtggcgttaacccgcgaacggggaacagcgacaatacaatgaaggccagcaacaagcggaatgcgttttactggcgcttcgtggagttgggaacatctacagcgcctgcacatccgtttgttcgcccagcttttgatacccgcatggaagaagctacgcaggtggcgatgcagcggatgaatcaggctatcgatgaggtgttatctaaatga

SEQ ID NO: 190770 - DNA, 327 bp, Klebsiella oxytoca
atgttagaacttgaagtggttaaaaagcactgtcgcattgagcctgactttaccgatgacgactcactattgaccctctacatcggagctgcttctcgttatgtcgaaacatggactcgtcgcaaaatgtatgagtccgaaaccagcgaggggtatgcagatgatcctgattcaattctccctggcgatgatgtgaaagcagcgatgcttctgcttatcggtcactggtacgaaaaccgtgaaacggtctctgtcggtcaggctgctacagatattccgtttactgtcgagtcacttctccagccttacaaaatttatggtatttaa

SEQ ID NO: 190771 - DNA, 1218 bp, Klebsiella oxytoca
atgtctgatgtaaacgagattctgaaaaaagtcaccgcttccattgaagaagcaaccggcaaatttaacgccaaagcggaagaagcgctgactgaagcgaaaaagaacggcaaattgtcggcggaaaccaaagaaaccgtggacaaaatggcgactgagtttaatgcgctgaaagaagccgaaaagactctgaaggctgcgctgggcgaactggagcagcatgttgcacagatgccgctggcaaacgcaaaacaggttattgaaactgtcggccagcaggttatctctgctgaagccattaaagttctgtcgtccagcatcgaagggaacaagcgtatttctgttcctgtaaaagctgcgctgatttccagtgacgttcctgagggggttgttgaaccacaacgactgccgggtattgatgtagcgccaaagcagcggttatttattcgcgatcttatcgcgccaggccgtacgggttcaccggccattttctgggtgcagcagaccggctttaccaatgctgcggcagtggtaccggagaacacaaccaagccgtacagcaatattgagttcacgccgaaaatcactccagtgacaaccatcgcgcacatgttcaaggcatccaagcagattctggacgacttcgcccagttgcagtccatgattgatgcggaaatgcgttacggccttaagtacgtcgaagagcaggagattctgtttggtgatggcactggcgctcacctccatggcatcgtgccgcaggccacggcttacagcgcggcatttgccgttgaacagcagaacggtattgacgatctgcgcctggcaatgcttcaggctcaacttgcccgattccctgcatccggtcacgtcctgcacttcatggactgggcgaaaatcgaactgactaaagacaccctggggcgctatatcctggcgaacccggctgcgttgacggggccgacgctgtgggggcttccggttgtcgccactgaagcagcagctttccagggcaagttcctgacaggtgcatttaatgctgcggcacagcttttcgaccgcgaagacgcaaacgttgtgatctcgacggagaacagcgatgacttcgagaaaaacatgatctctattcgctgtgaagagcgtctggcgttagcagtaaaacgccctgaagcatttatttatggctcctttactgtgccggcttccggcggccagtaa

SEQ ID NO: 190772 - DNA, 1743 bp, Klebsiella oxytoca
atggtggagaaaaagaagaagacccgctcaaccagttcttcggttgatcccgccacgcaatatgcgcgggatgtagactccggcaaagaaatcgccgggcctgacatcaggaattcctgtaagcgacatctcaaagatttggaatcctgccatgctcgcgggttggtatgggatgttgcagcggcgcagcgcgccatcgacttttttgccaaggtactgaagctcaacggcggtgagcatgaaggtaaacccttcaacctgctaccgtggcagtgctttattgtagggtcgatattcggctggaagaactcggatggttatcgtagatttcgcatggtgtacgttgaatctggtaagggttccggcaaatcaccactggcaggcggagtggggctttactgtctaacagcagataaggagcctcgtgccgagatatatgcagctgcaacgaaaaaagaccaggccatgatcctttttcgtgatgctgtcgcgatggtggatcagtcccctgcgttagcgcagcgaataaataaatcaggcggtgccgggaaagagtggaaccttgcgtttcttcagaccggctcatttttccggcctatcagttcggatgatgggcagtcagggccacgcccacactgtgcactgattgacgaaattcacgagcacaaaaacaaccaggttgtggaaatgatgcgcgccgggacgaaaggtcgtcgccaggcgttgattttcatgatcactaacagcggccacgacaaaaccagcgtctgctacgactatcacgagtatgggcgtaaagttgccgaaggctcgattgaggatgacagtttcttttctttcatttgctccctggacgaaggagaagacccattcaaggacgagtcctgctggaaaaaagcaaacccctctcttggtcatacttttaccgatcgctacctgcgtgagcaggttactcaggctcgggggatgccgtcgaaggaaagcattgttcggcggttaaacttctgtcagtgggtggatgccgataacccatggatgagtagcgatgtgtggatggggtgcgaagaggactttgacctgcaggagctgcagggagaagaatgttatggcggcctggacctttcaggaactcgcgaccttacgtctctggcgctctttttccctaaaaaaagaaaactgctggtggagttctggacaccaaaagatactttgctggatagagcgaaaacagaccgcgtaccttacgacgcatgggaacggggaggccatattcataccactcccggaaaggcggtgaaatatggctttgttgctgagcgcattgctgatctttccatgttgttcgatatcaaggcgatcgccttcgaccagtaccgcataaaatatcttgagccggaattagagagcgcttctgtatcagtaccgctgatacctcacgggcagggatactacaaggcgcaggattccggactgtggatgcctcattccatcgaactttttgaacagatgctcgatgatggcgtaatcattattaaaacaaacccctgcctccgatggaacgctgcttccgcagtaaccgaagccgaccaaaaagaaaaccgcatattcgccaagaaaaagagtactggtcgaatagatggtgtggttgcgtcggcgatggcaattggtgctgcagaaggttatgagcctgatgatggcgatatagagggcttttttgacgatccgatcatagtgggtatctga

SEQ ID NO: 190773 - DNA, 252 bp, Klebsiella oxytoca
atgtccgttgataatcagaaacttttacagaaaatcgtcgaggagctggagtcactcaaaggtgagaccgagatcttatctatcgctgtatcctgcctcttcagcgagttgccaacagatagcgccagtaacgtgagggctaaattcacaaaatccgtgaatgaactaaaaacagcggcagcagctagtcggaggaggtcgcgtcgcgacgtatattcaaaagctctgtcaatgatgaccaagcctgagtaa

SEQ ID NO: 190774 - DNA, 273 bp, Klebsiella oxytoca
atgaaagaacgaaaactcgtaattgaaattgatgacaacgccattgattcagtcatcgaaaaggtgcgcctgctcaaggatgaactgagaagccttaacctgccgatcaacatctctgttgcagtgccggcagcattaaagccggaagaggaaaggaacacgcaggatgccagaagcgtattccttagcaaccttgatgccgaaattactcaggcttggtcatcattgacagagcttttgaatatacgtcgcgacgcgacctcctccgactag

SEQ ID NO: 190775 - DNA, 480 bp, Klebsiella oxytoca
atgcttacagctaaagatgatgcctacattttaaaaagtgatggcagcagatgcggtccgtataaggcaaagtttgcaggggatacagttatcgtaaacgacaaaatggccgacattgatgacggagatactgttattcgagtccttccaaacggtaaggaagaacataaggaaatttataaggctaatttttacgacactggcgttggcggatttggtccacacttccaactcaaagttggtcccaaaaaggttcaaccagctgtctcttcacagcaaatcaacattcacggaggaaatgtccagattggaaatcataaccgtcaggagattaccaatagcatcgaaactctgaataacttaataaatagctcacagggtacgccacagcagaaagaagaggcaaaggggctgctaagaaagttagcagaacacccattgcttactgctattgccggtggggctataggactgctctaa

SEQ ID NO: 190776 - DNA, 579 bp, Klebsiella oxytoca
atgattaacccgtccgaggttggaaaagctggtgaaatggtcaggctgaaaacgctggaggccatctggattcaggggaagctgcgcatgtggggccgctggtcctacatcggcggcggtagtggcggcaatatgtttaaccagttactagcctccgggaagataaccaaaacagccatcaatgatgctctgcgccggatgaagaaatcgggtatctcgaagccagagctggaggcattctttcgtgaaatactcgcggggaaaaataaaagcggcctggctttctgtactgatgaggaaggattgataattgattctgtgcttagtgctcagcttgtgcgctccgggaataaagccctctacaagctaatcaaggatcggtatgtctatcgcatgagcaagaaggcaatggcgaaagagctaaacgaaaagcatccagaatggtgcttgcggacttgtgagagtaggatcgatgtttggctaaatcttgcagaatcgatgctttacgcaccaatgtgtgacgcatttggcacaaatggcgacagattttacttgaatagttgcgcggaaagtgcttga

SEQ ID NO: 190777 - DNA, 198 bp, Klebsiella oxytoca
atgcgtaaatcagaagttatcgaacacttcggaggcgtatcaaaaaccgcaagtgttcttggtatttcccacccggcagtttgccgatggggtgaagtcatccctcaaaaacaagcattcgtcatcgaacgaattacgaaaggcaagctgaagtacgacgccagcctttaccaaaaggctacagattcagccgcttga

SEQ ID NO: 190778 - DNA, 660 bp, Klebsiella oxytoca
atgaaaacagagatgaaagaccgaataagatcccgtcgagtccagctcgacataacacagcagaccctggctaaacgcttaggggtaagccgtgtttccgtaacaaaatgggagagcggcactactaaacctgatggtgagaatctccatcagctggcggtggcgctgcagacaactccagaatggattctttacggtcgaggtgaggaaacgccggatgatacaaaagttattccgttccttaagccacccacggcagttcctattatctccgcggttcaagctgggatgtggactgatacttatgcatgctcaaggctttctgatgtgatttcatggacgcaaaccactgcaaacgtttctaatgaagcattcggactggtagttcgcggggagtctatgactaaccctcatggtctgccatccatcccagaaggatcgatcgttattgttgaaccgcactatggtcaactggatgacctttacggaaaaattgtagtggcaatactcgacggctctgctgaagctaccgttaaaaagttggtatgggatagccctttcgcatacttgatgccacttaaccctgcctttaaacccatcccgatagatggtaattgccggattgttggtaaagtggttcagattacccaaaacatttaa

SEQ ID NO: 190779 - DNA, 300 bp, Klebsiella oxytoca
atggaaaaaacagtacagcagttaattaaacatgcctttgaggcagctaaaacaatgcctcctgcaaattcagaactcattaaagagctggcaacaatgctagatgtctcgaatattacccttcgtcaggcatgtaaagaacgtgacgctatgaaggaagaagttatttcctgggcaaaagaatgcgatcgaattgttgagcgtcacacaaaaacccgcagcaatatgcacgttctggaagcaatgcgcgatctgaagaatatcgcaacggcatccaccagcaatgcggaggctgtctga

SEQ ID NO: 190780 - DNA, 789 bp, Klebsiella oxytoca
atggctaaagactcaaaggttgtatacggggccagcggcaaaacgaacgttttaacgttcgaacctgaaagcctgcatctggtcaccgacaaaactcacccgctttacgatgagcgcatccacctgcctattagtgaggcaatggtgctgaacatcatggaccagggcgttcttgagccgattatcgtctggaaagacccggaaacagggctgtcttgtgtggttgatggtcgccagcgtgtgcggcatacactggaagccaacaagcgtctgtcgaaagagggcaaagaaccgttactggttccagcagtcgctaaacgtggctccgccgttcgcatggcgcaggcgatggtaagtgctaacgaaatccgccaggcagatacgccactgggccgagcaaagaaaatggctgatgcgctggagcgcggccacgacgaggacgatttagcgctgatgtttggcgtgagtgtccagaccgtacgcgcaactctgtcactgctggatgccacccaggctgttcgcgatgcagtggagtccggaacggtcaccgttacccaggcgcgtcagctggcatcgcttaaacctgaagagcagcgggagaaggtatctaaaatcgaagcggcaactgctggcacaaccggccatgaaaaagcccggcgacagcgtcagatcctcggcgaggcaaagccacgcctgaaaacccgcaaagaaatcacaaaagccctggaatcagccgagggtgagtatgcaagcgcacttcgttgggtgcttggggaggaatcattatga

SEQ ID NO: 190781 - DNA, 195 bp, Klebsiella oxytoca
atgaaaaatgactgcatcccggaggctgtagccgtggcaatgattaatgccgccagagatatcaccgtggcaaaaatcaacgctaagggcgcgcgattcgacggttacgccaacaatttcaactggtttaatcagtcaatgaaggaagttagaaatgccgttaacgaagtaattaccagtgtcgagaggaggtga

SEQ ID NO: 190782 - DNA, 768 bp, Klebsiella oxytoca
atgaggatatccgtggccgttcatctgttaatcgtcgacgcacttaatctgattcgccgcatccacgcggtgcaggggtcaccctgcgtcgacacctgcctgcatgcgcttgaacagctggtggtccatagccagccaacccacgtggtggcggtatttgatgatgaagaccgcggccacggctggcgacatcagcgtctgcccgattataaagccgggcgcgcgccgatgccggagaccctcgaagcggaaatgccggcgctgcgggcggcgtttgagcagcgcgggtttcgctgctgggcgctcagcggcagcgaagccgacgatcttgccgcgaccctggcggtcaaagtggcgcaggccggccatcaggcaaccatcgtttcaaccgacaaaggctactgccagctgctgtcgccaacgatccgcatccgcgactattttcagaagcgctggcttgatgcgccgtttatcgccacagagtttggcgtgacgccggaacagctgcctgactactgggggctggcgggcatcagcagctcaaaggttcccggcgtggcgggcattgggccgaaaagcgccgcccagctgttaaccgattttcaggatctggaagggatctacgcgcggctggcggacgtgccggagaagtggcgcaagaagctggaagaacagaaagagatggccttcacctgccgggacatcgcgcgcctgcaaaccgatttacagctggacggcaacctccagcagctgcggctgtcccggtag

SEQ ID NO: 190783 - DNA, 1173 bp, Klebsiella oxytoca
atgacgcaaaaaaccgacgataaaatcaacgtgttctggtttctgcccacccacggcgatggccgctacctgggcacctcggagggcggacgcccggttgatttgccttacctgcagcaggtggcgctggcggccgacagcctcggctactacggcgtgctgatcccaacggggaaaagctgcgaagactcctggctggtggcctcggcgctggcaccgctgacccgccgcctgcgctatctggtggccgttcgtccgggcctgcagccgccgacgctggcggcgaggatggcgacgacgctcgaccgcctgtcgggcggtcggctgctgattaacgtggtgaccggcggcgatccggtggagaacaaaggcgacggtattttcctcagccacggcgaacgctatcaggtcacccgcgaatttctcgacgtctactcgcgcctgctgaaaggcgaaaaggtggattatcacggcgagcatatccacgtggaaggagcggaagtgctgtttccgccggtacaggaaaacggcccgccgctgttttttggcggctcctctgaggaagccatcgacgtcgccgccgatcaaatcgatacctacctgacctggggggagccgccggcgctggtggccgaaaagctggcgatagtgcgcgagcgcgccgccgcgcggggccgcacgttgcagtacgggattcgtctgcatgtgattgttcgcgaaaccgaagaggaggcgtgggccgccgccgatcggctgatttcacaccttgatgacgaaactatcgcccaggcgcagaaaatttttgcccgtatggactccaccggccaggcgcgaatgagttcgctgcataaaggatcgcgcgacaatctgcgtattgcgccgaacctgtgggcgggcgtggggctggtgcgcggcggggccgggacggcgctggtcggcaatccgcagcaggtggcagaacgcattcgtgaatatcaggcgctcggtatcaccaactttatcttctccggctacccgcatctggaagaagcccatcgtttcgctgacctggtcatgccgctattgccgctggcaggccacgatcagccgaaggcgcgtagcgtcaataccggcccgtttggcgaaaccatcggcggcgataagcgtccggtgaaacaggtcagcgcaagctga

SEQ ID NO: 190784 - DNA, 600 bp, Klebsiella oxytoca
gtgtcggcccaaaaagccgcaataaactccccggctcgcgctgcgcttagccgggctacaattcgtgcggtctgtagcccgggtaaggcgtcagccgcgacccggggcttcgccggaacgagccgtggtttgactatcgcgaaccgacgtccagcaataaactccccggctacaattcgtgcggtctgtagcccgggtaaggcgtcagccgcgacccggggcttcgccggaacgagccgtggtctgactatcgcgaaccgacgtccagcaataaactccccggctacaattcgtgcggtctgtagcccgggtaaggcgtcagccgcgacccggggcttcgccggaacgagccgtggtttgactatcgcgaaccgacgtccagcaataaactccccggctacaattcgtgcggtctgtagcccgggtaaggcgtcagccgcgacccggggtttcgccggtacgagccgtggtttgactatcgcgaaccgacgtccagacaaacgcgacaacgaacaggacggtaaacagcaccacaatggtcggcgccggggcgctgtcgagataaaacgacagccacacgccgcccagcgaacagcttaa

SEQ ID NO: 190785 - DNA, 2472 bp, Klebsiella oxytoca
atgatcaagtgttttttatcacatagctcatcagataaagaaagttatgttagaattgtcgctgagaagataagaaaggaaaataggataattgatgaagaagcattcgaagaaggaatggtcacagctgaggaaatcataaaatatcttgacaaatcttcattgtttgtgtttttcatctcaaataaatcattagattccgagtgggtcaaactagagttagatagagcacgagagttacttgacgaaaacacaataaagcgagtttatcccatcataattgatccaaagatagaatataaagataaacgtattcctgaatggatgagagatcgattaaatattcaactgatatcaagcccgacacatgcagcaagaaagattaatgcaagactgatagaacttacttgggcagatcatcccagattaaaagaaagaagagatatttttgttggtagaaatgatcagataaagttaattgaagaaagattagatgatttacagaggcaaatgccaactgtattaattgcttctggactaccttctattggaagacgttccttaatgacccactcattaagaaaagcaaatcttgtgacagactcctatgatttctcagtagtttctttaacttcaatggatagcattgaagattttattataaaatgctgcgatttaggtgtcgttgaagttaataatattagagaaatacttgatgcagatctacatagaaaaattgaaatagcaaaaaatgttgcattgcagattgttaataccaaagaacgtataataattgaagatagaggggtaattgttcaaaataatggggatattgcggattggtttcttgatataattgatcatatcaggacaaaagattatttagcattcttaattgtaagtcaatttagagcaagaccatcattacaacgcacaaatcctgccttctttaatattcatatttatgaactcgaaaaaccagaaagaaatggactactcaagagatattcaacatttcaggaaattaatttatcaagggaggactcattctttttctctcaattactaactggatatcccgaacaagttctttttacagttgatcttattaaagaggaaggtttattttcggctaagaaaagctcgcattcaattcagcaatttggttcagataaagcaaaaatcgttcttgatgcctttaacgataataataatgtgctagatttcatttacctcctgagtagatttgagtttgtaagttatgacgtattatttgacattgttgatgaaaacacttacctcccaatactcgaaaaactattttcacactctatatgcgaaaaagttggttcaacatctgactatataagagtaaatgaagttataagagactacgttagcaggaatcgtttcgggaaggttaatccatttgaggaatctataaaaaatcatgttgtaaaatttaacccttcatctttaaataatgggcaagatgtatcagattacatattttctgggcaggagggattaatgtatgggaatgaaatacctgatgatttattaatcccctctatttttataaaagccataaaaaagctatatgatgaaaaaaggaattacatcgatgcactcagcctagcaaatagattactcgaaaaagagacttcaattcatcattcggccatagatcaagtaagattcataaaatgccagtgtttagcaagaacacgcaatggagagttttttgaagaagttcgtaaaataaaagaaccagaaaggacttttttatatggattttattaccggttaggtggaaaatttgaagatgcttcgaaatgctacaatactctccttggtaaaggaaacagagacccaagagttctcggtgaattaacactagtatatatgcaaagtgatgaatatgatctcgcatataatctcgcatatgaaagttataaaaataggcctggcaatattttaaatgctaataattatttcacttgtttaattttacgagataaaaatgaagaaaacaaaaaagaattaaaagaaataatttccaatatggagttagatggttcgccaaaagcaaaagagataagaggctctgcgtacgcaagattcatcgcatattatgaagactctgaagagcaaagtttttcattaattgagagcgtgatcaatgagtttcctgatgtcaattacccagtacttaccaaagcagaacttgccacgcactttatgaatcgtcaaaagttaagagaggctataaatctcattgatagtaacaaaataaggttgagccaaacctaccgaacaatcatcagatatcgagctatgttaatggctatggatggccagctagcaccagctaaaagtttaatagagaaagagctcaaagggcttataaaatcatcatacaaaaggctagtagacagactggactatttatacgaaaaccgaaacaattag

SEQ ID NO: 190786 - DNA, 567 bp, Klebsiella oxytoca
atgaccacccttactctacagcaggcttttgaggcctgtcagaagaacgaaaccgcctggctgaactgtaaagccgaactggcggccgcagagcaggaataccgggaacaggtgctggccggggatgaccgtataccgggcagaatgcagaaattacgcgacattatcgatgtcaaaaaatgggagataaatcaggccgccgggcgctatatccgctcccatgaagcggtacagcgcatcagtatccgcaaccggctgaatgactttatgcaggcacacgggacagagctggccgccacgcttgccccggagctgatgggactcagccagcagcccgcactcctgaccggccatgcgctcgaccgttcggcgcattacctgcgcgaagcgctgtccgtgtggctgagtaccggtgaagaaattaattattcggcagaagacagcgatattttaacggccatcggattcaggcctgacgcggcttcgcgggtggataatcaggaaaaatacacccccgcacagagtctgatttatgcccgccggcgcacggaactggccagcatgtag

SEQ ID NO: 190787 - DNA, 2358 bp, Klebsiella oxytoca
atgagcggttccctgatcaacaaggctaccagtgtggtgcaacagctgtcagggcagtcacgttatcgggttgatgtgcatgaatgcagtgatttccttgatgttctgcgttatagctcggttgaatcacttagccagccctggcgctatgacgtggcggtcacctgctcctctacggatatcgcctgtgacacgttactgctgaaaccggcgtcatttactttccagaccccgatgtttgacggggcaccggctctgccggtcaggacggtattcggcgtagtggcgtcgtttcgtcgtgtgtccacgtcgaatgatgatacccactacgcgctgacgatcgttccccgtatcgcccttctggactatacgaaagggagcgagatctacctcaatcagtcggttattgaggtggttgaacaggtactgcgtaaacacggtctggaagggcctgattttgagttccggctctcccgggagtatccatcccgggaactcatcacccagtggcgggaaaccgatcttgagtttattcagcgcctgctggcggaggtgggtatttactggcgctatgaaatggacagccgtcttgaacaggacgttgtgattttccaggacagccaggagcagtatgagtttggcgtcacgctgccgttacgcaaccaggccgggatgagtgacagcgggcaggagagcatctgggatattcagaccgcatacaatgtggtgagcggaagtgtggccacccgtgactacaactatcgcgaagcgctgaaacctcaggacagcactgaaagcattttcagcaaggaagggatcaccaccggggaaacgtaccattatgcggaacccttcctgacagcaggtgacgctgatagcccggagaccggggcatacttcgcccgcctgcgtcacgaacgtatgctgaacgcgcagtatcgcgtcagcgggcattcctccagccctcatctggctccgggtcaggtactggaaacggacggaacgcttcccgatgccgtcaggcaaggcatcgtcatcaccacggtgcgcaccagcggttcacgcaaaagtagctttacgctggcgtttgagggcatcccgtatagcgaaaccgtatgctggcgtccggcactgctcagtcgcccggtgatatccggctcgttgcctgcccgggtggaaagcacgcagaaaggcgacacctattcctggctcgatccggatggacgttaccgggtaaaactggacttcgaccgcaacagtactgaacagggctatgcatatctgtggctgcggctggcgaaaccctatgccggtgatacgtacggtttccactcaccgcttatcgacggaacggaagtggccgtcgtttttgacggcggagacccggatcgtccctacatcgcctatgccctgcacgactcagaacatccggaccatgtcaccagtgataatcatacgcggaacgtgtggcgtaccccggcgaacaataagttgcggatggaggataagcgccaggaagagcatatcaagctcgcaacggaatacggcaaaacgcaactgaacatgggacacctggtcaatggccagcgtgaaaaacgcggggccggttttgaactgcgtacggacgagcatggcgcggttcgtgcggcaaaagggctgttcctgacggctgatgcccaggccaaagcccagggcccggtgatggaaatggcccctgccatcaaccagattaaccaggccaacagccagatgcaggccctgaacagcgctgctgaagccgccggagccctggtctgtgacatcaatacccagattagctttgtgaccgacaaaatcaaagacctccagtcttcggtcctgctgggtagcgctccgcagggggtggcactgacctcaggtgaacaccttcagctcagcagcacccgcaacaccatggtcaatgccggtcaacatcttgatatcggtgcgatgaaaaatctgtctgtaacggtagaaaaagccctgggtatgtttgtccataaagaaggggcaaagctggttgccaaccagggagacatcgagattcaggctcagcacaacacgatggccctgttttctgaaaaacagctgacggtgaccagtagtgaagatgaaattattatcagcaccccggaaacactgacgctcaatggtggcgggtcttatctgaggctgagtaagaacagtattgagcatggttcatctggtgagttcatcatgaaaacgtccgactatctggtaccaggttcgggcgcagatcttcctaacgaaacacccaatttcagcctgacagatatcactcaggaaaataaaatcagcagtaagtcttttaatgactga

SEQ ID NO: 190788 - DNA, 2685 bp, Klebsiella oxytoca
atgtggaataatagtgcatccgttagttacataaatagtcatgttgaaccaagaagtattgggaagtgtgctgcatacgtcagaagggcggtggaggctggtggtgtcaaaattaagattccaccgccaaggattggcaattccgcgtcagcatgtgattacggctcatcttttgaggccgtaggttttaaacctgtttatttttatacaggttcaggtccaacagacaccgcagttataccaggacaacaagcaggtgatgttgttgttattcaacctattgatggacatcctcatggccatattgctttatttaatgggacaaattgggtttcagactttattcaacttcgaggattctatcccggccaacaatatcgaaatgtaaagcccgcatatatcctttaccgttactctgacaacagtagccctgctccggaggcatcggcttcccaaaaaggaaaaatcaaaatagtctggccgatcccctccaacagtcggggaagtgagttccataatcaggaagatatcctctctcatatcgggggggaatccaccgggcagtatatgattggccgcagcgggatgtggcatggcggggtccatatcacggaatccacgaccccgtggtgtgctcttagtggcaaatctcctcttgaagcattagatttcccggttccctttaaaggtgagcaagctgtacgatgcatggctgacggcgaagtcgttgcttaccgtgtgtgcaaggattacctgacgcttggctgggaatccggcccgctgagtttttccggttcattcgttatggtgaaacactatattcagccaggtgaaaaagaaaccagcgggttacatttctataccctgtacatgcacctggccccatattctgcttacactgtcaattcggcagaaacaaagtggactctacaggactcactttcagcctacgatccagagtgggtaatgtctgccagcacaaagaacaaagaagtcagcgacagctattcaaaaggcacgatgccaaaaggtgcaattgtagaatggaataagtctgacggcagtctccataccgtcgcgttcaataaccgcgagtacggactggtgacctttgtcagtctgtcagaagatgcggtgaagaaaggcaagaaaacatcctttaagcccggtcagcaatactggatattggttgataagaacaatatatctccgggtaccagtagtgtctcccagccttcctggtggcaaaaactcatgccgccagcaaaagaagcgatgaaatttgaccaggtagtatgcccgacgccctatgctatcagcgccggtgatcctgttggccatatgggatattatcaggcacctaaggacggcggatatgaagcgcgataccaggtacatatcgaatgcacgagtatggatgataatctggaaaagttcctgactaaccctgagcaggtgggagaaaaaaatccaatctggctgaagtacgctccgggccttgcgttgtacaaaaaagatgttgcaacaggaacattcacaaaggatacaagggtaacaaccagagcggggacccttccactgagtcaggtgcaaacggaagtcgataagtcgaccaaacaggaatactggcagctgcggccagagaatgcctacgtccccaaaggtcaggcggagcctcaactactgtcacagtatgaccttacaaagttgggtttcagaactgaaaccgctgagcctaccagctttgattacctggatgggaaaaaccagcctgttggattcttccgcagtcttatcaacgcactttacgaggctgcgaccggtgatacccggaccagccatgcacttgtgaagcataattatcagcgccttcttgataaaattgacagtggaagcgaccgttactccccaatggaatactggagagcacttcataatcctgactatcgtgacgtcattcagaaaataatcgtaaaacatcccagcgactggtacttcaaaaaaggcgatgctatctggcaaccattcctgaatgcgcttaagaaagacgctccggaatggaagaaatacagcgaagatttcctggataagatggcatggatgcaggatgtctccacggagaagctgggcccctcgttatggcatatgcatcctataatttttctaggggcaatgattagcataaaaaaacgacattcgggacttttcactgtacaagatgggaaagaagctttacgtaaaatatatgataaatacggtaaagacatgtctgtgatagttgaaagaatgtttcgtatcgagaccaaacactttacttctggtcaatatcaacattgtggtgctcctggtatggaggtacatggtgctccgccagcatacggatggagttctgactttttctcgcaacatccagaatatcaaccgactgggatttggagtaaaaaagaaggaagagggttaagtgggcagggagggaatgcccaagtcacagataagccaaaacaatttgtagtattcgattctgttgagagttcaatggaatatattgtgtactatattaataagcacggcggaaactatgcccgatggtactcaacccaagactcagcacaaaaactatatagagaagaatgtggggcaatcaaacccaaattcacgaatgagttttctgaggtaaattcatga

SEQ ID NO: 190789 - DNA, 228 bp, Klebsiella oxytoca
atggccgtgaaatgcaaccgggataccatgatcaagataatcaggattaccttctacgatggttgttggtccgtgcccctcgaccgggcaggacactttgtcgcctttgcgggcaacgccgataccaccgaatttcatcgtttcagaagcggtcagtacaaaaccgccgtgggatgttttatcgccttttctgattatctgaagcattttattcctctccagggatag

SEQ ID NO: 190790 - DNA, 1209 bp, Klebsiella oxytoca
atgcccgtctggctggatgccatccctgaaaaggctcctaaggtagcgcgtcccggcaccggtcgttggctgctattcctcgcgtttgtcatgctggggggcatagcgctcacgctatggtgctggacgtcagagcgaaccggatttgtcttctggttcaccgctttgggtcttccattttgcacctgggggcttattttcggcttacgccggtttgcctacaaagccgaacaggtgggggccgagtcccgaaatgtcgagcgagaagcgcttattgacagtgaaattctgcgcggtcaacgctgcgcctggatcctcggtacttatattcagagtccggccggaaacaacgccgatgacttgctgaaggcaatgaaagtcgcggcccccgctatcgacttctctcgcccaagaggatatgacaaaccggtcagatacgcggcattaacagaataccaggctgatttaacaaaggccctgacagcggcggtgactaaactgacaacgcgtgtagaagggatcgttcagccgcttccgccggagttgccatgctggctggtgctggattgtgataacgacctgtaccccttgattgaagagcagcttaaggccgctctctcactaaagaccggcaggatttttcgcctgatggccggaaaaggtctgggggcgtttgatgcctggctggacaagcgatgggacaacccgggcattctggttgccattaccgtgtcgttaccggcgtctccccgggaagaagatgctgatgctgtctcaatggtggtattaagcaaccgcaaagcccatgcctggccggatgcgctccgccttcatcgccccgaaaggggaacagaaacaacgctcacaaagacgctcacccgggcgctgctctggtcgaagaccctgcccaatgaactcaaaggaagctggatctccggtcccacattgacgtcgggcagcggctggaattatgcctgcgaagagagagaagtggaatttagtctttcagaagacaattccagtatcgatcccgtgctgggatataccggccatgctgctccatggctggccatcacgcttgctaatgctgactttgaacaacgaggggcgcaggttatcgccgcacaacccgccgctgataaggacgacatctgggtcgccgtcatcaccaaagaagaagttcgcaaggaatcgcctaagaatgtctaa

SEQ ID NO: 190791 - DNA, 672 bp, Klebsiella oxytoca
atgcttcgccgcctgccattctggggattctggctcgatttcccggctgacacggtctttgctgaaggccagggggcgctgatgggcgcatttttcacccttgccgatcatgataaccagacggatgcgctgctcaccctgacgctcgctctggatccactttcccgggagcacattccgatgggaatggagtatctcgccttaaccgttcctgtctccactgccatcaatcagcaggaggaggggatccgtggattctggcacgccgtgctgccggtgctgttctggctttgctcggagaacagcgagtggggaagacaggggaaacctgtgagaccagcgcccagacgagtcggaaagcatcaacgcctcatcccgccggacaagcctgtgcagatttttgcaggtgcccgggccggttccgcgctcaggcaggcaccgcgagcgccggaagcccgtacttcaggggacagtccttccacgccccatcggcgccttcgcccccatgtcagaaaagcccactggcaaagctactggaagggcaaacccactcagggggaggagaaaagtatgctgctgaaatggaagccaccacaaatcgtcaatggcaaggacgacgattttctggaagccgtcatcagattcatgaaggacatcgacaaatcatcctga

SEQ ID NO: 190792 - DNA, 1185 bp, Klebsiella oxytoca
atgaagggtgtaattaaattaagtttactggccttatcaatctcattcagtttcgctggatatgctgaaagtaaaaccgtagaagtcttaagcgctgtcgttaaggacaaaaaaatatcaggtgcgcaggtggtcattcagcgaaacggcgagcaatccatttcgtcttttagtgatgactccggaaacgcccagattggcaatatcacaaccgacacaaatgaaagtctgataattattaagaaaaatggatattcaacactggtggcgaaatgtccatgtggtgggatgagttatgcattaagcccgacaatgaaagggcttgatagtatgcgcgtggttttgggatggggaagttcaccttctgatcttgattcacatatggtatatccgggaaaccatattttcttcgaccataagttgggcgataatggaaatcttgatgttgatgatacagatagctatggacctgagactattacgttaaccagacgtgagaatggaaagccctatgtttatgctgttcacgactatagtgataagtctgatccagataccaagaatctatctaacagtgaagcgaaagtgtttgtttatgttggggagtcgttagttcgaacatattatgtacctaaagaccagtcgggtaatttatggactgtttttaaagttaatgaaaatggcgccatcgaagatgtgaacaaaataaaaggtatttctgtcggtgccggtgatatcgataatgttttaacgccacttttaaatagcaacgcaacattgcctcatcaaagctggggaactgagcaaattgacatttcaaattctctgaatcttaagggtgaagaatcatacagtcggaagcaatatgaggaggcaatttcgtatttcacagagtcagtcaataactattcagaaaatggcaaagcatatggcaatctcgggttggtatatcagaaggttggtcgtactgctgaagctatatgggcaaaccgcaaagctattacactggcctctggtaaaaatgcagcaacaatccgggcgggtgcaaattataacataggaaaaatatacgaaggggaaggtcagtataatgatgccctgtattactacaatgcagcaaaaaaagaaaaacaaaaccctgtttacgacaatgctatattaagagtaagcagcaaaataaattaa

SEQ ID NO: 190793 - DNA, 603 bp, Klebsiella oxytoca
gtgattaatgaaatctctaacggtgatttgactatcgttggtttttttagcaaaggtgaggatggtacaagcggatcctgctttgtcaaagatggaaatgtggcaatttatagcaagggaactctccaggctttaatttatggtgatgaaatcaccgatggctcaaattcgtctttgggtgcagtttccaaaaccaatttaaataacacatttcgtctgagagaatttttcccgcgaatgaccgcagttgctgatttgttttatgacggtaatgttgctcgtgttcaaccaattgcacctatagaaccattttgtaatgggatagcacctgtaccaaacatgtacggaaaagatattaaaagcgccagaaaattgctcaacaattatggatggaagcctgaaaataccgaagcggatcagagcgactccatagccaaagacttaaattctgaaggaataaccgaagtggattcttgctctggaactggatttggattctgtaacttcgattatcaacgtgaaggtgggatctctttgaatgtcataacagtgggggatgattttactgtaaccgattacggtgcccactgtccggaacaatga

SEQ ID NO: 190794 - DNA, 504 bp, Klebsiella oxytoca
atgagcaacctcagcttcagttttgctgcgcaacatctgattcattcctcagacgtttcagtatttgctctggtggatgggctgcaatatgagcggtatttcggtgaagaactgtcaactgaaaaatcgacggcgatccccctgtttgatagctggccggattcgcgtattgcctttgccggaccgtggctaatcaggatgaatgaaacaatggaaatgaggaagcagctggaagccttggaaatcgcattacccggcgtgtcctggatagtgtcaggctccacgccggaggaactggttgcgcatttacagatatatatgaacacaggacttccggacgggcgggctgctttactgcgttttcaggacccacgcgttcaggttcgtctgggtacgatgctgaacgacctgcaacaccagaagctgacaggtttaatgcaggaatggctgacaatagtggacgggaaagtctggtcatttaaacaaagggaattcatatgctga

SEQ ID NO: 190795 - DNA, 345 bp, Klebsiella oxytoca
atgctgaagctgtctgaagagcagtgtgccggtgtgggtaaaatggaagatgatgattttgttcgcgataccgcgcaaagactgaagaggaaatttccggggattaacgaaccggatgacacgttccatgttcgcctgagaaaggcactggattatgccaatacccttccgctgaaagaaaagaatgtgaagcgagattttttgtttctggaggcattttggcccggtttttatctgaagcccgaagtggataaatggctgagaacgccgaatggttattcagttgatcagcgggttgaagattatatgcatgtgatgataaaccgggaaaggaggggactctga

SEQ ID NO: 190796 - DNA, 771 bp, Klebsiella oxytoca
atggttatgtttccaccagtagtgaccgggggaatggggggcgcgactaccggaagcgtcggtgtggcaggtggctcaaccggaacagcaacatttcccggagcaggaagcacccatggcggctgggaagaagaggatatgtcttatcctggttcaggtagtgggtcgcgtcaggggaacggaggatttgattatcagggaaaacagtatgatccgatgctgaatgatcccatggcggtcagtgcagagacgcacggagatttctgggaagacgatatggattattcagaaacggtcagttacgaaggtgtagacgcgaaagtgggggctcaggcaaagacggatgaaaaaacctgtgagaactgcccacctgagggcacggtgatgccgatggtgagacgctgttcacgctggagtatggtgacgataagttaccagacgagaatatgtggcacgtactataatccagaaactaaacagatacaggaatttaaatattgtggcgtatcgtttgatggctggaaagacaagttgtgtcagttctgggaagctaaagcgagatatgatcagttttttaaggcagacggcacacgaaaaccctggtggactggcgatattagcgctaaaaatcaagcatcgcgtcatcaggccattgcgacagttagtcagccattaaaagtagtctggatatttatgcaaccagttagctatcgttacttttcaaaaatcttttcacggcataaggatataatcacaagatggcaaccgtaa

SEQ ID NO: 190797 - DNA, 786 bp, Klebsiella oxytoca
atggcaaccgtaacagtaaacatcagaattgagcaagaatttggattaagctcaccaattgaaatccctcatgcagccagggtgtttcgagatgtaagtttacattttgaacaagtactgggtgagcacaaaaaatggtatttaaaaggatattcaagaaagcaggcactacaacatcaagtgtttgttgatgattgtacagttccagatgagattttatcaagatgggaaaaaaaatataagaaaaactatcctttttttggagagggtatttgggatggtggagacgatgatataagtgctggaatcgatctgacatcctcttactcaagtactaataggcgaaataatcctatgtcgcttgttattgagttttcagtttttcctgtgaatacaaaattgtcatctgagcgaatgttagattttatgtgccatttacttgctttaaatgaaaattgtacatatcttaatgttgagtcgggggggtatggtttttctgaaataatccctaaagaaaatggttacgatgaagtatataaaaaagtatttcccgatagaatatcttgcggatggatgttattcatacctgccattattttacctgactttattccagaagcagccagagttattcctgttctaaaggataacaaacagatcggaacaatcgttgtttcaactgaagaaatatttgatggaaataacaaagaacacataggcaaagctaacgatattgaaattaagcttctggatcttggcttgttgccactgatgacagagctttag

SEQ ID NO: 190798 - DNA, 324 bp, Klebsiella oxytoca
atgataacgctcaataagatcagtaaaagcttctccggtgaaagagtgctaaaagaggtatcgctcagcattcattccggcgagattatttgcattattggccccagcggctcggggaaaaccacgctattacgtacgcttaatttcttagagcctgccgatagcgggcaaataagaatagatgatgtggcgctggattgcgcaaaagcgggaaaaaaggagattgaaaaactacggtcaaaaaccgctatggtttttcaatcgtggaatctttttcataaccttaccgcactgcaaaatatggtaatgactccaacttactga

SEQ ID NO: 190799 - DNA, 1188 bp, Klebsiella oxytoca
gtgaacgtttttgcaaccaggccggaatggaaggcctttctgctggcgctggccggttcggtcgtgctgatcgttggcatgggctatggccggtttgcctataccgggatcctgccgctgatgctcaatgagcagctgctgacgctgcgtgaaggtaatcttgccgcttcggcgaactatgccggctatctggccggcgcgctgctgctggcgaaagccaggcctgcggacgccaggtggctaagcctgctttccgcactgttgacgctggtgtgcctggccttactggcgttcctggtttcccccctggcgattattgtggtgcgcggaattgccggattactcagcgcggtgacgctgatcgccgcctccctctggctactgcagcatatgaagcaccctaacggcgcgccggtgcttttttctggcgtcggaatggggatattcttgtcggcggaatttatctccctggggaaggcgctggcgctctccagccagcagatatggctgatatgcgcgataagctctggcgtgctttttgttctcgcgctgcgtctgctgctgagccccgccgactaccttatcgcttatcaacccgccgcgatcgcacaccgcgaggagggcgaggggcgggtgcgggaggcttggaaactgctgctgatttatggtctggccggcttcggctacattattaccgccacctatcttccgctgtttctcagcggttcgctgaacgttatcgatccggtgcagatctgggccattttcggcctcgccgccgttccctcctgctttatctggcaccggctggtcatcaagctcggctaccgccgcgcgtttacccttaatttgctgattcaggcaatcggcgtcattctcccggcgtggagccatgcgttaccgttttgcatattaagcgcgctgctggtgggttgcacctttttgggcaccgtgaccatcgcgctgtccgaggggcggcggcttaatcatctggtttcgttcaatatgattgccgccatgaccgcgacctacggcatcgggcaaatcgtcggcccgctggttgccggaacgctgtatgaccgcagcgggtcgtttaatccttcgctgagcgcggccgccactgcgctgctggctgccgccgcgctggtggcggcaggggcggggcgagcgtcaaaggtcggaggctga

SEQ ID NO: 190800 - DNA, 537 bp, Klebsiella oxytoca
atggggcgaaatcaatgccacctgctatgcaggtggttttttactatcgctcttttcggttttcccggtggcgctatcgggcaactgcagatcggtagcctgggttgctccgggatgaatacatcggtgcggcttcttccccggctgcgctgcgcttacccgggccaggagtccaccgccgtctgcgggccggtagcccgggtcaggcgtttacgccgcaaccgggaatgtacggggataaatacatcgatgcggcttcttcccgggttgcgctgcgcttacccgggccaggagtccaccgccgtctgcgggccggtagcccgggtcaggcgtttacgccgcaaccgggaatgtacggggataaatacatcgatgcggcttcttcccgggttgcgctgcgcttacccgggccaggagtccaccgccgtctgcgggccggtagcccggacaggcgcagcgcgccgcctccgggaaaacccggctgaattaattttcgctcgccgtctccgggcgctgaaagcggcgcagctcgcgtag

SEQ ID NO: 190801 - DNA, 1878 bp, Klebsiella oxytoca
gtgactcggattccgacagcgattccgactctgacagtgattcggattcggacagcgattcggactctgacagcgatgccgattccgacagtgattcggattctgacagcgattcggattctgacagcgactcggattctgacagcgactcggattctgacagtgactccgattccgacagcgatgccgattccgacagcgattcggactccgacagtgattcggactccgacagtgattccgactcggacagtgactcggattcagacagcgactccgattccgacagcgactcggattctgacagcgattcggattcagacagcgattcggattccgacagcgattccgactctgacagcgattccgactctgacagtgattcggactctgacagtgattccgattcggacagcgactcggattcagatagcgattcggactccgacagcgactccgattcagacagcgattcggattcagacagcgactccgactctgacagcgactccgattccgacagcgactcggattccgacagcgactctgactctgacagcgattcggattcagacagcgattcggattccgacagcgattctgattctgacagcgattctgattctgacagcgactcggattcggacagcgatgctgactctgacagcgactcggactctgacagtgattcggatagtgacagcgattctgactccgacagtgactccgattccgacagcgattctgactcggacagcgactcggactccgacagcgattccgattccgacagcgattcggactctgacagcgactcggattcggacagtgattccgactctgacagcgattcggattcagacagcgactcggattcagacagcgactcggattctgatagtgattccgactccgacagcgactccgactctgacagcgactccgattctgacagcgattctgattctgacagcgattctgattctgacagcgattctgactctgatagtgactcggattctgacagtgattcggactctgacagcgactccgactctgacagtgattcggactccgacagcgactcggattccgacagcgattctgactccgacagtgactccgactctgacagtgactcggattccgacagcgacagtgattccgactctgacagcgattcggattccgacagcgattcggactctgacagcgactcggactctgacagtgattcggatagtgacagcgactccgattccgacagcgactcggattcagacagcgattcggattccgacagcgatgccgattcagacagcgattcggactctgacagcgactcggactctgacagtgattcggatagtgacagcgattctgactctgacagcgattcggattccgacagcgatgccgattcagacagcgattcggactccgacagcgattcggactctgacagcgactcggactctgacagcgattcggattcagacagcgactcggattctgacagcgactccgactctgacagtgactccgattcagacagcgattcggatagtgacagcgactcggactctgatagtgactcggactccgacagcgactcggattctgacagtgattccgactcggacagcgactcggactctgacagcgactcggattcagacagtgattctgactcggacagtgactccgactctgacagcgattcggactccgactctgacagcgattcggattcggacagcgattcggactcggatagtgactcggattcggacagcgattcggactccgacagtgactccgactctgatagcgactcggatatcccgcaggccaatgcggataccaataccgcgctga

SEQ ID NO: 190802 - DNA, 699 bp, Klebsiella oxytoca
atgaatttcactcagactataggtatcgggttagcggcaatgctggttattagcggatgtggggctaaagaaccgccgacgcaggtggtttatcgctttgacgaccatcgttatcttgaattaaagggctggaactgtgagggagaactctggtacacggatacgcagagggggattcataaccagatatggagtcagttttatcgaattttcaccaaaaaatttgtgcatccttcggaacgttatcttgctatcccaaattgggacccaggggctttctctgtatcaaaggattacggaaaaaactggaccacggcgacatattctcccggagaaaacgaaccgaatggtgactcatcaccgccgagagacgacattctttccttcacagttgtgaatgatcagggctttttgcaaacgaagcaccggttatatatgtcatcaaagccgtttgacgatccgcgcattcttcccggtggtccggggattacctacactcttgatgacggaacggtacagagaattgaaccacaatatccgggaaaggcctgggggctggattatattaccaaacaagcgcttgtaaatgacacggccaaatataaaaccaattatcaggatcttcccgataaagtaccggaagtgaaaaattaccagggctgggatcatatgcggtgcgatatggacgccgggaaataa

SEQ ID NO: 190803 - DNA, 270 bp, Klebsiella oxytoca
atgaatttcactcagatggcaggcagcgtgttagcggcaatgctggtggtcagcggatgtggtgccaaagaaccgccgacgcaggtggtttaccgatttgacgaccaccgttatctggaactgaaaggctggaactgtgagggagaactctggtacacggatacgcagagaggtattcattcacagctatatttccagttttttcggatattcaccaaaaaattagactggccccatgaatctccagacagttggtatcacttaaattag

SEQ ID NO: 190804 - DNA, 2004 bp, Klebsiella oxytoca
atggcctttaacccggagctggggagcacgtctcccgctgtgttgctcgataacgccgagcgcctggataagctggtcaatgggccagcgactaccgttccagaccgcgccgggcaaccgctggattcctggcgtaaaatcatcgccgccatcctggagagttctgcagcagcgatggaaaccattcgtctgacgctgatccccctcggtgaacaatacgccacagaggccgatgcgcaggcggcgattaataacggaacaatccccgctggttcatatttttacgtcaggagcactgacgacagcgcgctcgctgttgaatacaggaatgtttctggtacagctcagcctaccggacgcaaaatgccgtctcaggatttgctaaaccagctgactgagtcgctcggttttctgcttcccctggctgacaccacgcgtttttttaaggccggggtaacaggcacgccccacgaagcgatcaacgctgaagatatctttatcgatgctgagaataacctgcagtactggataaaggatggcgtgcggcagtacttcctgccggttcgggtcccgacactggaggcagacaccgttcttgttgacggtattgctgtcgatccggctgctattccccctgcggtcctcgccacgaatctgcttggcctggctcagtccagcaagttcctggacccggaggcatttcaacccggcggcgcgtatgagggctgggcaggctacgataatatctggctggataaatcaggaaatattcagggttatacccgtgaaggtaccagctatttgctgttgcccctgtcagtgcctgaactcagtgcaaaaaaaatccgtctcgacggtgaagacctgcgggacgtgatcgccagacgcacggaaacacggctcccgttcacagaaatggtggacgggaaaagccagatcatgctgctgaataaccagaccggccagctgtcgcaggtgactgatggcaccgcaaatgaaacggacccggtagttgatggcggcggtgtgctttcctggacttcggacagggacagcagcgtacctggcgggaaattttatctggcggaaagcggcaaaattcatcctgtcatttcccggcgcgttctggcgggctggggcgattcgttcatggaaaaccccgtttttatgaataccctccatgctctgacaggtttacccgcctacaactttggcaaatcagggctcagaagcaccgctgttgctgcccgccaggggggcgatcccttttactgtatgccggtggatggagtaatcccggccagtgggacggtcaacctgataccgaacgtaccgggaccccatgcctctgcatcaaacggggcaatggcggccataaaatgccagctggctggcgtagacggaacgtttaactgggatggcgtacaggccagctttacccgtgatacggcgggcagtgcaaagactgtcagcgtgctgacagcgctctttgtttacccttataccacctctgacgtgctgggctcgatgccagcaggcgtgctgtatcctgagcacgatgaagcaattctgatcctgacctgcggtcgtaacaacacaaccagcgtcagcgaagtggtgaataacgtcaaaaatatcgtcagttacctgaagccggttggtgcgctgccgtgtatctgccctcagttcacccgcggtgatgaaactcgtggttctgctggctatcagcgtatccatgccataaacgcagggctaaaggcggcctttccggagtactactgtgaaattgatggcgttgatctgctgcagaacttcaaaaaccattacaacccggcgaatgcaaccgatgtgcagaatatcgccgacgacaccacaccggcttccctgaaatacgacacgctgcatccgtcacagacgctgatgagcggtgcgctgtacgtcggggcagaagttaacgcaaatttcgtttgccagtttctcaaacataaaggatgggttaaataa

SEQ ID NO: 190805 - DNA, 813 bp, Klebsiella oxytoca
atgggtaaggtcgaacagagcaccgactgggtgaacgacaccgggtcaaaattatattattttccgtccatcaatgccggtacgctgggaatgatcgatgtgaagcataactgggcaggaggggcgaagaacctggctcccggtgcccagctcaaaaatctgtgctttctggatgacccggccagcgtgggttcggtagccctgaactttgacagcactaccggtgggctgattttcgataaaacgtcgcgccagtacctgcgcctgcctgcggggtttattccgacagcggccatgaaagactacatgcatacgttctggctgaaaatcgatccggcgaatgctggcgctgatggtttcagtaacgtctgggtggggattggggcaaccagttacgccactaccgctaaccggctgattcaggtctatcctaccatcacggctggggtgatcacggcgctgacggtgtgcgtgcgtggcattaactacagcattaaggattacatcggcaatctggccgacggcaatctacactgcctgagcgtccgctatcaggagtcggctgatggcacgcagcaaaaggggctggtttatctggatggggttcttgcttatgagggcgtctggacggggaaaatcgcttatcctgcggcggctgttagcctgaatggcatcggatcaaacctggcggacaccacaccctttgcaggtcggttttaccgggcgcgtattgacgatctgactctggtcagcaaaacagcgctgcaggtcattgcggaggagatggcggcggtgtcgggaaggtttagttaa

SEQ ID NO: 190806 - DNA, 1158 bp, Klebsiella oxytoca
atgtttcagaatgttagtgtgggccttgttgccgactggttagtaacttatgctggttcagagaaggttgttgcagaattcataaaattattcccacaatccgagctttattcagtcattgattttctttcagacgaatctcgaactcggtttatgaataaaaaagctacaactacttttatccaaaaactacctaaggctaaaaaaaactaccaacgatatttgccattcatgcctcttgctatagagcaattggatgtgtcaaggcatgatattattctttctagtagccatgcagtggctaaaggcatcttgactgggccagatcaattgcatataagctatgttcattctccaattcgctatgcatgggacttacagcatcaatatctaagagaggctggctttgataaaggtataaagtcttacattgcgcgcatgttattacataaaattagattatgggattgtcgaaccgctaatggcgttgaccattttattgcaaactcacaatttattgcaaggcgaatcaagaaagtatatgggcgcgaggctgatgtaatttacccaccggttgatgtaaataaatttgttttaaatcaaaataaagatgattactattttacagcatcccgtatggtaccatataaaagaattgacttgatagtagaggctttttcggaaatgcccaataagaagcttattgttattggggatggtcctgaaatgcaaaaaataaaaagtaaagcaaaaaagaatgttgaacttttaggatatcaacctgatagtgttatgcaggaatatatgcagaatgctaaagcctttgtttttgccgcagaagaggattttggaattattccggtagaagctcaagcttgcgggactcctgttattgcatatggtaaaggcggggcactggaaactgttcgttcgcttggagttgaaaaaccaacaggaatatttttccaggagcaatccgttgctgatataatagaggcagtaaatatttttgataaaaatcagggggattataattatcatgactgtaggagtaatgcagaaaaattttctgttgaaagatttaatgaagaaatatcaaattatgttaatgaaaaatacgagctatttaaactaagaagtaatgtcaagaatttgtag

SEQ ID NO: 190807 - DNA, 1302 bp, Klebsiella oxytoca
  misc_feature (979)..(988): n is a, c, g, or t
atgaaaaaaaacagtattattaacgcaacttggatgatgtctgaaaaaatagttactttatttggcttgttttttgttacatcattcgttgcaaaatacattgggccttcccggtttggtcagttagctctagctattgcaatatttcaagttattcaagcaatagctcagttaggatgtgataatattatttttaaacgtgtctcggaaaaagtattatctggtctgaaattgatttattcaacttttcttatccgcgggggaatatatttcacactgtctttgattgtactcctttttttttatgataaaagcgattttattaattgtgtttttttgatttctgtatgcgtagcatgtttttttacttctatggacgtgtttactatatacaatgacgcgacattaaactcaaaattcaacactattgcgaacgtgctcggattaataattggtttgattttacgttatgtcattgctttttttgaatggcccgtatatttcttggctttaccaatagttctaactactttaatcccctttttaattcgactcgtatatacacctaaagtatctgtaattaaagcaaaacacaaatggcgctataacaaatatctttttacaactggtataccgctagtaatttcaacggtatcaatgactctttactctcgagtgaatcaatttacactttcttattttaaaggtagttatgagcttggtatctactctgttgctctgacgcttgggactgcatgggttttcataggtaatgcgcttgctatttcttttctatcaaagatatattctgaaaaagatgagctgaaagccatggataaaacgtcaggtttgctatcttttgtttttattaccttgtcagttttccctctgtttttttatttttttggtaagaaagtaattttattactctatggggaacaatacatacattcatatgggatcataattatattatgtnnnnnnnnnntacattcatatggaatcataattatattatgtatatcaactgttataactgctatgggttttatatccaatagatatatagtgaagctatcaggatataaatatttatcgaagaagactctcatagtcttgagtctaagcatacctatttcaacagtcatggtatatttctttggtgtgtatggtgctgcttatagcgtattgattgttgaacttttatctctgacaataatgaattatttttttaatcatggagttattttaaaaatccacaaaggagcatttaacttaaagaagctagtctctctgaaatga

SEQ ID NO: 190808 - DNA, 168 bp, Klebsiella oxytoca; identical to SEQ ID NO: 101437

SEQ ID NO: 190809 - DNA, 213 bp, Klebsiella oxytoca
atggttggtactttctaccgcaccccgagcccggacgcgaaagccttcatcgaaatcggtcagaaagttaacgcgggcgataccctgtgcatcgttgaagccatgaaaatgatgaaccagatcgaagccgataaatccggcgtggtgaaagccattctggtcgaaagtggtcaaccggtagaatttgacgagccactggtcgtcatcgaataa

SEQ ID NO: 190810 - DNA, 741 bp, Klebsiella oxytoca
atgattcgtggatatcgttatgtatcagtgataccaacattacgagggatgccgctagatagtacagacatgtcatttatatttagccatgaagtaatgatttttagggtacaacaaaatttagccaaatggtcatctcgtgcacttaagcggacatttgatgttgttggttcatcgttgatcattataatattatcaccattattgctctatattagtcagaaagtgaaaaaagatggtggttcagcaatttatggacatgagagggtaggtaaaggcgggaagccatttaaatgtttgaaattccgttcaatggttgttaactcaaaagaggttcttgaaaatcttttagcgaatgattccaaagcaaaaactgaatgggatgcgacatttaaattgaaagatgacccgcgaataactaagattggccagtttttacgtcgaaccagtcttgatgaattgcctcagctgttcaatgtacttaaaggtgagatgagcctggttgggcctcgaccgatcatcacagctgaacttgaacgatataatgacgaagtagattattatctattaagtaagcccggtatgacgggattgtggcaagttagtgggcgtagtgatgtggattatgacacgcgtgtatatttggacgcttggtatgtcaaaaactggtcaatgtggaatgacattgcgatcttatttaaaacggttggtgtcgtacttaagaaagatggtgcttattaa

SEQ ID NO: 190811 - DNA, 294 bp, Klebsiella oxytoca
atgagacactctgaagcccatgctcataactcaacgttcacaattctggctgaattaggcattgtaggttatagcctgttcgttttgttatttaacgaaattaataataaaattgttgcactaaaagatgtggaacctgggatattcatggctttgagcttagctttttggacttgtatattttcgtccgcgactgaacatcgtataacgaccccttcgcaaatgataccattctttatcttattcgggatatgttatctgaaattttttggaagaaggaaaagaaatgattga

SEQ ID NO: 190812 - DNA, 294 bp, Klebsiella oxytoca
gtggcgcacgtattcggtgaacgcacgttggtcacgctggagcgtcttctgggcctgctgtcggcctttgaggtcgtggtatggatgacggatggctggccgctttatgaatcacgcctgaagggagaactgcacgttatcagcaagcgatatacgcagcgcattgagcggcataacctgaatctgaggcagcatctggcaaggctgggcaggaagtcactgtcgttctcaaaatcggtggagctgcatgacaaagtcatcgggcattatctgaacataaaacactatcagtaa

SEQ ID NO: 190813 - DNA, 378 bp, Klebsiella oxytoca
atggacgaacagtggggctatgtcggggctaaatcgcgccagcgctggctgttttacgcgtatgacaggctccggaagacggttgttgcgcacgtattcggtgaacgcactatggcgacgctggggcgtcttatgagcctgctgtcaccctttgacgtggtgatatggatgacggatggctggccgctgtatgaatcccgcctgaagggaaagctgcacgtaatcagcaagcgatatacgcagcgaattgagcgtcataacctgaatctgaggcagcacctggcacggctgggacggaagtcgctgtcgttctcaaaatcggtggagctgcatgacaaagtcatcgggcattatctgaacataaaacactatcaataa

SEQ ID NO: 190814 - DNA, 276 bp, Klebsiella oxytoca; identical to SEQ ID NO: 101357

SEQ ID NO: 190815 - DNA, 585 bp, Klebsiella oxytoca
atggcagaaggaatttggcaaagtgaattaggatactcgtcaaagccgcaaaacttattatcttcatatcttaaaatcataagttgggcacttagccataattggaaaacatcagatacgtataaggtattttggtatcctgcatggtctagccgtgataaaaaacaatacggtttagccacaacactgagaaatagaactaatgttctcaccgagaatggtaatgaacttgttttgttaaatatgctgtatggtaatggaagtttagcgagccaggaagttaaaagtaatatggaaagtagtttagatgcagctgattatttttttggggtaaagattgatgaaaaacaagtgattattgctgtgttgctcagtgatgttaataaatataaccaactacactattcacttgtgactaaaaaaaaaccgcgtaatgtaactttaatttcggcgaaaggtgagcagtatgaattgaattattcatacgaaaagggtaatactcatctctttatagataaaaacagggttatcaatatttcaaatggccgtgtacatatttttttcattaaggttgaactattctga

SEQ ID NO: 190816 - DNA, 195 bp, Klebsiella oxytoca
gtggcgcggcaggcggatgacgcggatatcgtgggcgaagtatttgccgccgaactgcgcgccgagaccgaggttttgcgcctccaccagcagttcctgctccagctgaatatcgcggaaggcctggccgtgttcgttgccttctgtcggcagttcgtcgtaatagtgggtagaggccagcttcaccgtttttag

SEQ ID NO: 190817 - DNA, 417 bp, Klebsiella oxytoca
atgcgctactgcaatattcttattggcggttttttccttgccatgctaattcgtgaactggacgccctttttgatcttatttctcacgggagttgggtgtggtttgcgctgattgccgctctggcagccttaattaatccacttattcattatcgtcagaccatggaacagcttacacaatatacccgtacgcccgggtacggcatgttaatcagcgggctgctggctattctggtcttctcccgactcttcggtatgcaaggtttatggcaggccatactcgatgacggttacgttcgggttgtaaaaaatgtcgttgaggaaggcagtgaatcattcggttatatgctttgtctcaccgcctctattggttattactgcaattttcgcggaaccctggggcaggaatcaacctga

SEQ ID NO: 190818 - DNA, 495 bp, Klebsiella oxytoca
ttgcgctttaactgggattttgtcgccgccctgtttcctgccgaacaggtggagcggcagtttgcccagtatggcgaattgctcaatcggatggccgaggaagagagctgctggcagcttccgctcgccgcgctggttccccccgttaaactcgcggaaccaagccccgctcccgctccgcgcggttgccctgagcgcccggtgtccggcgtggcggcggacgagagcactgtccgtctgatttgcgacgcctttcgcgaggtggtgggcgaatcgattatgcccgcggataacttttttgaggcgggcgccacgtcgctgaatctggtgcagctgcacgttttgttacaacgtcacgaattttccacgctgacgctgcttgatctctttacccactcctctccagccgctctggccgaataccttaccggcgtcgcgatggaggagaaagccccacgctctcgcccggttcgccgacgccagcggcggatttag

SEQ ID NO: 190819 - DNA, 534 bp, Klebsiella oxytoca
atgggcgagtcaatttactatgaaatgatggaaattcataattctggggttatggacaaaatggaaatagtccgcctgcatggatgtatgaatagcctctggcgtcggcacttaattaacttcaaaatgctaactccggtttattttgatgctatcgggagcggaacgcatgtctttgaagaaaaagaggaaagagagccttcatttgcggttataaaaatcaatagcgccggggaggcaagagtaacaaaacaatgggttagacatttggaagcaagagcgagttttcgtatggagtggcggaatgaaaggcgaaatgcaaggcaatgggggtggttatattaccgtttagacagcagtagtagcaataatgacgatgctatccgcttgctcgacggaatggcgtttcataggaatgaatttcatgaccatattttctgccgtcctgagtggattttctttgatgaagaggtagaggaagcaaaaatagaagtaaccctacgcaagggcattaaaagggggcagggtagatga

SEQ ID NO: 190820 - DNA, 1749 bp, Klebsiella oxytoca
atgtccgaaaacaactatggcgcattaatgatgaaatctgcgcttaacacagaaacaaatattgatacggtaatcttacctggtatttatcccgtaccatctggaaacgcgtcctctcctgatgataacggaggtatactgactattcactctggtgcccccctgcatcggacatttagttctgacacaatcatttttgcagcttccacttataacgctgaaacattctcctggacgccgtggtcattttctttaacgaaagaaattcttggatcaagcgagattccgggttcatcacttgttaacacagaaacaggccgtgatatcggttcatctgtacgtgctgcatcgggggtatcacaggcgctgtttccgaaactgatgaacaaactgacagcgtatcgtcacggtgtttccggctatcaggatttgttcagagcttatggtttcgggtcgtcagtagaggttggcgcaacactacccgaccctgctacacaagcccccattgctaagtttttcgaatacttaaataaaacggttaataaacagggaatttaccctctcactttcgaaaaccgtggggttaatggttcttcgataaataacttcattgtaaatcagtggcctggcgtcgtcgcagagggcgtatatcctgatatcgcgctctttgtctatggtatgaatgatttcccaacggcaaactataatgccgggcaaacgttcaatgaaaatggatttaagcagcgtcttagagccgcgattaatttagtcagggaggctggcggtgatgttgttttgacaaccacaccgcatccaaatatagctgagtacagctggagcatgccgccgtctgttaatcaggtgtggccatcattttctccacttcctgtttccgatgaggacattatcccttcagcggcagagtcaaacgtcacgtttgaatggaatggtgtaaacatacaggcaggtgttcgcttcctgcgtggaaacgatgccatcaggcaaatcgcggtagagatgggatgtgtgctgattgatgtcgaaaaatactggtttgatgctgtagctaaatatggcgaaacggcattattcaatcggacgcctgaaatacagactgttcaccccaatttgcttgggcatcagcaatcgtactggcttgcctttgaagaattttttgcgaacatggataagaacggctggataccgcccgtagcgaacagttatgacgttttcagtgtcggcgggacagcattaaatccaaacccaaaaactgctgacattgacctccaatctaatggcattcgggcatgggcttatgggttgcgcgataaatatgcgagactaatttacgcgtctgacctgctcggaaaaatatcaaaatggtcttacacctcacaatccccaacctcttccgctccgggttatagcctggaatggacagaataccattccagaacaggtgggctttatacaacgggtgacatcattccagttgctatccccaacagaacgtcgatgaaggtttttattgatgtgtggacttctgcgcaaaccgggtgggcgcagacaatagaggttattgctgtaaaccgtgaaggggtggtgtcgtataccatcgttggcgttcatgataacacgccgaatggtaacagattatttacggtaacagtcggttcaggcgtattgaatatcaatgtgctacaggttaactcatctgttaaataccacatcagcggttttaattcgtaa

SEQ ID NO: 190821 - DNA, 288 bp, Klebsiella oxytoca
atgtcatttactaaaaatattgaattaacctttaataaaacagccgcgaacgggatggcgctgccttctgagacacagacaatcgaaactcattttgtggtgcgaaatgtcattatctctgatgcggaggggatatctcaggctgacctgttcagtagttttgatggggtgtcctggcagttttacggctcgtatgagttttcacctgattacacgtccggtcttggtatgctggaacaggcggaaaatcagattcaaatagcgatgaatgaacctccttctgaataa

SEQ ID NO: 190822 - DNA, 264 bp, Klebsiella oxytoca
atgaaagcaacagcgcgtaaaaaaccagccttcaaagacttctacgaaaatggcatgttttcaagagtcattgctactcgcaccaataatggcaggtggcaactgtgcggaatgcacagaaatggagaagccgtgatatttattgaggcagcaagaggggggataagagagtggtctagcctggagtatttatccgaattttgtgattcggttggggtggttttgtgggaagttcacagggggaaaaacaaagtacaggggtaa

SEQ ID NO: 190823 - DNA, 441 bp, Klebsiella oxytoca
atgaccaataaccagttaacagacgcgcaaatttcaaacgcaacacttattcgtttaattctatgggctgacgagcataacagccactacgttgcagctgcgttgcgcgaactacaggaacgccgcaaggccgcaatggacagcgagccggtggcgtacaccgacgagcgcaacctgggctatatcgaccgaggtagggagacagcgtatctgtggggcaagcagaattctgagtcttcagacgttgcgctctatcgccacgcgcagccagcgccggtagtgatggatggttacgtgatggtgccgaaggagcctaccgcagaaatgcagtcagcaggagccagtgctatcagaatcgaaactactgcgcttaataagctatggactggaaatgctgtgttccgagccatgctcgcagccgccccgcaggaggatgagtag

SEQ ID NO: 190824 - DNA, 435 bp, Klebsiella oxytoca
atgttcgatcccgtaaacctgcaattgtttgagttaattttccatctggaagttagcctgcatcaggcatcaacacgccgcagcgcgcagcttttgcagcagttgttgcatgacgaatttctggagataggccgtagcggagaacggtacgataaaacgcagaccgtagcagcattaattaacgaggacgtggaggccatcaacgcttacagctttcagttggctttactaaccaaagattgcgcgttgcttacgtaccgcagcgaggttatcgattcagacggacgcactgctaaaaaaacgcttcgttcgtcaatctggcagaggagccatatttgtgcaaatcatcaggaatgctggcagctcagatttcaccaggggacgccagtgaaagaagttcaggaagaagagcaggcgagcaagacggcgaattaa

SEQ ID NO: 190825 - DNA, 582 bp, Klebsiella oxytoca
gtgatttcccccgctcgcgctgcgcttagcggggctacgggcccctgtactctgctcccgggggcggcgctaagcgcctgcccgggctacaggttcaccgccatctgccatcccgtagcccggacagatgcgcagcatcgcctccgggaaatatgccgcgctgttctctgctcccgggggcggcgcaaagcgcccgcccgggctacaggttcaccgccatctgccagccgtagccgggacagatgcgcagcatcgcctccgggtaattatgccgcactgcactttgctcccgggggcggcgccaggcgcctgcccgggctacaggttcaccgccgtctgccagcccgtagccgggacagatgcgcagcatcgcctccgggagattatgccgcactgcactttgctcccgggggcggcgccaggcgcctgcccgggctacaggttcaccaccatctgccatcccgtagcccggacagatgcgcagcatcgcctccgggaaatatgccgcgctgttctctgctcccgggggcggcgcaaagcgcccgcccgggctacaggttcaccgccatctgccagccgtag

SEQ ID NO: 190826 - DNA, 597 bp, Klebsiella oxytoca
ttgactttgctggcgctgagcgccgccacggcggttcacgcggaagaaaaacgttacgtttcagatgaactgaatacctgggtgcgcagcggtccgggcgataactatcgccttgtgggcaccatcaacgccggcgaagaagtcgcagtgctgcaaactaacgacagcactaactatgctcaggtgcgcgacagcagcggccgtaccgcctggatccccttgaaagagctgagcaacgagcccagcctgcgcactcgcgtgccggatctggaaaaccaggtaaaaaccctgaccgataaactgaataacattgataccacctggaaccagcgcacggcggacatgcagaagaaagtcgccggtagcgatgccgtcatcaacggcctgaaagaagagaatcaaaagctgaaaaatgagctggttgtcgcgcagaagaaggtgaacgccgcaaatctgcagcttgatgacaaacagcgcaccattatcatgcagtggtttatgtacggcggcggcgtgctgggcgtcggcctgattctgggactggtgttgccgcacctggtaccgagccgcaagcgcaaagaccgttggatgaactaa

SEQ ID NO: 190827 - DNA, 873 bp, Klebsiella oxytoca; identical to SEQ ID NO: 14470

SEQ ID NO: 190828 - DNA, 432 bp, Klebsiella oxytoca; identical to SEQ ID NO: 14471

SEQ ID NO: 190829 - DNA, 1353 bp, Klebsiella oxytoca; identical to SEQ ID NO: 103805

SEQ ID NO: 190830 - DNA, 1650 bp, Klebsiella oxytoca
atgaaaacagatttacagcataaactcagtcaggcacttctcagaggaaatcctgtcagttccccgttatccgataatgcccacgtcaatccggtgtctgaaatgccgatgatattaacacttgagcaacttcagccaaatccggataacccacgtcagggcagaaacccgcgttatgaggaaatcaagagttccattcgggcacgcggactggacagtgtccctaaagtcaccaaagcaccggggagtgagttttatatcttcagtgacggcggaaatacgcgctatcagatcctctctgagttgtggcaggagacacaggatgagcgtttcttccgccttcatgtgttatttaaaccctggccggggcgtttgcagtgtttgattggccatctggcggagaatgaagtcagaggggagttaacgtttctggaaaaagcacaagggatttgtgtggcgcgttctctgtatgaggaaacgctggggaaaaaattatcactccgggcattcgctcagcgcatgacggcggacggattacctgtcagcatttcacacatcagtaagatggaagatactgtttctgttttattaccttatatgccccgtttactggaaaacgggctgggaagaccccaaattgagcaattattgtccgtgcgttcgacattaaaacgggtagcggattcgtttctttttcagtatgacgggccggatccagcctgtgattttctgggatgttttgaaaggacatgcacagaaatagataaccatgatgtttttgattatgacgtgtttctggatgaactgattggccggctactgagggagtgttctgttgccggtgtggattatgaacgttgggtatttgaattgaaggtcaataaaggcagacgcagcacaaagccggaattgcctgcgccggtggagagtgagggtgatacaacaaccgcgcattcagaaaccgtacctaccggtatgacctccggtttttcggcagaggatttgttaacggagcccctatcttctggttcaggtcaggaggcttcagtatctcctgtcgttgaaaagaaaaaatcccgtccggttgtggagatccagacggatttatacggcggggcacctgtgctgagcggggataccgacgaggcggatattgagcctgtcgatggcggaagtctgtttgtcacgaataacccggagcatgtcacaccggtggaggcgcccgtctccggtcatgcggtgacggcactgacgtgtcaggatctctggccggtggcatcacatctggatgatattgaacatcttcagacgcaaatttaccgtactttgtttgaattagggaatgagctggatttatcttccgcctttatggcggcttccggggtgcattctccgggatttattacgttgtcagcacattcggtgctggggcgtgtgatgacggttttctcagaacctgatgagtcccatgatgatattccggatgccctcagagccctgctgacggggggatatcagcccggtatgtcgccggtattgaatgatacccagtttatgacatggatgaaactgatgtacttgttgcgttgtttgtatgccaaacaaagagatgttgatccggatgtgaatgatgaagaggaatgggaataa

SEQ ID NO: 190831 - DNA, 591 bp, Klebsiella oxytoca; identical to SEQ ID NO: 14474

SEQ ID NO: 190832 - DNA, 285 bp, Klebsiella oxytoca; identical to SEQ ID NO: 14475

SEQ ID NO: 190833 - DNA, 1296 bp, Klebsiella oxytoca; identical to SEQ ID NO: 103801

SEQ ID NO: 190834 - DNA, 519 bp, Klebsiella oxytoca
atgagtgtgccacaaacaaaagctgagctgcttttagctattgataaaagttttagtaaattaattagttacctcaacgcaatcccgccagaaatgacttcagataactcaatggatggacacgccaaaggaacgaagataagtgttcatgaccttgtttcatatctgcttggatggaatgctcttgttgtaaagtggatcacttttgatgctaaaggtctgcctgtcgattttccggaaactggctataaatggaatcaacttagtcttcttgctcaaaaattttactcagattacagtgagttaagttatgaattgttagtagctgaacttcaggctgtaaaaaatgaagttgtgaaacttattgatgagcgtaccgatgatattttgtatggaagactatggtacacaaaatggacgatggggagaatgatctcatttaacacatcttcgccttacgccaacgctaatggaagattaagaaagtgggcaaaaaacaataagatcagtttaaagtaa

SEQ ID NO: 190835 - DNA, 705 bp, Klebsiella oxytoca; identical to SEQ ID NO: 14478

SEQ ID NO: 190836 - DNA, 537 bp, Klebsiella oxytoca
atgaaaaaaagcggattgcttaccttatgcttttctttatggcttttgaccggatgctctgcacaggaaatcgcagaatggaatcagaaaatcagtgacctggggcatcaggtcagtcataccatgaatggtggtatgcagaaacgggaacaacgggagtatgacgtggttatccctgttgatattgatacagccgcagcccgtctgcgccgttattatggttttgaggatgtgaatgccaaaatccgtgctctgcgtcagtcaggtaaagaaagtgatcaatgggccgccacggctattgcagaagaaagccggggctgggaatgggaagtgacgccgggaagttattataaaatgggggcggatatgggaaaacgtaacccgccggcacatatcgtcatcgaactggaaaaaaatggttcgggaacacacatgtatatcacttacagcgcttcgtacagtgataccctgactccggagtttgttcaggaaatatttaaaaccgcgaatgacgttgcagccggaaaaaggaggtag

SEQ ID NO: 190837 - DNA, 2055 bp, Klebsiella oxytoca
atgaaattatttctgtgcgaaaagccgtctcaggccaaagatattgcccgggtgatcggcgctcatcagcggcgggataatttttttcagggaaatggcgttcaggtcgcctgggcaagaggtcatctgctggagcaggctgaaccggaggcttatggcgcacagtttgcggccccctggcggcagagtgccttacccgttattcctgaacagtggaaaatggtggttaaaaaagacgcggtttcgttgtttcagaccataaaacagttgctcagtcaggcgacggaagtggtgattgccacggatgcggacagggaaggggaagtgattgcccgtgaattactggaggcctgtcattaccggaaaaaggtacaacgtttatggttgtctgcactggatgaggcgagtatcaggcaggcattaaataacctgttacccggcgagaaaacggcctctttatattcagcgggattagggcgggccagagcagactggcttatcggtatgaacatgacgcgtctgtttaccctcaaagcccgggaactggggtttggtgggatattgtcggtcggacgtgtccagacgccgacactggccctgattgtccggcgggaaagagaaattacgcactttgtttccaaacccttctggcgggtgaccgcctcgttgcagcatcaggggatcatttttcaggctcactggcgacctgcctcgcagtattgtgatgatgaacatcgttgtattcacgttcaggccgctcaggccgtagagcaactgtgccggcaggcagggaaagcgacggtgtgtacagtgaatgaaacgaaaggaaaagccttgccgccgttgccgtttgatctcgggacacttcagcaggcggcctcaaggcgttgggggtattctgcggataaagtgcttgaaatcgcgcaaagtctgtatgaaaaacataaggccaccacgtatccccggacggactgcgggtatctgccggtgtccatgcgtgccgacataccggttgttttagatgcattatcacaaagcgatccggccttacagaatgtgctggcacaattgcagccggcgcgaatttcccgggtctggaatgatgcaaaaattacggctcaccatgcgattataccgacccggcagacacctgatttgaacgccatgaatgaggctgaactgaatgtctataaacttatccgtgcccattatctggcgcagtttttgccggatcaggaatgggatgcaacagaggtgtttttagatataggcggacaacaatttgttgccaaagggaaagtcgaaagagtgaagggctggtctgtattatttgtgaaacatgaagacgatccgccagtaaaagaagaggcagaaaccgggctggaagccggaacagaaacattgccgtcccttcacgaaggtgaattctgtgtggtacaggaggcaaaggttgtacaactggcgacctcaccaccgaaaccgtatacggatggtacattgattgcggccatgaagaatgcgtcctcctttattaccgatccgacattaaaaaaagtcctgaaagagaatgcggggctggggacagaggcaacctgggcagggatcatcaccacgctggaaaacaggaaattgattgtcaggcagaaaaaaacactccgggcgacagacaccggttgtcagctgattgatgccctgccggcagcctgtacagatccgggaatgacggcgttatgggaacaatcactcgagcaggttgcacagggaaatctgtctctggatgtgtttatgcaaaagcaaatcagctggttggcacatctcattaaaaaaggcggggaaatgccgctggcgctggatctgccaccgatgccatcctgcccgtcgtgtcatggaaagatggtcttacgggagagcagtaaaggccgtttctggagttgtcagcgttatccggattgtaaagggagtgtaccattaccggaaaaaatgcagggggttacccgggggatgaataaaagaaagaaggccgtgaagaagagcataacaggactctttacctga

SEQ ID NO: 190838 - DNA, 468 bp, Klebsiella oxytoca; identical to SEQ ID NO: 103796

SEQ ID NO: 190839 - DNA, 924 bp, Klebsiella oxytoca; identical to SEQ ID NO: 103795

SEQ ID NO: 190840 - DNA, 333 bp, Klebsiella oxytoca
gtgtctgatgacagcgccgctgacagccacacagtctgtttccggggggcagattggcagattgaggcggggaaatcggctaagagtcagactcagtcattgcagtatgaggcgcaggaatggggactgagtgcggaggagtatgcccgttttgaagcgctgatgaaagggtggcgcggtattcagtctctcggcctggatcctctgacgacactgggcattgaggcccggtcagatgaggagcgctgtcggctggctgaaaagtgggtacagcaggaatttgcctgggcagaaaaagagctggcgtttcagcgggaagtggatgcagcctag

SEQ ID NO: 190841 - DNA, 312 bp, Klebsiella oxytoca; identical to SEQ ID NO: 16660

SEQ ID NO: 190842 - DNA, 285 bp, Klebsiella oxytoca
gtgagaatagagcggcgcagtaaaggtcatctcctgctgacgctcaggcgtgatcgtcaggttggcggcaataatatcccctttacctgcgttaagcgcgctgacgagctggtcacgggccaccggaacaaagatgatccgcactttaaggtgacgatgcttgagctttttctctttcgccaggctttgattgagactgcgttcaaactccataaatatatcgtgagtcgcgccgcgctgggtgcctttattgataaagaaaaaagttttgctgaagggggttaa

SEQ ID NO: 190843 - DNA, 735 bp, Klebsiella oxytoca; identical to SEQ ID NO: 181818

SEQ ID NO: 190844 - DNA, 549 bp, Klebsiella oxytoca
gtgattcccggcctgaactgggagccgaagaaccagctgaccagcctgaaacaggtggaagaggcactggaccgccttatttccagccacggagagtcttacccactgccactttccactgatgtacaggctgaactgttcccggaggtgatgcacatgcgctcagatcgccggatgcagcgcgagaaacttgcttccaaccgcaaaatgcgccgggaggaaaaagtgctggagcgtgcctggatgttgcggcagaacttgctgggacaggccttgacggagcttaattttcagtcgccggaaaccattaacaccttgtatacgcgttgggctgacgagtttgacgcgcgggtgctggcacaggggttctggcagtggtggacgcggtttgcctcgctgatatcgctgggctggctgcgcgacagcaatgagccactgtacaacgtgatgtatgaaatccggttcaacgtccgggacaccccggcacatttacgcgaggccgaacgctggaaggtacccaacaagctgacggaccggagccggggatga

SEQ ID NO: 190845 - DNA, 405 bp, Klebsiella oxytoca
atgaagaggcgctattcgctgcgctggaaggttccgcacagaccgtgtccgggtccgcatgaactggtatcggaagtggtgggggccgggcagcccgctcctgaatcggtgatggcccgctgggtggccggtgccaggtatgcagtgtgtgtggatttcctgatgagagacagatcaggagctggagcgatgaacggaaagcggctgcccgcagaggaaatctggagcgccgcgttaatcggattgcgccactgtttgctgatgaacttatcgagcgggaactggaaacccgaccggagtattttcgcggtaaatcagcccgataagggctggaatcctggtcagacagtgacggtgtgcggtattatagcggtggcgcttgaggctttttgcctcatgacgtga

SEQ ID NO: 190846 - DNA, 213 bp, Klebsiella oxytoca
atgcctagacaacatcaggatagcctcttagatgccgcaaggcaaggagaagaaggccatgaaactaccgcgaaacactctgctcgggtgcgtattaatagtgtgtctcacactgctgatattcacttacctgacccggaagtcactctgcgaaatccggtacagagatacgaacagggaggtggcggcttttatggcttacgaatccgctaa

SEQ ID NO: 190847 - DNA, 804 bp, Klebsiella oxytoca
gtgcatccgagtgggttttacgcctggcttaagcagccacattcacgacggtttcatgctgacctgaagctgacgggacatattaagcagttctggctggagtcgggctgtgtttatggctatcgcaagatctatctcgatctgcgggattccgggcaacaatgcggtgtaaacaaagtctggcggttgatgcaacgtgtggggataaaggctcaggtcggataccgaagtccacgggcgcgtaaaggtgaagccagtattgtgacgcccaacaagctccagcggcagttcaacccggaagcaccggatgaacgttgggttacggacataacctacatccgaacccacgaaggctggttgtatctggccgtggtggttgacctgttctcccgaaaagttatcggctggtcaatgcaaccccgaatgacaaaagagattgtcctgaacgcattacttatggcggtgtggaggcgtaatcctcaaaagcaggtactggttcactctgatcagggcagtcagtacacgagccatgagtggcagtcgttcctgaaatcacacgctctggaaggcagcatgagccgtcgcggaaactgccacgacaatgcggttgcggaaagctttttccagctactgaagcgcgaacggattaagaaaaagatctacggaactagagacgaagccagaagcgatatttttgattacatcgaaatgttttataacagtaagcgtcggcatggttcgagcgagcagatgccaccagttgaatatgaaaacctatattatcaacgactcagaagtgtctag

SEQ ID NO: 190848 - DNA, 1053 bp, Klebsiella oxytoca
atgttgagaatagctaaaaaatactgttacctgactggcttgctgtcaggtatggttttatttatttctggtaattcagagacgcaggcggcatgtgttatttacggcactcccggaccagcgacgcaaacatattccctgccgtttaatcgtatgtctcctaacgtgcacaacgataatgttttgttaagcgtgacaaaatatatgaagccgacgggggtaagatgcacatcacgcccaacatactgggtccataagatagaaaacacaacaggagcaacaggaatttttgtcggtgactctccagtttataaaacgaatatagaggggctgggggtttattttaatggcatgaaagcaaacggcatggaaataacttctacaatacaaaatgatgctgttgttgtacccactattgacatgagactgataaagttaagcaactccacgctaagcggggttttagatgcttcaacattacccactattagtgtttacgcaacggagtccagtactggtgcatttaacagtagcgcagtacagttaacaaagctttcaatgagtgggattataaactacgttgtccccagttgcagtgcagaaaataaagaggtctggttaggtgaatttaacactgcaacctttaccggaagctcgacaacaccatgggtggatgccagtgttgtcatgacctgtgacagggcatttaataatgcttatagcagtgttaaagaaaactatgttactggcactgtctcaacctcgacacgtcccgaccacttttattcagtctcgctggaatcggttaatggattcactgatagtgcgcgtggaattatggaaattgatagcggtggagccaccggtgtaggcattcagatttcccgaacccagtcagaacaggcctggtcggctatgaactggatcgatgaacataagtccacaaccaatacatttaaaattcctctctacgcccgtttagtgcagacaggcagtaccgtaacttcgggtcagacgaacagtaaacttatttataccgtccagtataagtaa

SEQ ID NO: 190849 - DNA, 567 bp, Klebsiella oxytoca
ttggagatagttcttctccggtcagagtcaccaactcggttccggaatgtattaaaacccgatctcaccagtcgggtttttttacgccctcagtatcctatcgtctggcgtatccagccgttctcagccgtaaaatccctgaatgtcccttttcccgcgatactgacgcggcggctcagcagctgccagcgccggaacgtggcctacattgctttgataaagctcaaccctgtcaacccaacaaaaacgaaggcgaatgagactgaacgtaacggaaaagtgttgtggttgatgacgacagagaagtactggagtgagtgtttattaaaggccgggaaggggggtcccgtccttagttacgtttccggaactatcagcgcgtttgcacacgcgattacggcccgaagaacgatgattaacaggttaaccatccgtttctccagattaactggaagaaatcaccgttgcttactcatacactgcctgtcacaacggatctctcaatgtcagttgaaaagtgacttcttcctgccagagcaccgaacgcagcaccacctgtttgtttag

SEQ ID NO: 190850 - DNA, 192 bp, Klebsiella oxytoca
atgcaacctgacatcatacagacctctgatataatcggcctgttagctctgcatagtgtctttcctgccctaccccgtaaacatgcgggtatgaacgaattaaagtcctggctaaacaaacaggtggtgctgcgttcggtgctctggcaggaagaagtcacttttcaactgacattgagagatccgttgtga

SEQ ID NO: 190851 - DNA, 1071 bp, Klebsiella oxytoca; identical to SEQ ID NO: 14536

SEQ ID NO: 190852 - DNA, 1593 bp, Klebsiella oxytoca; identical to SEQ ID NO: 103751

SEQ ID NO: 190853 - DNA, 327 bp, Klebsiella oxytoca; identical to SEQ ID NO: 103752

SEQ ID NO: 190854 - DNA, 1002 bp, Klebsiella oxytoca
atgccaaactggtgctcgaaccgacttgacatcaccttacacaacgcggcggatatgccggctcttaaacactggatatatgcggatgatgggatacccgcctggcagacggcgatagcacaaagtctgcatttgttgctggccggctgcgcgaggatactgaaaccggtcagaccgctgtcttttccgccgttaccggaactgacttcatacggtgcaaccgggcctgtttccccgggaaacacggctttcacgcactgggttgacctgctgatgactgcaccggatttgacaccgtcatgttgtcagcaaatccatcagtggtatcagatgtggttatctgaaggcggggcgtaccattcctgggactcgctgacggcgacgcagaaagcgagactgtccccgttgttatcgggaagcagttttgactggcttaaccggtttaccggagaggatgagagccgggtggcgacagcctgggaggatattcagtaccttcgcagtaccggagaagccataccgatggatatgcggactctgttaccgaccagccttgcggctgaattacacggttttaacggctgtttatggaaaacaccggaggtcatctggcggcaggcgcgctggcaggcgtttgcccccggtaacagtacatatcacctttatcagtgccgttatggtgtgaaatggccgaacggcagtggttttcactgtattgatggcgggtatgcgacggagttatccgcagagtttgatactccgtgggggccgccgtcagcagcggttttgtgtgctctgtctgcgcgtttccgctgtcaggtccgtcatgtctatgccgaagaaggctgtggtttctgcggatacagcgagtatgaccatggccggttaaccgaccatgaatctgatgagattgagttcagtgatgaagagaatgaggacggtttccaggatgtgacgggaccggactatattcttgattcattgccacattacggagggtga

SEQ ID NO: 190855 - DNA, 300 bp, Klebsiella oxytoca; identical to SEQ ID NO: 103754

SEQ ID NO: 190856 - DNA, 975 bp, Klebsiella oxytoca
atgaaaaaatctgaccgtaaacgccgtccggcagcggataagccggttcgcgatatttatcaggaagtgactgaccgtattgtggccgcgctggaaaaaggcacccgtccgtggaaacgaccatggcggccgtcggaagggacaggcaccggttttccggtgaacgccctgaccggtcattcctaccaggggataaatgtgctgctgttatggttgtcggcggcggagcagggctttggttacgatatctggctgacttaccgtcaggcacagcaactgggtggccatgtccgtaaaggcgaaatggcgacgaatactgtgatattcaaaccggtgaaggtgccggcaaaagaccgtcacggtgagctgctgcgggatgaacacggtgaggtggtgatgacggaggtgccgatgataaaggcgaatccgttatttaacatagcccagtgtgatgacctgccggcgcatttttacgaaaaccggcgactacccggagaggagacagcagggataaccctgccggccacgcaccgggtgctggatatcctgaatgctagcggcgtgaaggtgaccagtgcggcgcagaaccgggcgtattacagtccgtcacaggaccggattgtgatgccgctgtcgtcacagtttgaccggaatgccgattaccaggccaccttactgcatgagttggtgcacagtaccggtcatccgtccaggctggcccgtgaaggcatcacctcatcgtccctgaagtttggtgacccgctgtacagttttgaggagctggttgcggaaatgggcagcgcttttctttgtgcgcagttaagcgtcgagggagaagtgaaccatgaaagctatcttgacagctggctgcgggtactgaaatcggacaaaaaagcgttgttccgggccgccgggcaggcccgccaggcctgtgagtttttactgaatgtggccgcatcccgacaggccgcgtag

SEQ ID NO: 190857 - DNA, 648 bp, Klebsiella oxytoca; identical to SEQ ID NO: 103756

SEQ ID NO: 190858 - DNA, 513 bp, Klebsiella oxytoca; identical to SEQ ID NO: 103757

SEQ ID NO: 190859 - DNA, 357 bp, Klebsiella oxytoca; identical to SEQ ID NO: 103758

SEQ ID NO: 190860 - DNA, 423 bp, Klebsiella oxytoca; identical to SEQ ID NO: 103759

SEQ ID NO: 190861 - DNA, 318 bp, Klebsiella oxytoca; identical to SEQ ID NO: 103760

SEQ ID NO: 190862 - DNA, 363 bp, Klebsiella oxytoca; identical to SEQ ID NO: 14547

SEQ ID NO: 190863 - DNA, 195 bp, Klebsiella oxytoca
atgacagaactccgttcgtccttgaaatcgacggagggtgataacagaatagcgttatcatcaggattatttttacgcaacgcttcatataacctgcccgctgacggggaaatcacccgtcatcagggaatttctccgttttttcaggagaaattcaatgaaggtatctacatttccggaatcgtctttttttga

SEQ ID NO: 190864 - DNA, 612 bp, Klebsiella oxytoca; identical to SEQ ID NO: 14549

SEQ ID NO: 190865 - DNA, 909 bp, Klebsiella oxytoca; identical to SEQ ID NO: 103764

SEQ ID NO: 190866 - DNA, 408 bp, Klebsiella oxytoca; identical to SEQ ID NO: 16655

SEQ ID NO: 190867 - DNA, 1515 bp, Klebsiella oxytoca
atgatgacaaacagttatctcgagtattttctcacgctgctggcctgggtggtgaataacggattgtggtcggtactgaccagcaccgggctgtttgcgctgccgctggtctttaaagtgctggagatctggctgaaagtgcgggaagagggggaggatgagggtaacaaaggttcactggcaattgtgcgtatcgagaacgcgctttacggcgcctttgtggtgatcctgttttgttgtgtgccgttgatggaggtgagtgtcagtaccctgcaatttgataccagccggaccaaaacctgcggcacctggaccccggtgaagccggcggaatccggttacagcggcgtggtgtcgtcactggataatcagacagccaaaatcccgctgtggtggatgctggtacataagctgtcgaaaggggtgactcaggcggcggtggccagcattccgtgccggccggatttgcgtcaggtgcgttttgaggtgcagcacagcaacattaaaaatccggcgctggctgccgcacttcaggattttacggatgactgttactcacgtgccctgtatgactggaaagcgaaagatcagggaaaaacacaggatgaaaaaacgttacaggatatcacctggataggctcggccacctttatgaaaggggaatatcatcagatccagtcacggacaccgcgggcgggctttccctgggatgccgaccgggatgacgggtatgcgaatgtcaacggcaacggttacccgacctgttatcagtggtggaatgatgcgaatgcagggttactgaaacttgtcaaagagcagaccgatgaagggatgtggctgcgtgcccgggcggcgatgaagctgattaataaaaactcgaaagagtttgaggaggccatcgtccgccggctggtgagtccggcgaatctggatgtctccggcggccgggtataccggggatacgggggtaatgcggatatgacggtgatgaatgagctggccagaatgggaggggtagccgggacttcgctggcgtcactgggggcattccctgcctttgatacgatgcgacagtccttaccgatggtgcaggggctgatgttaatggcggtgtatatcatgatcccgatggtgctgatgttttcggcgtatgaatttaagacggcgataacggtgacgtttgtgatatttgcgctgaactttctgacattctggtgggagctggcacgctggatagacagctggatgatggaggcactgtataattccgatacgcacagtcagtggaatatgaacgggcttcagaacacgtctgatgatgtcattatgaacctggtaatgggaacgatgtttttggtgttgccggcgttgtggttgacagcatttggttgggctggagctaaagttgggtccgagctaggtaatatgacatctaacgcgacttcacctgcgcatagtgcgggggggaaaggaggacagttagcagaacaagctatttctaaaaaagttaactaa

SEQ ID NO: 190868 - DNA, 339 bp, Klebsiella oxytoca; identical to SEQ ID NO: 103768

SEQ ID NO: 190869 - DNA, 1443 bp, Klebsiella oxytoca
atgatgaaagcaaaacgacacacgttttttccgccggcgctgacactgatggtgttatgcagtgtaccggcattttctgtccgggccgggctggatttttctgccggtgcgaatgatatcggctacggcgcaaatgtttccggcgcggtctccgacaaactgtactacaacctgggcggcggcacggtgttatcccagccgccggggcgcagtaatctgcaacgtctggggatgagcatgggctggaacagtgatctgatgtgcggcaattttgatatcaaaaccacggtgggcaaccagctgaacggggtgacggccggctttaagaatctgatgagtgaggtgatccagaatgccaccggggcggtggccagtctgccggcgatggctatccagcgggcgaatcccggcctgtatgaaatgctgaccaacggggtgttgcaggctaatgtggcgtttgataaggcgcagctgaactgtcagaacatggctaaacggatgatggacttttcagaaaataatcagtggacgcaggcggcgatcctcgaagaagcaaagaatatcatcaataacagtgacggggatgcggtaaaaactgaccagcaaattcagcaaagcagtggcgataaaggggttgtatggataggcgggaaacagcgcggtggggttggtcagcctgcgattcagccggcgcaggattttgcacaggccggctttaatatcatgaacggtctgccggcaaccagtacggccccggtgccggccggccagtgtaacggagccgcttgcaggcgctttgccaacagtgaggaagccgctcaggtggtcacacaggtgctgggcagcaaatcggtccgcacctgcaccaatccggcggattgtcagagcggcggtgaggcggagcaaccgggcagttcccagccaggaaccgggctggcaccggtgctggagaccaccacccgggaaaatttggaacagctgcataaactggtgaacagccggggcgcggtcggggcggcagagttggcgaaactgaaaaccggcagcctgacggtctcccggggggtgattgaagcgctgcgccgggatccggataaaacggcattaacacagcgtctggccggtgagctggcgatggcggacacgatggagctggcgctgacgatgcgccggatgctgatcaccggccagggggagccgaatgccggtaattttccgaaagcccaggagatcggtaaccagtcggttgaccagctggatcgcgaaatcgggatgctgcaaacggaaatggaagtgcgtaaatccattgccaataacgcgatgctgacggtgattgagcgtgatcagcaacggacacaggcgaaccctgccacccagaccccagataatacggatgtgcgtgtacagggactggagcaaaacagtgacaccggaggacgttaa

SEQ ID NO: 190870 - DNA, 975 bp, Klebsiella oxytoca; identical to SEQ ID NO: 103770

SEQ ID NO: 190871 - DNA, 441 bp, Klebsiella oxytoca; identical to SEQ ID NO: 103771

SEQ ID NO: 190872 - DNA, 2226 bp, Klebsiella oxytoca
atgaaaacgacgggagttaaagtaacgcttttgtcgctggttgtcagttattcctgcgctttacaggccaaaaacgtgtcactgggggacacggccgtggccacggggcagcacagtacggctgtcggtgagggcagtatggcgctggggaacaatatgacggcggaacaggcgcaggcggcgatgaaagcccagaatgccctgttgcagaacagggcgcaggcgcatgagcagtacatgcagacgcaggccctgtttgacagtaaatcgctggcgaacagcaatattctggagcgtcaggaagcgatgaaaccgttgttgcagcaacaggagaccctggcgggtcagcgtaccgcgcaacagcagcaggtgacacaggcacagcaggtcgctgaccggatggcacagatttatgaacgcaatctgggggcggtttcacagattgtggatgagaattttgtggcgttgtggcagcaggggcaggctgaccgtctggctcaggaagtgaaaaaacgggttgagcaggatacgtcggtcagtaatgacacgcagttttatgtcagttatgttaatgcctatattgaagcgaaaaccagaagtgctctggttaatgaaaccatcaaagagaaaaccggttctcagattacgaccaactatcagggtgtggccctgtccccggtactgagtgccggccacagtgataaagcgatgctgtggtcggatgcggtcacggacagcgagcagaagaaacaattatcccgtttacacctgaataccgcggccctgaagggcgttgccggttatcaggaagagctggccaaaatcgccctgatcacctctgcggacgggaaaaagaatctgtatcaggcttatcagaaaaatgcccggcagcaaattgagcaggggctcaccggggtgacagaggccgggaagcagatcctgtcagagctgtatctggataacatcgatgaaggcacctttaatcagatggtcagcggtattttcacccgctatgagaatcagctgaactacctgatccagctggataaggtcaacagtttatcgccggacagcccggattatgccaaagagttacagcaactgctggtactggaaagccgtccccgggataacaccgtcgggctgaataccaacccggaggcgctgaaacaaaaagtggatcagtaccttcaggacaatgcgctcagtcacacacaggccatgtcgtcacaggccacacagctgaaacagcagttatcggcggaaaaagccgtcaccgatcaggcactgaagcaggcagaaacgcaactctcccggctggaaaaggatctctccgcgctggatacaaagttgtctgatttgcgtccgacgcaatccgagctggaaaacatccgggatctggagaaggtgaaagccgaactggcgcagaaacaggcggaatatcaggcggcggataaagccctgaatgaggcgcagagtacgctgagtcagggtaaacaggctgttgcggtcggggataagagtctggcgctgggcgaaaaatccgtggcactgggtgtggatgcccgggcgctggcgaaaaacagtgtggcactgggggacggcagcctggctgaccgggataacagcgtgtccgtcggccgtgaaggtcaggaacgttttctgacgcatgtggcggccggcattgcaaaaacggatgcggtcaacaaagggcaactggatgaggagcgggatgcgcgtattgccggcgataagcagacgctgaaacaggccatggactacaccgatgtgagcattcagtacagtgaggcgaagataaacaagcggattacggaagagcagcaggcccgtattgagggggaggaacagaccctggcggccgcaaaccgctataccgatgagacgttcgggcaggtgacccacacggtgctggacaatgcccggcagtataccgaccagcgtttcagtcagctggacaataaaatcagtcaggtggagaaacgggccaatgcggggattgccggggtgaccgcaatatcttccattccgtatgtgaacagtgagcgtttttcgttcgggatggcgatggggcattaccgtgatgcacaggcgatagccaccggggtgcagtataagccgacggccaataccaatgtgcgcctgaatgcgtcatggaataacggcggcgataccagtatcggcgccgggtttgcggtgggctggtaa

SEQ ID NO: 190873 - DNA, 2868 bp, Klebsiella oxytoca
atgggattttcattattccgctcacgccggaaagcgcaggcggtttctgctgaaaaaacggatgaaaacaaggctgacaaaaccgtacaccgcagtacaccggcagagaatgccggtttaggccgtcagccgctttcccggccgggaaaaatgacccgggcggatgagcagaagatttaccatgcgaatccgtcctttattgattacctgccctgggtggaatttctggatgaggagcaatgcctgctgcttgatgacggggtgtcggtcggggcggtgtatgccgttgagccggcgccgacggaagggcgctctgccggccgtctgctcgaaatccgggatgcggtggaggatgcgcttcaggacagtctggatgagcatgatgataacccgtgggtggtgcagtttttttgtcaggatgaggacgacgtgagcgtcacactggccacattgcgggactatatcctgccggcggcccggggcaccgcgtttaccgaagcctggctgaccgaaatggcgcgtcatttacgggggattgcccgtccggaagggctgtttaaggacacggaggtgaccggacaaccctggcgcggacagcagcgccggacccggatggtggtttaccgccggctggggaacagctataccgatccgatgccgccggtggcgatgctcaatcagatgtgtgaccggctggtcagcagtctgggcagtgccggcgtgcagtgtgtccgccaggacgggaggcaggtgcatcagtggctgctgcgtcatttcaatccggcccctgactgggtggaccgggagacgctgtaccgggaaggggcgtactggccggcggcggaggaagccccgggcaccctgccggtgctgaaggattttgcggaaacgctgtggtttaccccgccccggtcggatgtggaaaacggcgtgtggtggtttgataacctggcgcacggtgtggtgaatatcgaaaaactgcgtaaagccccggggccggggcacctgaccggggagcagaagcgcggtgacaaaaatatcaatgcgctgatggacctgtttccggaagggacgatgctgtcgatgaccatcgtcacacagcctcaggatacgctggagcaggaatttacccggctggggaaaaactcggtgggggaaaacaccgactcgcaacgtacccgccgggacgtggaaaccgccagaggtttactggggcaccgccataagctttaccgggcctccctgtcattgctgctgcgtgccggctcggtggaggaactgaacaaaaagcgcgtggatctgacggccacgctgctgaatgccggtctggagccggtgaagccggaatatgatgtggcgccgctgaacgggtatctgcgtgccctgccgatgtgttttgacccgcagacggataaaaaacactggtatacccggctgacctgggtacagcacctggccggattactgccggtgaccgggcgcaccagcggcaccgggcatcccggctggagtttctttaaccggggcggcggggtgctgacctttgatccgcagaataaacaggatcgtacccagaatgcgcatctgctgttattcggtcccaccggggccggtaaatccgccaccttatgcgcacagttatcgcagctgatggcggtccgccgtccgcgtctgtttattgcggaggccggtaactcctttggtttactggcggactattacgccagtctggggctgagtgtcaataaggtcagtgtcaagcccggcagcggggtgcgtctgccgctgtttgcggatgcgcatcagctgctgatgatggatgaacagcgtctggcactgaatgcggatgaactgccagagacggacagtgaatctgaggatgatgacgggcagcgtgacattctgggggaaatggaaatctccgcccgcatgatgatcaccggcggggatgtgcgggaagaagcggagctgaagcgggctgaccgggcgatgatccgccgggcgctgatggcgggggcccgggcgtcttatgccgccgaccggcagatgctgccggcggatttgcaggaggcgctgtatgccctctcccggggggaaggtgaagaggaagggcgggcattaaatccgcagcgccgggcgaaagcggccgaaatggcggaatccctggggatgtttaccgaaccgggcagttttgagcatgagctgtttaatctgccgggggagctgtggccggaggcggatgtgaccctgattgatttggggcacctggcgcgggaagggtatgaggcccagatggcgctgacgatggtgagtcttatcaactccatcaacaatattgccgagcgggatcagtaccgggcccgggacattaattttgtggtggatgaggcgcatatcgtgacggtcaacccgctgttatccccctatgtgaccaaagtggtgaaaatgtggcggaaactgggggcctggctgtggctggcgacccagaacctcgatgactatccggactgtgccgagaaaatgctcaatatggcggagtggtgggtgtgtctgacgatgccgcagaaagaggtggaggcaatcgcccgctttaagacgctcagtgaggagcagaaacaggtgctgctgtccgcagccaaactctccggctgttacacggaaggggtggtgctggcgcggaaagtggaggcgctgttccgggtggtacagccgagcttatatctggcgctggggatgacggaaaaagaggagaagcagcaacggcgggtgctgatggagcaatacggatgcagtgagctggaagcggcgttcagggtggcagatgaacttgaccggaaacgggggttaccgccccgggtgccgggatga

SEQ ID NO: 190874 - DNA, 438 bp, Klebsiella oxytoca; identical to SEQ ID NO: 14572

SEQ ID NO: 190875 - DNA, 486 bp, Klebsiella oxytoca; identical to SEQ ID NO: 103775

SEQ ID NO: 190876 - DNA, 1497 bp, Klebsiella oxytoca
atgaaagtgaaatccaatacgctggtcaaaattctggtgccgtccgcactggcgttggcggtgctgattggtatcaaaagctgccagcccgacacgccggtcaccggcagcggacaggacaacctgtctcagtcaatcaatgaccttgacccaggggagctgaagtcactcgggattgagggggataccccggccgatacactgaggacgctgattggcactatgaaaacggtacgtgaccgtcaggcggaattgatcgcccagaatgagaaattgctggaagagaatgcgcagctgcgtaaccggcagcagaatgtgtcggggcagatccagtctgcggtggcttccgtccgtcaggaagcggagagtcagcagcgtgccctgcaacaggagcagcagacactgatgcggcgtctggatagcctgggggaaacgctgacagcatcaggtggtcagccggctcagggcagcggacaaggcgatattccgctgggactggggctggataccgggggcagcggactgacggtgaaagacgggttgctgtgggctgagccgcaggatgcacaaccggctgaaccggggcggatggtgaacggacaaccggctaaaccggcgtttccgacctcttttctggaggataacgccattacccgtcagaaagcggaactggaccgggtggccaaaaatcagcgcacgctctccggtacagtggacggtgaggcccataccgaaccggcgtacacgataccggagaatgccaccctggtgggcagccaggcgatgacggcgttgctggggcgggtgcccattgacggtaaagtgaccgatccgtatccgttcaaggtggtggtgggaaaagacaacctcacggcgaacggcattgagttaccggatgtggaaggggcggtgatcagcggctcggccaccggtgactggacattgtcctgtgtgcgcggggatatcacctcgatcacctttgtttttacggacggcacgatccgcacggtgccgaagccggctgaccggacggacggcggcagtcaggccaacagcggacagaatgcccgtaataacggcgggtcgctcggctggatttcagatgagagcgggatcccgtgtatcagcggtgaacgtaaaaccaatgccggcacctatctgccgaccctgtttgccctgacggcagcggcctcggccggggatgcgatgtcgcagagtcagtataccgcgcagaacaacgggtacggtatcacctcctcgctctccggggatgcggggaaagcggcgctgggcagtgccatcggcggcgggtttaaggatgtggcggactgggtgaaatcccgctacgggcagacctttgatgcggtgtatgtgccgccggggcagaaagtcgcggtgcatatcagccgtcagatcccggtggattatgaatcgcagggacgccgggtgaattacggtttttcactgacagagggtgaggaaggaggtctggagtga

SEQ ID NO: 190877 - DNA, 897 bp, Klebsiella oxytoca
atgagcataaaacgtcatctgacggcctgtgctctggggatttcggcggtgttttctgtggccgctctgccgctgccggtgcaggcggtagagctggtccgctgggagcgtattccgttaccggtttctctgcatgtgggggaagagcgcattgtgtttgtggaaaaaaatgtgcgtgtcggttttccaccgtctctgaatgagaaactgcggatccagagtaccggaggggcggtgtacctgcgggcggaaagcgccttcccgcagacccgccttcagttacaggatgtggaaagcggggaaatcctgttgctggatgtgacggccactgccggtaaagggaagctggagccggtgcgggtggtgtacagcggtgaagtcagtacgcagcgtgacagtcagagcgtcagacgcagcgggcaggctgcgggggcagcagccgatgccgtaccggaaagcgtggaccgcaaagcgaaaacccgttatccggcgccgttaccggtcttactgacccgttatgccgcccagagtctgtatgcaccgttaagaacagtggagccggtgtccggcgtacaacctttgccactgaccttaccaaaaacactgacagcactctacccgtctgaaccactgatcgcgcggccgctggccggctggcaggcggcggagtaccgggtggtggcggtgaaactgaccaatcagtccgctcagaaagtcgtgctggatccccgtcagttgcaggggcagtttgtcagcgccacgttccagcatcagtggctggacgcgaagggcacaccggaggataccaccacagtgtatctggtgatgaaaggcaaaccggataaggcgtttcctgcggagccgcctgtccggaggacgggagggaaagcccgatga

SEQ ID NO: 190878 - DNA, 645 bp, Klebsiella oxytoca; identical to SEQ ID NO: 103778

SEQ ID NO: 190879 - DNA, 417 bp, Klebsiella oxytoca; identical to SEQ ID NO: 14567

SEQ ID NO: 190880 - DNA, 369 bp, Klebsiella oxytoca; identical to SEQ ID NO: 103780

SEQ ID NO: 190881 - DNA, 240 bp, Klebsiella oxytoca
atgaatccgtcacagcaggcggcatttgaggctgctgccggctcggggatgtctccggctgttctgaatctgttgtgtatcggggcattactggcggtgctgtttttatgggcagcctggggactggttgatgtttaccggggctgggcaaatgaaaatgttcgtactgcaagggtggggcagtttgctgtccggtcagtgatattactggtggtctgcatctggatgtttgccagttga

SEQ ID NO: 190882 - DNA, 327 bp, Klebsiella oxytoca; identical to SEQ ID NO: 14564

SEQ ID NO: 190883 - DNA, 609 bp, Klebsiella oxytoca
atgagtcagaccatcacccgaaaaactgggcattttgcctggtgtgcactggttgccctgcatctggcccgcagggaggggctggtgcagtccgacatgcagaaaaacctgtttttaatacgctggctggcaaccgccaaaaagcaacgccgttttgaccgtgacgttacgccggatattgactggctgcttcaacagggacgtacactggggagccgggccaaactgccacaaaaactggattatctgtaccgctcctgtacaggcgcattacacgagcagagcgatctgttccggctcacttatgcgcttgaatcggccaaggaggcaggctttgcctatcagttattgagtgataaatcgtggcacagacgacatgcggtgagcccgggtacgctcagcaacaccatctgtttatccaaaaatgcactggagcaggcttttgatactgacggtcatcagaccgcacacctacctgtaaaaatcggaggtgatatcgccgcactagctgaactgctgacacaatgtggctggcaactcatcacgacagacaacccgccactttatttactgctcacactcatcaatccatcaatcagcgcaggataa

SEQ ID NO: 190884 - DNA, 750 bp, Klebsiella oxytoca; identical to SEQ ID NO: 14562

SEQ ID NO: 190885 - DNA, 2148 bp, Klebsiella oxytoca; identical to SEQ ID NO: 103785

SEQ ID NO: 190886 - DNA, 555 bp, Klebsiella oxytoca; identical to SEQ ID NO: 103787

SEQ ID NO: 190887 - DNA, 639 bp, Klebsiella oxytoca; identical to SEQ ID NO: 14558

SEQ ID NO: 190888 - DNA, 735 bp, Klebsiella oxytoca; identical to SEQ ID NO: 103789

SEQ ID NO: 190889 - DNA, 741 bp, Klebsiella oxytoca
atgactcattctgaagaattgtccgtaaccccattacataaaaaaatttaccggggggtgattgtgacgggcgtggtcgcctgtgctctggtggccggtatcccgctgtttatccacagtaatgttatcagttcacactcagaggctctgtcacaactcggacaacgattacaggcgattgagatgaagatggctgactctgtcacggatgaccggatgaatgcgcaactggacgtgctccgtcaggggctgacgacgctaaaacaggatgtggcatcacagcgcgacaccctcagaacggtgacagcacagctggcggtggccggcaaaccggatgaacagatcgccgtactgtctgacgggctggaaaaacggctggcacaactggaaacccgccaggcacagtgggcactggcgttacatcagttgcaggaacagcgtcagccggaacaaaaaacggtcaatcccccggttgtcagggcaaaacccgccacgccggaaacttcccgtctcggggcttctgtccgtccatcccggaccgtgccgtttcagttaaccgcgattgaacagcggggcggtcgtcttcttgccgcactggctcctgcggatattcgtcagctggggcaggtacagttactgccggtaggcggacgttatcagggctgggaaatgaccgacattcagactgatcgtgtgacattacgttatcaggggcgcacagtgacgttgcgcctgccataa

SEQ ID NO: 190890 - DNA, 663 bp, Klebsiella oxytoca
atgcgtatgaaaactctcccgatatgtcttgccctgacctcactgttgttggggggctgtgcagacaagccagcccagcctacggaagcggcggcagacatcgcgattccgctcaacgtcggttatgctcagccgctgctcccagatatttatccgtcagccccggaagtggtgcgttatgaccgttaccggctggttgatatttcgccttcacaggcacagcgttacccgctggaacaaattgttcatctgcgtattcctgcttccgtctccccgacagtcggggatgcgctacattatgccctgcgtgattccggatatcgtctgtgcacgtccgatggacaggcgaaccacctttatcgtctgccgttacccgctgttcattatcagatgggatcgatccgcctgaatgtggcgttacagatccttgtcggtccggcctggcagttgtgggtggatgatgtgcaacgggaagtgtgttaccgacttcgtccggaatacacgccatctgcgccggatgcaggaatgagcggcgcttcatccgtctctgtggtcaccccactttctgcgggcagtacgccattaccggtgccaccggtgcttaacacttccactggtcataccgatgtgaataaggttcatcgcggagggtggctgaaatga

SEQ ID NO: 190891 - DNA, 1938 bp, Klebsiella oxytoca; identical to SEQ ID NO: 14554

SEQ ID NO: 190892 - DNA, 468 bp, Klebsiella oxytoca
gtggccttattgattgctgaccgcgatccgctaaagaataatctggccgtcgcctacctcacgaaaatcatttatcaatggatttgcctgatcgccgaaaatggcaaaaaagatcgtcaactgcaaaagctggaaaaactgattgccgctctacacgctaatccgcaaaagcgctggagcgtagccgatatggctgatgctatgcagtgcagcgaaccctggctgcggcgcctctttttgcgtcataccggcaaaacgccaaaggagtattaccttaacgcccagcttgagctggcgcagtcgctattaaagcaggaggggaatacggtgggtaaggtggcggagatgctgaacttcttcgactcctttcattttagcaaggcgtttaaacgccgcttcggctatgcgccctcagcggtgctaaaaatgaatgaccggcaccctatggatgccggtcagcaggattaa

SEQ ID NO: 190893 - DNA, 822 bp, Klebsiella oxytoca; identical to SEQ ID NO: 187888

SEQ ID NO: 190894 - DNA, 123 bp, Klebsiella oxytoca
atgctcttatggctcacggatacggcatgcataaaacatgaacacgtcactagcatgcacgtgaaatcgatttctataaaacttactctggggtttgtgtatgaaaatcatgctgggggctaa

SEQ ID NO: 190895 - DNA, 2001 bp, Klebsiella oxytoca
atgtcagtgaccgagtctaaagcaaaagcaacggttaaaaccagcaaaaaaacggtgaaccctgccgaagccgccgccctcaaagccgcgcttgaggctgctcagattgaaatagtgccgctgtcgtcgctggtcaaatccccgctgaacgttcgcacgatcccctatccggctgacagtgtccgggagatggctgattccatcatggcgatcggcctgatccagaatctggtggttcactcgctgccggacggtatgtcaggtgtggctgcaggtggccgtcgtcttgccgccctgcaacagttgctcagcgagcagcgtatcgatgccggatatccggttgtcgtcaagcgtgtcagtgacgacctggcggtggtcgcctcgattgtcgagaacgacaagcgtgtggccatgcacccggcagagcaaatcagcgggttccgtaccctctcagaacaggggaaaaccccggcgcaaatcggggaccagctgggctacagtgcccgtcacgttcagcgcatgctgaagctggcaaacctcgccccggaactgattaccctgctggcagaggacaaactcgacgtggagcagtgtcaggccctgagtctggagagcgacccggcacgtcaggtgcaggtgtatgaccaggtgaaaacctcatacggcagcacacccgctcacctgctgaagcgggccatcacggatacggaaatcgccgtaacccactcccgcttcgtgtttatcggtcgtgaagcgtatgaggccgccgggggcgtggtgcgtgaggatctgttcagcgcccaggagggagacggaacggcggacggggtactggttgagcgtctggttcaggagaagctggcggcggctgcgctggccatcgaacaacaggaaggctggtcatggtcactggctcgtgagggatccgtcagaaactacggcgatgaccgcgagcattatctggtgctgccggcgccggagggggaattcagcgctgaggaactgcagcgtcttgatgaactgtacgccacgatggaggcaacggaaacctttgaggacgaagccgccattcaggtgctgatcgatgagattgaaaatgccgcatcggttcgggcgtggacaccggagcagaaagcggcctgtggcgtggtggtcagcctgtatgacggtgagctttgcgtccagcgtggtgtgcagaagaagatccagacggcggcatctgacggcggggagcacggtggcgagcaggcttctgtgcatgtggtcacccgcagtatgccggatgcagcagagggtatcagcgtgccgctcctgaaaaaaatgtcttcagaaaggacactggcggttcaggccgaactggttaagcagccacagaaagccgtggccctgatggtctggcggctgtgcagctgcgtgttcgactactgcaccaccacccggcacccgtttgtcctgcgccttgaggtgcatcacagcggcctgaccagtgaagccccgaccggagaggacggtcaggcatggcggtatctgatgcaggagaaagcccgtctggaagccctgctgccggagggctggcagaaagatttcaccaccttctttaccctcgacggacagaccctgatgtcgctgatggccttctgtaccgcctgttccgtcgatggcgtccagacccgtgaatgtggccatacccgccgcagtgacctcgatggcgtggaggcggcgctcgggttccatctgcgcgactggtggcagccgacagcggataacttcctcgggctgctcagcaaggcccagattgtggcggcactgaaggaggccgggctgaccggagccgcctcggatgccgaaaaaatgaaaaagggtgatgctgccagccatgctgaacagtggctctccggctcccgctgggtaccgggctggatgcagtccccggatgccgtaacgccggacgatgcacatgctgtcccggacactgacaaaccgacttcccacgctgcctga

SEQ ID NO: 190896 - DNA, 132 bp, Klebsiella oxytoca
atgttcagaatgaacacactcgtctggaaaaccaccataatttggaaggaaataattttgagaaagaatacaatgacaaaaaggctgaacagagagcacttcctggagcggatacaagagacgaactcctag

SEQ ID NO: 190897 - DNA, 732 bp, Klebsiella oxytoca
atgcaattaaataaattgatgactgttatggtcgtcagctctgcgctggtgttatctggatgtagtgcaatgggaaccgctattaaaaagagaaatctggaagtaaaaacccagatgagcgaaacaatctggctggaaccttcaaataataagacggtttatctgcaaatcaaaaatacctctgataaggatatgagtggcctgcaggcaaaaattgccagcgccgtcacttcaaagggatatcaggtcgtcagtaacccggatacggcgggctactggatccaggctaatgtcctcaaggccgataaaatggaccttcgtgagtctcagggctggttaagccggggttatgagggggctgtgactggcgccgcgcttggggcggggattaccgcttacaactccagttctgcgggagcaaccctgggggtagggcttgcagccggtctggtcgggatggcggctgacgcgatggtggaagatgtgaactacaccatgatcaccgatgttcagatcgcggaaagaaccaaaactcaggttcagactgataacgtggccgtattacgtcagggaacatccggcgcaaaagtgcagacaagtacggaaacgggtaatcagcacaaataccagactcgcgtcgtctctaacgctaataaagttaacctcaagttccctgaagcccagcctgttcttgaagaccagctggcaaaatcgatcgcaaatattctgtaa

SEQ ID NO: 190898 - DNA, 1011 bp, Klebsiella oxytoca; identical to SEQ ID NO: 181924

SEQ ID NO: 190899 - DNA, 1008 bp, Klebsiella oxytoca
atgggtagcaccggaagtgtaagctcctgggatgaagcgttattaattgccgccatccaataccccgttcccgttattaaaggaccggaggatatccagatacaggtcgataagatttgtaaggccgtcgactccaccaaagccggatatccgggacttgatgttatcgtcttcccggaatattcaacccagggactgaatactaaaatctggacctatgacgagatgttactcactctcgatagcccggagattggtcagttcaaagaggcctgtatccgcaacggcatctggggggtattttccttaatggagcgcaatgaagacccgtctcttccaccgtacaacaccgctattatcattaacgatcggggcgatatcgctctgcattaccgcaagctgcaaccatgggttccgattgagccctggatgccgggaaatatgggaatgccggtatgcgatgggcctaaaggttctaaactcgccgtctgcatatgccatgacggcatgttcccggaactggcgcgtgaggctgcttataaaggctgcaatgtctatatccgtatttcgggctattccacgcaggtgaacgatcagtggatctggaccaaccggacgaatgcctggcaaaacctgatgtataccgtttcggtgaatctggccggttatgacgatgtcttttattacttcggcgagggtacggtctgcaattatgacggtaacgtcattcagcaggggcaccgcaacccatgggaaattgttaccgcagagctgttcccgcgcctggtggataaagcgcgtgaaaactgggcgttggaaaacaatattttcaaccttggctgccggggctatgtcggcaaaccgggaggcgaacgcgagaattacctgacctgggtgcgcgatcttgccaatggcgaatacaaacttccgtgggatgaaaatgtcaaaattcgcgatggctggaagtattatcctgatggggtgcaattaggcccgctacctaaataa

SEQ ID NO: 190900 - DNA, 690 bp, Klebsiella oxytoca
atgctgaaaatttctgattatgctgtcgcatatggtcagagccaggtcatcagtggactgaatctgacgttagcagagggtgaaatcgtcgctctggtagggcgcaatggtatgggtaaaaccacgctgatgaaatcactgattggtatgataccgtcctgtgccggtgagttagagttttccggtacaaatattaccggcttgcttagttaccagcgcgttcagcatggcattggctttgtcccgcaggggcgaatggtattttcaaccatgacggttgaagaaaatataaaaacggggattcgccaatcccgttcgttacaggttcctgaatacctgtatgactatttccctgtgctgaaagaaatgcgcaaacggatggcgggaaatctttccggtggtcagcagcagcagctcgttatggccagagctctcgccggtaaacccaaattacttttgctggatgaaccaacggagggaattcaaccgtcaattattaaagaaatggcaaaaatattacgtaagattcgtgatgcagaagggttgaccatattagtttccgagcaggttttaagctttgtactcgatgtgtcagataaaattgttgttattgagaaaggcaatattgttcatcaacaggcgcgttctggtgctgatgaagaacaaattgcgtcatatctgtcagtttaa

SEQ ID NO: 190901 - DNA, 750 bp, Klebsiella oxytoca
atgaaaaatccgataaaagaaataattttagcggtagagggattaaccgtttcatttaatggcttcagagccgtcgatgatttttcaatgtacatcgatgaggggcagatttacgttattattggcccaaatggcgcgggtaagacaacagtgcttgatctcatttgcgggaaaacaaagctaaccagcggcagcatcaaatttcgcaataaggaactgagtaaacttcgggaaaataaaattgttcatgaaggggttgggcgtaaattccagaatccatcaatctatgagaacttaacggtatttgaaaatctcgagttatcttatcccaaagccagaaccgcgttgggcgccatgttctttcgtcgcacgccagaaataatcgctgcggtcgaacaggttgctggcgaaattttccttgccgattacctacatacgcaggctgaccttctcagccatgggcaaaagcagtggttagaaatagggatgctactaatacaagatcctaagctcatgatgctggacgaacccgtggcaggcatgtctgtcgccgaacgccaaaaaaccgcgcagctcctgcgcaaaattgccgggggacgttctgtactggtgattgaacacgacatgcagttcgtcgaagacattgccgatcatgtcaccgtcatgcaccagggaaaagtattgtcggaaggtagcatcaataaagtcaaaaacgaccctcgggttattgacgtttatcttggtcattaa

SEQ ID NO: 190902 - DNA, 1116 bp, Klebsiella oxytoca; identical to SEQ ID NO: 111892

SEQ ID NO: 190903 - DNA, 927 bp, Klebsiella oxytoca
atgttcagcgattataacttcgccgatttggcttccatttttgtcatgcaggggttttcggggctcagcctgttcgccgtgtttgttctgatgtcgcttggactcgctattatttttggccagatgggcgtgattaatatggctcatggcgagttcatgatcctgggtgcttatgtcacatggttgaccggtaagtttttcagcgcttatctgccttcaatcttcggcatctacttctttgttgccattgcccttgctttcctgtgtaccgccttgctgggtacgctcgttgagaaaatcctgatacggcatctgtataaacgccccctcgacacgctgctggcgacatggggtctgagcctgattctacagcagtgctatcgttcgctatttggtccccgcgaagtcggcgttgacttaccttcatggctaatggggtcgtatcagtttgccgacaatattgatattcctgttaatggggtatttgttctgctgctgaccgtagttattaccgcttttacggcctggctgatttatttctccgcctggggaataaaagtccgcgcggtggtacttaaccgccagatggccagcgcggtgggtattaatacggctcaggtcgatagtcgaaccttcgcactggggtgcggcatcgccgggatcgccggaagcgcctttaccatgatcggctcaacaggtccaacggctggccagcagtatatcgttgacaccttcctggtggtggtgtttggcggcgcgcaaagtttgctcggcacgctcgcctccgcatttgccatttcacaatcgcaatccacgctggagtttttcctgagcggttcaatggcgaaggtgattacgctactgatcgtggtcggcattctgctattgcgtccgcaaggtcttttcgccaaccgggtccgccgctag

SEQ ID NO: 190904 - DNA, 1281 bp, Klebsiella oxytoca
atgaacattcgtgatttaccccagccacatagcaatatgaaaatcccgagcccaggccggtttcaccaggcgtgcctcaaagcgaaacttttggcgattgccggcctgatgatggcagctaatacggccatcgccgccccggcgacgtcagtggttaataccacgggcctggcggtcaccgacaatagcgtcaaggtcgggatactgcattcatccacaggcacgatggccatcagtgaaaccggctcgatccaggctgaaaagctggctattgagcagattaacgctgccggaggggtactggggagaaaaattgaatatgtacaggaagacggggccagcgactggccgacctttgcagaaaaagcgcgtaagttactggtcagtgataaggtcgccgctatcttcggcggctggacttcggcttcccgcaaagccatgctgccggtacttgagcaatataacggcatgctctattacccaaccttttacgaagggctggagcaatcgccaaacgttatttataccggacaggaagctactcaacagataatctccggcattgattgggtagttaaaaataaacatgcaaaaaccttctacctgcttggctctgattatatttggccgcgtactgcaaacaaaatcgcccgtcaccatattgaaaagctggggctgaaagtcgttggcgaagattattacccactcggtaatacgcagttcaattcggttataaacaaaataaaactcaagaagcctgatgttatctatgccattgttgtcggcggttcgaatgtggccttctataagcaattgaaggcggcggggatcgatatgacgcaggagaaaccgctgctgctgaccatctccgtcacggaagatgagatccgcggtattggcggcgaaaatatcgtcggcgcctatgcctcgatgaagtatttccagagtatggataatccggcaaataaaagctttgtcgccgcatttaaaaagcgctggggtaatgacatggttatcggcgatgtcactcaggcggcctatcttggcccatggttatggaaagcggcggttgagaaagctggctcgttcgacgtggacaaaattcgtaaggcctcgcccgatattgagttcaaagatgcgccggaagggtatgtacgcatccatgataaccatcatctgtggtccaaaacggttatcggtcgcgctcgtgcggatgggcagtacgacgtgatttatcagacgccagaacttatcgaaccgaacccattcccgaaagactaa

SEQ ID NO: 190905 - DNA, 3381 bp, Klebsiella oxytoca
atgaccgttcagcaaaaggcgtttaaatcgcgcagacgctacaaccagtgggtgaccaatcagactctcgaggattttgcgctccgctatacgccggtctcggcacgacgctggagcgcaaagcgagttgttatgacagcgctcagcgcaattacctttttggcgcttgaagccattggcggcgcgctgacgttaacctatggatttaattatgtggtggtggcggttatcttagttagcattattatctttgcgctatcaatgccgattgccattaatgccgcaaaaaacggcctggatattgatttgctgacccgcggcgccggatttggctaccttggttccacggtgacctcgttaatctatgcttctttcacctttatatttttcgccctggaagccgctattatggcgatggcgcttaatatgctgtttggcctgccattgcactttggttatctgattggttccgttgttgttattcccctcgtcacctgggggttcacttttatttcccgttttcagcagttcacccagttttgctggctggcgctacagctattaccctttattttcattttaatacgtgaacatcatgtgctgcaaaactggatcgacttccctggttttattacagcccgcgatggttctttcgatttccttcagctcggcgccgtctgttccgtactgctctcactggtaagtcaagtgggagagcaggtcgatcaggttcgttttttaccaaagccacaacatccggcccgctggagatggtatggcgcagtaattgccgcaggtccggggtgggttgtcatcggcgccatcaagatcctgctcggctccttcctcgccgtgctggcgtttaattacggactcggcgcggaactggccagcgaacccacccatatgtacctggtggcatttagctatgtcacccattcatcatcaacgctactggcattaaccggtatttttgtggtgctctcccagctcaaaattaacgtcaccaatgcatatgccggctcgatcgcatggtctaattttttcctgcgcctgacccatcgtcatccagggcgcgtcgtgtggctgttttttaatgtcggtattgctctgttattgatggaacttggcgtttatcgcgtatttgaggatatcctgggcatttatgcggtggcggccacatcctggcttggcagcgtggttgccgatctcacgttaaataagtggcttaaattacgaccagcggaaatagagtttcgccgggcctatctctacgatatcaatcctgtcggcatcggttcgatgacgctcgccatgctctgcggtctctcagcctggatgggatggtttggtcatcctctacaggtttttgcctcaatgttatcgttgtgtctgacgtttatcaccgcccccttcatcgcctggctgactcgcggacgttactatttttcccggacgccggtgcaggtcacggcaacggaatgctgtgtctgcggtaattattttgaaaaaccagagatgagctattgtcctttttatcagggcagtatttgctcactatgttgttctctcgatgtccagtgcaacgatacttgcaaacctcatgcgcgctatacggaacaggcttcaaagcttatcgggatatttattaaagaaaaatcattacgcaaaattgatcccagagtgtggagttttatcagcattttgctgttattcagttccgtcatcggcctgcttttgatgctggttttcgctcagatgcgcgatgaattcggcagcgagcaggaccttctcgccgcggcgttatggaaagttttttttatcctgcttatcgtaaccggcgtcaccacctggctatttgtcctgacaaataaaagtcgccagattgcgcaagaggaattgcgcctgcaaagcgaccgtctgatgaaagaaattattgcccatgaagcgacggaccggcaattgcagcaggcaaaggaagatgccgacgatgctaatcaggccaaaagccgctatctcaccggcattactcatgaactcagaacgccgctcaatgcgatgctgggttatgcgcaattactcgaacgtgctgatgatatccccccagcccggcagcgcggtatcggtattatgcgcagaagcggcgagcatctggctaatctaattgagggattactggatatttcgaaaattgaagcgggaaaattagaaatatatcgtgaagaagtgcgcattggcgatttggtgcagcaactggtcgccatgtttgaacaacaggccagagataaaggactgacatttcactacaacgccccacactggctgcccgaggcggtgatgacggatgagaaacgcctccggcaaattcttatcaatctgctttctaatgcggttaaattcacggacagaggcagtgtaaccctcgatttccagtatcgtagcgaggtggcgtttttctcggttcacgataccggcatcggcatcgcccctgagaacctggaacgcatctttaagcctttcgaacgcgtatccggcgatagtcgtcggatcgggacgggccttgggctgacgattacccggcttctgacttatatcatgggtggcgatctccaggtggaaagcatccgtggcgaaggcacaacgtttaaactcaccctgatgctgccaagctatagcggggatgcctaccaacccgccgagcctgcggtaatcaccggatatccaggcaagcgacacaccctgctggtagttgacgatgatgaatcccatcggcagctgatgatggatttactcacgcccataggcttcacgctgctaacagccgaaaatggtcatgtcgcgctacatttagcccggcaaaatcatatcgaccttcttcttctggatgttgcaatgcctgaaatgtcggggtgggaactgctacgtcagttacgtaataagggacaattagcgccggtaattatgatttctgcggaagcggatgagggtaaatgccgccatttcactggcgaaggggaagttcgctacctggttaaaccgctgcgtttccctttactactggagaacatcggtgaaatattgcatctccagtggcgcacggaatgtcagccgccaaagcagccggaaatacatgaaccacgctcgcagcttacccgcgtccagattgagtcgttaaaagagatggccagattgggttatgtgagagggtttcgtgaactgctggacaaacatatttccgctaaccagatcagcaaagccgagggcgaaaaatttgccgagttgctgaggcgctttcgattcaaagagatagtcgagagtcttgaacgcccggagggagagaaaaatggcaatagcaaagccgacggtacttatcgtcgatga

SEQ ID NO: 190906 - DNA, 921 bp, Klebsiella oxytoca
atggcaatagcaaagccgacggtacttatcgtcgatgatgatatcaacacggtaagtatgttgaatgacacgcttgatgaagccggttttaccgttctggtcgctctggagggtaatcaagccctttcgataaccagccagataaccccggatatcattctgcttgatgccgtaatgccgcatctggatgggttttcaaccagtaagcgcctgcggcaaaatccggggctgcggcataccccgattattttcatgacaggcctgagtgatacgcagaatatcgttgatgcatttgatgccggggtggtcgattacgtaattaagccgatacgcacggaagagctggttgtcagaatgcgtacccacttgcggaactcaaaattaacggtcagtgcctatagcgcgatggattccgttggccagaccttatgtgtttttagcaaagaggggcaactacgctgggccacgcccaatgcatggcaactgatgaaaaacttcagcgataccgggtatgaacccaataaaaaaatagtaaaccggatcatcggttggctgaacaatacggaaggtttaaaaatacccttagatctttcatcgcaaggcatcgctctgaaattctatctttcacgccggaccgctgaaggagaaagtttgctacgtattgaagagatcaaaggacatgaagaagtcgaagcggtgaaacgcctgaaaaacaacctagggctgacgcaacgagaagccgaagtcctcctgtggattgccagaggaaaaacaaaccgcgaaattggcgatattttaaaccttagccccagaaccgtgaataaacaccttgaaattgtatttccaaagctgagtgtggacaatcgcaccgcagcggcagcgttggcaataaattcgctatatgccagggagaaaatgtag

SEQ ID NO: 190907 - DNA, 309 bp, Klebsiella oxytoca
atggatacagacaggattcagttcaagatcgaaacactgatacccgttctcaaatctttagggcatagcaggctttggtaccgagcgatcagctacgattccagatatgaagaactggagtttatcgtcaaccaggaaaatgaacttcttgctcaatggagccctaagcgtcaagggtggattgtgaccgacaagattctttgcattcccttaaacggaagtctgacgcagactccgggtgtgccagtcgatgatgaatgggtgtttttcagattgcacaatgaacctcttagcagaaagtcgctatga

SEQ ID NO: 190908 - DNA, 654 bp, Klebsiella oxytoca
atggctgactggtttattgcaactgaaggcgtgaaggtggtcaaggacagtgccagtctgtggccgcagatcatcacgggggttttgtccgccggtgctgcattcggtggtgtgtggtacgggcagtggcggataacacagcgagagaaggaagcagcagcagcgaagcttgccagcgaacgtctctttatcgctacggagctggtctttattcttgagcggtttgcacagcgctgcgttggctcagcccaggagtcagatggcccagaaaagtatgatcaatatggttatgtcaggattgaacaccctataccagaaattgattacacatctgttaccggggactggcgggctcttccttcggacctgatgtaccggctcagcgagttaccggttctaagacaggaagcggccagctccattgatgccaccttctatgaaaatacgccttttgatggtactgccgggatttctgagctcaaccagcaggcctcccgcctggggctgaaggccattcgcttgtcccgttgtctgcgacatctctgtgaaatgccagaagatcgactctcggagcagccgtggtcagcgtggcgcgttctctggcgtgtacgggggcgttgtattcagaaactgactgcagcgagagataactga

SEQ ID NO: 190909 - DNA, 783 bp, Klebsiella oxytoca
atggacaggcatcaacttccggccctttctggcccgcaatattcggtgcctgtggtgattgactatccggctgcgctcgcgctgcgccagatggcactggtacaggacgatctgccaaaatatctgctggccccggaggtgagcgccctgctccactacgtcccggaccttcaccgcaagatgctgctggcgacgctctggaatacgggcgcgcgcattaacgaggcgctggcactcacaagggctgacttttcgctggcaccgccctggccgttcgtacagttggccacgcttaaacaacgaaccgagaaagccgccagaacggcaggccgcgctccggccggcagtcaggttcaccgtctggtaccgctttctgatgcgaactacgtcggccagctggagatgatggtggccacgctgaaaatcccgctggagcggcgcaacaggcgcacagggagaacagagaaggcgcgcctctgggagatcactgaccggacggtacggacctggcttgccgaagcggttgctgctgccgcagatgacggggtgacgttctctgtaccggtgaccccgcatacgttccgacacagctacgcgatgcacatgctgtacgccggcatacccctgaaagtattgcagagcctgatgggtcataagtccatcagctcgacggaagtctataccaaggtgtttgcgctcgatgtcgcggcgcgccatcgtgtgcagttcgccatgccggaagccgatgcggtagcgctgatgaaacaacttgagaggcgataa

SEQ ID NO: 190910 - DNA, 633 bp, Klebsiella oxytoca
atggcctggatagttggttttatttcccagaaaggtggtgtgggcaaaagcactaaagcgagagcgttagcgcgtgaagcatccgcctgtggcatcaaaacaaaattagctgacctcgacctggaacaggcaacgagtgctgagtggcaccgccgacgtctgtcagctggtttgccaccggttgcttcagtcgaagtattttcaacagcaaagcaggccatagaatctgccggcgagtttgaccttctcattcttgacggaccagctcgtgcaagcaaagggacttcggaaattgctaaggtggccgaccttatcgtccagccaacgggggcttcccttgacgatcttgtcccggccattaaagttttcaacgcgctggtaaaagaaggcgtgccacgttcaaaactggtctttgctttaagccgtgtaggtaccgaagcggaagagctggatgctcgtgcatatatcagtgaggcgggttatgaaactttagctggatgtctttttgagaagccagcttacagaaaagcgatgaactcaggacttgcagtgacagaaacacgctataaaggtttaaacgagagagctgatgaacttatccaggcgctcatcgataagattggagaagagtaa

SEQ ID NO: 190911 - DNA, 375 bp, Klebsiella oxytoca
atggctgatgcatcaaaacttaaaactaaaagagcccgtggtgggctgggtgtacccccaggccctgacgaagtggctaccagcctgaacgcgcctgagatagctcctgcagtcgctgccactgatgtacagatacagcaggcggacttatcgccagtgcaccatgatccagtgggtacgcaaacagtgaccgaggcatatacccgccgcgatggccgttctgccagaaaaacaaacaggacgctggcatttgcaacacgtgtcacacctgctttcgaccaggagatccgggatatcgcagagcgtgaggggttgaaactggtggaagttctggaaaaagcagttgaggcatataaggaaaaacaggggtactaa

SEQ ID NO: 190912 - DNA, 975 bp, Klebsiella oxytoca
atgaaaattttttgcgatgatggttctacaaacgtgaaacttgcctggtttgaagggaagacgctgaaaagtgcggtatcagtgaactctttccgccataactggaaagtcgagggcttaggcagcagtcgtacctataactatctgctcgatggccgcaaatatacctacgacccggtcagcgaagctgcgatcagcacgactcacattgagtaccagtactctgatacaaacgtgctggcagttcaccacgcattactgaacagtggaattgaaccccaggagatagatctcaccgttacgttacctatcagcgagttttacacggccgactgccagaaaaacacgcttaacattgagagaaaaattagcaacctgatgcgggaagtcaccctgaacaaagggggaacttttaccattaaaagcgttgaagtaatgcctgaatcactcccggctgtctttacacgtctggttgctgacaatgtgggtcagtacgaaaaatcactggttatcgatctcggtggtacgaccctggatgtcggggttattgttggccagtttgaggacgtttcggcagtacatggtaatcctgatattggcgtatcaatggtcacgaaggccacgctcactgcactgaaaatggccagcagtgataccagtccaatgattgctgacgagctgatcaaaaacagggagaacctggattttgtggggcaggttgtaaatgaggctgctaaacaaaatctggtactggataccattgatacagcgatacataagctgggcgagctggttgttgatgatttgctgcagtatcgaaacgtaaaccgcgtatacattgttggtggcggtgccgcacttattgccgatgctgttcgtaaggcatggaaccaccttggcgaaaaggttgttcttatggacgaacctcagacagcgctggtccaggcgattgcacgcttcaaagcggaggagtaa

SEQ ID NO: 190913 - DNA, 393 bp, Klebsiella oxytoca
atgcacgacggcgaagaaagaaaaaaactttcactgtaccttcacccggaggactctgccgatcgtcttgcactggctgaaattgaaactgtcccccggaaaaaccggggggagttatatcggcaggctttgataaccggcctgataatgcatcagcttgatgcgcgaattcctgccgtgttaaccgcactattcaccagagaactgaatgcggatgaggtcattagtcagatagcacagatcacaggctggaaaccttctgttgctgatttaaaggacgtattggcggcactgggaggaaatcaggagacgtcttctcccaagccctctggggatgacgtggaacaggcacgcctgaaagctgctcggactaagatgcaaaatctgatgtga

SEQ ID NO: 190914 - DNA, 144 bp, Klebsiella oxytoca; identical to SEQ ID NO: 29491

SEQ ID NO: 190915 - DNA, 135 bp, Klebsiella oxytoca; identical to SEQ ID NO: 103823

SEQ ID NO: 190916 - DNA, 303 bp, Klebsiella oxytoca
atgaaaaaacgaaatttcagtgcagaattcagacgtgaatccgctcagttagtggtggatcaacactatacggttgcagatgccgcaaatgccatggatgtcggactttccactatgacccggtgggtaaagcagctacgagatgaacgtgccggcaaaacacctaaagcctcccctatcacgccggagcaaattgagatacgtgagctgaagaaaaaacttcaacgtattgaaatggaaaatgaaatattaaaaaaggctactgcgctcttgatgtcagattccctgaacaactctcgataa

SEQ ID NO: 190917 - DNA, 348 bp, Klebsiella oxytoca
atgaccgccattttttataccatcctggagaaggaaaacgacaccggagaaattgaccatatcccgatgctgaaaacctttgtcgtgtttaatgtcgaacaaattgatggcctctcactgacggcagataccgttgccccacaagcgacgtttgacgcgttgccacaggctgaaaatctgttctgtaacagcggtgctaacatcattgagaaaggacaaaacgcctttttcatgccatcaacagatgaggttttgttacctgaacgtcgtttttttccgatgccgctagcttttatgccacggatctgcatgagattgttcactggagcgatggcaaaagtcgcctga

SEQ ID NO: 190918 - DNA, 177 bp, Klebsiella oxytoca; identical to SEQ ID NO: 14595

SEQ ID NO: 190919 - DNA, 2370 bp, Klebsiella oxytoca
atgaaaaaaagtaaactctctattattttacttatacttttgtcgtctcctttatatggaaaagagaataatcaagataaaagccaagaaaaagaaacatcaaacgatgttattactgttaaagcaacatcaataaaaaacaaagagacattctcctctttattactcaataatcgagaagagataaaaggaaaacaacttgaacaaataaaaacaaatacgattggtaataccgtttcaaaagttgctggtgtacaagcggaaggttttggcccaaatgcggcaaggcctgttattcgaagtctctctggcaatagagtcgggattttagttaataatcttccgattaatgatgtttcatttattagtgggaatatgcctattcctgttgatatgaatagaattaacgaaatatcaattagtaaaagctccgaagcactactttatggtggtagcagcagtggtggtgcaattcatttgtgggatgatcgaataatgacacagtttcctgaaaaagcaatttcaggtgccgtgacatttaatggtagcactaataatggtaacggtggatcagtaaatattaaattcagtaataaagaaaactggatttttaatctttccggtgctactaaacgagtctcaaaatataaaattccaacacgctctaaagttggtgcttgctatagctatcaacagctaaaagaccactctgcattacgtgatcaatgccaagtggatatgaaagtgtttactagccgtaaccctgaagcgtatccttacattagtgagttttggaaaaaatatcaggttgaatatgagttaagcgaggatgataaatatacctttaaagataaggactatttttcaggtattggttatgtagataatgaacctaacttacgatataaacctggtagccccacatctattgaacatgtcacacctccaaagcattatgttgaaaataataataacgaaattcccaatagctttttaaaaagccaaagtggtaacgcatcactctcttatatcggagatgacggttacttaggtttttctgtcactgattttcaaacatcgtatggagtgccaggctatgcttatctcacaactaaaacaactcgagaaaggtataaacctgtttcggtttcaaatagtaatcgaagaatagatatacaaggaaaacatgatcatttagcaccatttttaagagacagtgctttttattattcttattctgaatctaaagatgaagagttagtcggccaaattgcttcatcggtatttaatacaaaaagccatcagttagctttagaaactgcacatactccgctatttaatcgacttaatggtgcgtttgggatcaacggtaattatcgtgatctgaaaacgtctggttatgatgcttatttacccagtgtattaaccaaagagtacggaatatattgggttgaatcgctaaatttatctccttttgagctcactgctggatatcgtaaaggttacactcaacataatctcaatattccagcgaattataatcgtggtagagggcaaggttctaatttacaaaaccgtcattttgatacaagtgcaaatacactcgctctatcttttacaccaattgatgaatggacattaaaactacaacaaaatatttcttatcgagcaccagaaattaatgaactttatacacatggccctcattatgcttatttaattgaagaacaaggaaacagtgaatttaataccgaaaaaagcaaaagtattgaattatcatctgttattgagattggcaatttctctaataaacttaatttgtataaaacagactacagtggttttaaatttagacgattaacgggtatcagtcgtggtgctggtcctgttatggaatgggatgacaccgatcttgaaacaaaaggattagaatatgaatttaaatatttatatgaaatgcctcatgatcacaatctaacatttacactatttggtgattttgtcgaaaataaaagcaaaagaaaactgtttattgcaggtcactatttgccaaatttacctaatgaaaagcatggtatcagtatttattaccaacatgatgaattaactgcatttagtagtgcaacttactataaaaaacaaaaagaaagcggtgggttaatgtatggtggagatatggcctttccttcctatacgttagttgatgcggggattggcaaaaaataccaccttgataaggtagatgtttcggttgattttattattaataatctcaccgatactgaagcaagacctgcatcttctcaattgaaatatttagtcccattaccgggtcgaaattatgggataaatgtcaaaattgatttttaa

SEQ ID NO: 190920 - DNA, 1125 bp, Klebsiella oxytoca
atgatggatgatgagcaatcacaaacattaaatatgcttgatgtaatgcagcgtgactcatatgttgaaacaatatcaaatatattagatatatctcagggtaacgaagtattaaaggatttacttcttcgcggattttaccagaaccctaatcgagtagttcaccatgaaaataactcacttcttaatagattgattgctgcaggtaaaaaatctgaatggctatgtgagcatgatggatgtactaatcctagtatttattctcatgaattatctgaaagggctgtattaagctatttagcggatgataaccataaagcatttatcctgcaacgcaacctgaagaataattcatttgaattttcatttgaggataaacacatacgtaacatttcaaattttgccggttactgcagtatacatgatgaaggtttatttaagttgatagatgatccaggtagagaggtcgatttagaatatgtaaatttacaagctttaaaaatgatgaaacgccatatgctcgatcatgaaatcaccttaaaagttgctaagaatattgctactgaaattaataaaaaaattgatgaaattaaaggggctgaacaaattattacgggccttcaagaaagttttgatattttccagcaagcaattaaagatatggaaagttcatcagaggcgttacgcgtattttataacaacttatgggttggtattcagttaagagaatatatcattgattacagaaaaatcccatgcaataagactgggtgggttttctctcattcgtttgaggtaatagaagaagaaagtcacgaacgtatcttatcattcatatttaaggtggatgttaatcagcagcctgtgttgattcatgcctgggacaatactacgttagccagtaaacatgaggatttttatatctcttctgaaaaagtaattgagtgtatgttgctaaataaagaaaagcttgtattttcattgggctttttaaaaaccatggagataacgcatcttgagcgtttacttgacgatgagagcatatataataatgtgaaaaaccctgttttcatttttctttttaaaaaaatatttctcgatgagttagagggtgatttaggttaa

SEQ ID NO: 190921 - DNA, 837 bp, Klebsiella oxytoca
atgttcacttctactccgtcagacgagtcaacccaaggcgacagcttcatgtcagaacctgatgttcttaaaaccatactgggggataaagtgaagattgaactcgatacactttcaaactatctcatagcaacccttgaaaatcatgttagtcattcaaaaaaagaacccgacttgatgtggatgatccatgagatggacagttttttccatcaagaggttttcgaccacgaatatgacgctaacgcagcaactatgctactggcgacgaactcatacatgatgctttcaaatgcagttcttcaggcactatcaggtcatcgggtcgcagtgctcccagttgcccgaattgctctagaatcagcctgttatgcctatctcacatcatccagtgagaagatgagtgaactctggtttaatagagataaatctaaaactgcaaaggataactgtcgtaaggcgtttactattggagcgacggtagccaaactaaagcgcatctcaccggatatgtctgactacctgaaaaaactctacgaattgtctattgaatatggcgcacatccaaacatcaaagccatatctcaccatctgcgtgatggcggtttggtggatgataagtgtcgcgtcttttcgcacacaggtgtttatggggaaaacagtaatcaggtaaatggcgccttattattctgtgttgatgttggacaagccattgcatttctgctttgtgcatcatctaaagaacatcctattattaatgagcgcattcattattttcagaactggatggatgagaaaaataatcttatagataaaatttcagcagagttttattaa

SEQ ID NO: 190922 - DNA, 279 bp, Klebsiella oxytoca
ttggaaattctaataactctggccatcatatccatacctgtgatcaacattttatgggttcggtatttccaaatatacccactctcctacttcgatatcgaaaacgttcagcgtgttgctaaatgtgaaggtcttgaatggcgcgtgcgggtgttttctctaagcggtataaccagccccgagtggacaaaaatcaatacccgtcagctggaggcgttcaaatcagaactgcaacgccggaaaaaatacactgccaccatcagagatggtataaattaa

SEQ ID NO: 190923 - DNA, 411 bp, Klebsiella oxytoca
atggccagagtgtctattagtgaagctgcacggcttgttaaggttagtcgccccacagtttacaagatgattagcagtgggaagctaagttacacttctgttgtaaagcacggaaaagatataaaagtcattgatacatcagagcttattagggtttttggttctcttgatggtgtaaccgacactgtaaaaattgacgctaagtctacagaggttaacaatcatggtttacacgacttacagcatagaattgctttacttgaagctgaaaacgatggtcttaaaggggctgttaaagctcgcgatgaacatatcgattcccttcgccaggctatgcagcttctggagcaccggcacgaaccctcttcacaggggcactcttcgtggtggaaattctggaagaaaccctga

SEQ ID NO: 190924 - DNA, 336 bp, Klebsiella oxytoca
atgtccgcaagcgaaatgaaagagatttgtctagacgtaactggtgttgataaagagctaaagtctttacctgttgataaagctttagcttttttgcacaacttgaagttggttgccgctggaattgaaccagaactgaaagttgaacacctgaaagtagttgctccaggcgtgattgagttgaagataaatggtagccctgcttatcgttgtgtgtacacgataaaatcacccggcaaggtgatcgtgttacgtttcttcaagaaaacgactaacgggcctgcacgcaaagacttagaagtcgtgaagcaacggctgaaaaatctcaaaatatag

SEQ ID NO: 190925 - DNA, 312 bp, Klebsiella oxytoca
atgagcaatcaaaacatattcgaaatactaacgagtgatccggtatccctaaacatgtggaacctgaaatcaaacctgatcctcgccatacataagacggtaagagataacggctggaaccaaacagaggcggccgcacatctgggcataagccaacctagggttagcaacatgctgaaagggaagctggacaagttttctacagattcactactggaaatcatgttcaagctgggttacaaattagacatgcaagtacacccatcctctgaagtaattttagagatgggcatgaaaaaggcgatgctgtga

SEQ ID NO: 190926 - DNA, 219 bp, Klebsiella oxytoca; identical to SEQ ID NO: 103816

SEQ ID NO: 190927 - DNA, 462 bp, Klebsiella oxytoca
atgtatacgggtgaagcactgcctaatgatcgtgaatcaattttttggctaaatatactggatatttcagctaaacctaaatttgaaaataaaaataatttaaatgtaaactcatattatcttcaactcccgatccatagtcgcataaagctattctatcgtccagaaaaactcacacgttctctcagtgaggcctataattctgttatatggcatattgaaaaacaaggagcaaaggcctttctttgtgcagataatcaaagtccttattttattacttataatcatattactttgattcagagcaactactcacaatcaattaatccagtagatatggttgctccttattcttcaatacgccttcctatacatggaaatatgtcgggatatggaaaagtgaagtggacagttgttaacgattatggtgggcatgaattaagtgagtcagctctgaaataa

SEQ ID NO: 190928 - DNA, 1539 bp, Klebsiella oxytoca; identical to SEQ ID NO: 182325

SEQ ID NO: 190929 - DNA, 348 bp, Klebsiella oxytoca; identical to SEQ ID NO: 181667

SEQ ID NO: 190930 - DNA, 756 bp, Klebsiella oxytoca
atggaaccaacattgtcattaaccgtgatgttctgtgctgcagtgggtgcttcagtatcagaatcgctgtcggaatccgagtcactgtcggaatccgagtcactatctgaatccgagtcgctgtcagagtcagaatcgctgtcggaatccgagtcactgtctgaatccgagtcgctgtcagagtcagaatcgctgtcggaatccgaatcgctgtcggaatccgagtcactgtcagaatccgaatcgctgtcagagtccgaatcgctgtcagagtccgagtcactgtcggaatccgaatcgctgtctgaatcggaatcgctgtctgaatcggaatcgctgtctgaatccgagtcgctgtcggagtccgagtcgctgtcagagtccgaatcgctgtctgagtccgaatctgtgtcagaatccgagtcactatctgaatccgaatcgctgtcagagtcagaatcgctgtcggaatccgagtcgctgtccgaatccgagtcactgtccgaatccgagtcactgtcagaatccgaatcgctgtcagaatccgaatcgctgtcagaatccgaatcgctgtcggagtccgtatcgctgtctgaatcggaatcgctgtcggaatcagaatcgctgtcggaatcagaatcgctgtcggaatcagaatcgctgtcgctatccgagtcgctgtcagcatccgagtcactatcggagtccgaatcactgtccgcatctgagtcagtttctgaaatcgaagagtgctga

SEQ ID NO: 190931 - DNA, 204 bp, Klebsiella oxytoca; identical to SEQ ID NO: 104460

SEQ ID NO: 190932 - DNA, 141 bp, Klebsiella oxytoca
atgtttcggatgcagttgtacgccattcacataattacctacctttggaagaatttcgaagatattttgatattggagtatttcattgcgaacagccatggattcgagaaacattcggtggcgctgggggagaaggcataa

SEQ ID NO: 190933 - DNA, 378 bp, Klebsiella oxytoca; identical to SEQ ID NO: 104959

SEQ ID NO: 190934 - DNA, 276 bp, Klebsiella oxytoca; identical to SEQ ID NO: 56170

SEQ ID NO: 190935 - DNA, 186 bp, Klebsiella oxytoca; identical to SEQ ID NO: 103826

SEQ ID NO: 190936 - DNA, 324 bp, Klebsiella oxytoca; identical to SEQ ID NO: 149288

SEQ ID NO: 190937 - DNA, 618 bp, Klebsiella oxytoca; identical to SEQ ID NO: 149287

SEQ ID NO: 190938 - DNA, 654 bp, Klebsiella oxytoca
atgctttccaccgcagcctttctggcgctggcgacgcagtgcgccaccagtgttcacccgtccacggcgcttgatgtggcacgggtcgaatccggttttcacccttacgccattgctgaaatcgtgccgggcggtaaaggtgtgatttcacattttcccacgagcctgccggaggcgatccacctcaccagacagctggctgcacaaggccgacgctattcggtcggactgatgcaaatcaccagcaccaatttccgccattacggcgtcacggccagcgacctgcttaacccttgcatcaacctgtcggtatatgagcgcattttcgccgactgctaccggcgcggcagaacgctgaaacgggcgctcagttgttactactccggcaactttgaaaccggacagcgaccggaatccacctttaaccagaccagctacgtgcaacgcattggctatgtcgtcccgtccacgcgggaagaccggcagcgtgaccctgatcggaacgcacagccgtctgtccgttatcccgccgttgtgctgcgcggcgagcctgccggtgccactgtgccggtcctgacttccctgcattatcccggtgccgtcattcgcggcgctacccctttatctctgatgaggagaaatgatcatgcgtaa

SEQ ID NO: 190939 - DNA, 276 bp, Klebsiella oxytoca
gtgctcagatcctttttaaccttatgcgcacttacaggcgttatcgtgctgtccggctgtaaggaaaccaaatccgaagcctggtataagcagcatccagacgaaacatatgcggtttatacgcaatgcctgaaggatggtgaggcaagcgataactgcgagtttgctcaacgggctgccattatgttcgctcaaattggcaagcccggaataaaagaaaaatttgagacactctttcagcaggaagccgaaaagagaaaatccgtcacccggtaa

SEQ ID NO: 190940 - DNA, 1011 bp, Klebsiella oxytoca
atgcgtaatgaaataacctgggatgaactgcttgaagaatatttttttgctcaccggctgagacccgctaccgaatggagttataacaaggttgtcagagggttcaggcgttattctggtgataccctgcctgcgcaaattacgcaccgccaggtactgcagtggcggcgttatctccttcaggagaaacaacaatcggctcagacatggaacaacaaaattgcacacttgcgggcgctgtataattacgggatggaacatgaaatccttccttcggggaaaaatcccttcaataaaagcaatgttcagcgggatacaaggaagaaaaaaacgctgacacgatcgcagctgattcgtgtttatcttgtcatgcagcaatttgaagaggctgaacggacagggcgcggtatcaggggcggacgtaatgcgctctggccagcgtggtactggctgacggttctggatgcattcagatatacgggaatgcggctaaatcagctgctgcatatccggctgggagacatcaatcttaatgaagggtgtctggaactctgtctggagggcagtaagacacaccgtgagtggcgggttccgattgtcagtgcgttaaagccccggttgcatcacctgatagaaaaatcaacggaactgggggccggaaacggagactatctgtttgatgtgaacagaattcttcttaagcgtcatgtggaatgggatgctgctaaggtccatcagaagatccgatcttttttccggcgtctgtcgaaagagtgtggttttaccgtgtcgccacatcgttttcgccatacgctggcgacggaactgatgaaatcaccagaacgaaatcttcagctggtaaaggacctgctggggcaccggagtgtcagtacgaccatggaatatgtggagctgaagatggatatcgttggaaaaacgctcgaagctgagctgtcacttcacacagacgttacgggcgaaagaaacttacacctgttgacacaagcgtag

SEQ ID NO: 190941 - DNA, 1584 bp, Klebsiella oxytoca
atgttaaataaaatcaaaacgtttttgtccggtacgccggctatcacagagtcctccggcaaacaccctgtttcggcaccaatggggtatttctctccggttaaagctgaagagttgaccatcagcgcattacgccaggatgccctgcagaaaatccgggaaaataatgcgctgtcgggcgaagtatatgagcgactttatctggctcctgtgcacctcctgcttgaacgggcccagaacgtgccggcggcacctgatggccggtgggcttatgccgggggatttggtgatttaagcctgcgttttaccgcctatgctgtcaggcttgcccgggggtatatgtttccgccaggcgcggcaccggaagaacaggccgctcagggcgttatctggcaggctgttattttctgggctgcgttgtgttatcacctgccgttactggcctgtattgaaggcgaaaccaccggcggcgttaactggcaaccgggcatatctgtgccggatgcgccttatcgcttccgatttcgttcttctcccctgaacgctcatgatgcttctgctctggcggcgctggccgccggtcaactgatgcccgcagaagcgataaactggctttcaggtaacttcggggcgctgctaagtcttgcctgtgcattccacaatggttctccagatatgcctcttatcaggatgttgctcgaccaggccgctgagaaggttgactcaccggcgctccggaaggagacaggtgaatcttctatggtaagtgcgccgccagattcggtgactccgccggacggcatgttatctgttcagacggacgataacttaacttcatctacgttgacactcgttgcttcggaactgatgacgtctctgaacgataccggtggcggggactgtcagccaccgctgaacggaatgagtagagttgatccgccggaagaacaggctaacggcagcccgagccagggggatgccgatatgctgctcagtcttttttccgcagtatcggatgctgaggttacggatgacgccgatgtgaatacgccagccgctatagtgccggatgaaaccgtggtgcccgtcgggaatgacgtacctgatgagcctgttgagacggaagacatctcccggtacatcaataccggtgctgattgtctgttatctggtacaccgggagagccgtgccacccgattaatgccggtgctgatgccccacggtcgggcgaggattttctcgcctggctgtctgacggcatggcatccggcaggatcaccgtcaaccagcctgattcacgggtgcattccgttgccggttttatttaccttctggtgccggatattttctttctatttctgaaagataccggaagtgacagtcacagggagcagattcagacgtcgtttgaaaaactccagctacatcgtgttcgcaaaggagagcgttttacccgggcgaaactgtactgctcagaagataaacagggacggttcagcagggttaatggttatcttatcaaagctgcccgtctgaaaggagtgagacctccggaggacagcaagctccttttctttccataa

SEQ ID NO: 190942 - DNA, 1485 bp, Klebsiella oxytoca
atggcatggataaccacaccagagcaaaacgccatcatcgaatggcagggcaatcagcttgtggttaatgcgtttgcaggtactggtaaaaccaccacactggtacaattcgctcaggcgaacccggacagcaaaatgttgtaccttgcctacaacagagccatccgcgacgaagccgaacaaaagtttccctttaacgttgagtgcaaaacctcccaccaactggcctggtcgcatttcggccgacatttcaggcaccggttgacggcaaatctgcgtattaccgatgtggcccggaagctaaacactcggcactggccgctggcgcgcctggcgctgacggggctgaatgcgtttctttgtagtgctgaaccggaacctggtattatccatctgccagcagaggaggatcgtcatagcctctctgaagataaaattctgggggccgtacaggttctctggtatgaggtgagtcgtaccgaatctgatttcccgatcacgcatgatgtttatctgaagctttttcaactgtccggccccgatctcgccagtaagtgggataccattctctttgatgaagcccaggatgctaatcaggtcaccagtgcctttgtcctgagtcagccctgtcggattgtgctggttggcgatcgctaccagcagatatatcgcttccggggggctgataatgcgctcagttctccccggctggaacaggccgatcggctgtggctgacgaccagcttccggtttggccctgcggtcgcagaaatggcgaacatgctgctggtcatgtccggagaggagatgaaagtcaccggcagcggtggggatgatgaagtggttgctcatctgtctgctgacgttcctcattactccgttctcagccggacggtatccggtgtcattggtgccgcgctctctgccagcctgcaggacaaaaaagtcttctgggtgggcggaattgaagggtacaaaacggaagagctggaagacctttactggttctctgccgatatgcctgaacggatgcagtccccccgtctccgccaggattatcgggactttgaggaatattgctccattgcgaaagcgacacaggatgtggagatgagtcaggccatccggttgcttgatgagtattttccgttgccacagaagttggccatcatgcgtcggcaggttgtgacgcatgaaaaggatgcgcaggtcaccgtgtctactgcgcatcgtagtaaggggctggaatgggaagttgtcgttctgaatgaggatttttgtgatatcaccgacccgctgctctctgccgaagaacgacaggacgaaacaaacctgctgtatgtggccgtgacccgtgcccgtaagaccttggtgctgaatgagctgatgcagtgcctgaaggctggtgaagagcagaaagattgcgaacaatctgcaacggatgatgttcagaaggatgggggagaagcgattgtcccatgttaa

SEQ ID NO: 190943 - DNA, 663 bp, Klebsiella oxytoca
atgaatttatattttgtgtcggatgatagttactttattttaggggttaatggtatttttgataaaattaattgttttgccaggaaagttagtattcacgtggatgaaaacttgagggagtttacgccttcgcctggtgatgtcgtggtgtttgcaatttctgattataaaatgctacgagtgatgatgaaatggcatgggctgtctgaatatcgtcttattatcatgttgaaattaagggttagtatccagtcattaatgagtactactcccaaaattatttcatgggatatatcaaggcctggattcattcgtgctttacatgagatggcaaagaaggaatctcgttgggtctcaacatctgatcgcattgtggatatttgccttcagcttgggttaggacgatctttatctgatgttgctgcccagttttcattatctgagaaacatgtgtatgcaatgagaagaaaaatgatttctaaacttgggttgaattattgtaatagtgctatgggcaccctaatttgccgtgatattctggaggtaaggctgagaaatagccatgaagaatttaaaaaaaaagggcgggttaccacggtgcgatatttgtctgattatgagcgatttgcagatattattcatactcgggagctttacaattga

SEQ ID NO: 190944 - DNA, 792 bp, Klebsiella oxytoca
atgacttcattttatctactagaaaacgagattgaatttcactactcagaacggaagctaaaaaaccgcgccaacggccgggagataacgctaactcggttaagttgtaacattctcttagcattatgcaatgatgatgaagctgtattgacgcatccacaaataatgcaaaaagcttggggcgaaagacaccgggaggttcaatatgccacttactatcaaacagtattaatgttgcgtaatagcattcgcgaaattggggttgaatacgaagtggttaaaacaatccccagaaaaggcctggctttggctgtcacttctactttcaagaaagaaaaatcagcaaccgaaattgttaatagtgtaaaaaatgaacttgagcatccttgcacaaataagaagaactactatccctatatgttcaatacactcactattagcgttatatttctatttttagccattcttttaatttaccctcatttatttattcaacaacggctcttccgtggaagaaatcctttttttagtaactatgtactagccggcaaaactgaaaaccactgcatgtattatttcaataaagacacaagcagtcattcaaaacacaaaaaatttattatccaaaacaaatttctttgcgagaaaaatacaaaattatttattacaacttatgcaacggcaaaaaccgtaagtgctattcgatgctatttaccttcaacttcacacaatgaacattgtgtcagctattatttccctatgtaccaaccttcaccaaccggtgggctgtaa

SEQ ID NO: 190945 - DNA, 624 bp, Klebsiella oxytoca
atgaaagatttgcttttaattattaacacatatttggaaaatatgacaacgcctcaggaaaaaattcaggctattaacacattgcgagtatttatccatgaaaaaagcccgttcaaaaatgaaccggtagactgtgttttgtgggtgaaagttactgatatacaggctaatgattacaatcctaatgttatggctccagcagagaagaaattgttgaagcgttcacttgatacagatgggtttacacaaccgatcgtcgtttttgataacatgtctaaatatatagttgttgatggattccatcggcaccttgtcgggaaaattaagtcgggaataggaaaaagactgcacggatacctgccagtgaccaaaataaaatccgcaaacgggagcgaatcggagcgggtcgcggcaactatccgtcataacagggcccgggggaagcatactatttcaccgatgtcagacattgtgcgtgagttatccagattaggttgggatgacaatcgcattggcatggaactagggatggatcaagatgaaatattaaggctgaaacagatcggcggcctggctgatttattcgctggtgaagagtacagtgaggcctggacggtgcgttga

SEQ ID NO: 190946 - DNA, 1224 bp, Klebsiella oxytoca
atggagcgtagattaaaaaaagaactacttggcgaaaacgtttatcatgctagtggctcacgtgtggaatgggcttttgataattttgataccatctgtgtttcattctcgggaggtaaggattcaacggtcttatttcatctaacggcagaagtggccagaaagaagaataaaaaattttccgtgctttttattgactgggaagttcagtttcattgcacaatagagcatatatccaaaatgaagaaactttacgctgatctgatcagtgagtttttttgggtagcgcttcctctaacaaccgtaaatggcgtgtcacaatttgaaacggaatgggtatcatggggaaaagatgagcagtgggtgagaaacccacctggtgatgcaattaccgactataaatatttccctttttatgaatatgcaatgacgtttgaagcatttataccagcgttctcaaaatggctttcgagggatcagacattggggatgctggttggcgttcgcgctgatgaatctttgactcgctttatggcactagcatcaaagcggaaaactcgatattccagcgatttaccctggacgacagctggcagtgatgctttatattgtactatttatccactttatgactggaaagctcgtgatatctggatttttaatggcgtcaaacgcgctgcatataatcctctatacgatcttatgtacagggctggagtgacaatgaaagctatgcgagtttgcgagccttttggccccgagcaacggcgcggtttatggttgtttcatgttctcgaacctgaggtctgggcccgcgtctgttctcgtgttgctggagcgaactgcggcgctatttacgcagagcagcataaaggattttataatatccgaaaggatatgtctaaacctgcccaccatacctggcgaagttacgcgcattatctcctggattcaatgcctcatcagaccgcagaacattataaaaataaaattgcagtttatttgatgtggtataaaaatcatggtttccccatggatattccggacgaacaggaaaatgatcttggtggtaaagatatcccttcatggcgcagaatttgtaagactataatgaaaaatgacttttggtgtagaactctttccttcagcccaaacaaaccaaaaaattatgggcgctaccttgaacgtatgcgcagaaaaagaagtgagtggagggtaatttag

SEQ ID NO: 190947 - DNA, 168 bp, Klebsiella oxytoca
atgtttttttgtattataatcagatggttaggtggtttttttatggagttctttttaagggtgggtaaagcaaggctcaatgtgatgaaaataaatccgaaaaaaacaagaggccgttttttaagtgtggagatgatttttaatattggtacaatactctattgttag

SEQ ID NO: 190948 - DNA, 591 bp, Klebsiella oxytoca
atgaagaagacttcattacacatttcgctggcattaatcgcagctgcatctcttgccggatgcgatacaacaaatgacgcaagcaatgggaactttgaaaaagcaataaatgagaaacttgaaaaccactgtattccattgcgaactggatattcatttcctgttgttgacattttgtttagtacagaatcacagtatcacaatcgctttgacaaactgaatgctttagtaaaagcagggctactaagcgcagagaaagaggatattattaaatacagggaaaaggcaaagcgacatacatacaaactgaccaaggaaggtgaacgatatataatggaaaaaacatctggtatattttgcattggtaaatacaaagttcaaaaaattatcaatttcactgttccatctgataaactggggagaatgctctcgagagttaattacacctacagcccttctgaggtaccagcctgggcgaaatccgaagacataaagaaggcatttcctcttattgttagtaatttaaaggaaactcaggaaggtagtataaccctattcttatacaatgatggctggtcagctaacccctga

SEQ ID NO: 190949 - DNA, 1413 bp, Klebsiella oxytoca
ttgaaaaataaaatacaaaagaaagcatatttcaaaaaattacccctattaataaccctcgttatttttaacgtgtccgttgctgtttcattaaatatctatcgcgcatatcttaacgtagaatatatatcaacaggtttcattggcgatcttcaacgaatctttaatgaaaatgaaagaattgctctttccatatccagtagatattatgaactagtgagtgaaaactcttgccccgaggacatactcaacactcaacttatgggaatggtctcgaatcaaagcaacattattcattctggtgtcattgatgcatcttgcttaacggctgcgcttgagtttataaacaaaaaagcctcttcttcttttaaaaaaacatcagccgtgcgctatttttatgctccatcaattaattatttgtattttttcactgacaacatagacaaaagcataaacatttctcatctcaatcgagttattctggatgaaggtgacaagataaacattcctgagtattacgatcgtattttatctgacaatataaaaagaaaaggattatctgcaacggatatatatattgataaaatcactcatgagaaagcttataccatcgtgagccatgcgtatagtttaaataaatctcaacttattggcaatttattttatgatcatacggcgagcgaactcaaaaacattcttgaaaaacattttagtggcagtgaatccaaatggttatcggcaaagcttgttgcgattagcagtggtttgtctttgtgtttttttggttcgtgttctcactcttacatctcatatgaaattgaatactcagataaataccggtccgttgttagtgtaaacatacccgctttacttaaatcggataaaatcacattaattactgtcatagtattaatattcctctgttttgttatttttgtaagttcagcaaaagcggcatcgcgaaattacattaaaaacatggttgatcccttgactaaactgtatacgcgaaaggctttaaaacacattcagccggatatcggcagttattttatactttgtgatgtaaataaattcaagcaaataaatgatacctggggccatgctattggcgatattgctttacaaaaaatagcatcaatcatacaaaccaacataaaatcaacagatacagctattcgtcttggtggcgatgagtttttaatctacattaaaaaaaccagtcaaattcatgtatatgaaatagttaacaggataaaaaccacattaagcgaaagtccgttatatctggaaggtggatctatcttgttgtctgtaagttttggcattgcagaacatagaggacaattaaaagatacgctcaaaaatgctgacaaaaatatgtatctaaataaaaataattcagacatctaa

SEQ ID NO: 190950 - DNA, 624 bp, Klebsiella oxytoca
atgccagacaaaactcattcatatcacgtcattaccgataacctttatctggggtacggtatccggacggtgctggaaaatatgaccggaggaaaagaggcgtgttatctctcactcccggatatcaggataacccgggaaggtgtccggagcctggtcttgcgccataaggtcaccctgacgcttctggctgtcaggtgcatccggcttcgccgtctgatactgcgttttctgggagaaaggcaggagaaggttctggtgatgtccccgccggcgttattcagaaaagagcaggaatggcgacatgtccggaatatcgtgaccatcccaatggatgtctcagcaaatgcattacggcagagcgtcttttcagcggtcagggaggagccgttcatccccgtgacagcccgggaacgccatctgattgacgggctgtaccgtggatgttcggatgagacgttatcacagaaactgggctgctctgtgcgaaatatcagccagaccagaaatcgaatgatgtcacggataggcgggctgaaaggtatccatggatttttgctgtgccgggacatagtcagcatgtatgaccgtgaagagaatggagcagacagggctgacctgtag

SEQ ID NO: 190951 - DNA, 1245 bp, Klebsiella oxytoca
gtgaagggattgctgaatgcggtggcgtatacgggcgtggtggtggctgccgggtgtattacgccccaggcggcagccggaacgtttgcagagaacatttactggaccatgggcgatgcggcaggccagctggcagggacctgctatacctattacccggatgaaaaaccgctggcggtaccccggacactggtggtggaccagaatacgcctgatggcacggttctgttccagtgggggtatggcgaatttatgtcggacaccacgctctattgcgtatcttccggtatatcgaacagtaccagcagcactggaggaagtccgaattttgtgtattttttggctaattatacgccctatagcggagttcatgggctactaacatccgataccggaatacagttaaaaatactggcgcgatataatgcggcatgtgcgtattccggtagttccccttattttcagcaggcgtttggtaatacaatgtgccttgctgccggcacagaggttgatgcccgaacatcgacacaaataaccggttatctggcatatattatgcaggcatataactccggaggaagatattatttcccgacttatgctgcaagtatgtctcttcgtgcagcactggtaaagcaggggaccatttcatattccagcgcattgaatgtatctaattctactaatttctatttaagaatgggggcagggacaagcggttatactgtcattccgagtatattggccacttcagccacccggatagtgccaccggcctgccagctcagaaccaccgattataccattcccatggggcgctgggctgctgacgccatcacttatttgggtacgccagcctacggctctcaggtgcctgttaacctctcacttgaatgctctggcagggtcaaccacgtccgtttccgctttgaagacaccggcacctcgctttccggcaacaagaacatcagtctctatgataccgccggcgggaataaaattgacggtctggagatagaactgttctacaacggcacaaaggtgaatgtcgataacaccacggtgaccgatacgggtagccacggggcaactaaagcctcaccggcttcacttcccctgtatgactccgtcagtacggctgcattccaggcccgctatgttcagaatgccgcggtgacccgggcgggggtaaattataccggtcccgtgaccggcaaggtgaatatgtatgtgacttatgattaa

SEQ ID NO: 190952 - DNA, 1263 bp, Klebsiella oxytoca
gtgagaggattggtaaaggccgtggcgtgcgctggcgtggcggtggctgccgggggcattacgcctctggcagaagccacaacttatagtgcagatggtttttggtctaacggaccctctgtcggtcagccagccggaagctgcagtataaccattccagatgacaggcctttagcggtaccacaaacttttgtggtaggtagcgatgttcctgatggaacagagatattttcgtggggatatggcgaagcattttccgatattgttatgtcctgcgtctccagcggcattggtggtgccaatggggatattgatatatacgcaacctcaaatgtttatgtatcgggtgacagcagaggatatatactgcttagtgatagtggatttgctctaaagttatggggtcggtttaatactgatcctggaaccaattattctgtatgcggcggagtgtccacgaattgtcagtattacacaacatcatatgctaacccatcttttgtaaatgatccggcagcaaatacagagattgacttaacgcagacaggtgccagttcggcgtctatgtcacagactatgcgtaaatactggatatctgcgcctcccggccttaatcaattactgccaacctatacgggaagcttctcgtttagaatggctttaattaaagttggtacaccacaatataatggaccattacatacatcatctacggcgagtttctatgctcgggcaaccgtcaaaggaacttataatgtttatgggcttttggatggttcgggcataacaatagcgcccccggcctgccagctcagaaccaccgattacaccattcccatgggacgctgggctgctgacgccatagcttatatagggacgccagcttatggccctcaggttcctgttaatctgtctctggagtgttccggcgctgttgaccatgttcgcttccgttttgaagataccggcacctcgctttccggcaataataatatcagtctctacgacactgctggcgggaataaaattgatggcctggagatagagttgctctataacggcacaaaagtcaatgtcgataacaccaccgtgaccgataccggcagtcatggttcatttgtctctgtttctgccgcatttgactccgtcagtacggccgcattccaggcccgctatgtgcagagtgccccggtcactcaaaccgggacaaattataccggtcccgtgaccggcaaagtgaatatgtatgtgacttatgactaa

SEQ ID NO: 190953 - DNA, 744 bp, Klebsiella oxytoca
atgaagatatcagtgaacaccagaacgatagcgggcacggtcctggcggccggaatgctggccggcgcaacagccccggcggagtcggcggtcaggccgcagctgacgcgcatcgtggcgtacgctgaggacagggaaacgccggcggagattatcaatgaaagtacggaaacgtacatggtgcagtcctggctggaagatacggacgggaaggataaagatataccggtggtactgacgccaccggtgatgaagctggaaggaaagaagagcgggaagctgcgtctggtggtgatgaagggaaatatccctcaggacagagagtcggtgtactggctgaacctgcaggagataccgcctaaggcgaaggatgcggaaaacagtctggtgatagcgatacgcagccggctgaaggtgtttgtgcgcccggcggggctggatgcgcagggtaacgcggaggcaccgtcgaagctgacgtggaaaatggagtcggcaggcgggaagcgctggctgcgggcgacaaacccgacgaagtatcatgtgagttttggggagcttgcggtaggtatgccgggtaagaaggggcagcgtctggaggacaagtaccggatggtaccgccggagggaagtgagcgatatgaaattcccgccacgataaagagcaacagcgtgagcgtgacgtggagcgggatgaacgactgggggggcgcgggcaaggagcagacggtggaggtgcatcagtga

SEQ ID NO: 190954 - DNA, 2628 bp, Klebsiella oxytoca
atgcgcaaaacgaatccgccttcactcacccctgacacacaaaatttccggagaacggcaggtggatggcaccgtccggggattttttgtgttttaggttgctgtctggccgggagcgtgccggccagctccgattttgatgaggtattcctgcgccgggataaaggcggggccacgccggatgtgtttgtctggcaggacgcggtcacgccggggatgaagctggtcgacattcgcgtcaatgacaatctggcggaacacaccgaagtgcgtttcgtggataacggaaaacagcgggtggccccgtgcctgacccgggagcagctgataagtctcggtataaaaatagccctgtacgatgaccgtgccacagccccggataaaacgtccgccgcaacagacggcgaggccacctgtgagccgcttgagcagaaaatcccctcatccgccatcgcctatgacgccacccaccaggtgctgagcatcaccgtgcctcaggaggccgttgaccggcagcgctttaccatgatttccccggacgagtgggaccacggcgtcccgagcctgcgcaccagttacaacggctatttttacaccacaaaaaccaaaggccggtccggtgacggctggcgcacggatgacaccaccgcccgcagcgcctatctcaacctgaacaccgtgggctctctcggggcatggcgtttcttcagcattgattcgttctaccgcaatccgggtaagggctggcagtcaaaccacgaccgttcttatctgagccgggatattgccttcctgcgtagtaacctgcaggccggtgaaatctataccagtacctcaggatatatggtcggggccattcccctgaccggcgtgtccctgagtaccagccagaaaatgttgctggacaatcagttcagctactccccggtggttcgcggagtggcccggaccaacgcccgcctggttatccgtcagcgcggcaatatcatctacagtaccaccctgacgccgggaccgttcgccatcgatgacctctacagcgctcaggtgggcgctgacctggaggtgacggtggaggagtctgacggtcaggtgcaggtattccatgttccctatacggccctgccgaacatgatacgcccgggctctacccgctacagcctggcagccggacgttaccgtaatcagggcagccgggctgaggagccctgggtgaccacgggcagcctggagcgggggtttgagcatttcacgctgaacagttcggcggtggcgtcagaagattaccagtccctctccgccggtgtggcgtggaacttgggcagtatcggggcattctccaccgaagcggcctgggcgcgtcaccaggagacctggaacgacggtgaggccaggaacggctcagccgtccgttttctctatgcccgccattttgacatgaccgggacctccctgcagattctgggataccagtatcgctcgaaaaacttccttgagtttcctgagttcctgtcccgccagagccgggacaatatcagcggctacagctggggagattctgagtggctgcagcgtaagcgcagccgggtggaaatgacgctgaaccagagcctgaacaactacggcagcctctacatggggatgagccaggaccgctactacgggaccagccgcaagacgacctccattaccgggggggccggtaccaccatcgggccggccagcgtctccctgtccctgacccgcacgcatgacattcataattcggacacccagataggtctgtccgtcagtctgccgctgggccgtgcaggcggccgcagccgcgattacggctccctgaactacagcctgagccgcaacagtgacaaccagtacagccagtccctgggatacaccggcagcgcgtgggataaccgggtgaactactccgcaaacatgatgcgggacacgcagggaaaatacagtcagtccggcacgctgggctataacggcagcaagggcaacgtgtcagccggcatgagccacagcagtggccataaccagtactccgccgggatgagcggaggtatcacgctgtatggcggcggcctggtgctgtcaccgacgctgggtaataccgtggccatcgtagagaccccgggtgcctccggtatcagcgtgtccggtgcgggtaacacggagacggattatttcggacacgcgatggtgacctggctgacgccataccgttacaacaacatcagtctggataccagtcgcagccagtcttcacaaaacgttgaattaaaggattccgcccgcaaggtggtgcccagcgacggcgccgcggtgctgctgaagttcgcgacccgggtgggacgccgggccatggtggagatacagagtccgaaaagaattccgctgggcgccatgatttacctggaaggcgagaaggaagaagccggcattgtggggaaccacggtcaggcttacctgagcgggctggacgcgcgccgggaccagacgctgaaagtggtctggggcaaacggcaggcagagcagtgtcagttcaccctgccggcgctgccggaaggaaaacaggcgccggaagagtggtacaaaaaggtgaccgtgaactgccgttaa

SEQ ID NO: 190955 - DNA, 576 bp, Klebsiella oxytoca
atgaaattaaatcgtatcctggcttccctggtagtggcttccactttactgtctgccggcgcgatggcggctgacggcaccatcacctttaacggcaccgttactgccagcgcctgtactgcgctgaccggagtgtctgtcggtggtggtgcgccggcggttaaccagaccatcaacctgccgtctgtgccggcaccggcactgaatgccggtgccggtacctatctgggtcataccgcgttcaaaatctccctgaccggctgtgccgcagcaggctccctgtccaacgtccgtgccatcttcgacacgccgtttgccccggctactgatgcgtatgttgccggcaacaccgcgccgtcagccaccgctgcagacgatgtggccgtggctatcctgacgccggccggtgtgcagattgacatgaacggcggtaccgctgtggcgccgggttacaccctgccgtccactgccggcgctatcaacatggactttgtcgcggcctataaatccctcagcaccagtgtgaccgcgggtacggttaccggcaccgcaaactacaccatctcttatttctga

SEQ ID NO: 190956 - DNA, 570 bp, Klebsiella oxytoca
atgagatatcatattgtatcggataatacatatttccttatgggcgtaagccatgccgaagaaataagaaaaggtgatgtcagtataataaaaataccgcgggatatcagcagggtatcaccctcgcccggcgatgtttttgtgctctatattccggaatccggtcgaagaagtgaatttattcgccgtttttccctgcatttacttcgggtggttattctggtcgactctcctgtttttcggccagttaaaaagtattttccgtgggtaatgagtgcggcgatttcattgcgggaattattttccgtcattcgcctggctgaaatggcccccgcccgttaccggaaggtgtcagaccgggttacccggattatcagcctgctgacagggggtgtgtcagtgagggatgcagcagaaaaacttaatgttacccgggattatgtctaccgggtgagccgggaagaggtgatgcattacggcatacctgactgcaaccgggtgtccctgcttatctgccgggatataaacgaaatttgccgggcaggtgaaagcgcctgcagtgaatcatag

SEQ ID NO: 190957 - DNA, 267 bp, Klebsiella oxytoca
atggagctgagtcgctcactgctatcaggctgggtggatgcttatatcgggttcaacgagctgtaccgcaatggccggataatgcgggcccacgcccgccgcaacatccgcaatgtgcacgtccgcatcccgtcatcgctgatgaggaaagcgctgaaacggatcggcgagctatacgccatcgaggcggaaataaggggaatatcggcgagaacgcgagcggaaaacgaaaccgctgctgaaatccctggaaagcgggttgcgtga

SEQ ID NO: 190958 - DNA, 195 bp, Klebsiella oxytoca
atggtcagtaacttcctgttcttcgattctgaacatggtggtgagcgggaagcactgctgtatagcctgatcgggacgcgcaaactgaacagcgaggatccagaaggctaccttcgctatgtagccgactggccggccaaccgggttggcaaactgctaccctattattttctcctgacgcaccgtagtctgtaa

SEQ ID NO: 190959 - DNA, 147 bp, Klebsiella oxytoca
atggacgagaaacagttgcaggcactggctaacgaacgggtaaaacataatagcttattaaatatcaatttgttaatcgctagttggtctggtgctgaagctgcgctcaatgctgaactgactcatcatctcggctataaggagtaa

SEQ ID NO: 190960 - DNA, 387 bp, Klebsiella oxytoca
atgtcagcggcggttaaagatgtgctggcgcgggagcttgaggcgtcaggcctgtggcgccgggcggcagacaggtggctggaggtgatgttgtcgtatggtctgtcagatgcccagcgtgagtgggtcaggcggcggcggaggcgttgtctgtcggcaacgcagcctgttgtaaaggacaggctgaacgtgagggaaatcctcaatgcggcaaaggcggcgcaaacaaggatggggctgagtcaacagggtggtgcggcattcagattcaaaggccagaaacgcagggaaaaagtggtcatcaatgatagctgcctggcggaagaaacggacgcagaacttctcatcagcgaatattttcagcagcggcaggaggcggggctttaa

SEQ ID NO: 190961 - DNA, 936 bp, Klebsiella oxytoca
atgcgattattgcaacatagcgtacgcaatgccttgattatctgtatgttactggtctctgcttccgcagtagcggcctctcccatattgtatgtatcatatctttcctactcaaatggaaatagttcgctgaagggtctcaatgttggggatacaatgtcatctgatatgacgctagcaggagtacgttgcggaacttacacacctggagcatcatctttcaaaataactgcctgtaccgcagagcaccttgccggtctcaatgctgtttgtacgattaaagatgaaccctatattcctggtggtatgaatgtggatgggtatttttttgagattaaacaccgccttgtttccggcggtgaatccgttgacatcactgaagtattaagtcctagcggttcactatctcaaatacgcccccaaatatttgctaaagaaagctatattaccaccaatctaagtgatgacggccgtgatgtcatcgacgttaagtgtagatactcgggaacatcatctgttcctatgtattattcactgagcggtgctcaggcaggtgaacaggttactagtgaatttactgctaaatatgtagacgttgcatcgttgaacatttcaatagaacaaccgtctccgatagtagggaaactaatgactacatttgagtcccctttcaaaatgacaacctattatcctagcggtcggaaatttcagctcgcccctaaaataacctgggatgtttcggctccttgtgacagttggtcacctacattgcagttaactgatggaactatactgggtattcaccatgctgacaccgggaatttactcagaaacagtggtgggaaaagtttaacaaatataatgactgccagatttacgcctactactctgggagcattcagttgtacaggcacgttgattgtatccttcgattaa

SEQ ID NO: 190962 - DNA, 567 bp, Klebsiella oxytoca
atgaaagcatcattcaacaggaaactgatggcaggactggttgcggcatcaatggcagcggcttcatggggcgtactggcggcatctgtcgctactccgctttcggtgaccttcacgggcgatatcaaagataatacctgcgacaccgccactgtctcaggcggtggtaccgtggcgttcggtaatatctcggcttctgactttggggcagggtcagctgcgggtacatctgcgatgtcaaaggatttcaaaatctcttttgcaaactgcgggacacaggcttcagcggtgaaggtgtggtttagcggtacgaccaccaataccgttaatgcgctggataacgtggctggtgcaggtaatgcaaccggtgtgggtgttcaggtctggaagggctctacacatcttaagagtgacgatacctccgccgtcaccacgttcacactgacgccgtctgcaccagcggctcaggacctgacactgcaggcccgtgtggtgaaaacaacggcagcagctccgggtctgggttcactgaacaccaccggcactctgttcgtgtcctatcagtaa

SEQ ID NO: 190963 - DNA, 2748 bp, Klebsiella oxytoca
atgaaggatatgagggaagcgaaaataaaccacggtgccagccgaacacgccatcgcgataaagggcatttgtctctttcgcatgggctgcggccgctggctgtcatggtgatgctggcactgccggcgctgttacaggccgaagagtactttcccgtggggttaatttccggggcggaggacggcgtggcagacctgtcgtacctgacgccggcagggacgcaaatgccgggaacctatgaggtggagatgtaccttaacggcacctggctggcttcccgcaatgtccggtttgtcgctgccgattccgtacctgctgcaaaaacgccgatggcaggcagtatcgctaaggcagatgagccgtcttcggttgtgtcttcagatttggtttcaggccaggacattcgggacaaaacgggtttgatggcctgcctgacccccgatgactggcgtgacgcaggactgaagatagatgctattcctgccctggcaaatgcgccagatgacctgtgcatttctccgggacgttatattccgcaggcctatacggcatttgacttcaccgcaatgcgtcttgatatcagtatccctcaggcgatgctgaagaaccggccacaggggtggatacccccggaacgctgggatgacggtattaatgccctgctgttgggttacaacctgaacggcagccacagcaacggagattacggcaacagcaataacctgtacctgaatctcgataatggtctcaacctcggcccctggcgcctgcgggacaaccgcacatggagtcgctacgccaccagtggcggcgaaacctggagtaaatgggagcgactgaacacctatgcagagcgggcgattattcctctgcgcagcagattgttacttggtgaagcttctactgacggtgacatgtttgatgcgtttgccttccgtggggtgaagctgaccaccgatgacagcatgtatccggacacgatacgcggttttgctcctctagtgaaaggtgcagccttcagcaacgcccgggtgactatccgtcagaacggtaacctggtttaccagacctacgttccgccaggcgcctttgttattgatgacctttatccggtctccagcgggggggacctggatgtgacggtgacggaagcggatggcacggccagaacgtttacggtgccgtactcctctgtcccgctgctccagcgtgaaggccggatgcgttacagcgtggcggcagggcgttttcgcagcaacagcgaccagtacgataatccggcctttgcggagggaaccctgcagtggggcctgccttataacaccacggtctatggcggccttcagggggcagagaaataccgtgcaggaatgctgggtgcaggggtgaacctggggcgctggggagcattatcggcggacctgactcatgccaacagcgaactggctgatggtactcatcattcgggacagtcgttgcgttttctgtacgcccgctcaatgagttcactgggcaccaccttccgcctggcgggttaccgctactcgacgaaggggttccacacgctggatgagaccgcgctgaaggggatgtccggctggctgtatgactacgacaccctggatgcggatggtcgcccggagcagcgtccgtacacggactactacaacctgtacaacagcaagcgcacccggatacagagcaatatttcccagcgtttcgggtcatggggctcgatgtatatcaccggcagccggcagacttactggaacagcagccattcaacggattccctgacggcgggatacagcacctcgctggggcaggcaaacctgaacctgtcatggggttacagcaaggccagcacccagccgcattcggaccggatggtttacctgtccttctctctgccgttcagcgccctgttgccgggcagtcagaacgcgcaggcgagcagaacccgactttccggaaatatgagtcacagcagcggtgggcggagcagctacatggccggtatgagcggctctgtatttgacgatgcccgactcagctggaacgtccaggaaggttatgcccggcagggcgatggtggaaatcacggcggcagcggtaatgccagcgtggattaccgcggtacttacggcagcacgtccctggggtacagccacagtccgggctaccgccagctgagttacggtctgagcgggggcgcggtattgcaccgtaacggcctgacgctgggccagacaccgggcacgaccagcgttctggttgcggttcccggggccgccggcgtaccggtccgaaacggtacgggggtacgtaccgactggcggggatatgcgttactgccttacagcacggaataccgggagaacaccatttcgctggacgcggacaacctgagcgaaaacacggagctggatgccaccaccacgcgtgtcatccccacacgcggcgcgctggtccgggcggagtttaaagcccatacgggtgtcaggactctgatgaccctcacacataacggtaaaccgctgccgttcggcacgacggtgacggtcgggaccagcagcggcattgtcggtgatgaaggtctggtgtacctgtccggcctcgctccggagggagagctgaaagcgcagtggggggcgggagcgaaccagcagtgcacggtgcgttatcggttcacggaggcgcagatgcagcagtcgcctgtacagatatctgaagtctgcgcgcggtaa

SEQ ID NO: 190964 - DNA, 708 bp, Klebsiella oxytoca
atgacattattaaaacttcataaagtgttctcctctggatttgtggcagcatcattatgcctgtgttcaatttcagcatttgccgagggcggtatatccatccaggggacgcgtattgtatatccgcagggagcaaagcaggtcaacgtgctgctgagtaataactcccgaacggacacctttctggtgcagtcatgggtggatgcggcgtctggcggcaaaacaaaagactttgtggtgacaccaccgctttatgtcagcaagcctgaggacggtaataacctgcgggtgatgtataccggcggtgaactgccaaaggacagggaaacgctttattactttatcgtcaaggccattccctctgtagacaaaaaagacacggaaggtaagaactcgctgattctggctgccgccaaccgtatcaagctgtttgttcgcccggcaggtctgaagcctgaactccgtgaggcaccggcgcagctgacttttcgccggtccggaaagacgctggaaatcaataaccccggcccctattacctgacgctgacggagatcaaggccggcagccacaaactggaaaacgtcatggtttcgccaaaagggaaagccagcataccgctgccggctggcagtggcagcagcgtcactttccggaccattaatgaccacggcgccctgacgccggcactgacaaaaagtattcagtag

SEQ ID NO: 190965 - DNA, 606 bp, Klebsiella oxytoca
atgaatatttttcttgtgtctgatgatacctattttttactgggtatgcagaattttactgcgaacttaccatctgtcggggctgtgacattttttaatgtcagcaaatgggatgaaaagcgaaatcagctaaatcctgcgccaggagatgtagtattgttgaatgttagtaatatcaatttacgccgcaggcttattcgcttgcctgtcatgtcggcctgccgattggtgataatggtcagacttaacgggatgaaaccctttgtttgtaatgctatgttccctcaaatcattgcctggaacacgcagcctaaggaattgattagcttgttaaaacggattttgaggcatgcattcaacagacatgagatcccttggcagaccagggaaatatttgatttgctagccaaggagtattctcttcctgatatctcggacagaatgcagatgagtgaaaaatacatttatgccgttaagcgacgtttgctacatcaatttggattagggaaatgcaattcatctgttgcatctatattttgccatgagattcttcatatggataaaagtactgacaaattaagtaccagaataaggctagagatttag

SEQ ID NO: 190966 - DNA, 1149 bp, Klebsiella oxytoca
atgtattctcctgatgaactgcgtgaaaagcttgcccggcagtgggataacgccaaacttcgggctgagcgcttacttccacccggtaactggccgctctgtctgcccattggcaaaccttccgcgaaaatattcgcagagcaggctcagcgcgttttacaacacgtgcagttatggcggcaagtcgcagttgggcgtgtggaatgggaagaggtgagttatcgggcgagcgacgggccggtatcaatgccgttacgctggatcatgaatggcccttctgactggatcaacgcagcggcagatgcgacggtgagtcgggaatttcgcttgctggagagaattattgagcaggttgaccctatttttcatctgctgttggtcagtcatcgttcactctggcggcacaaaagcccgcaggatatcatcagcgccgccaggctggcctgccgattagagcccggttgcgcaaaagggctgccgttaaggctgctttccgggcaaggggtggataccaaatttatcgagaataatatttcattattaacccgactgctggacgtgcgtttttccggcgaagccagtgagcaggggttaaccacctttcttgatgcttttgatgagtccagccactgggttttgcttgtgccattatcgcccggattgctcccttttaaaaaatgccggataacgacggcggaactggcggaaacggcattgcccgtgtcgcgtgttctggtgattgaaaatgagcagtgtctgcatcaacttccagcgttatctgacactatcgcgattttagggtgcggccttgacgtgcagtggttatccagcgctgttctggatgaaaaacgcgttgcctattggggggacatggatagctgggggctactgatgctggcgagagccaggcgctgtcgtccgacgcttgatgttctgcttatgaaccgtgagttgtttgagcaatatgccagccatagcgccgttcctgagccggtaaaggcacagcaagcaatacccgatggcttgcttgatgaagagttcgatttttatcgctacttgacccacttgccgcatggtcgtctggagcaggaatttttgcctgcgggggtggttgaagaggcgctggtcaggtggggaaacgagagttaa

SEQ ID NO: 190967 - DNA, 3291 bp, Klebsiella oxytoca
atgaatcaaatagcgcgtctggctggaaaggaatcttttattctcactcgtattgagttgttcaactggggcggttttcatggattgcatcaggcagccatccatcaggaaggtaccgccgttattggtccaaccgggagcggaaaaacgacgctggtcgatgccttgatgacgctactctgtgccaatccccgctacaacctggcctcaaccgggggacatgaaagcgacagggatcttatctcctacgtgcgtggtgtatccggacccggcgatggcggtgaggggcaatcgcatattgccagaccgggtaaaaccgtgaccggtattgccgcgacgctggaacgcgaagggcagcaggtacgtctgggagcgctgctgtggtttgattccaccagttccagcgtgacggatatgaaaaggctttggcttttcagcgataactccgggcagacgctggaacactggttgaatatctggcatgacggtggcgcacggtcgttgaagcaaatggaaaaagagacgaccgggatctggatttggctgaacaataaaaagcagtatctggcgcgcttgcgggatttcttcgaagtgggggaaaacgcatttacgctgttaaaccgggcggcagggttaaaacagttaaacagcattgatgagattttccgcgagctggtgctggacgaccattctgccttcgatcgcgcgacggaagtagccaatagttttgatggtctgacagaaattcatcaggagctggaaacggcgcgcaaacagcagcagtccttgcaacctgtcgccctgagttgggataagtaccagaagcaagagcgacaacttgctgacaggaaggcgctggaattgctgttgcccatctggtttgcacaacaggcaagccagctctggcaagaaaagattagcctccttaacgctgagcttggtgaggcacaaaccagcgaagaacagatccagtcacggcttgagttgcaaaaaaaggtggttagcgactgtatgcagcgctatctccaggtcggcggcgccaatattgatgaactgaacgagcgtatcaaggactggcaaaaaacgctcggcagccgagagactctggcgcgccagtatcaacagttgacccgcaatcttggcttgccgcctgacctgagccaactacagctggaggcgaatcagcatgaagccggggcccgatgtgagcagcttgctgatgatataaagctgaagcaggaagaggcgtatcaaaaaggcgcgctcagccatagcattaccgtagaactgcgcgaacgggaaactgaacgcgccgagatcgcgcgtcgtccggattctaaccttcccgcccattatcaggcatttcgcagcgagctggcaaaagcgctgaacgttgatgagtctgaactgcctttcgtcgctgaactgattcaggttaaaccggaagaggcgcaatggcgcggtgcgattgagcgtgcagttggcagtaatagactgcgtattcttgtttcgccagaatcagcgccggaagcgctgcgctgggtaaaccagcgcaacaaccgtctgcatgtgcggctactggaggtcaaattaccgcactctcccgtccggtttttcgatgatggctttacccgcaagctgttgtggaaagatcatccgtggcgagaagctgtcaaagcattactggcagaaagcgacaggcattgtgttgacagtcctgaacaactgcgtgatacaccccatgctatgacggttcaggggttaatgtctggtaaacagcgtttttatgacaagcaggatcagaaacgccttgatgaagactggctaacgggatttgataaccgcgatcgtctgaacttccttgccaaagaaattgccgtgcttcaggagcaggttaaaaccgcaaacaaggcacttgagtttgcgaaaggcgaggtggggcttttgcaaaatcaggccatttcattccagaaaatacaacaaattgatttcgataacatcgatgttcccggcgcaaagagccaactggaagcgctcaaggagcggctggagaatctgatccgcccggattctgacgccagcgtagcgaaagcaaaacttgatgaggctcaaacggttgaatttgaacttgataagcagctcaaagccgccaataaagtcactaacgggctggatacagaactcacctcagcccgggccacagaacgtaaggcccagcaaaccgcgcaacaaggtatgcaggatgaagagcgagagttgtgcgcctcacattttccggcggtgactctggagcaactgcctgacattcgcgatctggaacgtcaacatgagcggggaattcagcaagaaattgagggcgttaaaggtgaactgcatcgactgaacattgagttgaccaaacgtatgtctgaagccaaacgtgtggataccggggcgctcgttgaggcaggggctgatttggacgatgttcctatctatttacagcgtttgcagaagctgacggaagaagccctgcctgaaaagctcaaccgtttccttgactatctgaatcgttcgtctgacgacggcgtaacgcaactgctcagccatatcgatcatgaggtgttggtgattgaagcacgactcagcgaactcaatgaaaccatgttcagggtcgattttcagccgggtcgctacctgcgtctggataccaaaaaagttgtccatgaaagcctgcgcacgcttgaaaaagcacagcgtcagctaaatgctgcccggtttgttgatgataacggcgagagccattataaggccttacaggtgctggtggcgcaactgcgggatgcctgcgaacgaaaccgtaccctgggggcgaaggcgctgctggatccccgttttcgtctggagttcgccgtatcggtgatggatcgtcagagcggaaatgtgattgagtcacgtactggctcgcagggcggtagcggcggagaaaaagagattatcgcgtcttacgtgttgactgcatcacttagctatgcgctttgtcctgcggggagccgttatccgcttttcggcaccattatccttgatgaagccttctcccgcagctctcatgccgtggcgggcaggatcattgccgcgcttagagaatttggcttacatgcagtatttatcacccctaataaggaaatgcgcctgctgcgtgaccatacccggtcggcgattgtcgtccatcggcgcggtcaggattcaaatatggcatcgctgagctgggaagagcttgaacaacactaccagcgacgggagaacgcgtag

SEQ ID NO: 190968 - DNA, 750 bp, Klebsiella oxytoca
atggcgggcttttttgacaggctgattaaccggggcgttgctgcaaatgcaggcagtgaaccagaaacatcggacgaagcggttgccgatgagtcggttgaggaaactgcaactaataatgaaacgcgaacgctgaaaaaaatacgcgaagcgactcaggaattgctcaaatacggccttctggaagaaaccagtaaacccaatctgtaccgcgtcgtactgacccatcctgaagaggtgactcgcattctggaacctctcgatctggatatcggcattgatgagatccgcggcctgctgtatgtcaaagtcaggcttgatgaaacgccagaacaggatgagtggtctcaccctctggtgagacggcaacggcttaatctggaacaatcattattagttgccatactgcgccagcattttgttgcttgggagcaagaaagtggaacgggcgccagccaggcgcagatcgttatcgacgatctcctccctcagctccagatttaccttggtgatccagggagtgaatcaaaagagcgtacccggttgcttaccctgctggatcaattaaagggacatgggctggtcacgtcgccggatgcgcatgagcggatcgtggttcgtccgattattgctcatcttgccgacccgatgaatcttcaggcattactggcatggctacgggaacaaattacgcaacaaacttcccctaatgattcgttagaaaaagaaaatagtgaggaggacgcatga

SEQ ID NO: 190969 - DNA, 1497 bp, Klebsiella oxytoca
atggaagaaaacataaggcagcgtacagaaaattatatttcagcaaaaaatcagcatccagcctggatacttcttgccacccgccgcgccccgctggtattgggctgcctgaaaacgctgtttgaaaaatcacatgatggtatcccccttgaggaagcgattcagtctcttactggcattcttgtcgcgcacgtgagtcaggaacagtatgacattaatcaggacaacccctctcttcaggccagccgtgaactgcgggaatggattaaacgccgtttaattgtcgaacgggatggacgtgtctttgctactgatgcgcttgaggtcgcgattacgtttgttgagtcgctggataatcgtttcatgacctctacggcttcccgtttgtccaccgtacagcgagaaattgaaaacctggaaacccggcttaatcctaatccggcaaacagggttgcaaccttacgtcgtcgtatcgccgagttggaacgtgaattacaggaggcggaagccgggcatattgaggtgctggaaacgcatcaggcggttgaacatattcgagaggtcttcaacttagcttccagcctgcgggctgactttcgccgtgttgaagactcctggcgcgaggccgaccgcgcgcttcggcaatccattattggtgagcaatatcatcgcggcgatatagtagaacgtctgctcaacgatcaggacgcgctgcttaatacgccggaaggaagagttttcgacagttttcagcaacagctacgccagtcagctgaattgactgcaatgagcgagcggctgcgcgtaatccttagccatccttccgcttcagatgcgcttaaccgcctacagcgccacgatttgcgctggctggttaaacgcctggtcgatgaatcgcagaccgtactccaggctcgcgcccgtagcgagcgcgatgtctgcggttttatgaaaaccggtcttgcagctgaacaccaccgcgttggtcatctgcttaacgaatttctgaatcaggcgttaaaactcgactggcagcgccagatgattcgcaaacaagaggttccgcttcctgccattggcgtagcggtaacgggcgtccctgcgattgaacgtttacgttttaaagaagtggatgatgaagcggaacaaacgttggatctcagtaatcatgcggcggatttgacgcagattggtgatgatttctgggatgctttcaatggcctcgatcgtgaggcgttgattcagcagacgttgcagcttctggtaaaagaaaatcgccccgttggtctggctgaactggcggcgttgttgcccccggctcacgatctcgaaacgttcgccgtatggattggcatggcgagagaagtgggcattgaggttattgattcacagcgtgaatttgctgaacttagtgatggggaaggtcgccgctggcgatttaatctgcccactaccggtctggaaagtcaggcattaatggatatcgattgggagtaa

SEQ ID NO: 190970 - DNA, 264 bp, Klebsiella oxytoca
atgatggatttaggtgaagttgaatatgttgtagaggattcgatgtggttcattaaatatagacatgtcatcacaggagggcgctatgattcacaagaaacagcgcagtatgccgctgagacgcttactgttgatgatatggatattttatggatggataaggttataaaaaaccccagcaagaaaggtgctgaagtcctcatttcccggcaagatatagatgagtttttgtcaacccgccccgtatattccaaaagtgaataa

SEQ ID NO: 190971 - DNA, 2367 bp, Klebsiella oxytoca
atgcacatggcagaagttccattaccaacaccgacacaggttcctgttccaagtactgacattcgtaacgctgtatttgcaggtgcgaagcttgacgaagaagtaaccggctctggcgaatactacactgatcgccttggtgtaaagcgcctgactaataccggtagaaataatcaattcaatacagctcagcaggaaagagaaagccggttcaatacatttatccaaaactcgggttatgaagtaatcggtgattatactgcaggtccgttgacgctcaccgagtataaccagctcgttcgctatgacaacgagttgtataaacttaccgcagcaacagatatcccgtttaccacgactggtaatactgacgaaacatggatcagtactgacgctgcgcattttgtatctgtcggtgatgccgctcttcgtcaagagttgggttcaagcgcgccggggaatggagggtctattattgctcttgagcaggggggaacagtccaggacgccatattccatattaccccaggcatgtttggctacaccccagacttcaatattacatctcaaaccggaacagataatggcccagcattaagacaggcgattgcaaaagctatagctcttggataccaaattgttgagatccccgcaggctttgcattgattgatgtttcattggaggatgtaaatttaggtgggcaagggtttaaaggataccagggagttaagcttgttggggcggggcaaagaaatacgaggcttttctttcgcggtcctgctgggagtgtgggcatatccaatattggtggaagtggctcaatatctcaaaaatcactacacggaataggcctatctacaaccaatgattcagtaaggaatgttaatctgtaccttctggatggatgctgcttttcccacaactcggatttatggctacttaatggtgcaagcggcattaaatttagcaatagtggaacctctggcagttttactgagtttaatacttttacaaatagtagggtgcaaaactgtgccgataatattatttttgaagtcaacggaggcgataatagttttcatggcaattcatttaccaatgtacagaaccaagttttagccgggtcaacatttgggaatgggatcagggttaatggaatcacatctccagcttacctttataaccaaacgtgggatatgaagttttttgggggcaccaactgcagagcatacaaactaactaattgtaatacagataatcttagtggaaacctatcatttgaaggtaacttaatttgtgaaacgaccgacgcctctgtttttgaatttaaaggtaacttttcaggaataagcacccttacatttaatgtggtaactcctactactgtaagggctgcaaatttcatatttaacaatgtgctagatgattttagttcatttagcaatacagtactgtcatcttatagccctagactgttcaacccgcaattagcagacacgactgataatggagtcaccgcttctgtttggagagtgagaaatgcagtgggcgatgggttgctttttaatgttttcaacggtagtccaggttggtttttctcgacaactcaggctaatcaaagaacccaggctgcggcaccaaaatattcattaggtcccgatggcaatagcttcactggttattcatcaactctttatcttaacccggtaaattcgacatacggattgcagttatcatcagccgattctcgatttgcccccagaacagataatacattatcttgtggcgcaggggcgtttaggtggactcaggtttttgcagttaatagcacaataggaacgtcagataaaaggaaaaaaaccaaccttcgccagattgacactaaagaaatttctgcgttttacgaaatcggacaacttgactcggtgtggcagtggttagaaaaatatcaaacagagggggatgaagcaaggttgcattctggtccgacagtacaagatgccattgaaatcatgacgcgctacggtcttgtatggagcgattattcctgctttgtacatatagagcaagtcgccagtccagaagaggtagaggcatggggcgatatctatgagattatccctgatcagccagctatctatgaggatgatggtgtcacgcttcgtcaagcagaagaaaaagggggccggaagctaaagacgcctgcaggtagtcgggtcatcaaagatgcacagccagctatgagtgagtatgcatttagaaaagaagagttattattctggattacaagggcgattattgccaaccaagatatattatcaaagagacttgatgcacttgaggagatatcgcaattgaataaataa

SEQ ID NO: 190972 - DNA, 534 bp, Klebsiella oxytoca
gtgacttctgatgaggttcttgtaggcaaagaaatgtcagatgcttttttgcataactacaagttgctacaagccgaaagcgatcgaggcgcggtacttgttgcatcaagtgttattgaaaaggctctggctgggttgatagcagcatttttattggaaaatgatgctaaaaacgatgagttattcgtcggttcaaaccctccactgggaacactggaatcgaagattttaatagcgtatcgacttgggttaattcgtaaagttataagagattcactcagcatttttcgtcgcatacgaaatgatttcgctcataatattgaaacatatagttttgataatcaaagtgtaaaaaatagattgaatgaaatctattcattaagagacgatcaatcaagtgcgcttgatgagataataagcaaatctaaagatgcaacttcaacaagagaaaaatttcttttattttttgcgatggatatggccgctcttcaacgaataagactttcgattgaaaggcttgcgccgcttgattaa

SEQ ID NO: 190973 - DNA, 2571 bp, Klebsiella oxytoca
atggcggaaggtgaaaatgttggcggaatctacattgagatcgaggccgatgttgcaaaattgcttactggtcagcagcaagcgaataaagcccttgataacattggagataatgcacaaaaaacatcagggcaattcaaaaagcttgatacgcaacttaacgctacctctaaagttatgtcttcagggttaagggggagcgttcagcaagcaggttatcagatccaggacttcatcgttcaggtgcaaggtggtcaatctgcattggtagcatttagtcagcaaggatcgcagctagctggggcattcgggccaggcggtgctatcgtcggggcgctaatcgcgcttggaactgttgttgcagggactttaatttcttctctcaatggtggcaaaagtgcaatggatgcgcttaaagatgccgccgagaggatgaatgatgttatctctgtttctactcagggtatcgctgcgctttctgacaaatacgcaaaccttgccagagtgaatgctaccgctgcaacattactccgaaatcaggctgcgattgaatataatcaggcaatttcaaagatacctaaagctatcggtgatgcagcagactcatttctctcatttggcgataaagctatttcagcgtttggtggtggttatgcatctattgaaggattcaacgatcggcttaagtcgctaaatatcacgacagatgattacaaatctgcgatgaatcaggcttatggggcgggacaggcgttctcggcaacagccaatagcatcggtaatacagtcggtgccgtagcctctaagttgggtatttctgaagaggcggcgtttgggcttactaaacagctcgccgatctaagcgataatccatcgcctcaggctcttcagactttagcgttaagaattggcgatatgatttcgtcatcaaaaaacgccaaacctgagttagtagagctttacaacaagatagtagacctttccaccggagcatctcaggcggcctttaactttgaattgttgaagaagtccacagacaacctaaccgccgggcaaaaaagcttaattcagcagtccgagaggaatctggcgctatctaaactacaaggtaccgcaagggcaaaattagcggctcaatatgcagctgaggacgcgggattctcaaaagacgatccgcacaccaagcgaatgatggatgatgctgccgcgacttacaccaatctcgattcgcataagaagctgacagcggagcagaggaaaggtgagagtcaggcagagagaaatgcaaaagttgtcgaagagtacagccagaaagcaaaattggctgccgattctacaagcgaacactcgcgcgaacaggcgatactggcagcaaaacagaagttaacgaatgctacaccgcaacaggttgctcaagttgaacgtgatgcagcggctgcatgggatacggcaaacgctctcaaagcccaagccgctgcccaaaagctcctcccggaaacaagagagaacgcctcttatcagcaggatatgaaggatctaaaaaccgctcttgatgggaagaggattacccagcaacagtacgatcaaaccagtgagcaactggaggctcagcaccaggctaatctggctaagatacgcgctcagcaaactgtaagccccatgcaggaagctcgggggcagattgaccctgtccaacagctggctaaccagcacgcgcaggagctggctttgattcagcagttcgagcagcaaggagttctcgcccatgagaatgcattagcgctgaaaaatgccgctgaccggcagtatgagcagcagaggaccgcagctcaatgggaaatcctgagccagcaaagcctcggctataacatgctgacgagtgcggtggacgcctttagcgggaatgcctcaaacgcaattactggtcttctcaccggcacaatgtcagctcaggaggcgatgcggtcactcgggaataccatcctgaacagtgtgatcaacagcattgttcaggttggcgtggaggcgctgaaaaactacatcctcggccagacgctcggggcggcttctgttgcgtcatctgtaggaatggcagccactacagctacggcatgggcgccagctgctgcactggcatcgctagcaacactgggaacaaacgccgcgccggcatctgcaggcatcacttcgactgtagggcttgcgagcggtcttgctctggctggcgcgcgctataatggcgggccggtatcggctaacagcatgtatcaggtcggcgagaaaggtaagccggagatttaccaggccagcaccggcaagcagtacatgatccctggcgataacgggaaggtcatcagcaataaggatatgaatggcggccaggtccaggtaaacatccagttttatgaccaaaccagtggcggacagcattcattccaggcgcaggcgatgcaggagggtaatgtggtaactgtggatgcgtttttaaccgatctggaccgtggtggaccgatgacatctggtatgatggacagattcggattatcaatcaaggcgagagggtcatattag

SEQ ID NO: 190974 - DNA, 471 bp, Klebsiella oxytoca
gtgaggcaggtaattattaccggactacttttcttgtcgtcattttgttatgcaaaatctgacgctcagattgttaatgatgcgaaagaggctgtaaggaaagatctatctcagaagtataagccaggagactgtgagagatggaggttgcttgaaggtagcgggaaggccaagagtggttctgctgtcattaattgtgacagtaacttcaatccattgttggggctagatttctctgagataaaggtattccgacatgaaaactcaaatgctgtctgcgggattgtttcgggacacacagatataagcagaattggaggtcggttcgtttatacagatggtgatagcggtcatgttttcattaagagatctaaagagcctgccttcttggctgataagagcgaaatcggtcgcaatgcactgaagatactggatcaacaattaaaaattaactccagaaattgtcagtaa

SEQ ID NO: 190975 - DNA, 573 bp, Klebsiella oxytoca
atggctatcagtcaagcgattgcattggctgcgataactcaacaaatgaacaaggttcaggatgctgttaatagtgcattcaagcccttgatttctaatgcctgtgaaatgcctgcgagattgaatgcagaagagtctttgcgcaggtgtacagcagttgtcgcaagcatcaagctgatagaagacatggcaaaagaaggtatgcatcacttggctaatgtgcgctcgggggagattgatttagggagcgcgcctgaagggctcatagagacgatgaatgctttggctgtggcatgtaagaatgctcgcggtcatgttgtagaaatgtttgcatttgctgaaagttctcctatgtggagcgggcatatcagcatgctcagacccttaaagaaaaaatatgttaaggcactttctgcagcagaaaacatcgcaaaccaaatgattactgaagtcaaagaggcaaaatcagcgtccgccgatgttgaatctttagatatacgtcgtgacgacgcgatttcattaattaaaacttcacacatcatgctgggggctgattctccaaagtggatgtga

SEQ ID NO: 190976 - DNA, 318 bp, Klebsiella oxytoca
atgactgagcgagtgaagaaggcgagcgataaccggttatcgttcatgtgtcctgggtgctgtagccgccatgtagtgcaggttggcaatggagaaggccctcgatggggatggaatggaagcgtggataaaccgacgcttacccccagcgttttagttactggcttcacgcccagtgatgacccagaacaatttgatgatgccactaaagacaagccgttcacttgccattcatttgtgacagacgggcagattcaatatctgaatgactgcacacacagcatggcaggcatgacggtgccgctaccagagctttga

SEQ ID NO: 190977 - DNA, 402 bp, Klebsiella oxytoca
atggcactcgtaaaggtattggtagcaaacctctttgccggtgccagccttcaaaaactggaggctggacaggtttatgacgtcgatgactcgatcgctgagaagtgggtcgcgcagggtaaggcggaaaaatcaactgacaagaagggggagaagctcgtctttgaagtggcgacaccgtctgcgcctgtggcatccggtgcatccgatttgcagtcaaaactcaatgatgcccttgagcagctgaagcaggcccagtcacacgctgatgcaaaagacaaagagcatgctgatgcccttgagcagctgaagcaggcccatgcggctgagctggaatcggcgaacaaacgcgctgaagagtcagaagccgcactggcagaagcaaccaagaaggcgaaataa

SEQ ID NO: 190978 - DNA, 273 bp, Klebsiella oxytoca
atggcaaagccagaagagccgtatcgtaagttgattgtagagagcttttacccagccagcatgtcaggcaagaagggtaaagttcatatcaggccgattccaggacaatgggcgagcacctcacttgctgttgagtgttctaaaaagttgtcagatgtgaaggtttacccaattggcagccaatttgaaattaccgccaagcttaccgatagggaggatggcggagagtacatatacagctcattccggtgggaatttaaacacatcaaatag

SEQ ID NO: 190979 - DNA, 993 bp, Klebsiella oxytoca
atgacaccggagcagacggcaaaggtggggctgccgatcgttccgcgcagcaaggttgaccccacgcgatcggcgaagcaggtcagcgcgatgttccgggatatcgaggatcggtatctcggcatcaagcgcgctctgaaatcgctcttcgaccagcgcctgaccgggagagagcgagaggttaacagccataactggcatttcctgtgccacgaccatggcgaagatgtgcggctctaccaggtcaatgccggcaagtttatctacgacatgtcagcgcaggagctggccgacctgctgggcatcgtacagaccatcctagacgattacctgctggaaggcggcgaacaaaacctctgggcgatggattacgtcgtcgcagaggcgcagcgcggcatgctggaggccttcaacaacctctcgcagcagtcgcaggtgtacgccagccagacgacgctacagcagcttttaaacagccccggttatcttaatcaggtggcggccgccagactgacaacatttagcgactggaaggtaatcagcgacaccgcccgcggcgatctgaccaacatcatcactgacgcggtagtgcgcggcgtcaatcctcgcgagacggaaagcgtcatcagcaagcgcctggacgtaagtatgtccaaagccaagaccatcgctcagactgagcaggtcggcgcgctgcggcgggcgcaatggaacgaaacggactgggcagcggataggcttgggctgaatactggcctgctgtggctgtcagcgctcaagccaacgacgcgcacctggcacgccagccgtcacggcaaggtttataccaccgagcaggtgcgagacttctacgccgagaacggcaaccggtacaactgctactgcagccagattccggtactgctcaacgacgacggcagcatattcaacgaagggctggctgataagttgaagaaagagcgtcagcagtggaaactggacgaagcggcatga

SEQ ID NO: 190980 - DNA, 1470 bp, Klebsiella oxytoca
gtgagcgaacaagataacggcctgcagatggctgtgaacaacctcgccactgaaatgaggcgagcaaattacctgaatgccatcggcatcggtggcgggaacacgaagcgcccgacgctttaccaggaatttggctacccgcgcacgatcaccttcaacgacttctacaacatgtaccgccgcaacgccgctggcttcgctgtggtgcatcgcctgctggatggttgctggcaggactatccggtcatagttgacggtgatgaagcacaggaggcggagaaaacaaacgcctgggaaaagaaagtcaccaagttcatgaagaagctgtggccgaaggtgaaggatgccgatcgccgcaatatggttggacgctactcagcactgctgctgcaggtgaaagataataagtcgtggagcgagccagtagatatcaagctggtgaaatccttgggcgagtcagcgctggtaaaacttatcccggcatgggagccgcaactaacagtcgccgaatgggataacgaccgtcagtcagaaacgttcggccagccgaagatgttcaacttcaacgagcagccggtcggtgatgagccttttgtcggtccgatgcgcggagagccggtacacccgagccgcgttatcttgttctgcgaaggttctgaagacgacaacgttctgtccggcatcccgctgctggaggctggtttcaacaaaggcctcgaccttgagaaagtgtccggtggtggcgctgagggcttcctgaagaacgccagccggcagatcgcggtcgagttcagcaaagagacagacatggccacgctggctgaccaggctaagaaagctggttatgccgacctcggcgaagcgatgggcgacaaggtcaacaaacttaaccgcggcaccgatgcggcggcggttatgcaggccgggcagatgcacgttctgagtgtgacgcccggcgacccggggccgacatgggaggtcaccgcgaacgaactggcggcgtcagtgcaaatcccgttcactatcctgtttggacagcagaccggacgactggcgagcgatgaggataaaaccgactgggcgattcgccgcaatacccgccgcaacggcttcctgactgaccgaatcacagccttgctggaacgcttctggaccttgggcattatcgatccgccgacaaatggagaggtcaccatttcatggacagacctgcttgcacctggcgagaaagagaaaatcgagaacgcttcgaaactggctgatatcgtccagaaaacgtcgggcttctatggtggcgagccgccattcacagccaacgaactacgcgagattgtagggctcgaccctctgcctgaaccaaagcatccacctaacccgaatgacaaggtgacaaccgatgatccactggccgatgacaccggagcagacggcaaaggtggggctgccgatcgttccgcgcagcaaggttga

SEQ ID NO: 190981 - DNA, 1473 bp, Klebsiella oxytoca
atgaagcctgagcatctcaagctgctagctgataaagactggcggctgaacaatctttactggatcaccgacaaagaaggtaagccgacccgcttcagaatgacgcctgagcagcgggaatacttcgagggtattcacacccgcaacatcatcctgaaagctcgccagctcggatttaccacagaggtgtgtatcatccagctcgacgctgctctgttcgagtcggcaaagtgcgcgctgatcgcccacacgctgaatgacgcaaagcgcctgttccgagaaaaggtaaaatatgcctacgataagctgccggccgagataaaggcggccaatccggcgagcaacgactcagccggcgagctggtctttaagaagggcggatcactctacgtcagtacctcatttcgtggcggcacgctgcgttacctgcacgtttccgagttcgggaagatatgcgccaagtacccggataaagcccgtgaaatcgtcactggtgcgtttgaagcggtatcaaccggatgctttgctaccatagagagcaccgcagagggtcgtgctggttacttcttcgattactgccagacggcagagaaagccttgttgcagggcaagccactatctgcgctggactggaagtttttcttcttctcctggtggaagaatccgcagtacgcaattgacctggtagaaccgctgccagtacgcctgattgaatacttcgctgaaatggaggcgaagcacggcgtagtagtcaacgaacgccaaaaagcctggtactacgccaaagagaagacgctcggcgatgacatgaagcgtgagtatccgaccattccggccgaggcgttccagcagtcggtcgagggcgcgtactacgccaaacagttccgctggctgtacaccaacaagcggatcggccaaatcccggataactcacacctaccggtgcacacgttctgggatatcggtgtgggtgactccacggcgatatggttcgttcgtgaggtcggcgaagagttccacatcatcgactactacgaaaactccggcgaggggctgaggcactacatgaaggtgctgaaagaccgcggctatgagtacggcgagcactggggtccgcacgacatcgaaaaccgcgagtttgctgctgatgcgaagtcacgcaaagagctggcgcgcgagggttacgagattgacggcctgatgtattcgataaacttccgcgttgtgccgaaggccggcattgataccggcattgagtcggcacgtgaaatcctcccgaaatgtgtattcgatgagaagaaatgcacagaaggtatctctcaccttgagggctaccggaaggagtgggacgacaagcgcggctgctggaaagacaaacctctccatgacgccacttcgcacggtgccgatagcttccgttacttcgcagtgacgaagaacaatcgcaagcaggtcggcacagtattcttctaa

SEQ ID NO: 190982 - DNA, 516 bp, Klebsiella oxytoca
atggcactcaccgacaagcaagagatgttctgtcgcgagtacctcatcgatttaaacgccacgcaagcggctattcgggcggggtacagcgaaaagactgctaaccgcaccgcatccgaaaacctgtcaaaacctgacatccagtcaagaattgctgaactcaaagcgcagcgcaatgatctggttggtgtaaatgcgacatacgtcctgaatcgtcttgttgagatagaccagatggacgtgctggacatcctgaccgcgaccggtgagctcaagccggtgtctcagtggcctaaggtctggaggacgacgctatccgggttggatgttgtcgagatgtcagctgagggaaacacagccgcgctgctcaagaagattaagtggcctgataaggtaaagaacctcgaactgattggtaagcacattgatgtccaggcattccgtgagcaggtgaaaactgaacacgttgtcgattcaatttcagaccttatggattccttgtctcagggggcgtaa

SEQ ID NO: 190983 - DNA, 288 bp, Klebsiella oxytoca
atggaaaaggttactttaaaagttaaaaatggccctgatattgcatttaatggtgaagaagtggcttacgaacatatcctggaagaagacacagctttgcgtgtttatgatactgagaaaggtcattggctcatgacactaacgtctaacgatgatgtacttttaaaacatgagattatcgagaataagtctgtagaaagccttgttaagtcgctaggttacactgcttatgccaaatctatatacaaacaattaggtatagacacgaccaacaatctagacatctaa

SEQ ID NO: 190984 - DNA, 138 bp, Klebsiella oxytoca
atgctgatactcttcattctcctgtcgatctggctctgtcgactgtcggagaagcctggctggtttaaggtcagccatattatctcaatgctggcgctcgaagatgagcatccggcacgcagcaaggggctgcgttga

SEQ ID NO: 190985 - DNA, 1455 bp, Klebsiella oxytoca
atgagttcatctcccggtcttaccctgtcttccagacatgtttcttgtaaaacgcctccctgggccggtttgtccgtattactccttgcaggattcgttaccatctttgatctgtttgttgttaacgtcgccatccccagtatccagaccgggctgggcgcgaattttgcgcagattgggtttattgtcgccggatatgaactcgcctttggcgttttgttgattactggtggacgactgggggacatgtttggtcgccgtcgattattcattgttggtatggctggctttacgctggcctcggctttttgtggtctggcaccagggacagattatcttatctgcgcccggattttgcaggggctggctgcagcattattgttcccgcaggtttatgcctctattcgcgttaactttgaggataatgaccggcgcaaagcttttggcttgctggggatgacgctagggctggccgctattgccggtcaggtgctgggcggatggctggtacatgctgacttgttcggtcttagctggcgcatcatttttcttattaatctgccagttggagtcttcgccattcttgcagcacggtcaattcccgaatcccgtgccccgcagagaccgctactggactggacaggcgtcctgctggtcagctgcggactggtgctagtattggttccgttaatagaagggccagttcagggctggcctgaatggagccgctgggcaccaggtctagcactggctttactggtgctcttttatcggcaacaggagcaacgtcgaaaggcaggcaagtggccactggtagatatgcggctgatggcgaatggcaatttctcgctgggaacaatgctggtgctgttggtttactctacctcaagttcattctttctctgttttgctttactggtacagacggggatcggtctggatgccttcgaggcaggaagtatctttgcgccctgtagcgtcggttttgttcttgcatccttggctgcgccacgactggttgctagatggggaacatctacgcttttttttggcgcgttaatctatgcggtcttcattgcaataatgatttttcaggtatggacgtcaggatcagaattgaaaccagtgcagttaattccggcacttattatggtcggtgctggccaaggttatattatgacgccattactgaacctggtattgggttttgttgaagaagcgaaatctggcatggcagctggagttatctcaacagttcagcaaatcggggctgccctgggcgtagccgtcgttggcattctgtttaatggtgctctttcaaaagcgactgacctgtcacaagctgggcagtatacttctgcgtttgttgccgggatgctgtacaacctcgctgcggcagcattaatctgcctgttattgatgattttaaaaaaaatgcaacggacagaaaattga

SEQ ID NO: 190986 - DNA, 804 bp, Klebsiella oxytoca
atgcggaccctgaatcgatcacgtactgacctggcagccttcctgcgggcgcatcgggaacgcctttcacctgccgaggcagggcttcccagcggaacccggcgtcggacgccaggccttcgacgtgaagaagtcgcggcacttgcaggcgtcggccttacctggtacacatggcttgagcagggccgggatattggcgtgtcgtccacctttctggataatctggcacgggtactgaaactggatgccgctgaacgccgacacctgtttatgctcgcacatgagcgtcctccggccgaaccagggaaaacctggtgcgtactgccgccccttgtgcggcgcctgatgcacgatcttccgcaccctgcttttgtgctcaatctgcgctgggacgttctgggttttaatgcattagccgacgaactgtttaattttggtagtcatgtacccgagcggcgtaaccttctctggctacttttcaccgattgcactcttcagaaacgtgtcgttgcctggcatgaacaggctcccttgatgctgtcaagctttcgccgtgatttcactcgagccagccaaagtacggatatacctgaactggtaaatgagttggaacatgtctcgccagagttcaaagtctggtggcgacaacatcaggttcacgcgccatgcaatggaatccgtcatttaatgatagaggaacagcctgtgccttttgaattcacatcactaactgtggatgaagaccgacatttgaggttggtagtgtatgcgcgacaagaagaagacgctgaacgtcctgattag

SEQ ID NO: 190987 - DNA, 681 bp, Klebsiella oxytoca
atgaataataaaaaagttatactcaaccctattttaagaatatggctggcgatatttgccataatcattttcattagtgttctcagcgcgttcaatggagagcgctggcattttaataaaacagtagattatttcaaagcggcaaccggagacgtgacaacgcatgagctatacactccagcaaaaatattctttgctctgatattctcttttgctccgcccttactctggttgcttgttgttaacaaacgaaagttaatggcagtaacgcatggcgttataccattaattttctttttattgtccattgcttttttctttctcaaaccggaagttattcccggtggggaaacgacaacttaccgctatggagcgcatagtctttattacgaaaaaattcgctggcaaaaaatgtccgctgataattacatcagcactaaatccgaatacaagacatttcttgaatacaaagacccaagaggctatcgcgagccagagaatataaagaatgcttatgtttgtgaaactgaaagagaaacgatatttttcacactggtaatcaataaaacctggtttccggatgattatcccaacatcatggacgcgcactgtactcagattaaagatattcgttcactatcggaatacacgctttccagtgctcgctggtttccgatatag

SEQ ID NO: 190988 - DNA, 696 bp, Klebsiella oxytoca
gtgataaaatcaaaccccgacgaaaagaaaaaaacggccagaacgatcagaatagttttggttctattaagtattaccgccatcatcaccggcctgtgtctcctcagcggtgatatgtggagggtaacgccctattatgattccataaatgctaaagccggagatatcgttggtctgatcatctattcaccaagtaaatttttcttcgcgttactgtatgccttcattgtaccgctggtatggttattacttatccgtacaatccacagtcgcatcctccagagctcaatattccctttattactatttattctcgcggtgatattcatttttctacaccctgaaatcacaccaggccgcgatgcaggctatcaatacagtcgtcacaatatttatcatacctctatatcatggcggaaagaaaaaccaggccactatttaaatcatcagtcgaaatatgaaacctatctccaggctaaagatcctgatgggtacatggaaaggaataatattaaaagcgcatggtcctgcgaaactcagcgttattcaatgtttttcaccctgtcaatctatgagagctggtttcctgatggcgacgcccgcgtgctggaggctcaatgtcgcaaaatcacagacatccatatgctctctgaagaaacgctgctcgttgcaaaatggaacatgaaaaatgaataa

SEQ ID NO: 190989 - DNA, 498 bp, Klebsiella oxytoca
atgggcgcgtacaggtcagccaccgccgcgctgcggttaaagcgcggatcaacgacgatcaccgtcgcattatttttaattttggcttcgataacccatttgaaccctaccggatgcgcttccgccgcgttgccgcccataatcagcaccacgttggcgtttttaatatccacccagttgttggtcatcgccccacgaccaaaggttggcgccagcgccgataccgtcgggccatggcaaaggcgcgcctggcagtcaatcgataccatccccagcgcgcgggtaaatttaccgtcaaggatcccggtttcattgctcgccgccgaagagcacagcatgctggttgaggtccagcggttgacggtgacgccctgggcattcttttcgataaagttggcgtcgcgatcatctttcatcaatcgcgcgatacgatcgatggcctcatcccagctcatacgcgtccacttgtccgagcccggcgcgcggtactccggatag

SEQ ID NO: 190990 - DNA, 987 bp, Klebsiella oxytoca
gtgactcggattcggacagcgattcggactctgacagcgattccgactctgacagcgactcggactctgacagcgactcggattctgacagtgattccgactctgacagcgactcggatagcgacagcgactcggattctgacagcgattcggattccgacagcgattctgactctgacagcgactcggattcggacagcgactcggattcggacagtgactcggattcggacagcgattcggattccgacagtgactctgactccgacagcgactcggattctgacagcgactcggactccgacagcgattctgactctgacagcgattctgactccgacagcgactccgattctgacagtgactcggattccgacagcgattcggactctgacagcgactccgattccgacagtgattctgactccgacagcgactcggattctgacagtgattccgactctgacagcgattcggattcggacagcgactcggatagcgacagcgattctgactctgacagcgactcggattctgacagcgattccgacagcgactcggattcggacagcgattcggactctgacagtgactcggattccgacagcgactcggattctgacagcgattccgattcggacagcgactcggattctgatagtgactcggactccgacagcgattcggattccgacagcgattctgactctgacagcgactccgattctgacagtgactcggattccgacagtgactccgattctgacagcgactctgactccgacagcgactcggatagcgacagcgattctgattcggatagtgactcggattccgacagtgactccgattccgacagcgattccgattcggatagtgactcggactccgacagcgattccgattctgacagcgattcggattcagacagcgactccgatagcgatatcgaggctgtaccggatagcaacagcccggatgtggtga

SEQ ID NO: 190991 - DNA, 771 bp, Klebsiella oxytoca
atgattaaagaaatggaagttgacttggatttaggcttaaaccctttttgctttgaaacagaactaaagattgagacaagaaagaaaaatctgactgtttcaaggggaacggaacttatcgaaagaaaagatgccagtcgaagctactttgctaatattgtgcatacacaagaggttgataaagaagagttcatcaaactctatacatcacaaataaaagcctactttgatctcacgaaaacagcatacaaagtattttttatctttttacgtatttatcaagatgcgataggcaaagatcatttctacctgagttgtaaaaaagcaatgtctcttgcggaaaagatagatcattttgtcttatctgaatctatcttttaccgggggataaaggaactcatcgagaaacgcattattgctaaaactaatgaaaaaaactggtattttataaaccctgctattgtcttcaacggtgatagggctcgcttcgtttcagagattaggaaaaagaaagagacgatagaaattgaacgagacgaaagcgtgattgatagtcggggaaactatactaatcatgaaggtcagcttaggtctatcgagtcagtcattgaaaatgtaaacaaccaagaagatattgatgttttaatcgccagattacaggctaaaaagtctcaaggggcgatcatgattaaaagtgtgaaagagggtatctctgtggataatgtaagccttgtagcaccagaagagccgatagattgggatactatctaa

SEQ ID NO: 190992 - DNA, 240 bp, Klebsiella oxytoca
atgattgatgagttccacgttatgtttatgtataaaaaaatccaagctgaagccgctactacagatatgaaaacactgaatcaactattgaataaatttcgaaaagtggtagaggagcggcgtgaggagtattatcaggagattggtgaatataaggtgcgtaagctaaagatgaaaagactcctcaagttgatggcgcgagatggtatttcaccacaggaactatgtgactggcagtag

SEQ ID NO: 190993 - DNA, 303 bp, Klebsiella oxytoca
atgtctaaaaataataaagttaaaaacaaatctacaaaactgttccttgatcttgctaaaagatcgtttgagacaagttggatcagtttacaaaatgatcacgatggggatataagagagtatattagtgatcatgattttatgagtgcaactatcatgtgcgtgataatgcatattaaagataactttgagagtttaacacagaaagaaggaaataatgtgaatattgacgaggttgatcttaaggttatcgctaatctgttggtaaggcattcgtatttatttgttcataaatctttatag

SEQ ID NO: 190994 - DNA, 285 bp, Klebsiella oxytoca
atgaataagaaaaataatggttttgataggatcgctactgagatgtttctactatcagcaatgcaagagtattaccgtatctattgggatatagtcaaaaaagggccaaaagaggcatttaatttacttactgataatcatcatatggaaacagtctatgaccaagtaatcgaacgagctaaaaagggcgtagccaaaaataagcgctatcttatcgattttgaaggggtgagaatggaggtaatgacgctgcataccaaagccttagtgttagcctatatgtaa

SEQ ID NO: 190995 - DNA, 201 bp, Klebsiella oxytoca
atgacaacaagaagacttattcgcctgccggaagtgatgaataaaacaggatatagcaaagcatggatttatcgacttattagcaggggcgtattcccagaaccgataaagattggcataagagctagagcttttgtagaaagtgaaatcgatgaatggattgaaaacattattcagttttcacgtaaacatgctgattaa

SEQ ID NO: 190996 - DNA, 1983 bp, Klebsiella oxytoca
gtgaaagaaatcatcgttgacaattttgccggtggaggcggggcaagtacgggtattgaattggcgattggccgcagcgtggacattgcgattaaccacgacccgaatgccgttgctatgcacactactaatcacccggacactctgcactactgcgaaagtgtgtttgatgttgacccggcaacagcgaccgcaggtaaaccggttggccttgcctggttcagccctgactgccgacacttctcaaaagcgaaaggctcaaaaccggttgagaaagagattcgcgggttggcatggatcgtcattcgttgggctctgtccgttcatccgcgggtgatgatgctggagaacgtggaggagttcaaaacctggggtccgctgctggccggggaaatgcgccctgacccggcacgcgccggtgagacgttccaggcgttcgttgacatgctgagcactggcgtaccggcggatcatcctgcattaatagagtgctgcgacttcctgcaactatcacctgacagcgcacaggtcaagcgtctggtagccggtctcggttatgacgtgggctatcgcgagctgcgcgcgtgcgactatggcgcgcccactatcaggaaacgctttttcatggttatgcgccgtgacggtcagctgatcgtctggcctgatataacccatggagatccgaagtcgccagcggttcaggctggcagcctggcgccgtggcgcacagccgcggagtgtatcgactggtcaattggcgctccgtcaatctttggtcgcaaaaagcagttggctgtgaacaccctgaagcgcatcgccagaggcattcagcgctttgtcctggacaatccaacaccgttcattgtgaagtgcaatcacaccacgacgaaaggtcagtacgattgttttcgtgggcaatcgctggctgagccgctgcagacgatcacgaaaacccacggctacgcaattgcggtacctcatctgacaaaattcagaacaggggccaccgggcagccagttaccgaaccggtaccgacagtgaccgccggcacgtccaggcgtccgggcgggaatggtcatgcgttggggattgttgaagcagagttggcgccgttcctggctggcactggcggcagcgagtaccaggctaaaccacgcccgctcgataaacccgctcacaccatcctgaaagaatcgcgcgcctgtgtcgtcgctccggttatcgcccggcagttcggagccagcacaggacatcgagcagatgagcctagcgcaacaatcaccgcgggcggcggtggtaaatcgcagctggttgtgccgacacttattcaaatggggtacggtgagcgccccgggcaggagccaagagtgctgcaactgggcaatccgctgggaaccgttacagcgggtggaaataagttcgccacggttagcgcgtttctggctaagcattacggcgggaattatcagggcgccggcgtggggctggatgagcctgcgcattcagtaacgactgtcgatcaccacgcattagtcgcttctcatctggttaagctgcgcggtacctgccgagacggccaacccactaacgaaccgatgccgaccatcacagccggcggccagcacgtgggggagattaaaacgacactagcggtcgaggactacgacgaagagcgcgcgcagcaggtgctggcgttcctgcgggaatactgcggggaggactgcaccgggctggtggaaatcgacggcgtaacgtatcgcattgttgatattgggatgcgcatgctgcaaccgcatgagctctatcgcgcgcagggcttccctgagtggtacatcattgaccgggactaccgcggcataaaatacgcaaaagataagcaggtggcacgctgcggcaatgctgtcccacctccttttgctgaggctctggtgatggcgaacttaccggaaatgtgcgcaaccaaaagatcggaggcagcatga

SEQ ID NO: 190997 - DNA, 1443 bp, Klebsiella oxytoca
atggcaatttcaaaagaaatgagaaagcttataaataaatggaaaacaggaacatcttggccaaagcgcctcgaatggcttgaaattaaaggcataaggggatggtctgggcaaagggttgatatacaatttcctattgtagcccttgtcggagaaaacgggtctggtaaaagcacagttctgcaatgtgcagcatctgtttataaagacaagaaaaaacggttcgcatctttctttttccctgacaccccgtttgaaaaaattcaaagtgcctatattcgttattcttatagggaaggacacaactcattagttaaatcgattagaaagccaaccaatcgatggattggtaatcctgatagacctgagagaagagttgaatatgtagatttaagcagattacagccagtcaatgctcgtctgggttacctgaaattgcttaaaggtggttccacagagcagtctcatgaagcattcgatcaggaaaggcttgacaggttaaaaaatattataggtaaaagttatactgcggcagggttatcgataacaacaattgatgctaaaaggccagtcactgtaatttcaaatgagggaaccagatattcaggttttcaccaaggcgctggggagataacggcgaccgaactaattgcggtcgattatccaaaatatggacttattttaattgatgaaatagaaacatccctacatcctcgagcccagcgccgcttaatgcgtgatctggccaaccttgcaagagaaagagagcttcaaattctcatcacaactcactctccatatattctctctgagcttcctccagaggcgcgtatttatctcatgaatggcgttgaagggaaaacagcagtaagcggtgtaagtccggaatttgccatgacaaaaatggatgaggaaaatcatcctgagtgtgatgtatttgtggaagataatgtagcaaaaacattagtttcagaggttatcgccagttccagggagcgtgagttattatctagggttatgattattcctttcggaaccgcaagtgttggcatggcgttagggcaaatggctcacaataatcgcttccccagaactactgtagtgtatctcgacggggatcaatctccagcaccagggtgtgctatattgccaggagacgacgccccggaagtcgtggtttttaacgcactgcaagagagggggtggccgaatatttcagaaaaaattggaagggaacctgctgaaacaatcgatgctcttaatgcatctatgagcaatgcagaccatcacggctggccgagagctgcagcaaattcattaaatattggatcagatatactttggcatgccatgtgctcatcatgggcaaaaaactgcatgagcgcagccgaccttgattctgtgctgcagccaattgttgatgcaatggagtctgaacgctaa

SEQ ID NO: 190998 - DNA, 225 bp, Klebsiella oxytoca
atgaaatttatcaaattaacccaagattcaacggtagagcgccaaggaaaatatggacgtgaaactgaaacggtttatgacccggtattcattgctgtcgaccacattgagagcatgattttcgccggccttacttatctcaggatggcctctggcgatcgtattacggtgcgggaaaccccggaagaaatcatcgccatgcttaccgcaggagccgccaaatga

SEQ ID NO: 190999 - DNA, 357 bp, Klebsiella oxytoca
atgactgatatcaccgaactggcgcagagagtaaaaacagaagcttcggcgattgatgatacccaatggtatctggctaagccttcagaaatcaggtcgctgttagaggcgctggagaaagcgcaggctcaatcatcaaaatggcttgaggcctatcacaaggccgtatcggttggtgctcgatatgaagagcgcatcgccgagctggagtcccgcaccgtcaccgtgaagcaatatgatgaatttcagatttgccattacggtaccactgaggactacgcgaagggatatatcgactgtcagaacaatttcttcaaatggctgaccgcagctggcatcaagtgggaggctgagtag

SEQ ID NO: 191000 - DNA, 123 bp, Klebsiella oxytoca
atgtccaagtgcaacgttctactttactcaatggtggttggcttcggcctggctgctggtatccgggtttatattgcctgggagtcattaatcaatctggcgtggggtgctatcagtggctaa

SEQ ID NO: 191001 - DNA, 504 bp, Klebsiella oxytoca
atgcgccgcataaacagtaaagctgaagctatggaatatatatccactgacaagattaaatgttttgagtgcggaaaaacattctctctgctggctaaccaccttaaaaaggctcacagaatgacggtagaggagtaccgggttaaattcaatatacctactggaaccccgctggcaggcaaactttatcgtgataagcaccgcgataaaatgcgcagattgattgctaatggcgtcgtgacgcactggcatcttgctgatgctgtggagaagtctaagacttcagcccgtggtgatcgccgtgactttgatctcgcggagcaagccgagcgcatgaagcgcaacgctaggcatgaagaacgaacctttccgccaggcagtaaacgcgcaaacggtaaagacgcagatcgagaacgggaataccaacgtgcgtaccgggctttaaaaaatggcgatccctctctcatggttgcatataaagcaaacctccaaaataaagcctag

SEQ ID NO: 191002 - DNA, 210 bp, Klebsiella oxytoca
atggctgcattaatttctgaagtgttcgggcgtatcaacgaagaagggaacgttgatatcctgtatgttgaagacggttacccggtaacgcgccttgatgccggcaacgtctaccctgtaaattccagtctgagcgttaattatgaccacgccgaaggcattacgctgacacaggaagatgcacgtcgcatcggtattgatatcgaataa

SEQ ID NO: 191003 - DNA, 642 bp, Klebsiella oxytoca
atgaaaaaagataacgaaaaatcctggtctgaattagccagagttccacgtcgatcatatctcgggaagcatcgccggcttactccatctcagaatcgctggattcgatcccttcttaatcattggggttcggtttttggtggaagcggaaccgagcacctttcaggtggtggtgggatgtggtcaatgataattactgggtggagcggggagcagcaggaaaaaatcactgatgttctcgccaggcttcgcaagataggttacgaaggtgcaaacctaatggtcatggcaaaagcactgttatggcctaaaaaatccctatctgacatcatcggcaatgctattgatcaggatgaagctgactttatggaagcgataatccttaaggcgtttccaaaagatacgatgatttacactattggtaaaaactactacaaaggccggcagccaatggttgatatggctaggtggatgcaatatcaccacgcgccatttcttaccgaaaaacagtgcgtagacagggtgagatggtgcgttgaattgtttaactctgctgtctatttcacactttgtgcagaacttagcatcgaaaatgatgttaacgtgaaaaaagacttgaaaataagttttgaaactgcataa

SEQ ID NO: 191004 - DNA, 321 bp, Klebsiella oxytoca
atgaaaactcttcctgcaaatcagcgggtggcgaagccatgcctgccacctgtgcttgtctggcaaacgctacttacacacctgctggagcaacactatggcctgacgctggacgacacgcctttcagtgatgagaacgttatccagcaccatattgatgcagcgataccgctggctgacgcgttaaactttatagttgagaaatatgaactggaacgaacagattgtgttagcttcagcactcaggagaaatcgccgttcattactcaacttgatctactgagagccagaaaagctacaggcctaataaaacagccataa

SEQ ID NO: 191005 - DNA, 327 bp, Klebsiella oxytoca
atggaaaaacacgataaccctgaatgggggcttctgtgcgaggcaatacctcgctttagcgcaaggctggtacaggaaggcaactggctacattatttagctgaccgtgccgggataactggtgctttcaatgaggaagagtgcaaccaactgaataccgcatttccgcactttattgaacagatggagctgatgctgctttctggtgagcttaacccccgccatgcacattgtgtaacgctgtaccacaacgaactgacctgtgaagcggataccctcggttcgcacggctacgtttatatagcgatttatcccactcaacgttaa

SEQ ID NO: 191006 - DNA, 474 bp, Klebsiella oxytoca
atgtctgagtttaatttaacctctgccttcccgataaatgaacagcgtattatacgccgcgcaatgcgtctgctggagaaataccagcgtcaacctggcgagcagtttattgccaccggcttcactagaaattggctgcaactacgtcttgcccgacaggaacgggaaatatttatggcgctgtatctcgataaccagaaccgtctgctggagcatgaaacgctgttcctcggcacgattaacaataccgaagtacatcctcgcgaggttgttaaatcggcactgcgccacaacgcggctgcggtgatcctcgcccataaccatccgtcaggcgttacagatgccagcaaagcagaccgcactataactgaccggatcgtaaatgccctgaatctggtagaagtacgggtactggatcatttcattatcggtgatggcgatacgttgtcttttgctgagatgggctggctgtag

SEQ ID NO: 191007 - DNA, 819 bp, Klebsiella oxytoca
atgagattagccagccgctttggtcgggtaaaccagatccgtcgtgaccgcccattaacccatgaagaactgatgcgccatgttcccagcgttttcagtgaagataaacacgaatcccgcagtgaccgttatacctacatccccactattactttgcttgataatcttcagcgggaaggcttccggcctttttttgcctgtcagactcacgttcgtgacgtatcaaaacgtgaacatacgaaacacatgctgcgcttgcgccgcgaggggcaaattacgggtaaacaggtgccggaaattattctgctgaacagccatgatggttccagtagctatcagatgctgccgggcttgttcagagctatttgttgcaacgggttagtttgcggtgagtcttttggcgaagttcgcgtaccgcataaaggcaacgttgttgaaagggtaattgaaggggcttatgaggtgcttggcattttcgataaggttgaagaaaagcgcgatgccatgcagtcgctaatgttaccgccaccagcacaacaggcactggctaaagcggcgctgacgtaccgttttggtgaagatcatcaacctgttaccgaaacacagctactggctccccgacgctggcaggatgaatccggggatctctggacaacctatcagcgtattcaggaaaacctgattaaaggtggcttatccggtcgctctgcacagggtaaacgcgccagaacccgcgccattagcggtatcgatggagatttgaagctcaatcgggcgttatgggtaatggctgaaaatatgctgcaacttgcatcgtaa

SEQ ID NO: 191008 - DNA, 720 bp, Klebsiella oxytoca
atgaaaaggataaatgttataggcgaacatagcgtacttatcactgagagattaactcaggaaaacatcatgaatgaaaagataactaacgattatctggtaaaagataaacatgctgaatggactgaaaataaacgatacaaacagaggataaaggacacgcttaataaagcacttaaagagcacccaagaacactggtgttaaaaatagaactttgtattccagatgctatctataacccagattcaacgctgatgaccagatttattgcatcccttgatgcgcagatagcagcagatatacaaaaacgcagtaataatggggtacgtgttcatccatgtactttacgttttgtatgggtaagggagttccatcaggatgggcgcaaacactaccacgtggctttatttattaataaagatacttatgcttttcctgggacgtactatcctgataaaaaaggtaagtatacgcataatttatctctgatgattatggacgcctggataagaacactgagactcgataaggatgtcgattatcagaaacattactggctcatcaactttgcagataacttttacttccacctcaataagaatcagctaagttttatttcaagctatccattagttctcgatagattgcgttatctcgctaaaaatatcacaaaagactattcggatgggcagcgtagttttggttgtagtcaatactga

SEQ ID NO: 191009 - DNA, 1425 bp, Klebsiella oxytoca
atgtataatacctctgtaaatagtgaatatccactacaacatttccccagacaactcaacaacgctgtgcaagccatttacgacagaacgcaggcaccagtcgagttgatcatgggaacatgtctgagtgctatgtcactggcatctcaggctctggtggcgtttcagtatcaggatgaacgaagaagtcctgtctccctgtataacgtgattatcgcagaatcaggagaacgaaaaacggcggttttcaaccaggtcatgaagcccatactgaagtttgaaaagcagtctttgaaagcgtattccgacaaggtcaaggagtatgaggccaacttgttgggctggcaggcaatcaataaatcaatacttaatcttatcagaaggaaggaagaacaagggaaagacaatacctgtgagcaagaaaggcttcgggagcattacctggagaaaccagtgccacctaaattacctaagctgatttacaacgatgcaacccatgaggccatactcaaaggtctatcagaaaacattgggtctgctggactggtatctgatgaaggtggtggagtattaaacggaagagcgatgagtaattccccgttatttaatcaattgtgggatggtgttccttttgacgttgaacgcaaggaccatcgcttgattatcgatgacagccgctttgttattcttgttttaacacagttaaatgaattgaatggttttctcaaaaaaagaggtgagcgtgccattggcaatggattttttgctcgatgcttgtggtcagtcacaacaaccactcaaggacagcgtcagcaatcttccgggataaagtgtgataacctaaatctagataaattccatcaacgaattagcgaactattagaattaactatcagcaatgcatcaccgaggacactttgtttttcacccgaggcagagaaaaaattttctatctttcagaatgaaattgaaaatctaatagtcgtagacagaaataaacattcagccttagcaggaatactttctaaaattccagagaatgcggtcagaatggcaacgctgattcatttcttttatgagtttgaaggtgatgaaataggtcagggtacgcttgaacatatcattcaggctattaagtattattataatcaggtcgttaaagtactcacggtacgaatggataaaggagaagaagatgcaaggaatctctatcaatggttattgaatggaccgataaatcaaagaggcatgtgtacccgagtcgctaaaacacatgtcagacgctatgctccatatcagcttagagatggtgtgcgttttaataaggctttaaagattctagaggagtatgggaatattactatttgcaaggagaggaatgtaaatgggagtgttcatcagatcatagagataaatcggagttga

SEQ ID NO: 191010 - DNA, 720 bp, Klebsiella oxytoca
atggattacaggcaacagctagaccatgagcttacaaaactcatctcctaccatgaaaaggaatacgctaattacgttagcgatgatgataacttggggactgatcttgataacgactttgagacacaagagcaaaacgaagaacctcattattcagtatggtcatccgaacatttcatagaaaaaattaagccaatggctatggttttgcacgattacgatatcgtaggtaaatgcgaaatcctgttggctatcataactaaaatacaacaggccgaagaaaaggcaatgaaagagagagataattatatagattctctctatcagtttgatcacaaaacgtacttggaaaataagctatttttttctgcatccgatattggatgttacttcggttacatatctgcacaagaagtaaataaaaaactgatcgaggccggattacaggtacgtacaaacgaaggtcttatacccactactcaggggcaaccttaccacttaaaaacggtgtacactcctgctggttcaaaaacttgccgctgggataaagctatcgtacatgtgctggcgatgcatcttggaacagagccaggattgggtatctacaatccgtttctcattatgttgatattcatttttagccctagcttccattttcatgaagaaataattggattacacattgaaaatggctatgatgaaataattagaggagtataa

SEQ ID NO: 191011 - DNA, 1170 bp, Klebsiella oxytoca
atggacatacgaaaaatatttgaagctataagcttggagttatcagctaaattccaaaagacaattcaaataaaacataatggcggtaaaggtgataatagagaagatgcctttgtaggttttctcaaagaatatcttcccggaaagtatggtataggacgaggtgaagttatttcacctgaaaatgaaataagtggagagttagatattgtgatttttgacaaggatcactgcccattatttttaaaatctgactcccattctatatatcccagggaaagtgtctttggggcaattagcatgaaatctcatcttgatagcgaagagttaagagatgcatataaaaacattgcaagtttgaaaaaaatggttcccacaaaaggcttttctaattcgccatcaccaggcatgagagtaggtttgcacccagtagttcctgtaactgcaatatttgcctatgcatcgaacagaagtctcgaagctattgctaaacaagtcaaggagttagatagggagttagatgatattaatctgagaccggatttcgttgtagttctcggtttagggattgtagggcctaatagccggattagaaaagatttcaatcagtatgatttaccacaagaatataatgatctttcgtactcgagatcaacaggtaggcatacccttctgcgtttttatatgcaatatcttgatgagttaaatacaataactcaacctaaccttaatcttcgttcatattttgatatgccttcaagggtcggtgaatacaaagttagaaaacatgacaaattaataatgaaacatgaagataaggagatggaggtagttaaacgcctaacattgtcagccatcgatagaattgttaaagattcaaaaatggttacattagaacaacattataaaaattattttggcgcaattccattgggttcggaaaaaatagatgatctatcaagggttatatatgaatacaatccaaagaacaaaccaccacttaaaataatttgggatgatgataacagtcctactggtgatgtaaatacatttcaagcattttatattgagattgatagtaatcaatatgctattgattcagaaagtattaataatgatgactttgaagataaccccgacttcacagttgatgaattaatgtctaattga

SEQ ID NO: 191012 - DNA, 4578 bp, Klebsiella oxytoca
atgagtattgcaggcatacgttccaatcgcggtgatggatatcaaaccttagtggcgtttgattgggccttgaaggttttatcagatccagactttctatggctggaagtcgattcgataagctactccgttgatgatgtcgtcgtaggaaaagcggatggaagcgtgatcgtctgtcaatgcaaaaaaaatcaaaccgattttaaggcctggacgatagctgatcttggcgatgagctggataaggcctttcatctgctagcgaacactcctacagctaatgttcgtttcatttcccgaaataactttggcgaccttgcaaaactcaaagaacacagctcttctcaaccagacgaaaagagttaccgactaagcctaggaaaagcacaacagcaattggatgaaactttgtcgagccaacttgcgaaaattacctcaaggctttcaacatttgaattcttgcgtcgaacaaattttgtggttactgatgaattagatcagatggagcaggaactgcggggacagttacgacgtgtagtgagtaacccagacactgctttcaatgcactctgggtaagcctagataggttgggtgcgcgtatggaaggtccgagtgtatctactgctgcgcaacatcgtttaacgaaaaaagatctccatgcccttatccagcaagctgggtctatgctagttccccccatgaatcttacagaagtacttcgttctttttccagtacttctgctataggtaggtcctggcgacgagatattgcaggacagcggctcgctaaccctattctggatgaattattagctgcgattgatgccaaaacacgttcaatcctacttacaggcctccccggttcagggaaaacctgtgtgatgcttgcattacaagaagcattggaaaagcgcgcaataagccgttcagatattgtccctttatttattcagtcacgcgaattcgccagtctggcaacatcagaggagcgccaagctcagggtttagcacaacaatgggtagaaaaagcagcaagactggctgaagacactcatgtaatagtactcattgattctttagatgtactgtctatagctcgtgaacatcgggttttgcagtactttcttgcacagatcgaccgtctgctcttgatccctaatattactatagttaccgcttgccgcgacttcgacagacattacgacaaacaaattgccgaacggcattgggattgtgaattaaagtgccgaccattgaattgggatacagagattgcacctttacttgatgtacatggaattacaactaatactatagacgctgttacacgcgagttgatacgcaatccccgagagttagcgctgtttgtcgaactggcccaacgaggcggcagtttcaatgtcgtgaccagccaggaattggctcaacgctatcttgatacgattgtgcttgctaatgatgaactaggggatgttgctatacaagcgattgaggcgattgcctctgaaatgttgcgcatacgaagcctggtagtgccacatcaacgtttctctgcctctcaagatatacagaggaagctatgtagccttaatgtattacaggaaactcaagatgggaaactaacgtttggtcatcaaactttattggacgtacttgtcataagtaaggctatgcgtaatggcattacattgaatgatttcataagcgatttatcaccagttccatttgtacgtccgagcatacgtagttttatcgctcaactagcgctgggagaacgccgtgagttcagaaaacaactcagggctgtattaacagggaacaccgcatttcacattaaacgtctaatagccgagtcttttgcagaacaaaaaccccagaatgaagactggccatttattcgcgatttgcgtgagaaacagtatgatgttttccaggtgatttacactgctgggcgttctatcgaatggcatcatttctggcttgacttccttattccccatttaaaaatgatcaaagatgccgaggggatgaggaggcatgcctaccgtattaatcaatggaacaatattgacactagtggcgtagtctcattttggatagaagtactagactttgattggcttggtgaaaatggaattgcggatcaactgtcgatgcgactgtcagacattaatcctgagaatatggctattatcattccattattagaaaaattacttaaaatgccacgttctgaacataattctcttggttgggtcgttgcaaacagtgtaatagcaggagctgtggatgatgattttctctggagctatattgcgggcgatatcgaagatgaggatgtattagaatttagattcaatggcaaactacgttgccagcctcataaatttgggaatggaaatgaaaagtttctaaatcagcgcatggaacaatccggtgctttactggacttagccttaggatctattgagcactggagccaagtacgcacatcccgttacgataaatcacgattaagttatagaaatgggtttctaaacaaaacctcttacgaaactactcatagccagcgagatatgtaccatacagacagtacagaggcattatttaatgctgttgaggcaggtattattcatcacgcaataaaaaattcagactggtggagaaaaaaccgtgaacgtctttgttttaaccacgaaggtgcattactctacttcggtattattgcctgtacgattgcacctgacgctaatattgatttaataggtcgtatgttatgcgatcacgatatgctagagttcaagctttcttttgaactaggtaagttaatacagtcggcatttaattccctacctacccgggttcaagattcaatcatggataatatattaaccattagaaatgaatatgtttccggtaagcctagattatggaaattaagggcgcaagctgaatttattgtatcgataccttgctatctacgttccagtgaattacagaaaagattggatgaatatgaaaaaataactgggacgttcacacgtgagcctcatatccattcacaaggtggttgggttagagcccccttctcatatgatgtttttataggtgtcagcaacaaggcgatactgaaactgctatctcattatgctggacatactcaacgagaatgggatgactttcttattggaggagaagaagaagtgggcggggaattgcgggaggcatcgtcacgccagcccttacgcttccttaactttttatccagctactggattgatatttcaataaaattccgcgataacataatgagtggagttgcgaattatctggcatatcgctatggaaatttaaatcccaataaaacatgggagcctcttgaagaacctaatgcatcacttcttgcaagcaagattctggatgaattggaaagacatcaaagacattggcgatgcaatgcctttgcagctaaagcgctagaagcctgcgccaatgtcatacaagacatacaagaggcagaacgactaatcttcctgactattggctttgcaggacttaatgaggtcgacccaattgagggagattctgttgatttgattgcacttggaattaatatggtgaaaggggacatcaccgaagccttgatgattctggcaaataattttttagagcaaggaaaaaaactaccaaaattgctagttcctacgttaaaacggtttgctggcgatgagcatcctgctattcgtgctttagttttgcagcatttaccatttatgcaaagcaagtcttttgatcttggctggaatttgttccacttagcgataaaagattttagtggtctttggagtgtcgctgagagatgtctttattattcttaccatgctcattttgaaattgttcaaccattattggttagtatatacaatgatggagatgataaggatgttgaaacatggggtcgtatttcggctttatcagcaatgacaggacatactaattttgataaattcataaaagacctgaatactttagacaaaaaagaagcctggttgggtgcggctcatgtttggacaaatagagaaaatattcgtcaacataatgagcagtgcctaaaaggaattgaagcaggtttaaaaacaaatagtccacacgccatcgaggtagcgaagcaattagatcatatatttgatgatagcgaaggagtaatctatgtaccattagaaatagtagatctctgtttttctgtttttaaaaataatagtaacactgatgagagcaaacaatatcagttctataggtttcatgaatggcttaatgcaatttcactacacgatccagaactagccttgtcagccacggaaaaatatctaaccttttcccgtcatagcagacaatatctgtatgatcaccataacagccttactcagttgatgacccgacttttcgctgaagcagaagaacgcgaagaatcagatcaaggaataatgttagaacgcgtagtggcagtacaagacatacttcttgctctaggtgtagaaggtgtagcagattggttaaaggcggcggagcgaccatga

SEQ ID NO: 191013 - DNA, 882 bp, Klebsiella oxytoca
atgaaaaaattaagtagtactattatattcctctccggatttttattcgctacctcttcattcgcaaatgaaacgtatgatttaaaatgtacgctcgatgatggtgatcagatgatggttagtcatgtcagcgatacggtttacatcgcatttttggctcccggagacgatcctgatgaaggcggttcggtcattaaactcgatgtttcatcaggtggtgttaagcaagaattaacagagccgggtatgaaatatccatattttacactaaccggaacagatgaagagatcgatgggaagatcattgttgattataacactgatgaaaactctaaaatctcagcttcctttgcacaaatcgatagtaaagggaataacatcgcgaaaaattactgcaaaccggacactattaaagcaaggaatggactaactgaaaaaggtattattgctgtcaaaaattccgctgataccgccagcaccaatgtctcctccaaagatttattcaaattatctgtgtctcagaagtatcgcgactacagttcagtaagagtatatttctggaagtaccaattaattagcaatgttgacgatcttaaaattcaaaaaattaccgttaacagaggccattgcttgattaatgaaaagaaaatcacttataccacaagagttcaagatcagaacactcttaaccgtattgttaatggtagaaaagccaaacagattacggaggacaacgaagttccaagaaccagttgggatcttaattatagcgatgtttactactttacggttacgactgatagcgattatggaagatgcaggcctcaagaggttgtgattgaaactaataaaggtagttcgagttttacttgggatatttaa

SEQ ID NO: 191014 - DNA, 315 bp, Klebsiella oxytoca
atgcaacatatagcaatgaaatattttattgtcgcattcgtactatcactgatcattgtaatttttaatctattttcagcaacaggaaagatttatggtttttggcatggtgtaaaaattttgttctggctgacgattggccctggaattggaatgttaataggtgcttttattcggcagtggttgatgcctgatgctatatatactcgtgagggtgctattggaatatttaaagcaaaaatattctggacagttgggccacaggcaatcggctggttacttggaaccttggcagttgcagaacaattatattag

SEQ ID NO: 191015 - DNA, 948 bp, Klebsiella oxytoca
atgaaaaataatgaatttaattttttggttgaagaattagatagagcgtttgaggagcgcgtaaaggatgtagcaacttctgggtatatctcagcatcaaccctggaagagtatcgtgaagatgcagaagagcttattaggtattttattaatggagtatatgtaagtaataatgggaggctaacaaactccgaaggtgattatataaatgaaaataatgaaaatataaattatgagggtatgcgaataaatagcaatggagaacttatagatgataatggaaatgttatagaatataagggaagtcagcaatataaacgaagaagtttaaaaaagatggtcgccaattactctcagttcacaatgcaagattatattcattattggattgaaaaattcaatttcgttgatttattaaaaaggcagtatgacatcaataaaatagatattgatgtgtatttgagattatctttaatatgtcatagatgggggatgtataaaagtaatcttgaccagaacgatgagcaatatgaaggacgcaaatatttgtttgatgctttaaattatataagcctatggataggcggatgtaaggttctaaatattaatagaatgttcgagaataataaaagaagtctaattgaggctgctcagttgggagggaaaggtcgagctgagaattatatcccgctaaagctaaaaatagttgaacttcttaaagaaaaagtccctaaaggtggctggaaaagtaaagcatcggctataaatgctctcgagaatgatattaataagtttatggaaaatgaacagcaagaattggaatcgtatagacctggaaaaaaactcaaatattatgctgcctgggataaaatgcagagaaggatttctgactggtcaagaaatgatgaaatgatcaaagctgcttttaatgaggtcataatgaaataa

SEQ ID NO: 191016 - DNA, 339 bp, Klebsiella oxytoca
atggcatattacagcatcggtgaagttgccgaacgttgcggaatcaaccccgtgactttgcgtgcatggcagcggagatatggtttgctcaagccgcagagaagcgagggagggcaccgccagtttgacgaggaggacgttcagcgcattgaggaaatcaaacgctggatcgatcggggggtttcggttggcaaggtaaaggcgctactggaaggccagcagcctgaatcgcacgacgcagccgttctgctccaggaagagatgatgtctcttctgcgacttgtacagcccgcgaaattacgtacccgcatcatgtctctcagccatgatatcccgtag

SEQ ID NO: 191017 - DNA, 201 bp, Klebsiella oxytoca
atggtcatttttttgtacaaaacgatgaggcagatcaataattctcaggtcattaacatcctttacaatgttacaacggcgattaaaatccttttcggcgatctcaacgacaaaaagcaaaaaatgttatacgttctcaaaattaaaacatttcaactcacgatgataaaattatttattgcagtaatgatcacatattag

SEQ ID NO: 191018 - DNA, 1359 bp, Klebsiella oxytoca
atgcttgtgaccatgtcagataaagaactcagtcggatcaacatcattcagtcagttgttgaaaagcgcatgcgccgtcgagatgctgctcatcagcttgctttgaccgaacgtcagacacagcgtttgatgaaccgctttcgtgaatctggtgctgcaggtctggtaaaccttcgacgaggacgccccggtaatcacagacttcctgagtcattgaagctgcgtgtactttctttacttcacgatcattacagcgactttggaccaacgctggccgcagaaaaattgcgcgaacgccataacatcacggtgtctgttgaaacactgagaaaatggatgacggctgatggactctgggtcccatactcacgtcgcaggccacgtgttcatcaacccagataccggcgtgactgccttggagaacttattcagatcgatggttccccgcatgactggtttgaaggaagtgcccccaaatgctgcctgctcgtcttcattgatgatgctactgggcgcctgatgcacctccgtttcggcgagactgaatcagcctttgattacatgatggccacccgcgagtatcttgaacagcatggcaaaccactggcgttctacagcgataagcacggcattttcagggtcaataatggtggcactaccacaactggaatcactcagttcggccgggtgctttccgaactggggatcgagttgatatgcgccaacagcccgcaagctaaaggtcgcgttgagcgcgcaaaccagactcttcaggatcgacttatcaaagaaatgcggcttgaaggcatcagcagcatcgaggatgccaatgcctggatggattccttcattattgacttcaatcgtcgttttgccagaccagcaaaatatcccaaagacctgcatcgaccggtggttgaaagctctgaagatctggatgatatctttgcttggcaggaatcacgaaaactctcgaaaacactgactttccgttacgataagatgatatatctcgttgagcctacagaagaaaataccagaattgcaggtgaaaaaatcacagtttacgactacccagatggtacgctggcgtttaaatatggctaccgatcactcaattatcaggtcttcgataaactggaatgcatcgaccaggggcaaatcgttgataacaaacggctcggtgctgtactgaaactggctcaggacaagatggatgaattggatcgagagggaaagcgagataggagtaaaaaaatgcccaaacgacgtgcacaggcccgggttcaggagcaactcaaggccatcaaccccgtactggctaatcctgaagagttccgagccagtctgaaacgctag

SEQ ID NO: 191019 - DNA, 138 bp, Klebsiella oxytoca
atgacgtacatgcctgtgatgagaggctataccaataagctgttattcgccttttttatggtcgtgttccttcagtccgggatgctttggcttgttttccggagtgacacgccttcttttatcttctttgccagttga

SEQ ID NO: 191020 - DNA, 975 bp, Klebsiella oxytoca
atggtacctactgctaaaccactacacttgccagtgcatatagcaactgagaataattatttttccatggggcttatattcctgttgaaagagttgtttgaagaggagtatcagggcggagtgattatctctaagactagcgagcctatggccgcggatctgatcgtgaaattccacacgccgggtgaaaaagtgtttgattgggtggggtgtcatgagttccgtacacacaatgaatataagttcaaaatgttaggtaaaaaatggttaagtgtatatccgcgtagcgaacattacgatcggaatattaactgtccggtcatcaatgccgttattaccatgagaaactccgtggccactattcgcagaaaattgtttactttatttttcgctgactcgatgagcggccctccggatctgcgtaagccaaactgctctaaatgcccagggccttaccaactggcatggcgagaacagttgatgctagggtatttaagtcaaggcttggggcattatgagatttcgcaaaaaatgggttgttctataaaagcattgagcagctatcgccgttctattatgcgtaaaatcaatataaaaaggtatagcgacttcgtactgtggttaggctctcaggctgtttcaaaaaaatacgctgaaattgtccagcatcatgttccggaatatgctgacgatcggcttatctggaaaacaaaactttctcctgaaggcggtgatgaatcagatgataagtaccgtacgttgcaaagcatgaaacgcctgacgaccagtcgtttacatttaaaacaatccgaaagtgaaatctggctgacgacacgagagatcgccaacgaaatggatattagtatttacagcatgcgctatttattatgccagatggaaaactccggagccgtaataagcattaaaaccgggagcgggagaagtaatacgctacgctggaaattagcaagttaa

SEQ ID NO: 191021 - DNA, 948 bp, Klebsiella oxytoca
atggaaaagagaaacttaaagaaattaatactggcagcggggattatattggtatggtcagagtctgcatcggcagctacttgtaatgcgtttggcaatcaggggggaggatgcccaacggtacagtcattaaatgtaactggcggttccgttgcggttaattgggccgcagatatgaatgcacagtactttgcctcaatacagggtagtctagcaacaacctggggtttatatatgattcatggttggcacacatcaatgaacgggcattggtttggtggaggaacaaagacgccaatattaaccgtcaagaataccgatcctgttcgtgatgcactgggtaatcttacaacagatcaatgttcaattagtgcgaatcaatgtactcatgacaggatggccgcgcggttttacaataaatacggagcctccggtacgactagcgtgacgttgccctcatcatcatcaccaaacgcaccgccgtgcctgatctttggtgctgtagctcctgatacgggggatttctttacagtttttgcccctgtactggcagaaccttgcaagcccggattccctggaacggttgatcctgaacctgatcctgaatggtgtggaatgagcaccagtgcgctgtcttttgcatttggcgatatggcgcctgcggtggtttcgggacagtcgatgaccaaaagcgccactatggcctgtagcaatgcaggtgtgagctatagtttatatctgagtaatgtttctaccaccggcagaaataaaattgatttgggccgagggatcaccgctacggtgagcgccaataatcaggcgctgcaaacaaagagaacttctacaggtaaaacaaatacattgaatattacagttactctcagtggcacacctactagtacaggcccaattagtggcaccgggatattggctgttaactatttataa

SEQ ID NO: 191022 - DNA, 507 bp, Klebsiella oxytoca
gtgaaaacatggaaattagggcgccttgccactctttgctgcctgattgcggcatcgccgtacagtctggcatcagacggcgggacaaccacgctgaccatcagcggcaatattatcgaaccggattgcgagattaataacaatcagcagattatggtggatttcggtgaagtgcttacgacgcgcatcgacggttcaaactatgaaacgccaattgtctatacgttgaaatgcaaagaccttattcgtaacacgttaaaaattaatctcaaaggaaacggcgcaccgtttaacagccagctgttctctacagatgtgacgggacttgggattaaagtttatggtgcaagtaaaacgacgattgttcccaataccggggcgctgagttttacctatgccgaaaataaccctccggctctgtatgcggttccggtcaagcagaccaacgtctcgctaccaaacggaacattcaatggttccgcgaccatggtgtttagctatcaatga

SEQ ID NO: 191023 - DNA, 159 bp, Klebsiella oxytoca
atgaatccctatgaaaaaatgtaccgccagctgctggaaaatggcgccatcgcctgggctggcgagggttacttaagggcaaagaaacaacaggagcgggtgtttagctggcttgatttacagcagtactttccccaacccggagcgccagtcctttag

SEQ ID NO: 191024 - DNA, 345 bp, Klebsiella oxytoca
ttgtgcagctggtttagcggtatgatgtttagtggttttgtggtgttttttagctgcctgcgctttctgagctacaggtttagcagcggcttttttgtgtttcttagcggcctgggctttctgggttacagctggtttagctgcggcttttttgtgctttttagccgcctgcgctttctgctcagcagccggtttggcagcggcggtatggtgttttttatggtgggtcgctttagcggtggtgctgtgagttgcagcagccggcgccggagttgtggtggtggcagcatcggcagcgaaagcaacagaagacagacccatagcagcggcaacgaccagagctaa

SEQ ID NO: 191025 - DNA, 444 bp, Klebsiella oxytoca
atgagtttatatctttataaacaaaaaagtaaagaatttgattgtttagattttactaatcacaatgacggcatgagcacaaaagaaattagaagtaagcgactagctgactggtttgctgagcgcactcttcctgaaagagagaaaagctatttatcacaactgataaatggtaagacttcttttggcgaaagagcggcacggcggatagaaagggactacaatatgcccccgggttatctggatgctatggatgccggtaatgagcatgatggctctatgccttcagtgctttcgtcaatgcttactgctgatgaagttaacctaattaagttttatcgtggatttccggattctgagaaaaaaacagtactaattgaattcgaaacaaaattcaaaaaatacaaccagttattcgctgaactactcgcctcccgtaagtaa

SEQ ID NO: 191026 - DNA, 321 bp, Klebsiella oxytoca
atgcaaaacgcaatagcacgaaagttagatccaccaattctcaacccggttgagattgaaagcgtcttactcaaccggctttcatcggtcggccaaaaggtttacgccgaacttttggggatcagtgagtcaacggcaagcaggcgtaaaggggagggccattttgctgatgtggcgaaagaactctcaatactcggattgcaggttgtaccgccggaagcagtcgttgtgtccaggcattacctgcagtctgttgaaacgctcgctgatataggcctgcgtgctgagcggtgccgcccgggtccgctggggtgggactga

SEQ ID NO: 191027 - DNA, 201 bp, Klebsiella oxytoca
atgactatcgagaaaactcatatcggtattgtgatcaccagagacggaccgaaacgtaaaaagctgcacgcgacggaaagtatgtgggtggtgggaaagaacgagttttaccacaaagacaccgggcgccggcactttgccgagaacacccgccgtcggcttttgctggaaacgattgagaaaatcgggagcaaattatga

SEQ ID NO: 191028 - DNA, 267 bp, Klebsiella oxytoca
atgagtgaagtcacagtgaagttgacgaacaaagcgatcgcaatcattgcggactacatccaacgcgccagtaagaacgagcagctgcaggacgcaaagaatcgtctggataaaaaaatagcgatgctctctgaagacgaaaactgcgatcaggagctgttgatggctgcattcgtaccagcgatgacaaatcatacccgtgatggtttttttgaagctattgcagttgctttagaaggagcgcatcgccgagctggagtccaataa

SEQ ID NO: 191029 - DNA, 1107 bp, Klebsiella oxytoca
atgaaagtgttagttgaagatattgtagctctaattggtgcatctctggatgcaaactattctgaagtgcgaagcgtaagcaatcgcattgcgagagctatcagtgtcgaggatatggacggggcgcaaaagatcaagtctgtgcttcgtcgcaaaggagttccgttgcgtagttctggctacagcgatagcttgcctgttgatccaaaatcaaggatgcctttggttgaagaacaacaatggcctgttaccccacttcttttaggggaaagtgaacgtaatacatttacaacatttatcgaaagtgtaaaacaacaagataagcttattgaaaatgggttaatggggaagttagggcttttattatcaggccccccgggcacaggtaaaacattaattgcgggacatattgcctctcaactcaacaggcctctgtatgttgtaagattggactcagtgatctcttcattattaggtgatacggcaaagaatcttaggcaaattttcgatttcgtgccatcacgtaacggtatattactacttgatgaggtggatgcggttgctaaagtgagagatgataggcatgaaataggcgagcttaagagagttgtcaatactttaatacaagggttggattctcttgatgataattcagtagttattgcagctacaaatcatgctgagttgcttgatcctgcaatatggaggcgttttcctttcaaaatacgcttagacttgccatctcaagatttgagagaggtgttatggaatcatttccttttccgagataatgggaatgataaagagttgaaagcattaggagccatatcagaagggatgagtggggcagatattgaaactgtttcgatttcagcaagacggcaatctattttaactggtgctgatttaaatatggcatcaattatcttatcggtagtcgaaagtgattatagtaattcagtaatgccgaattgtaataatctggaacttataaaaaagaaaaagcttataaatttattggcagaaacaaagttattcacacaaacagaaattgcaagcttactcggattgagtagacaaacaatttcaagtcatttaaaggagtga

SEQ ID NO: 191030 - DNA, 2235 bp, Klebsiella oxytoca
atggcagatggtggaagcagaaaaaaaacattaaacccggtcctttccttattaatggatcctacccctaaggctgttactggcggtgggaaaaatgctaatggaatagcattttcaagattggattctcaacaaaaattattgtcagagaatctaaagtctattcaggaagatagtagtttagttgaacattctggtaaaatccatctgcttgttaaaatgttcgaagattctttggctccatcgtggacgccaaatgatttgtttgaaactaatacgtcaacaaggatcgtttcccccgcctataatggatttcttgttgagacgtcgaaaggtaaaataccagatattataaaaagaataaagtcggcgaatacagataaaataaaggttgatgtttctaggctaaaggatataaaagggtttgacaagaatgagcttttacggaataagcaagaatccgaagtttatggtgagcctactaaagcaggaaaacaattcaatgtatgggcgctaccattccacgatcctaaagcgcgtgtttctgttgcagaagaattaggcaaacttgctgataaaggtattttaacgtttggagacccgacttttgataatattttcttggacgaagagcaaaaaaataaaactcgctccttttctaggaaattaaatcagtacttggctagtgggcatctttcatttactactgttataaattcaaagtccgattttaaaaaaataattagttctggagccatatacagaatagaacctgttaagccgattaccacaaaatctcttcctcctggggatggaaaagaaccgacgcctaaaatgatcgatggaaaaaatgccccggccgtagtaattgtagatgggggctgttcagctcaatcatacatccctttcaatgttcttagtattcaaccccttgttgattcgcgatcagcagatttaaaacatgggaatcgtgtaacatccattatatgtcaaggaagtgcatggaataataatctttcacttcctaaactagaatgtaagtttattagtgtccaggctattaataaagttggtgcaacatctcaacctacaactgagcaatttataaattatcttagaggggtagcagagaaaacgaaaggaatatcctcagtatggaatttgtcatttaatgagattagtccatctgacggcaatgatgaaataagctaccttggacatgaaattagtgcgatagctcgagagttttcaatcttaccggttatatctataggcaatgtaagtgaaagtaatgcttcaagactctgtcctcctgctgattgtgaggctgcattaactatttctggcagacaatctaatccaaaaggtgatgtgggttcggcgtgttctgaaagtttacgtgggcctgctcctggtggtatgaagaaaccagagctatcatggttttctaaactaagaatgatcggcggggatgtagcaatcggtacaagttttagtgcaccattagtttcaagtatagcagcacatactttcaaaaacattaaaaattccacgcccgatttggtgaaagctctactcataaataaatccgaaggcatggagcatgatttaaggatcggttggggtacaccttggcataaaaataatgttatgccgtggttatgcgacgacggaagtgtaacattagcttggagttcaaaattaaaggctggtagttcttactattggaatgatatccctttgccaccagagatgattgttaatggaaagattaaaggggaagttacgcttacggcgatattaaaacctttagtttctgagtttgctggtgataattattttgcaacaaggttgcagtgcgcgcttcagcatgttaagacggatgggaaaacaaagaaccttcttgggacaatgaaggagtcaactgaaaaagaagctaattctcgcctggagttggcaaagtggagtcctgttagacatcattcaaaatcctttagtggtgtagcgatagataatgataaaattagattgtatgcgaggattttcactagagatttatatcaattcggttactctacgcaccatgaattggacgagcaggatgtagcatttgtattaactttcaaaagtgatgagaaagatccatctatttataactcgatgaaacaacggcttgccaataacgttgaagtcgcaactgtagagcaggacatcgatcttgatagtttaatatga

SEQ ID NO: 191031 - DNA, 507 bp, Klebsiella oxytoca
atgccgatgaaatactcatggtttcaccatcacgactgcaccacgcagcaggctgatgaactaatggagaaataccgcaagcgtggagtaaaggtcgagcgcagcctgaatcaggatttaatcacctggaccgtcagtgcgcagctggtggaggacaaaaatcctccccggcccgcttctcgcacccgaaatcggatgtggggggtgattatggcgaacctacgcaaagaggcgcgcggccgcgaatgtacagtcaggatcccgggttactgcaacggcaacccggaaaccagcgtgctggcgcattatcggctggcgggtacgtgcggcacaggatgcaagcctgacgatactcaggcggctatcgcctgcagctgttgccacgacttgatcgacggacggaagaaaaccaccgattacacccatgatgaactgcggctgatgcatgcggaaggtgtgctcagaacgctggccatatggaaaaaagaagggctggtaaaagcatga

SEQ ID NO: 191032 - DNA, 141 bp, Klebsiella oxytoca
atgaacatgaacacaactgaatgtattcgccagcgctggctacagttgaacattgtccgctatcgcgggtcgttcccggtggcataccgcatcctcaaaaactttatacgcacctgccagatccggggagagacagcatga

SEQ ID NO: 191033 - DNA, 480 bp, Klebsiella oxytoca
atgacccaacatattggcgtgaaactgattaacgcctttccgatgacgagacaggcatataacgattttcgcggctggcagcttcctgccgacgagaacggcgcggacgaaggctatctggttgaatatctggacggcggaaaacctaacaccgatcgctttgatggctacgttagctggagcccgaaagaagtattcgaaaaggcttaccgtccggtatcagggctgagtttcggccttgccattgaagcgctcaagcaggggaagagtttgcagcgggcaggatggaacgggaaagaacaatttgtttatctcgtgaaaggcgaaaaattagcgtcggcactgggttatgactttggcgaatatgttggcgagccaacgttcaatgacatgtttgtgctgagaaattcacagaatgaattgtgcgcttgggtaccgtctacgggcgacctgatggccgaagactggcaaatcgtttaa

SEQ ID NO: 191034 - DNA, 258 bp, Klebsiella oxytoca
atgaatggtactgattcaaggcaggccgatattttatatcgtggaataattgattattacagcagcatcagcggtcttgatattacgtttgagcaaatgactcaacgcaataaatttataacggatagcgccatcgtctgcgacgattctctggatgagcaggttctggcgcttcaggaagagtatattgctgcgggggataacgctctggaacagaaggctgtgattgaaaaaatcataaacttgctggctggctga

SEQ ID NO: 191035 - DNA, 240 bp, Klebsiella oxytoca
gtgctaagacaaacagacattaaccaggcatttcgcgagtcgattctcaggaactcaaaaggctatcagtacctgcatacgcgagatttcgtctcttctttgttgcgtatgggtatccacttttcagagtcagaagcaaatcgctggatagagcgctatcagtcgtgcttcgctgacaagactccggaccacactgaaaacagattgtggattctccgcaacatggggagggttatgtaa

SEQ ID NO: 191036 - DNA, 321 bp, Klebsiella oxytoca
atggggccatttccttcacctgctgccgactacgttgagcagatgctgacagtcacagctgcttgcaacattggcgcgaattctcatgttattgagactgaccgcggctatgtcgtccttgatctgtctctgaaggtgactccgggcagtgtccttctcattcgcttggctggccaactgcagtttgcaaagctgatgggccagtcgttcatcacggttgaaggggaaagtattgaaggtgaagctctggatgatgttgaggtgctcggagtcgcaacacatgcgatcaacgatttaaggcgggatgatggtcccgtatga

SEQ ID NO: 191037 - DNA, 198 bp, Klebsiella oxytoca
atgcatttgattggttgtttttaccttatcctgaaccagggattcacggacacgatgcagagcccgcattgcctgctgagattccgttctgggctgcacaaaacgcatagacggacgcgatgcagcttcacaaatagcttcggcgtcgacaaagtcgtttttattgcttttaacgaacgggcggacaaattgtggtga

SEQ ID NO: 191038 - DNA, 285 bp, Klebsiella oxytoca
ttggtctgcccgaaaccttggccattactggactataaagagtggagaaattttcaaaaggtaatctcaaaagcgataatttcatgtgaggcgagcggtcagctaccctcagaccattttgttgagtccaacaaaatggtcgaattgggttccggttccagcaggaatcttgaagacattcatctatcccgcgacgcctgctatctggttgtgcaaaatggcgatccgtcgaaaccggtcattgccgcggggcaaacctactttgcgttgcaaacccggcgttag

SEQ ID NO: 191039 - DNA, 585 bp, Klebsiella oxytoca
ttgcaggtcagtctgtttctcgctcggcagcgtcatatagcctggcaagctctgcgacagcagtcccaggtcggtgagaccctgaatattggagtggccgcgcagggcgtttacgccgccgcccgccatgcccatattgccgagcagcagctggatcatcgccatggtgcggatgttctgcgcgccgatggagtgctgcgtccagcccagcgcgtagaggaacgacgcggttttatcgtgcgcgctggtttccgcgatgtattcgcagactttgaggaagtcggcttttggcgtcccgcagatgttttcgacaacttccggcgtatagcgggaaacgtgctgcttcagcaggttccagacgcagcgcggatgctgcagcgtggtatcgcgtttggcaaagccgttttcatccagctcatagttccaggacgttttatcgtacttgcgggcttcggcgtcgtagccgctgaacagaccgtcttcaaagctgtaatcttcacgcacaatcaggctggcgttggtataggcttcagtatattcacggttgattttttcgttgttcagcaggtacaggatgacgcctga

SEQ ID NO: 191040 - DNA, 315 bp, Klebsiella oxytoca
atgccggcgaggatctcaccgtcggtggtcgcaatccccggggcgtccgcgcctttccagtgccactgcagccagcggccggagttgacgatagaaccgttctcttcggcgaagcaggtggacggcaggcggaacacttcggtctggattttcgtcggatcgacgtcgttcgactccccgtggttttgccagaaagtggaggtttcggtgttgagcgggtcgatggtcaccaggaacttcagcttcgacagcgacgcgacaaccttgtttttgttcgggaacgacgctaccgggttgaagccctggcagatatag

SEQ ID NO: 191041 - DNA, 738 bp, Klebsiella oxytoca
atgggcgatgccgagcttgttggccagcttctcgccgatctccacgaactgttccggctgcgcgatggcgttaagcagcgcgtgcttggtccagtagtggaagtgctcggtcagacggtaagtggtgccgacgtaagggaatttatccgctttgcccatctgctcaaggtcgcctttaaagacgcgcgcggccgggttcgagaccacgttcgggtgcagcgggttagtgcccagcggcgtttcaaacggctcgtagtgttccgggaacggcccttccgccatcttatcgatagcgaacagacgccccattccttccggctgcatgataaacggcccgacatcgctgtccggcgccgcggcgctgtagtccgcaatatccacgccgccccacttcgcgccatcccatttcaggagctggcgcttcggatcccacggtttacccgccgggtccgcggaggcgcggttatacagaatgcggcggttgagcggccacgcccatgcccagcccagcgtattgcccaggcccgacgggtcggcgttatcgcgacgcgccatctggttgccgtccggcgtccagctaccggcgaagatccaacagccgctggaggtggtgccgtcatcgcgcagctgcgcaaacgagctgagctgctggcctttcttgacgatcaccgctccggttgccgggtcggtaatatctgccagcgccttaccgttgctttccatcgcgacttcttctga

SEQ ID NO: 191042 - DNA, 360 bp, Klebsiella oxytoca
atgaggaactggcgcgacaggccgcgccggttccgggtattgcgggggggttctggccgcagaatggatatcccggataccttttcgtcgattatctgtggaaaagaatatcacggtggatgcgatcccagggttattccgccgttttttgtttcaacgcggcgtagcggcgctcgtttgcgacgcggtctcctctttattttcgctgtcttccagccgcaccgccgcgttgtgcatcagggtatacaaggcatcgagctggctgacatgtttgagttccaggcgctgcagcacatcatccagcgccgtcaggtgcgcttcggcctggtaaagctggctcagatcgttaatagacaataa

SEQ ID NO: 191043 - DNA, 657 bp, Klebsiella oxytoca
atgaacactatttattcggcgtttttcatcgatctgctgatgaacataccatcactggcaccggtgctgtttctccgaaagacacaaaagaacgtgaagggatcgctggcccttagactttttctgcttaacgccttcttggtgctatcactggtaacggtatcgcagaatacaacacaaaaatatggactgttccctgtatggctggtttttgccgccattgggttatttgtggtcatgctggtgccagcggtaaaattcatgcgtaagcatttaactgtaggtaaaagcaggggtgttatcctttcatcattcctgattatcaatgctattaggtttcacagcgtgttttcaaatgcttatggcagcggatacacgcttaatggatacaatgtggtgtggacgttgttcttcctgtttgcctgcctgctggcttatcttggttgtgctgggagtaaaacatattctggttattctgcgtcgtcatctgcatcgcaaccagaatattttaaaccgaccaaagagtatgaaacacaatctcaaattgactacgatattgctgtaaaggggcggagtgttctgtctgatcccaatctgagtattattgagcagcagcgttataggaatacaataaaaaatatagatacgcatttttga

SEQ ID NO: 191044 - DNA, 432 bp, Klebsiella oxytoca
atgataaaaactcatgagttgatagctcttgctcaatacataacaaaaataatgtcattttaccccaataaaaccgtggattatgcattggatgatatcttaaggttgctggaagaaaagcataaaataagtaagagcatatcgtctagcaagaagaggttaaaagaagaacctactactatcgctaataatgagactcatgctcaactaacagagtttgttggtcaaatgaaaagtctatccattgatgaaataaataaaaacctttctgacgagttgttattcccgacggtgcaatcattaaagagattagcagacatgattggtataaaatcaacctcacgacaaaatcgagatgtgataattatgaatattattaaaaccatcgaaagacgaagaatggacatgactatttcagacaaggataagtaa

SEQ ID NO: 191045 - DNA, 951 bp, Klebsiella oxytoca
atggctaaagtaatcagcatgataaactggaaaggtggtgtaggtaagtctaccttaacattgcacctcggcgtaggactaatgcgaagttcagatgaacaccctaaggtgttattaattgacttagacccacaatcaaacttatcttatttggccctaggtgttgatggttacgtaaaatatgtttatacagataaaaaaccgacactaaaaaatatttttgacaattactttgatggaaaagactttgatacaaaacaagccattataaagaacgcagtaaattctagccccggtagagtatgggtgaatgttgatttactcccttcccatcacgaattagttcttgttgatatgatgttagctcgtgagaagaaaagtgcagcctcacatcaaaaagaaacagaacttgaattagaaaaaatggccataataaaacatgccattgaccaagtaggtgatgagtatgattatatacttcttgactgcccaccgaatattaaccttgttactcagaatgctttctttgccagtgagttatacctaattccagcaataccagactttttatccactgtaggtatatcgcttattaaaacagagatggataaattaaacacaaacttcagaggaatgatacaatattccagttcaaaaattgactttactgacacggaaatgttagggattatattcaacatggtcgatgaatatgataaaaaacctaaaggcacacatgaaggaacaataagtgatgtaaagtctcaaaatcccggaatggtttttgagaagtatataacagatggagatgggatttctgtcgcagcagaaaacaaccttactgtttatagctatgataatttacctcgttctaaagctaatgcagaaaaacagagtaactattttgaaggggtcgtgagtgaattgtgcgaaaaactggaggatttatga

SEQ ID NO: 191046 - DNA, 1407 bp, Klebsiella oxytoca
atggcgatttttcatctggagtttaaaattgtgaagcgctctgatggtatgtcttcctgtaggaaggcagcctaccacgcgcgttgcagaataacagatgatcgtacaggcaatacctacgattttagccacagaacagatttattccatcatcagatattatcccctgattctgctccttcttatattatcgaaagctcaaccaccctgtggaatgaagttgaaagagttgagcgtcagaaagacggtcaaacagcccgttattttgatatagctattccctgtgaactgagcaatgaagacaagataaaattagtagctgaatactgccagaaaaatttcgttgataagggaatgattgctgatattgcttttcatgatctcaatggtgaaaatccccatgcgcatgtgatgttgacattaaagccaatcaccgctgatggctttggcaaaaaagaaagaagctggaacgacaagaaaaacgtaatcctttggcgtgaatcatggtcagtgattgccaatcgttatcttactgatgctggcagtaatgaatgtattgatcatcgctctattgatgctcaacacagtgaagcactcgaaaacgctgctattacattagacgttgaagaaaaagcgctatggcttgccaaagcaacgttaaccagccgtccaccaatgcaacgtgttcaccgtgctaagtggaacagcaaacaggttcaggaaaaacgtgctgctgaacaggctgttcgtgatgagatgaaacaagaagctcaggccacatacaacatcttcaaagatttagatctgcagatcgttgttgaccttagaagtttcacgatatccgaactgtctgagcctgttgaaatcgtattgccagaaacaagtacgcagtcatcgtcatcagaggatcaacagcctgttctggtcgcccctgcacctcatgcacgcactaaattgaaaaccccatcatcttcaactgccagagcggtcaaacgcgctcctcttaaaagtaagaggaagcaggtcaaaccccgtcagagtgatgtgttcacgcgtttcacgctattggtaatagcatatataaaagagaaattcgtctgggccaagaagaagcctgttgctcctgatgttgaccatgacaagcgtattgccgaaaactatgtgtttgatgaagtgcaggggatctatgtgccacgtgctgagcatgaaagacgtgtcaaatttaacagtgatgattacaagcctaccaaagatgagattagacgttttccaagtcgtttaactaagcctgaactgccagatagcacactagactacatctcttcccatccaaccggtttaggacaaacagcgccaacactcagacatcccaaactttatgctcaccaaaggactaaaaaagaataa

SEQ ID NO: 191047 - DNA, 285 bp, Klebsiella oxytoca
atgacaacaaaaacaattaaacaacaaattgcttcagcgcaggaacgtctatacttcttggaagccaaaaagaaacaacaaacaaaaaaaaagaatactcgtcagaaaattattttcggtgcagaggttgccaaagtcttaggatgtgatattggttatgtagataaggaattagtctttggggttctgcttgatatccagaatcttcatgagagtgatatcaaagcctaccgagtacagggccaaacctatatcgatactgttataaacagaactaagtcctaa

SEQ ID NO: 191048 - DNA, 714 bp, Klebsiella oxytoca
atgaagattgacaacatacagctacactctttcttacgctcacaggatataacgtattttcatcatgcaaatactgtagcaactgcaatatcttttattaggaatggggggctagtttcaagaagtgatattgaaagacttggagcatttcaaacgaagcaggaatccgacccggaagataagcagtatgacgtctggggagatgtgtttttggacacagtggaccttcatggttttttcccgagacaaaacctatatggtcctgttttgttcaagtttaatatagattttctacttcatgaaaatttagatatatggataacaaaaacaaacccaatgttttggatcccaaacatgtcaagtaatgaaagatacttccaaggcatgtctgacattttactgaactggaataattttgatcgccaacgcaaaatgataacaatacgaaaaccataccacccagtactatttaagtacttggaggaaatagttcttgatgatcccggcgttcaaatttatgacgaaaccatactttatgatgtagcacatgcatcgttaagtatagaattgaacaatgttcaattgcctttaacactattaacaaaaagacattgtagcgggtgtttttgccaagacaattacctaagacaattaactatagagaagttaataagtctattcttagcaccacaacataagcattggagaaactag

SEQ ID NO: 191049 - DNA, 1338 bp, Klebsiella oxytoca
atgaatactgcgtactggagtagaagaaaacagaatgatgatgataactaccctgtaaaagaattcaattcaaatactgaggacagccagtaccaaagagacagagcaagggttattcattcggcagcatttagacgattacaaactaagacgcaagtattaggactcggagaaaatgatttttaccggacacgattaacacattctttagaggtagcacagataggctctgccatttgtgaaagattacatgaaaagtatacgacagatgaactcattagatcgtggattccatccttaagcctgattgaggctatcggtttgagtcatgatataggtcaccctcctttcggtcatggtggtgaagtagcacttaactattcaatgattgattcgggtggatttgaaggcaacgggcagaccctaagaattgttagtcgccttgccgaatactcaccaaatcatggcatggatttgactcgaagaacccttttaggactggtaaaatatccggctccatatagcaaagtaagaaactataatcaaaaggaaatatcccaaactattcttcccttaaatttagataactggcaccccccaaaatgttatcttgatgatgaaaaaaatttacttgattggatttttaaagaaatccctaaaaatgacattgagatattttcaaccattaaatttgtagagagcaatcatcatgaaacaattttcaaatcatttgacacgacaattatggagcttgctgatgatatttcatatggagttcatgatttagaagacggtatagcattaggtctcataactaaaagcatgtgggaaagcgatattatcccaataattttagctcataataataatcaactggcagaaaacattgatttctataatgaaaatctcttcgatggttctaataaagaaagaaaacatgcaataagtaaattagtagggtattttatttcatctatacatgttgaaaggaatgatgttttcgacacaccacttttaatgctaaaagccacccaagataatgacagcatgagcatcttgaaagcgttaaaaaaattcgtcatgaatcgggtaataaaaactccagaagttcaggttttagaatataaaggtcaacaaatcatattaaggatatttgaagtcttacgtgaaaatcctaaccgattgcttccaaaaaatacactcagtgcttataaaaatgctgaaaataaaaacagagttttatgcgattatatatctggaatgactgacagttatgcaacaaaactgtaccacaaattattcacaccagatatcggttcaatttttgataggttgtag

SEQ ID NO: 191050 - DNA, 390 bp, Klebsiella oxytoca
atgaaaataataaataaaaaaggtttttccttattgggaataacattagttttaggtattggctctgcaatgacattcataaagtttcaggacatgaagcaagatcaagaagccatcatggctaataccgttggtgctcaaatgaaacagatgggggaagcggttaatcgttatatcagtattcattttgacaagctttcaaccctgacatccagcagcagccagacaagcgatccgggaccaagaacctgttcggctaatggttgtgaaattacttatcagacgttggttaatgaagggctgttgcctgcgggtcatactggcgtcaatatgcaaaaatcttcttataaaatcctgctaaaacgcgctggaacaacgcctaactactga

SEQ ID NO: 191051 - DNA, 909 bp, Klebsiella oxytoca
atgcaaacagcagggattgatagcggtatgacgcaatctgcatctgtcgcatcaggtacgagtggtcaatggactgagaaccaaaataactatagtgggattaatgcggctggattgctggcctaccgagtaggatacgattcctccatgtattctgtttacctacatcgtgatggcacattgccaatgacgggcgatctcaacatgggaggtcaaagcatcaacaacgccaaagacattaccgcgtccggtgatgtcaatgcggtttcgtttaatggttcctatgggcgctttgccaagaatgtcagtgtttcagaagatctggtggtgacgggcttctctacctttggcaaaaacgtatccatgaacagctatctgaccgttaagaatggcattgattcgaatagctatgttgctgccaagactaacagcagccgtctccaaattggcggcggtgggtccagtaatcagaatgcggtgttgattaacgtcgcaggcggggcgggtgatggctacctctcccttaatggcgataacaactcatcggttaagcttgatgtatggggaagtcaaaagcttcgcggtgatcttgttttgtcagcatctaatgatggtaaaaccaccggtggcatcagtgcatcaggcaatattgctggtagatacattcaacccacatcaatagccactaccggggagacatgcttacctacggacttatcagcaaggcaaccgatggatcgccagtatggtgtattgatggcgaatggaagggtaatgaagggaacacgattgtttcgtctgggagcatcaacaacaattccgcgtttacttgccgaagtggtgcttctggcaaaatactggttcacgcttacttcaactgggtggtttactatgccgtttatcaaatga

SEQ ID NO: 191052 - DNA, 1254 bp, Klebsiella oxytoca
atgaatagatatgataaagttgatttagcatatgaatttttgagcaaaatggaaaagaaaggtgaagctttcacaatagaacaacttgttgaaaccactggttgggctattgacacttgtcgaacctatccgtctaaacgttggcatcagtacattgaaaaagatggttcacaatatacaacctcaggaattatttatctaagtaaagaggagtttagatcagttcacagtcaaaagcttcaacagacgaccgatcaatcaataaaaggaatcttcattcataaagctaaagaattcgccctactagcagtaagcacttataataatccatacacagaattcaaaactcatggattcattgtaaatatcatcatcgcttacacttcattatttcatgctatttttaataaaaaaggaattaattattttcattttaatgataatgcagaaaaaattttcattgatggcgaggaaaaagcatgggaacttgcagaatgcatagatgaatactggcgtggtgttatgacacctgaaaaagcaaatataatttttcttattggattgcgaaatagaatagagcatcgaagtttacctgctatagatcttgcggtttgtggagaatgccaatctgctttaattaattttgaaaatattttagtagaagagtttggtgatgaacatgcgctagcgacaagtcttgccatagcaatgcaattgactcgggtttcagagcaagctcaaatcgacgcattaaaacagatgcaaaaagaaaattacaaggtagtccgtgagtatatggaaacttatcgcaatgatttaggcaacgatttagttgaaagtcaaaaatataggattcgagcatttttagttccgaaattaggaaatcatgcaagttcgtccgatatggctattgagtttattaatgtaaacaaattaacagaagaggaaagagagaactatgagcagggagttgcatttataaagggtgttgaaaatccgtttaaacttaggccgtcaaaagttgtagaagctttggctaaaaaaatactagatttcaatatggccctccatactaaatgctggaaatattatgaggcaaggccaagagaaatagaaagaaacttcaaaggtgaatattctggttttgtggagggttttgaaggatatctttacacacaacagtgggtaaaatttttaactacagaactaaaaaatccagaaaaactaagtcagatcaggaggcaaactatttaa

SEQ ID NO: 191053 - DNA, 981 bp, Klebsiella oxytoca
atgataactctatttttaggagctggtttttcgaaatgggcattcgacttacctttagtaaatcaattatttgatttaaatatctcggcgacatcagagcaagaggtaaaaaaactagctttaattgaaaaggattggggagattggcggaaaaaaaatcctgatgtaactcctgaaaaatttgtctattggtgcatgaataaatcatcgcatagaaaaagtcgcataatttggtatgtgagtcgtcgcctaacagaaccattcatgactaaaatcaggggttcatatacttcggcaatgtttgatgagagatcaattagagaaaatgaaagaataaagtatcttcgagagttctttgcgaaattaagcgaaaatggtttaagtggaattcttacttgtaattacgatacaattactgagtgtgctttgggtatgtctggatttaactacggtgtcatcggtgaacaattgttcggaagaggaataaatccattattcccatggcaaaatgcacacttacaggttactggttcaatttcattagctaaattacacggttcgttgtcttgggatataaatacaaaatacacaagtggaaaaccgggaagaaatggaaaagcactaattattccaccagcaccagaaaaaaaaccaccagtagaactacagtatacttggactttaggagcaaaactattagaacaaagtaacattttaattatatttggttttgcatttaacccatacgatcaggcattgctagagtatttaaagaagcatggttctaacctccaaaaagttattttagttgatccatttccaaatatagcaagtgcccaagcactttggcctgatgtttcaatacaagtaattgacccaagagataattttgatgctgacaccttactttcagtgcttagtagaaagatgaagaaaacacctaacaatattttactatcaaacaaggatcactcatcttga

SEQ ID NO: 191054 - DNA, 900 bp, Klebsiella oxytoca
ttgaaagccccaaaaactgaattaattagcagagctggcgtatattttgctgggtacgctttgtcaatatcaggtattatctttcgcgaaacaagctcaagtgatattggcatagatgggcaaattgaattagttgataaagatggttctgctactggcatgttagctggagtacagataaaaagtggtgactcatttgtagaccacaagaaaagggtattcacatttaaagctagtaaagaacattataaatattgggccaatcttacaataccaagcataggcattgtcttttctcctaaacttaaaactgctgcatggttcaatctagaaaaccactcaaaagaaatcattagcaacaactcctctagcacaataattcagaagatagacatctccaatgaattatctattgagaacagcccttgctgttatcttattaattatattagaaattattacaagcgaccaataacagaagaaaagttgaacaactttgattcattagacagtgataataaaacatctaacactgataaaataattatatggaagcggttaactgccgcattcttttcatcagagagcaatccggaagtcatttatgatgttggatatagattgtcatggcattttcctgttgttacaaatgaacaacggaatttcttcaaagaacgtctaaataaaattacaataccagaattatataatgtaatcaaaggtgtaatatttgcgtatgaaaatgattgcgaccgtggtttcgaactaataacagatctgttaaaatacaaaacagatattataaaaatgttatcagaactgatgaagtctaatttaccgacaccgaaagaaatactactacttaaagatattatcgattgtttggtgcaggatatataa

SEQ ID NO: 191055 - DNA, 294 bp, Klebsiella oxytoca
atggaacgtatcctcgcagaaaaatctatcaacatcaccgagttacgaaagaacccggcgaaatattttattgatgaaccggttgccgttctctcaaacaaccgtcccgctggctacatggttagtgctaaggtgtttgaagagctgatcgatctgttggaagagaagcagggcagggttcataccggtgcgcgattcaggccaacggctgaacgtttaagtgatattgcggatagtggacagaaactgctgcaaaacgcctctgacaaggatctgaccgagttcacggaatga

SEQ ID NO: 191056 - DNA, 405 bp, Klebsiella oxytoca
atgagtatcaggattttcaagtcagcactgatccgtcaacaattaagccaacaagagcttgatgatttggcggcggattttctgtcctataaaaaggatggcgtgttgccagatacctttgggcgtgatgcgccttatgatgatgaccgcacctatcccttggtaaaagaagagcaagtggcccacattcatcttgccgatgcggatgcccctttcccgaagtttttacgtcagttcaaacgaaccagcgatcaggcgcatttggtatactgccaaggtgcgatggaccctgatgcctatctgttgattatcattctgaaacccgaagcgcataaaatggcgcgtaacaataaccatatgcataagatcgggatgatggccgaagcgttcaggatgaagcattaa

SEQ ID NO: 191057 - DNA, 123 bp, Klebsiella oxytoca
atgaccagcttcaggctggaatacatcagcgctgtcggtaacgtgatagcactctccgtaatttctcaggccacgaaaacgcaaaaagcccatccgtcaggatgggctcttcacttaatttga

SEQ ID NO: 191058 - DNA, 540 bp, Klebsiella oxytoca
atgcgggacaatatctggtttacatataaagcacgtattaatgcacatcatcgcctggagtggcttgaaaaacactctcagtttatcctcgtttggtatgccttatttagtgcagtgctttcaatcataacattacgatttccaaaaatactcggggacaataccgatattcttgccgcaatactttcggtggccttactaggcatttcacttgtagtctcaaatctggacttccgcggcaggtcaatatccatgaggaggaattatcttgcactacagcggctttattctgatactaccactgagcaacgattaacgcctgaacaacgaaaaaaatatcatgaattgctcgatgaagttgaaaatcatcttgatatagatgataaagcggcacgtgtagcccagttaggactaacaacaagaatccctaccaataaagaaaaacgaacagtcctattttggaaaataaagcggttaatatttacttattcattttatctactcccgatcatatttgtttggatagactatgactgctag

SEQ ID NO: 191059 - DNA, 240 bp, Klebsiella oxytoca
atgactgctagcagaatatttaaaaaatctttttcagaaagaaatctccttaaagtatataaggaaaaaataaaagattccggtgccattggcatcgaccgagtccgcccatctaaactcgacttaacaataaaaaacgaaataaaatttatctctaaaaaagttcactctggtaattacaaattcacagcctacaaagaaaagttaatatctaaaggggctaactctaaccctaaataa

SEQ ID NO: 191060 - DNA, 567 bp, Klebsiella oxytoca; identical to SEQ ID NO: 95512

SEQ ID NO: 191061 - DNA, 387 bp, Klebsiella oxytoca
atgattgttattgaggatttgaaggtttccagcatgtcaaaatcggcagcgggtacggtagacgagccggggcgcaacgttgcggcaaaatcaggtcttaaccgggcgatactggatcagggctggtacgaaatgcgccgccagctcgaatataagcagcgctggcgcggcggggaagtgcagaccgtaaacccggcatataccagccagaaatgctcctgctgtggtcataccgcgaagaaaaaccgtcaatcgcaggcagtatttgtctgtgtggcgtgtggttacgaagcgaacgccgacataaacggcgctcgaaatattctcgcggcaggacatgccgtgttgtccgggattaaccccggacgcgcccgtaaggcggcgtaa

SEQ ID NO: 191062 - DNA, 234 bp, Klebsiella oxytoca
atgaaaatagtatcatttgtaaaattagatagattcaatgaaaaattggacgacggtaaagcccttatcctcgctggttcctgtaaagacgtgaaaactctgaacatagcgagaaacatcatcgtaaggtcaacgccgctcaatgagcaaatggcaggctggtctgatgaagaaaaaaataagattgcacttgctgtatacagcaacagtaatttcagattcgtattgaattga

SEQ ID NO: 191063 - DNA, 177 bp, Klebsiella oxytoca; identical to SEQ ID NO: 95457

SEQ ID NO: 191064 - DNA, 582 bp, Klebsiella oxytoca; identical to SEQ ID NO: 95530

SEQ ID NO: 191065 - DNA, 537 bp, Klebsiella oxytoca; identical to SEQ ID NO: 95532

SEQ ID NO: 191066 - DNA, 384 bp, Klebsiella oxytoca
atgctgtttcggaaactggtgttgttgggaggggcctgtaccttacttttggcctatcacggtggttattggctaagcgactggccgtggttgttttattacgcgttggtctcctggtggttttcatttagctggtatattttcattacccctaaagttccagttgttccaggcaacataaataaaaacgaaaaatcattatccatagcggggaaacatctgactcaccggtataaacagagtgatagtgatgattcctcactgattatccatagcatttatttatcatcaacaagcaacgtacaatcggatagtaccattattaatggaggagattgcagttattcggacacttcagattcagggtgcagtggaggtgattaa

SEQ ID NO: 191067 - DNA, 792 bp, Klebsiella oxytoca; identical to SEQ ID NO: 95383

SEQ ID NO: 191068 - DNA, 354 bp, Klebsiella oxytoca; identical to SEQ ID NO: 95382

SEQ ID NO: 191069 - DNA, 849 bp, Klebsiella oxytoca
atgaaaaaaacattattagctatcctcacatgcactcttctggccggatgcgccactcaaccacagagcccagataaccgtatgttcacaaaagaacacggtgtttactggcatgcagatcctcaaaaatcggtggcaacgaacgcatacgcacttgcaggtgtaccagtaaatgtagatgaagcagagaatgcaggagggggagttgatgaaggtcttgcttcaaaaatgcttctgaacactgctaccggtgtaataacaggcgggcttaaagctggaattgggatgtttacggcatcactctacagcgaggctgatgctgaatttctcatggttccacagagtgtggttttcatttcaaatcctcgcaatcttccttatgacgacccatcacttataaaagaaggggccagaattgttatcgagtcaataaaggaacaacctaaaattttaggtgcaacttatgagggtcaaataaacgccttgaacgcatgcacaatctcaaaatcttcaatgggaccttgggatagttgcgaacttaaatcaaaggtagaaaactcaggggatgtaggaagtgagttcttcaaataccaggttatccggccagcaactggtgatgaattagctcagctttcgttgccaaaaggtaattactcgataattcgatatactaatatttttagtaagaatgctacatttatgactaataactttccaggttttattctacagcctcaatcaaagaaaacagcacctggatttcctagtgtgacaattaataatcttgaatattattttattaaaggtgatcttggaaagaaaggatttcctcataagaaagaaatataa

SEQ ID NO: 191070 - DNA, 393 bp, Klebsiella oxytoca
gtggggcaggtcactgacacgctcgatgacagcctgacgctggggccaatgacaaaaatggtcaaatatatggagtggggcggggaatccagtgggttctgtcaggctttcccgaatacgatgagcgggagtgaaaaacctgtcgcctttgatgtctgcagaatcatccagtctattgcacgcgattgtattaaaacgacccaggactcagaggttcagaccccactaagaggggtggcgttaaatgaaatctatgtcactgatcttggttcaatagaaacggtgatggattcaatgacgacaaacagcctgaagacggccagcgtccacatggtgacatccaccggactgcagtatgcatcctgttccgacgcctgggcgtatctatcatga

SEQ ID NO: 191071 - DNA, 372 bp, Klebsiella oxytoca
atgaaacgtatagggcagatgaatcagtttgttgaatcggctaaagaagagtcaggacaaaaaagtgactttctgcaaggtgtagcgtcttcgctttttggaagcgctggtcaggctcacgatatcaccacaggggcttttgtcctcaaccaaatagataaaggtgtgctgcagtatcgcaagtcgttgggtatcgccgcagattaccaactcttcgaagcgagcatgaaacgaaccaacgccatggtcagtcaagggcaactctggctgaacatctcaggcgctgcaatatcgttcctggaaatgttcagctacttgacatcctcccccaccttctcactacgtgaatcaggaaggggattccctttgtag

SEQ ID NO: 191072 - DNA, 435 bp, Klebsiella oxytoca
atgagcataaaccctataataataaggcaaaattttaaaatcggcgaattggacgctgaatcagacacacttctcttggaaaactgttttattgatagtggttatctttctaaactattaaacccatctgatacatcatctatagttataggaagaacaggcgcaggaaaaagtgctttgttgcacatggtggcaaacaaagcacataaatataaaaaacttgaccctaatgatatttcaataggttttctagagcattcagatataatttcattttttgaagagttaaatgttaatcttgatatgttttataaagtattatggcgacatattttaattatggaattattaaaaatacgccatgacattaagagtgaatctgatacgaatagctttttctcaaacttgcttagcaggctaaaaaagatgagataa

SEQ ID NO: 191073 - DNA, 510 bp, Klebsiella oxytoca
atggacgcactttccaccggtcgcaggatcaagtgtcttacctgcgtcgatgatttcacaaaggaatgcctgacggtcactgttgcctttgggatttcaggcgttcaggtcacgcgtattctggacagcattgcactgtttcgaggctatccggcgacgataagaactgaccaggggccggagttcacttgccgtgcactggatcaatgggcctttgagcatggtgttgagttgcgcttaatccagccgggcaagccaacgcagaacggatttattgagagctttaacggacgatttcgcgatgaatgtttgaatgagcactggttcagcgatatcgttcatgccaggaaaattattaatgactggcggcaggattataacgaatgccgcccgcactccacgctgaattatcagacaccgtctgaatttgcagcgggctggagaaagggtcattctgagaatgaagattccgacgttactaaggaaggtgcgaacaagttcctgatatga

SEQ ID NO: 191074 - DNA, 261 bp, Klebsiella oxytoca
atgtcatcaggagtgaaatcacagtggcactgcgatgtggtggtggtggatatcacgacctttgccattgtggccgctgtcgaactggatgatgcctcgcacctgaaaaaacatcgggtacgccgggatattctgctggaagaggtacttcgccaggccggcattccgctgttgcgggagcgggattcagagaaactggtcaggtgtgtgagggattttctgaagcaccgacacgacatcactgaatgtcatcaggagtga

SEQ ID NO: 191075 - DNA, 1182 bp, Klebsiella oxytoca; identical to SEQ ID NO: 95492

SEQ ID NO: 191076 - DNA, 201 bp, Klebsiella oxytoca
atgatacgacctggacgaaagcaaacaaactggcagccgcatggctaccaagggttcgggttcttcatccatggcctgtggagcggttcaccgccagacacccgaggcaggagcccggtgcgtaaatcgcgcacgccgggatctgtgcggggggtatccggtaacgggtatccctaccgcgacatcagtgaaaagacatga

SEQ ID NO: 191077 - DNA, 759 bp, Klebsiella oxytoca
atgagccggattctaaccgggatttgtgaagctgatccggccaggaggttatacaaagtggccgtcagtaggggaaacacttttctgtctgcaaaagaacgttttcgtgtacaggtctgtttcaaaaatgccataacacatccagatgaagatcggctgctggccgagctgttgactgttcatcacttcctggctgacacctctattttatggcatatggagcaaaaaacttatgcatgcaccacgacatgggcaaccacgtccacatggctgccagagatatatcagcgtcaggccagcacgcccaatgtggtaaagattatcaaatttatgcacgcccggtttccaggccttaaaacggttgcagaaacaaatgagcagggttacgaacaggcgcttaccagtgtggattttgaaattccttactggccggtgctgccgaaattcgaatctgatataggaacgatacaggtaacgattgccgggatgatccgttacacagaaacgatgagcaataaagattgtaaaacccctctcgacttaatgataaaaagttttaagtcagggttgatcccgatagagaaaatgccgttgagtaagactgaaaggcttatgcctctgaatatcaacaccgctggtaagatatttacacacgcgacatggccgagatgtcgttacattttcgtaccggatgaggcgggagtaatgaaactggttaacgtggtcaaattaagattaaagcctctggaggaaaaatga

SEQ ID NO: 191078 - DNA, 132 bp, Klebsiella oxytoca
atgaacgtttattatgattatgatatcgaatcggtttttaactgggttaaggaacacttcattctgaagcattccgcttctcttgttaatagcccttggtatgactacgacatagagatagattgcgcttag

SEQ ID NO: 191079 - DNA, 342 bp, Klebsiella oxytoca
atgaaaatcaaaaacaccctttttgtaatattaatgttatccctgccagccatttctgctgaacattctgaaatgaacatgtcagatatgacctcatcagcatcgtcacaggaatacatggcggggatgaaagatatgcatgacaaaatgatggccgccgttaatgagccagatcccgacaaggcctttgcaaaaggcatggttgcacaccatgaaggggcaatagcaatggctgaaaccgagctgaagtatggaaaagatcccgaaatgagaaaactcgcacaggacattattaaagctcaaaaaggtgaaattgagcagatgaataaatggcttgactga

SEQ ID NO: 191080 - DNA, 162 bp, Klebsiella oxytoca; identical to SEQ ID NO: 150264

SEQ ID NO: 191081 - DNA, 1005 bp, Klebsiella oxytoca
atgtgtacacgcgttatgtggcctgatgcgaacggtgccgttattgtaggccgtaatatggacttccataaggatctgaagaccaacctgtggatgcagccacgggggatcgcccgcgatgacggtgttaatggcaatctgaaatggacctctcgttatggcagcgtggtggccactgcgtttgacatgatgtcggtggacgggatgaatgaagccgggctggcaggtcatgttttatggctcgttgagtccgactacggtgaaccggacgcgtcccggacgcagctcagccaggcggcctggctacagtatttcctcgataatttttcctcggtcgcggagtcggttgaatggatagagaagtctggggttcaggtagtgcaaatggaggaccccaccggcggaaaccctccggcgatccatctggcactggatgatgccaacggtgactcctgcatcattgagtacagcggcggtcaggccgtggtctatcacagcccggaataccgcgtgatgaccaactcaccgacctatgataagcaactggcgcaggttcgtacattcagcggcttaggtggcgagcagccgctgccggggtcgacactggccagcgatcgctttgcccgagccagctactacgtctctcgcctcaatcagcccgcaacgcaaattgaggctatcgccgccatgtttagcgtgatgcgcaatgccgctcagcctttccgtgtcccggatccgggtaagccggaggcgtcgcaaacgctgtggcaggtggtgatggatttaacccatcgtcgctatgtctttgagtcgacaacccggcctaatattgtctgggtcaatttcgacgagctggatttctccactacctccccgcaggccaaactgaatctggtggatgatctgaccctggagaacggaatagcaggcaacgtgagtcgccacttcaagcagggggagacgctgacattgctgacaatggcaatgttgaaacacgctcactaa

SEQ ID NO: 191082 - DNA, 690 bp, Klebsiella oxytoca
atgaccatgactaaaaccgaccgcattattgagaccctcggacgtcagattgtcagcggcaaatatgtgcccaatgaatcgctgccttcagaagccgatctgtgtctcgaatttgaaacatcaagaaacattatccgggaagtttaccgctcgctgatggccaagcggctgattgaaatgaagcgctaccggggtgcgtttgtcaccctgcgtaatcgctggaattacctcgatacggacgtattgcaatgggtactggaacatgactatgacccgcgtctgattagcgcgatgagtgaagtgcgtaatctggtggagcctgctatcgcccgctgggctgcagagcgcgcaacctcaagcgacctggctcagattgagtcggcgcttaacgacatggtgtcaaacaatcaggaccgtgcagcctttaacgaagcggacattcgctatcacgaagcggtactagagtcagtccataacccggtacttgcccagctgggcgtggcgataagctcgctacagaaagcggtgtttgaacggacatggatgggggatgaggcgaacatgcccaggaccctgcaggaacataaaacgttgtttgatgcaatccggcatcaagacagtcacgcagcagagcaggcggcactcacgatgattgccagctcaacacgaaggttaaaagacattacatga

SEQ ID NO: 191083 - DNA, 879 bp, Klebsiella oxytoca
atgagatcacgctatatcgctatcgactggggttccaccaatcttcgcgcagggttgtatcacggcgaagagtgcgtagacagcaggcagtctgaagccggggttacgcgtctgaacggacgctcattcgaagcggtatttgcagagatcacagcaggctgggagccagaaaacacgctggtcattatggccggtatggtcgggagcaacgcgggatgggtcaccgttccgtatttaccctgtccgacaccgctatccgctcttgctcagcagctaacggctgtgggtcagaatacctggatagtcccgggcctgtgcgttacgcaggaagataatcacaatgtgatgcggggcgaagagactcagttactcggcgcccagcaactggctccttcctctctttatgttatgccgggtacccactgcaaatgggtgcgcgtagacggcgacgctgtccgcgactttcgcacggtcatgaccggcgagctccattatttgctactcgaacactcgcttatcggtgcggggctgcccgcacaggttgagtcatctcaggccttcaacgccggcctgcagcgcggtgtagactcccccgatgtgttagcccgactctttgaggtccgcgcctcccacgttcttggcaagcttgaccgtgcgcaggtcagtgaatttctttccggtctgctgattggcgctgaggtggcgagtatgactcgcgacgatagcgacaggcaggctatcacgctcgtcgccagtcgttctctggccgaacgctatcaacaggcctttgccctgttggggcgtgccgcgcagaccgtcagtggcgacatcgcttttcaggcaggcataaggagtctcgctcatgcagtggcaaaataa

SEQ ID NO: 191084 - DNA, 618 bp, Klebsiella oxytoca
atgcagtggcaaaataaacttccgctcatcgccattttacgcggtattaaaccggatgaagcgcacgcccacgttgaggcagtgattgccgcgggttttgaagccgttgaaatcccgcttaattcccccgactggcaaaccagtattccggcaatggtcaaggcgtttggcgatcgtgccctgattggtgccggtacggtgttgcagcttgagcaggtggatttactggctgaaatgggctgcacgctgatggtgacgccgaatattcaacccgcgctgattagccgcgcagtcgagcacggcatgctggtttgcccgggatgcgccacggcgacggaagcgtttgatgcgatcaatgccggcgcccagtcgctgaaaatcttcccgtcgtcggcgtttggcccggactacatcaaagccctgaaggccgttttgccgccggagatcccggttttcgccgttggcggcgtcacgcccgaaaatctgaaacagtggattgacgcaggctgcgtaggggcaggattaggcagcgatctctatcgcgcgggtcagtccgttgaacaaacagcacggcaggccgccgcattcgttaaggcatatcgagaggcagtacaatga

SEQ ID NO: 191085 - DNA, 1149 bp, Klebsiella oxytoca
atgaaaatcacgaagttaaccacataccgtttacccccgcgctggatgtttttaaaaatcgaaaccgatgaaggcattgtcggctggggagaaccggtcattgagggccgggtgcgcaccgtagaggcggcggtgcatgagctgggcgagtacctgattggtcaggatcccgcacgcattaacgatctgtgggaagtgatgtaccgcgccggtttttaccgtggcggaccgatattaatgagtgccatcgccggtatcgatcaggcgctgtgggatatcaagggcaaggtgctcaatgcgccggtctggcagctgatgggcgggctggtacgcgataaaatcaaagcctacagctgggtcggcggcgatcgcccggccgatgtgatcgacggtatccacaccctgcgtaaaatcggctttgatacttttaaactgaacggctgtgaagagctgtcgctgattgacagttcgaagaaaattgacgcggccgttaataccgtcgcgcagatccgcgaaaccttcggcaatgacattgagtttggtctggatttccacggccgcgtcagcgcaccgatggcaaaagtgttaatcaaagagctggagccgtaccgtccgctgtttattgaagagccggtactggctgagcaggcggagtactatcccaaactggccgcgcaaacgcacattccgattgcggcaggtgaacgcatgttctcgcgcttcgagttcaagcgtgtgcttgatgccggtggcctggccattctgcagccggacctgtcccacgcgggcgggatcacggagtgctttaaaatcgccgcgatggcggagtcttatgacgttgcgctggccccacactgtccgttaggcccgattgcgcttgcggcgtgcctgcacgtcgacttcgtttcccacaatgcggtgttccaggaacaaagcatggggatccactacaacaaaggggccgagctgctcgactttgtgaaaaataaagaggacttcaatatggaaggcggcttctttaaaccgctgaccaaaccgggtctgggcgttgaaattgatgaggagaaggtcattgccctcagcaaaaatgccccggactggcgcaacccgctgtggcgacataccgacggttccgtcgcggagtggtga

SEQ ID NO: 191086 - DNA, 477 bp, Klebsiella oxytoca
atgggcagcttctccaaaacgctctctgcctcggtgcgctgtggctatatcgcctgccgtgccgaatggattgaagggctaatcgacctgcagatagccaccagcttcggtggccccagtccgatgacgactgagctgctggccagcgtactctccggcggcggctaccgaaagcatctggaggaggttacccgacggctggcgcgggcgcgcaaggtagcgcaggacaggctgatggcgctggggctgacgccgtggatcacgcctcgcggtggtttttacctctggtgtcgcctgccggcagggatgaattcgacgacgattgcccgccgctgccgtgaaatgaatgtggtactggcgcccggtaacgtgtttagcgtctcccagacggcgggtgagtttttgcgctttaacgtcgcccaccttgacgatgagcgggtgttcagcgtcctgcagcaggcgatgcgggctgagtga

SEQ ID NO: 191087 - DNA, 276 bp, Klebsiella oxytoca
atgctgaccggttccggtacccaggctctggatctgatctgccgctttctgctgcggccgggggatacggtgctggtggatgacccctgctactttaactttcaggcgctgctgcgtgcgcatcaggtaacgatggtggggatcccctatacgccttccgggccggacgtcgccgcctttgaacaggcgctgaccctgcaccgcccccggctgtatatcaccaactcggccctgcataaccccaccggggcctgcctttccgcacagacggcatga

SEQ ID NO: 191088 - DNA, 408 bp, Klebsiella oxytoca
atgacacgcacagagatgcttatgcaggatattcgccgccggattatctccggtgcactgcccgccggagagtgtctgccttcggtgcgccgctatgcggcacagatgcaggtgtccccctccaccgtgatggaagcctacgagcggctggccgcgacggggattatcgttccgcgccgcggggccggtttctttgtgacagggtcacatcaggccccgcttaatctggtggaaaaaaaagcggactatcagcgcgatgtcgatcccttctgggtgtcccgccagtcgctggatgccgatccggcggtgctgaagcccggctgtggctggcttcccgccgactggatgccggtagaggcactgcgtaaggcgatgcgccagccgcccgttcggacgccagcctgctga

SEQ ID NO: 191089 - DNA, 147 bp, Klebsiella oxytoca
atggaacggacaacggcaggatggtggagcgggctggcaggcgtgctgatttttagcggttcgctgccggccacgcgagtggcgatacaggatttttccccgctgtttctgcctccttcgccggtacggctagcgccaacggcgtaa

SEQ ID NO: 191090 - DNA, 1458 bp, Klebsiella oxytoca
atgaaattactctgctcactgctgctgacctgcctgtgcgctggctcgcttacgccggcgtttgccgctactaacgatgacgaccgcgggcttcgcctgtggatgaaggatcggctggcctatcaggaaacaagcgacaccgcaccggataaagaccagccgctgctgcaggacccgctgtcgctcagcctggaggggaaaacctacagcctgaacaacaatgcgcaggacctgggcctggccatctacctcgccatcagccatcgccagtttcgcgatgccctgcgcctgttgccggcctatgaacggctggcggatcacgatccgctgctggtgctgttcgcccgggcggaatacgcccgcgatcgcggccactacgccgaggccattgatgactaccggcagatcctccatcgctcaccggatttcctgcgcgtgcggctggagctggcgcgcaccctgtttgaagataatcagaaccgcgaagcgctggcgatgtttaaccgcattctcgccgaccgcggggcagagttgcccgcggggacgatcgccaccatcaggcagtttaccggcgccattgaaacgcgtacggcctggaccggcagtctctcgctgggctacgtctggaactccaatattaatcagaccccggatcgcgacgctccgtggctttccggcggcggactgtggcgccgtgaggatcctaaaagcagcggcggcgtgtcttacgacgccagtctgagcaaaatttttccgctggccgggcaccacgctctgcagctgaagggcaccacctacggtgaccgctacccgcatcaggcacagttcagtgagaacacctccaccctggcgctgctctggcagtacagcaacgccaccacccgcgcggccatcgggccggtggtggagatgaagctatccgacgaacagaggctctataccggacgcgggctgcggctggatggcgactaccgttttaccccacgcctgatgctgagcctgaatgccgactaccagaagctgacctacaaaaaagagtatgaaacctccgacggcgagcgcggcaacctctatctgaccgggatttatggcctgacgccggcgacctcactgttcattggcgcagacggtacccgcgtcaccacccaggtgcgcagcgatgactactaccagaccggcctgcgcgcgggtgtgttcagcgccattaccccggatatcaacctgatggtgatggcgacgcgccgcaacagccgctttgccgcgtttaacaccttcgtcggcgatgaacgccgcgatcgcgaacagctgtatatggcgcgggtgagcctgcccggctaccagatgctgacgctgacgccctttgccagctaccgcttccgtaaaaaccacagctctgccgacgggctttattcgtaccgccagcatgaagtggtgatgggatttgaaactaacttttga

SEQ ID NO: 191091 - DNA, 2823 bp, Klebsiella oxytoca
atgacacggctgaaaatattaaagatcgcgaccgccagggctacgacagccagtatgaaaaggacggcggacctggtggagcgctacaagggcaccagcaccgccgacgtcttaaacagcgcaatcggcgtgtacagcggcgatgcgcgcaacagcggcgcgctggatcccaacgttcgcggtattcaggggcaggagcgtgtcccggtgaccgttgacggcaccgagcaggcgctgaccgtctggcgcggctacaatggcgccaataaccgcaactatattgacccgaacctgatcagcagcatcgaggtggagaagagcgccagcctgaccggtgacgtcaagacctcggtcggcggcgggatcgccattaaaaccatcggcattgatgatgtcgtggcgccgggcgaagagttcggtatgagcctgaagctggagaccagcagcaactcaaaaacgccgcgcatacccaactatggctatggcgacgactaccgcgaccacccggagctgtataaagaccgtaacaactacgtcttctccgatccgacggtcaatatcgatccggcttcaaaggggagtgccggcttctttaacctgaaggataactccggccggttggcggtgggcacacggcaggagcggtttgacctgatggcggcctacagccatcgtcgccagggtaactacttttccggtaagaacggggcaaaacgctatcgcgagccggtgcagctgaacggcaatcagacctcgggcgaaagcgtcgggccggatccctatctgccgtttgccgccaacgtcttcgagccgggtaaagaggtggctaacacctccatggagatggagtcctggctggtgaagaccaacctgttcctcaccgacagccagacgatcaacgtggggttccgccgcagcaccaatacctacggtgaaatcatgccgtcgcggctgggctacaccaaactggcggaaacgcacacccagccgcagtggccgctggccaacttcagcgttaacgcctggaatctcggctacgcctggaagccggaggacaaccgctggatcgatctggacgccaccctgtggaccacccatgccgttggcaacaccaatacctccggcggctatccgcgtgaaccgcgggcgagggactatctgtttgagtatggcctgcgcccgcgtaatccggatattgacggcagcctgatcaataccgccgccacgaactcgcgcaacgaccgcaccggcttcaccctgcgtaacaaaatggcgctgacggacaatctcgatctgacgctggccggggagatgatgaaggagaagctggactccaacgatacctatattagctacacggcgagtccgttcattgccgcaccgcgtaaggggcaccgccaggagggcagcgcggcgtttaattttgactaccgcccaacgagctggctggagctgaatgccggtgcaaaatatatcaacggctgggtagaagacgatttcctgaaggaaaatctgaataaccgcacgcgttttagccggacggatgagatcgtttctaagactatcagtaccagacgcatgctgaccagcgaggagtatagtcgcgcacgggatctgggctgggagtcgagcggaccgaacgacggtacctatgataatctcctgatcctcgccaaagtactgaacagggttaacgagtatggtcagccagtaatgcaatatggtactggtagcaatggtatcttcttcgttgatgaagaggccgcctggcagcctgatggcgacggccgttacaccaccgcgacgaatccgtaccataacggcacgattaaccctgaccagaccgcgatcgatccggtctccggtttagaaggccgcgtcatccagggagggggatctgtcggtgatgtgcgtcaagagctccctgagtccgagcactggaaacagccgggcaagcagaagaacagcggatgggcaccggcctttggcgccacggcgtggatcaccgatgatgacagggtctatgcccgctataccgaaacgctgcgcctgccaaccatctttgaaaacacctcgggcgccggcggcggcgatccgcgtcgctatacgccgaatatgaagtggcagccggagcgcgggaaaacggtagaggtcggctacgtacgcaatctgcaaaagctgctgaatgccgaacgccatgcggacgttaaaatcaactactacaacacggtaatggagaatgtgttcgaccgtaacggacggctggagtttacccaggtggacaagcataaaaccgccggtatcgaagcccaggcccgctacgacgacggcggcttctttatggacatcggtattgattaccgcctgaagaacgaagtctgcgacagccaggccgcggcccagctcgaccccattaatacctaccatctgaagcagtgcgtgacggccggcttcccgggcggcttcctgcgcacccagctgcagccgaaatacgccattaactccaacctcggtctgcgctttatggaagagacgctggaggtgggcacccgcctgcgctataccagcagcgcgcggaatagcgatgagccagatctgatggccaagttcccgaaccgttactcgatggccaacaacagcccgatgcactggacgccgacgtttacggccgatctctataccagctatcagataaaccgtagcaccaacatagaactgctggtgaccaacctgacggatcgctactacatcgatccgctcacgcgcagcatgatgccggcccccggccgcacgctgcgcctgagcctcagtagtcagttctga

SEQ ID NO: 191092 - DNA, 351 bp, Klebsiella oxytoca
gtgcagacatatgtgtcagaactgaagccgccgggcgtcggcctctcctgctcgctggtggttcacggcctgctgctggcggtgctgttctggagcgcggtccgggagcgggcgcagcagaacacctggcacgaggtggacgccccggcgttttcggtgcagctgaccccggccgccacggcggcggtggcggaggaggtgccaccggaggtggtggcgccgcctccggtgccggtcgtggagaaggcggagatcgcccttgaacaggcgaaacccgtgcgcgctccgccggagaagccgcccgaggtcaaacccgtgcggcagccgccacagcggagccacaccgcgtag

SEQ ID NO: 191093 - DNA, 453 bp, Klebsiella oxytoca
gtgcgtaaacaacccgccaccgccgcgccggtgaaaaaaacgcaggaggagagccacgacaacgccacccgggacgtcaaccgcgcgggtaacgcccaggctgcagcgccggatgccggtccgcgcggcaacgccccgcaaaggctgagcggagaggccagcgacggtgagaaacaggcctaccttgcccgggtccgtatggcggtggagaaaaacaaggtctaccccagccgcacccggcggatgaaaatccagggcagtgtgcaggtggagatcgcgattgatgccgccggtaacattaccgccgcgcggatggttcgcagctccggcgaggcgtcactggatgaggccgcgctcgatacggcgcgtaaagcccgctcatccggcccgccgccggcaggttttggccgcatcatcgtcatgcagatcgattttcagttaaataaacgctaa

SEQ ID NO: 191094 - DNA, 855 bp, Klebsiella oxytoca
atggcgtataaattaagagcacagccggtactgcgtgcagaaatagaaacgacaaacgttccctatggccttttggcgatatggagcctggggcaggcggggtttgtgctaaaaaacagcgctagcgatatcctggttatcgatccctatttaacccgcgcaattgagattaataatccgggcacggaatttgcgcgcgctttcgatccggtgctgcagccagaagatatcgccggtgcggatgcggtgctgatctctcaccaccatgatgaccatatggatcttgccacgttgcaggcgctttcggtcgtcaacaggacaatgcctttttatattcccccggttgatgcagtagcgctaaatgaatccttcccgcatcttgagggaaatattcaacaggcgaagacgggggaggaatttaatgtcggcaacttcagaataaggccgattgcatcagcccacagtgaatatgaaaagaatgaacagggatacgatcgttacctcggctatctcatcaccacggatgatattacgttctaccacagcggcgacaccttagtcactgaagagctggaaaaagaactgagcatgataaaacctgatattgctgctctgccaatcaatggcggagactacagtcgggaaaagcgtggcatcataccgaatatgggattcagggatgcggttgatttatatcagcatattcaatccgatattatgttgccatttcattatgacatgttcacctgcaatacagataatccgagttactttgttgattatctgctttctgcctatcctggaagtaaatttcacatgatggctccgggagagcgtttcatctatatgaaatag

SEQ ID NO: 191095 - DNA, 258 bp, Klebsiella oxytoca
atgagtaatataaaaccagcttttcctgacggcgcaccggtgaaattattaatcaggcgtgagtttttcctcatgctgtttatgggattaatgattagtgtcttaatcgcctgggcgaccgttggccttattgataaaccgtttattatccgattttgctatgccagtgccattatggtggcattaaatatcactgcctacatggtgaaaatagtacggcacgtaaaaaaaacaagtaaaaatcagggggtgttatga

SEQ ID NO: 191096 - DNA, 1311 bp, Klebsiella oxytoca
atgattggctttaaagtaccaaaaggggcccgtgccagttggattatgctgttcctcacctggctgctatgggttatgaatgccaacgaccgcgaaattatgtttcgcgttcagccatctatcattaatgaatttcatcttagcggcgtcgagtggggatatattgtcagcctgtttttcctggcgtacgccttagtcgcgctgcccgcgggtattattgccgataaaatcggccgcggctggaaaagaaagaaaagtcaggtgtggtacatggtgttcttcaccacgttctctatcctgattggtattaaagcaacctgtttgaatctctggcagttcatcctctggcgcgtgctgggaatgggtgccgctggcggcgctgaggtgaccaatattgcccagtgctccgaatactggccgaaagagcaccgtggttttgccctgggcctgcatcataccggctacccggtcggcgcattactcggtggcctggccgccagctggatcctcgccactttcggcagtgaaaactggcgcttagtattcctgctcacccctattattggctatgtgcttgccgtaatgctgtggatgtttgccacgccgaaaagctatcaggaggtgaacgactacgcccatgctcacggcctgacggcgccgtctgacgaaccggaagaggtactgacgttcaaacagcagttagcagagaccaaacaggttttggccaacaagaatattttactgacggtaatcggtgccgggctgattaacttctcgcagaccgtcggcctgtggttcttagccccttacgtggttttcaccatgaaccagcaggatacgtttggcgccatcatcggggttgttccttatatcaccggttggttcggacagttattcttcggttatatctctgaccatatcggccggagaaaaaccttaatcttcctctcctgctggtatgcgatttgcgtattctcactgatcttcatctcaggtatcagcatgctgtgggttattctgctgatgtgggggcttggcctgaatgcggtcttcccggtttactacgcgatgatggccgatcatgcgccgaaagcgtcaggttcggcgatgggactgctgctgatgctgaccttcctcggtacgctgccggcgtcgcctctggccggctggctgatcgacaactttggcggctggaacagcgcgcagggctatttaatcggctttggcgtaggttcagtggccgcgttaatcgccgctatcctgcaatactttacccgggataataatagcgcggctaaaccggcgcactga

SEQ ID NO: 191097 - DNA, 474 bp, Klebsiella oxytoca
atgagatcccatttcgagtaccagaaccggaaacgccagcaacaaccccagccagaagcgtcttgtcatgtcgtgaagttcatcactcggccccgtggatgccgtagctacgagcggctccagtgccattccacagacaggacagcttccgggaccactgcggcgtatctccgggtgcatcggacatgtccacacaccttcagaattctctttttccgcctggttgtgaggctgttttatctgatcagggctgacttcgtgatgatcgtggtgatggtgatgggaatgttcactggcatcttcggtaagataacgatcgggatgggctttaaatttactctcacagctggcggagcagaaataaagttggtggtcctggtatcgaatgctgctgtgcgccctgtcgggcaggatggccatcccgcatacgggatctctcaccttatgcaatacgtggccctcgtccggggataa

SEQ ID NO: 191098 - DNA, 1401 bp, Klebsiella oxytoca
gtgaggttcaaaatttccctgaccacacgcctgagcctgattttttctgcggtgatgcttacggtatggtggttatcaagttttatcctgattagcaccctgaatggctatttcgataatcaggaccgcgattttctgacaggtaaacttcagctcaccgaagagtttcttaaaacagagacgttcaggaacaaaacggatattaagtcattatcagaaaaaataaacgatgcgatggtggggcacaatggcttattcatttctataaaaaacatggaaaatgaaaaaattgttgaactctatgccaaaaattctgttgttccagcggtcctgcttaataagtcgggtgatattctcgactatatgatccagacggaagaaaataacaccgtgtaccgcagtatctcgcggcgggttgccgtgacgccggaacagggtaaaagcaaacatgtcatcattacggttgccacggatactgggtatcacaccctgtttatggacaaactcagtacctggctgttctggttcaatatcggtctggtctttatttctgtttttctgggctggctgaccacacgtattggtctgaaaccgctacgggaaatgaccagtctggcttcctccatgaccgtacacagcctggatcagcgtctaaatcccgatctggctccgccggaaatctctgagaccatgcaggagttcaataatatgtttgatcgcctggagggggcattccggaaactgtcagatttctcgtctgacatcgcgcatgagctgcgcacaccagtcagtaatctgatgatgcagacgcagtttgcactggctaaggaaagggatgtttcgcattaccgcgaaattttattcgctaacctggaagaactgaaaaggttgtcacgaatgaccagtgacatgctttttctggcacgttcagagcatggtctgctgcggctggataaacatgatgtggatctggcagccgaactgaatgaattacgtgagttgttcgagcccctggcagacgaaacaggaaagacaatcacggttgaaggagagggcgttgttgccggagacagcgatatgctccgacgtgctttcagtaacctgctttccaatgcaatcaagtattctcccgataacacctgtacagcgatacacattgagcgtgacagtgactgtgtgaacgtgatgattacgaatacgatgtccggccaggttcccgctaatctggaacgtttgtttgaccggttctatcgcgcagactcatcaaggttctacaacacggaaggcgcggggctgggattatcaattacaaggtcgatcattcatgctcacggcggcgagctgtcagcagaacagcaggggcgggaaattgtgttcagtgtgcgtctgttaatggattaa

SEQ ID NO: 191099 - DNA, 435 bp, Klebsiella oxytoca
atgaaaaagatccttgtatcctttattgccattatggctgtcgcttcatccgccatggctgcagagacaatgaacatgcatgaccaggtaaataatgcccaggcacccgcccatcagatgcagtcaacctctgaaaaaagcgctgttcagggagacagtatgacaatgatggatatgagtggtcacgatcaggctgcaatgacccatgaaatgatgcaaaacggcaacgcttctgcccatcaggacatggctgaaatgcataaaaaaatgatgaaagccaaacctgagaacacccaagaaactgctaagccattttccgaaatgagcgagcatgagaaagccgctgttgtgcatgagaaggcgaataatggccagtcttccgttattcatcagcaacaggcggaaaagcatcgcagccagatcacccagaattaa

SEQ ID NO: 191100 - DNA, 1491 bp, Klebsiella oxytoca
atggagttattgaagtttttggcggcgatttttgtcatttacttgttgttttttagaaagaaaaaacgtaaatctccaaagtcttatgcttcagaccccgtgaaagcaccgccaaaagaatggctcgctgacatcaagaaaaaagaggcggttgtgcgaaacgatgatagtgaagacgataaccttgcaacttttacattgagcggtggccggggtgttgaacttcgggtgacaaccaatcattaccgcaacacctcaaagtcagcaggtgcactagctcgatgggtacttccgggtgagatgataactgtagctggtgtagcaattagcggtggccacatttacgtggggcaacgtatgaagccctccggtcaggaatcaggcggctattatgacgatggaagtgaggcatcattaattgatgacacatgtaagataaaacctacttcttatctttacgaggacagttcattaggatactggcccagtttttcctctctttccccagaagcacgcggtgcgtatgtcagttggcttgccagcgataggtctgatccatcgtgtcctatcggctatgtttttatctacctctacggcctggaaagaaaagcgctcgtagattccactgacccaaaattccctgatgctgagttccgtaatctgttcaatgaagtcgctcggttaagatcgatattcattgagaaccgctccttccgtggatattcgacccaattactcgaagccatgtctattctgcgcccgaacatgggcttagccactgagctcgatagcaattcaggtttcagcaacagcatgcaatttaagctggctcttgcaaaaactgtacatgaaggagttcctgtatcagctgaactggcgttgaactgggtaataaaccacaccgagtattcgctgcgtaccccggctcgccgctgtgctaaagagtttgctgcacttttcaaacggcgttacaccctcaaatatggtgaagggatggtcgttaaggcgaataaaacgcgcctgaggttagattacacaccagcaagtcctagtttgcgaggtgttcgacttcctgttcccgacctgcctgatccaagtgcgttgaagagccctgtccagaaaattatggctcttgccgatatatgtacagatgaacttgatgcttatagtcgctaccttggtaggaaaggtacgtcagtcaatgatacggctgcaattatgctgctcccttcagagatagttaatgaaagcgcagaaaaaatattaagctcattcaaacgctgggctgatgaggcgatcctcgtcaaggaggggttagtctcagttgctgacttttgggcacatatgaatgccagttgccccaataagatcaataaaaaagaggccgatttgatgcaggcctttgctctgaagatgggttacggtctggcacctgacccgtattatcaccatgtgaaggcggatgttgatgggactgtagtggtcaactaa

SEQ ID NO: 191101 - DNA, 486 bp, Klebsiella oxytoca
atggacgcactttccaccggtcgcaggatcaagtgtcttacctgcgtcgatgatttcacaaaggaatgcctgacggtcactgttgcctttgggatttcaggcgttcaggtctcgcgtattctggacagcattgcactgtttcgaggctatccggcgacgataagaactgaccaggggccggagttcacttgccgtgcactggatcaatgggcctttgagcatggtgttgagttgcgcttaatccagccgggcaagccaacgcagaacggatttattgagagctttaacggacgatttcgcgatgaatgcctgaatgagcactggttcagcgatatcgttcacgcaaggaaaatcattaatgactggcggcaggattataacgagtgtcgtccacattcagcactgaattatcagacgccatcagagtttgcagcacggtggcgaaatggaaaatgtgaaggtaaacaaaccgaccttactaactga

SEQ ID NO: 191102 - DNA, 255 bp, Klebsiella oxytoca
atgacgggaagaggcattaacacagtacgtatcggtgatgaagtgaagcacatcaccgagctcgatgcactaacactcatgcatgaatggtcaaagcttaaaaaagaaaatgcagacctgtatgactataaccgtcaggttaaccgggggtggcgcggctttattcttcgcctgatgggtatccatttgcctgaaaaaaaacgtgtttgtctttatggcattaatgccagaaaagaatccatctatcccgactga

SEQ ID NO: 191103 - DNA, 399 bp, Klebsiella oxytoca
gtgcaggaaataaacagaagtcgtcattctgcctatttattacatgttcacattgtttttgtgactaagtaccgccgtaaagttttcggtgagttacatctggaaaaagtaaatcagtatgcaggtgaagtttgcggtgatttcggtgctgtactgaaagaatgtgacggagaagccgatcatgttcacatgctggtcgaatacccaccaactgtgcaactgtcaaaactggttaacagcctgaaagccgtcacaagtcggcggctacggaatgaatttctggatttgcgggaggcgtacaataagcctgttctctggtcacgcagctactttgttgggtcatgtggtggagcaccgctggaagtcgtaaagcgctacattcagcaccagcgcggctaa

SEQ ID NO: 191104 - DNA, 603 bp, Klebsiella oxytoca; identical to SEQ ID NO: 150266

SEQ ID NO: 191105 - DNA, 297 bp, Klebsiella oxytoca
atgtccctgccggacggcgatacgaatgatcagaacaatcagcaggcttatcacgacggcaatcgcaatcagattctttttcagcgcatcgagatagtggagatggaaatttatggagaggccagtcagcatgacatagttctgctgtttaccctgaaaaatcgcctgaccagaggaggcgataatccggtaggtgtccattttcattccggattcggcgtgcatcggacccgcaggctcttccaccgtccagagaaagacatcccgtgcgcggctgtgctcgttaaaatctgctga

SEQ ID NO: 191106 - DNA, 240 bp, Klebsiella oxytoca; identical to SEQ ID NO: 143016

SEQ ID NO: 191107 - DNA, 681 bp, Klebsiella oxytoca
atgaaaatattaatcgttgaagacgaaattaaaacaggtgaatatctcagcaaagggcttacagaggcagggttcgtagtggatcacgctgataatggtcttaccggatatcatctcgccatgacagccgagtatgatttagtcattctggacatcatgctgcctgatgtgaacggctgggatatcatccgcatgctgcgcactgccggaaagggtatgccggtcttactgctgacggccctcggcacgatcgaacacagggtcaaaggactggaactgggtgcggacgattatctggttaaaccctttgcgtttgccgaactgctggcccgggtgagaacccttctgaggcggggaaacacgatgatcacggaaagccagtttagggtggctgatctctcgatggatctcgtatccagaaaagtcagtcgcgccggaaaccgcattgtgctcaccagtaaagagttcagcctgctggaattcttcattcgccatcagggcgaggttcttccccgctccctgattgcctctcaggtctgggacatgaattttgacagcgacactaacgcgattgatgtcgccgtaaagcgactccgcgctaaaatagacaacgattacgggacaaagctgatccagactgtccggggcgtgggctatatactggaggccccggatgcatag

SEQ ID NO: 191108 - DNA, 165 bp, Klebsiella oxytoca
atggtactgatgctgagtaattttaatttgaacataacgcttctcgtccaggcagacctggtaaatggttcaaacgaagtccagagtattaccagggttactttaccgaacgctctctgtttgccgggtgacaggataatgacaatgttgtcatttttgctgtaa

SEQ ID NO: 191109 - DNA, 282 bp, Klebsiella oxytoca; identical to SEQ ID NO: 139167

SEQ ID NO: 191110 - DNA, 1032 bp, Klebsiella oxytoca
atgccgatcatagcaccaattccccgtgacgaacgacgcctgatgcagaaagctatccataaaacgcgtgataaaaattatgcccgcagactgaccgccatgctgatgttgcaccggggcgagcgcgtcagtcatgtggccagaacactctgctgtgcccgctcatcgattggtcgctggattaactggttcactctgtctggtgctgaaggcctgaagtcattaccgtcaggacgtggcaggcgctggccgttcgaacatatttgcgcattgctgcgtgagcttgtgaagcattctcccggcgatttcggttatcagcgttcccgctggagtaccgaactgctggcgataaaaatccgtgatgtcaccggttgtccgctacatgcctcaaccatccggagatggttacctgctgccgggctggtatggcgcagagcagcgccgacactgcgtatccgtgacccacacaaagaagaaaaaatggtcgctatccatgaagcactggcgaaatgcagtgcggaaaatcccgtgttttccgaagatgaagtggatattcatctcaacccgaaaatcggtgctgactggcagttacgcgggcagcaaaaacgtgttgtcacaccgggccagaatgaaaagtactatcttgccggtgcgctgcacagcggtacgggaaaagtcagctacgtaggtggaaacagtaaaggttcatctttatttatcagactgttaaaacatcttaaggcgacataccggcgggcaaaaacgattacgctcattgtcgataactacattatccacaaaagccgtgaaacgttgcgctggctgaaagcaaaccagaagttcagggtcatttatcagccggtttactcgccatgggtcaatcatgtcgaacggttgtggcaggcgcttcatgagacaataacccgaaatcaccagtgccgttcaatgtggcaactgttgaaaaaggttcatcactttatggataccgtcagcccattccccggtggaaaacacgggctggctaaagtgtag

SEQ ID NO: 191111 - DNA, 315 bp, Klebsiella oxytoca
atgaagaagattttactcgttgctggtacagctcttgttctggcgggatgtggtgagaaaggcgattttgaaaaggctatcaacgcgaaaatttcaaaatcaaaggtgtgctactccctgcaaaacaatgactttgcgttcaacaaaggttttccagtaaaggttaatcatggctaccgttctgctggatacaatgccagcgatgaaatcctgaaaggtcttgttgaacagggtctgcttaatttttcacaacaggcgaatggctttagcagtgttgatgttctggaggtcaccgacactaaaaaatatttttga

SEQ ID NO: 191112 - DNA, 534 bp, Klebsiella oxytoca
atgccggaacggcggttgagccgcaggggtaaacaagctgcatcagggctatttccccgggggcggcgcgatgcgccttgcccgggctacaggttcactgccgtctgcgggtctggtagcccggacagatacgcagtatcgcctccgggaaactctgccactctgcgctctgctcccgggggcggcgctatgcgccttgcccgggttacgggttcaccgccgtctgcgggtctggtagcccggacagatgcgcagtatcgcctccgggaaattctgccactctgcgctctgctcccgggggcggcgcgatgcgccttgcccgggctacaggttcttgcgatctggaggttctgtagcccggataaggcgttagccgcaatccgggaaacctcgtcgaccgcaccgtttttacgcgctctttgtattaatcatcctgttcaaccacggcaccatgatcgccatgaccaccgtgacgcccagggtcaccaggccaattttactgaatacgttggtgtatatcggcagcgtttgtag

SEQ ID NO: 191113 - DNA, 1503 bp, Klebsiella oxytoca
atgaaaaacacgaaatggttgttgctgtcagtgatattggccttttttggcgtgccgatattaacgcacgtcgcggctctggtgctggcgatggtcggcggcggcctggcgctggttactggtctatttggcgaatcacagacggccgccacggcgatagcttacctgatgttcgcggcgggcgcggcgctgatgtttgccagcggtcgggtatggtcagataaacaagagtcggcattgctggccggctggcggcagagcctcttattactgcctgcgctgatggcgcttctgacctggattatcatgctgcagcgggcggagctcagctttaagcagctcaactttttttggctgtctacgttcctgcttccatggtttggtattagcgtgctatcggctctgagcggctggtattgggggatcgtggtgatacccgttggctcacagctgtgctttacgctgggatattactggccgtacaggcatgtacccatcgccaggaatgcatcgctctgccgctgtattctacttgcggtactggcgctgctgggcgcgtatgcgctctatcaggcgtggctacatgaggaaaaatatccttctgtcagcagaaacaatagcgttctcgagtcgattaataccggcaatttcgcgccgggaagctgcagtaaactcaccccattacagggaccgccgcaattacgttttacgcaaaactggccgcggatggccggggccacggcggcatatccgctctatgcgtcagcgttttatgccctgaataccctacctgctacgttttccaccagagactatttacacgagtcccgcacgccggatgcctggcgcagcataattactggcgaaaccgatatcatttttgtcgtccaaccttcagccgggcaaaaacagcgcgcgcaggatgcgggcgttaagctggtctataccccttttgcccgcgaagcgtttgtgtttatagccaatcaaagtaattcggtccagtcgcttagcgaggagcaaatccgcgcgatttttagcggcaaaattacccgctggagcgatgtcggcggcgccagtaaagctattcagccctggcagcgcccggaggactctggcagccagacggtgatgctggcaaaagtcatgaagggcgtcccgatgctgccgccaaagaaaagtgagttttccacagtaatggagggcgtcatccgcgaagtggccgaatatcagaatacgcgcggggcgattggttacaccttccgctactacgcgacgcagatgaacagcaataaacatatcaagctgctgtccatcaatggcattgcgccgacggttgagaatatacgtaacggcagctacccgtacacggttgatgtctatatggtcacccgggaacatacctcagcagaaacgcagcaactggtggcgtggtttttaagcccgcagggacagcacctggtgcaggatgtcggctacgtgccgatgtataaaacgcaggaataa

SEQ ID NO: 191114 - DNA, 714 bp, Klebsiella oxytoca
atgaacgccatggaagacattaaattgtacgtgcagctgacgggcgtcgatcctgccagcggcgctgatatttgtatcgcgcggcgtgaatccactgcctggcatagaggcatcgtggcggagctgattaatcaggctttggatcaggccgaaaaattcgtgggcgcaccgggtctggaagagctgcgggcatacgatgtcatggtagggattggtttaacatccagcggcatctggccgggtttttctctggacccagggacgattggccgtatgagcgtctgcggcgcggagctggatttcgatccttatatcgacagagtcccgatttacgcctgcgacatcgatactcacgatgatttcacggtggcgttctccgcgctgggttttcatcaccagcggagcgttatcgcaaagcgggggctcagagagtacgccagcgtggcggatgttttcattctgcaggtttttaaagatgcgttgaaatatcacaatgacaatagtctgcggctgttcagaaaaaagcaggcggagctgatgctatatgctcgctattatcaggctaaacgctgcgacgacaaaagctgtacgaactgcgaggagggctgtaccaggcccggctttcatttgccacgagacgtttttatccgcctcagcgccgccaacgcgcgctttcagtattgtccgtttgaaagacgtcggttgtcggtgtga

SEQ ID NO: 191115 - DNA, 420 bp, Klebsiella oxytoca
gtgaaaagaggggccatcgcgttaatcttcgtcgccgcgctaaccgcctgcgacgatcgtgtcgtaagccatttctctgactacgccgccataccagagcaatccggcatttggagctggctgccggtcttcttccccatttccgcacgcgaaatcaaaatagccactaatctcgacctcgatcttttttatgctgattttgcgctggcggaacacgatgagcgcgctcattttgaagcagcgttaggcctggggagcgtggttcaatccctggattctgcacataaaagttggtgtaagacgggaaaaaccctctggaatagcgaagcgcaggcaaagtcgttttttattcagaaattaagcgtggagcgctatcgcataactaacgacatgcccgcatgtaccaaaatcggctattaa

SEQ ID NO: 191116 - DNA, 210 bp, Klebsiella oxytoca
atggcggctaccggcagcgtacctttcaagcgcggggatgaagttgaggtttttttgattgtgaacgctgcggccgatttggggctcgtcgattttcacgaccgccggccactggtactggtgcctgcagccgcacgcgaatggatgaagcagtatatcgtaggaaaagaggcagattgcttacatattcttagcaaaattattttttag

SEQ ID NO: 191117 - DNA, 156 bp, Klebsiella oxytoca
atgatgactcgtttattagggaggtgcgacatcccgaatagtgaaaaaacctcagtggccggacaaaataaaaatgaaattgttctcatgatagcggcatattctgcctgcccggaatgggattgttattatctgaataagattaacctgtcttga

SEQ ID NO: 191118 - DNA, 354 bp, Klebsiella oxytoca
ttggatgaagttaaccattcagaatgttgtcgaccggcgactgccacgcagatggccgcgcagcgcttgggcattcccaatcgccagtatcgacgtcttctgtcgcgttaccgtgaatctggctcgcttggtatggctaaccgccgtcgcggaaaacccagcaataaccagcttcctgatggccttgctcagtatgctctcaatattatccgcgagcgctataccgactttgggccgacgctggcgtccgagaaactcgcagaactgcacgatgttaacctgtccagattaatggctacgaccatcactggtttaagaatcaagctcccggctgcaccgtactggtctatgtag

SEQ ID NO: 191119 - DNA, 921 bp, Klebsiella oxytoca
gtgtctgctgatggcttacgtcatagcctgacgggctggttcgccgcctggcttctgaccggcatcggtatgcggctggcgctgtacgacgcgctgttcgcggcgctggtgaatctttacgggcagcgtgccaggttgaccatatcgcgcgtgacgctggccggaggattagcctcggccctgttctggccgcttggcgcctggctgctgacgcggatggactggcggcacgcgctgctggtctacgccctgtttggcctgcttagcgctcttctgttgtggaaaatgccgaataccaaattaccgttgccggtaagggtgaaaaaaaaccagcagcagtcaaagcatgatagacgtccggccctgctgtacgcgttgttgattgcgctggttacctttgtatccaacggcacgtcaacgcatcttcccgagttcatcgccagcgttgggctccctgtcgcggtgggaatgctatggggaattggacaaaccggcgcgcgctttctcgaagtggcatccggctacgcgctcacaccgctgcggctaacgatattgacgacctcgctgatgccgctctgctttgcgcttggactgagcggcgcttttctgtcgtgggcggccggcggatttgtactgggttacggcgcgatcaacggcctgaccaccgtgtttaaggccactttaccgctgcagctctttgccgccgaggattatgcccggctaaccggcattctgttgattcccgcgcaactgctggccgccatatcgccgtttgcctacgcatggctaaatcatcatttcgggttgaggggaagcttagccgtttccgccgcgctggctgtgatggtggcagctttggcgatggccattgcatggtgtcagcgggagaatacgccagcggggattgaagaacggggataa

SEQ ID NO: 191120 - DNA, 198 bp, Klebsiella oxytoca
atgatgaagaacctgagtcttgtcgcccagctggagatcagcgctcatccccatatgctgcgccacgcctgcggttttgcgctggctaacaacggtgtcgatacgcgattaatccaggattttctcggccacaggaatattcagcatacggtcatttatacggcaagtaatgatgcaagatttagagaggtttggtaa

SEQ ID NO: 191121 - DNA, 648 bp, Klebsiella oxytoca
atggcggtggaaacggtagcgcaatatgattggcttggccttttaacgagcggaacgctcataccagcatcagccttcgttgcgatttgtctttttatcctaagagaatggttagattggcgtcgtaaatccaaagccagaaaaaatgaagtttgcgcattaaagaagatctttgcacgtgagtgtcagttagcctggaacgtaaaagaacaaattaaaacactatgtgaaaaattcgcgccttacgaaaaagggcctatgcacgagtgccctcttgacttaagcgttacaaaaacggtagctggcaaaactcgttataccgtcacagaaaacgacgttccgcgctggggtggcactctaagcgaaccatcagtcgcaaccttcacaaagcatttatatgatgtgtctaaactcgattctgcattttatgaaaaggttaacttagcctataccgccgtgattgagttgaaacatttttatgaatcgttggtcgataatgaagatactgcgcaggtgattggaatcgacaacattatgtatggtttttcaggctacgccctcaatgagatgatatggattgaacgggagcttaaagctctttatcaatactgtactggagaagaactgactgtaggtcttttacgataa

SEQ ID NO: 191122 - DNA, 2442 bp, Klebsiella oxytoca
atgagtaacgacgttaaattgcaggtattactcaaggctgttgaccaggcgacccgcccgtttaaatccatccagacagcgagcaaaacgctgtctggtgatatccgggacactcaaaaatcgctgcgtgaactgaatggccaggcatcccgtattgacgggtttcgcaaggccagcgcgcaacttgccgttaccggtcaggagctgaagaaagcgaagcaggaagctgccgcgctggcgatccagtttagaaatacggaacagccgacgcgcgcgcaggcgcaggcaatggatgctgcccgaaaaagtgccgccgcgctccagctcaaacacaacagcttgcggcaggccgtacagcgccagcggcaggaactcagccaggcgggaattaatacctgcaccctggcggcagacgagcgccggttaaaaaccagcatcagcgaaacgacggtgcagctcaatcgccagcgtgaagcgctggcgcgcgtcagcgctcaacaggcaaagctcaacgcggttaagcagcgatatcaggcaggtaaagagctggccggaaacgctgccgcaatgggtgccgccggtgtaggtatggcgacgaccggcacgctggccggtgttgcactgatgaaaccgggttatgattttgcgcagaaaaattccgagttacaggctgcactcggtgtggcgaaagactccgcagaaatgacggctttgcgaaaacaagcccgactgctgggcgacaatactgccgcctctgccgatgatgctgccggagctcagattatcatcgcgaaagcgggcggcgatgcggcagcaatccaggctgcgacccccgtcacgctgaatatggcgctcgctaaccggcggacgatggaagagaacgcgcagcttttgctcggtaccaaaaacgctttccagctttcaaatgaccgggtagcccatatcggcgatgtgctttcagcaacgatgaataaatcagcggccgattttcagggattaagcgacgccttaacctatctggccccagttgccaaagctgcgggagtaagcctcgaagaagccgccgccatgacgggtgtgcttcatgataacaatatcacgggatcgatggccggtaccgggagcagcgctgtcgtcagccggttacaggccccaacaggtaaggcatgggcggcattaaaagagctgggggttaagacggcagatagcaagggcaacatgcggcccgtatttaccattctgaaagaaatccaggccagttttaaaaagaataagctcggaacaagtcagacaggcgaatacctgaaaacgatattcggcgaggaagcgctgaaatcgtctaatgccctgttagacgctgcggccagcgggaaactcgataagctgacagcggcatttaaagcctcggacggcaagaccgaggagctggttaaagtcatgcaggataacctcggcggcgacttcaaagagtttcagtctgcgtatgaggctgttggcaccgacctgtttgaccagcaggaatcctcattacgcaaactggtgcagactgcgaccggttacgtgctcaaacttgataagtggatccagcgaaataaagagctcgcgcagacgcttggggtgattaccgccgtggtgcttggcgtggtgggtatgattggggccattgggctgattgcctggccagttataacgggagttaatgccatcatcgccgctgcgacggcgctcggtaccgtatttacaacggtggccggaggcatcattaccgctattggcgcgatttcctggccggttgtcgctgttgtggctgcgattgtcgccggggcattgctcatccgtaaatattgggagcccatcagcgcatttttcggcggagtgattgaagggatgcgggccgcatttgcgccagtagctgaactgtttgcgccgcttaaaccgatgtttgactggctgggcggaaaactgaaagccgcgtgggactggtttaacaacctgattgcgccggtcaagtcatcgcaggaaaccttaaacagttttcgtgatgccggtgtgttgttcggtcaacggctggcggatgccttaacgctgccgctgacggcatttaataagctgcgcagcggtattgattgggtgcttgagaaactcggcattattaataaagagtccagcacgcttgaccagactgccgcaaaagcgaacgcagccacgcagggtaactcttatattccggcaaccggcacttacggtggctatcaggcatatcaacccgtaaccgcaccggcgggacgttcttatatagaccagagtaaaaacgaatatcacatcgacgttcaggggggcggcagcggcacgcagctcgatcgccaactacaggatgcgctcgaaaaatttgagcgtgaaaaacgcgcccgccagcgtgccagcatgaaccacgacggatag

SEQ ID NO: 191123 - DNA, 2175 bp, Klebsiella oxytoca
atgacgaaatttaatgagtcgccatcgtgggaagaagagattgagctgattgccagaggtgagcgtgtttccggtggtcaggatggcgttgctaaccggccgttaaaagttctggttaaccgcacccgtcacctgaaagaaaaaagtgatgaaatggggggcgcactggccgggaaggtggaggcaataaacaccttcacagaaggcgcgacgctgaattcaccgcgggaggaaattctggacggtgcctaccggctggtgtggacgggggcctacccgaaagtcgtacctgcgaacagctcgcccgccagtaccggcggcgtcggtcccggagcctgggcgtatacctctgatgttgccatccgtcgcgagctggcctcagaagatgcggcaactccgggaggggcgaagatattcctcaaacaaaaaggcacggttcaggatgccatcaattacgtcacgccatttgcctttaaaaatctggtcgtaaacggcgactggtcggcggcactggttgcggctgacctgatggcccgcgatatgggctgggggctggatggtcaggggctggaatttaaagtcggtgccgagattgtcctgcggtgtggttattttcgtaatatcaggttcgcaccgctggcgggcttttctggcccggcaccgatttgcgttgtaaatatggctacaggcaagtgtattcatgactctgtagagttcatcggatttaagctgacgggaacaaaaatactgcaaagcacttacatcggtgagactgaggctatttttaaaggcgtctgccgttataactataatggcaatttgatccgtaccacgctcacggcggatgttaacacggctacagcctgggtcattcctgttgctgatgcgtcaagttttgccgccgaagacgccgttcatatcggggacgggcgttataaaatcctctccgtctccggtaataacattacgctgtataacgatggcgtgggtgccactctttttgattctggtacgcgatatcagcactataccggtcagtacgttactaaaaatcaggggtacgataataacggtatccgtatagggaaccacactcagggctggaacataaaggtcgcgggaaaggttgaggctatcggaaatggctggactggcttctatcatgacagtggtgaatacggcgggtatctggaaatagatggtgtcagggcatcgtcaaacgggtacatcggggttggcctggggtacgcaaataaaggctacgtccgaaactgcattactgagtttaacagtaacaatggcattgatacttttgaagcaaaacaaacttttgcggttgaaaacaacctctgcgtaggtaatggcgttgataatatttttgtcggcggaaacagtgaaaccgccccggtaaaaggaaatacctgcataaatgcgcaccgtatcggaatgttgatattcggccgcacgactgccattcaggggatggagttaacagataataaatgccgtgggaacaaataccgctctgtcgggctgacaggggtgcgtcacggcaaaattaccgggggcaacgtcggcggcgcagctaactggtcaatctttattgaagggcgtgccgggctgaataacccggataaaataaccgttagtggtgtggatatgtatcagtcatctctgggcgatgttggtggcaacctgatgaataatgccggttacgcttcggggaccattgacctgattgataacaatactttcgccagaatgccaaccataaacatcagcaacgtcaattatttcggctgcaagtttcatcctgaatgctatatcgccggggcgggggaatattccgccgccgcaggtgtcaatattgcggtgacattatccgtgcgcaggccccataacagtaccgttaccgatgcggcctcggcccgaccgataaccttcgccatttcttctcaggcagatggttctgaccagtcaacggttaactatgcggtaaaaagcctgtctaacgccgtcgaaatactgaacaacgccaccacgcgcgggaagattatcgctatccctgatttgggagttatttcttataacttccgactggatgcgccggggacgcgttatatccaggttgaatgtggtggcttcaggaagatattaaccctgaaatggtcgtaa

SEQ ID NO: 191124 - DNA, 597 bp, Klebsiella oxytoca
atgaataactcgttgatggcgaccgggtcatcggtgctggaacagcgagccgccgaagcgtgcgccgtcatcagtgatttatccgtcccattgcgtgacctgtggaacccgtggaaatgcccggtcaaatttctgccttatctggcgtgggctttctctgtcgaccggtgggaagaaagctggtcggaggtggagaaacggcaggaaatcagtgatgcgttctggatacatcaacgtaagggaacaatatcagctatccggtttgtgattgaaaaaatgggttattccatatcaatcgacgagtggtggcaggtggcggatccggctggaacgttcaggcttgaggtggatataaatgatatcgggctgacaccatcaatgctcagtgacctgaatcgcctgatagatgagacaaagcccgtcagtcgtcatatggcacagatgaatattgcggcaaaggtgcgcggcgatattcataccggtgctgctttatgttgcggcgagattatcagtatttatccggagaattatgagccggaagaaaacattatttataacggcgtgatttttcacgatggagattttaattatgggtga

SEQ ID NO: 191125 - DNA, 1035 bp, Klebsiella oxytoca
atgagtaaatacaaaggtcgcaagccgcagccacaaaagcgtctgcgcaacatgaacgacaccgcgccccaaaaagtggaggcgtttacctttggtgaacagagcgccgtgctcgaccgccgcgatattctggattacgtggaatgcgtcaataacggcaaatggttcgaaccaccggtcagcttcaacgggctggcaaaaagcctgcgtgccgccgttcatcacagctcgccgatttacgttaagcgcaatattctggcctcaacgtttattccgcacccgcttttatcacaacaggatttcagccgcttcgcgctcgatttcctggtgtttggcaacgcctttttagagcaacgaaagagcgtgaccgggcgcccgctgaaactggaagcgtcaccggcaaaatacacgcggcgtggtattgaggaggatatctactggtgggtgccgtcattcgaccagccgcacccgttcgcgccgggctccgtgtttcacctgctggagcctgacatcaatcaggagctgtatggtatgccggaatatctcagcgcgctcaattccgcctggctgaatgaagcggcgacgctgttccgtcgcaagtattaccagaacggggcgcatgcgggttatatcatgtatgtgacggatgctgcgcagagcgggaccgacgtcgaggcactgcgggatgcgatgcgcagctcaaaggggctaggcaacttcaaaaatctgtttttctacgcaccgcacggaaaaccggacggcattaaaattgtgccgctcagcgaggtggccacgaaagacgactttttcaatatcaagaaagtcagcgccgccgacctgctcgatgcgcaccgcgtaccgttccagctcatgggtggcaaacctgagaatataggctcaatgggagatatcgagaaggtggcacgggtgtttgtgcgtaacgagctgacgccgctgcaggagcgttttaaggagataaacgcatggcttaaaatggacgtaatccgttttgaaaaatactcgcttgatatttaa

SEQ ID NO: 191126 - DNA, 651 bp, Klebsiella oxytoca
atgacaatatattttgacaaggctttgtcaaaactaaaagcaagaacagttgtgcttgatagtgcatttgaaagaaatttgcttattgcaaaccctaacaaatgcgcagatagatatgctgttcaagaaggactaatgtcctcattgtggcaggcttggtgtatgtattgccgaactattatatttggttcgttaactgatgggctaacggtaaatggaaacagagtctcttcagcttatgctcatttaactgatagggagttggtttatcttgcacaaaaagcttcacagggagcaaatttggcaacagccaccgtgagatctgcacaaccacatacagaaatgacttggggggatgcttttaaactaaacccggttataactgctttcaatccctctaattcaggaattcttataagtggattgggtgcggttagtttactcttggatttgcaaaaatttagaaatgcaaacgcgcatataacatccttcacaataggtgaggttaaaagtgctcaagttaaatactcgcatacaaaatttcgtcatccatctgatacaatgttttggatagatccccaaactaatgattatttatggaagtcatggattgaggaaatagaactgatttctgaagcaattgctcagtag

SEQ ID NO: 191127 - DNA, 1077 bp, Klebsiella oxytoca
atgttaattaattccagttattacagtattgcagaacttgtcgatatgctttcacgccgagacttaatagttaattcaaattatcaacgagcagctggattatggcctgagggacctagtagctatttcattgatacaatattagaaggattcccattccctaagatatatctttatgagtttatgaatcgctcggaacgtaagataaaaaaagaaattgttgatggtcagcagcgtatcacgacaatacgcagatatattgacaatcaatttcgggttaagggggatagtcaatattcagggttgttttttcgtgagttgccgctagaagtgcaagaccaatttatgtcgtataccgtttctgctgatgtaataagaaacgcaacgcgtagtgaaatattgcagatgtttagacgaatgaatgcttatacactaccccttaataacgcggaaaaacgtcactcttcttatattggggagtttaagtggtttattaatgaggcatctgatagtttgaatgaatttttcatcgagtatggtgtttttacagatagacaaataataagaatgactgatgcggaatttatttcagagtgtgtgatttctattgaacgaggtatagttagcgctagtcctactgatttaaatcgcctctatcagcaaaatgatgatgcttttgttaatcgaaatgagttccatcaaatgttaactgaaacctttggtttcatttctgctaattttagcaatctcagacaatcatttatgatgaagccttatgctctccactctcttgtcaccgcattgttgcatacaagatatggtattcaatctattacaaatgaatacgcaattcaatcattaggggtttacaccactgatattgccagagctgcaaaccgcctagaatctttggctcttgctcatgaatcaaaagatgtgtccggaccattccacaagtatgtatggggaacagaatcaagtaccaataaagcaccacgaagagaggcaagagttttgacgatcttatcggctctcggttgtaaaattggagatcatgagtatgacaatatattttga

SEQ ID NO: 191128 - DNA, 645 bp, Klebsiella oxytoca
atgatttggaaaataatttctcttgtattggtcggtttttttatattcgtgcttggtttgtggctcggttctattcaggctgaatgggcgaaacctgagaataaagatgctgtcgcttatttggctatgattgggggatgggtttcgggaatagccacatcagtggctgttattatctctttatatgcaacataccagtcgtctcaaagtaatgctgaaaacatacaggtttcatatgaagtttttccggcaattgaaaaaaaagatataggcactaacattattattaagaatgtgaggccagttacagttcatatattgaaagtgtttattgctattgatggttctaaagttagtgcggatataagttttctaaaacgaggtggatatcctatccctcatgccttgtatcaattaggtgaaaagtgggagtttgcattttatacacattacagccctcagtgggctacgattttttcaaaacttgaaagtggtggtgagctgacatttaaaaaaggattttttattatcgagtctgcaatgaagcaatataggttgaaaatgcctagtgattttctgaacttactgcgcaccagatatgaaactttcgagacggaaaaagaagagtacaagctcacattttga

SEQ ID NO: 191129 - DNA, 732 bp, Klebsiella oxytoca
atggatactgtaatagcatttttatctctggctctctttattgcttttaccgtgggtttaatcaagccatcgttagtttggatgccgaaccgtaagcgcgccagtgcagtttaccttggtggttgtctggtgctgggggtttttggctcaatcatatggccagctgaaaagagtcagtctgtagcaaaaacagaagtactggcggttaaagcggaaccggctacgccaacgtttgattacgcagataaaactctcaaagaatatcgcaacgagccaaaagaaacccgacacgatatcgttaaaaactatgttgatttcaaaagcgtaccggccaagtctactgatgtgttttatgcttgtatgagtgagtacacttttactaaagatgatacgttaaagctcggtgatgtgttggggtggtgtttcaacgacttcgagaaagagccacaatctctaaataataaaatcaaccttgacgcatttcagggtaattttagcggttgggatggctcttatcgtccgttagataaactaataaaatcgaacatgaatgatgattcatcttacaaacatgtttcaacggtctatagtctgattttgaataaagacccgcatgccatcgtaaaaaccacgtttcgcggcactaatgcttatggtggagtggttaaacaaactgttgcagcgcgcgtaaacgtgcgaacgggtgaagtcgagtcgatactcgacaactag

SEQ ID NO: 191130 - DNA, 1743 bp, Klebsiella oxytoca
atgaaccatactccccccttggctctaccaacgattaacttcaaggaaataacatttaaatgtggcaaaaccatacatcttggcgagaatgataaaataatcattgtcggccctaataacagtggaaaatcacagacgctacgagatatattttcaattgccgcgcaaacaagcgggtttgaaaatttagttgttgaggatgttttaattaataaaaatacctcccaaacacaatttgagaaattcttaaaagaacacgcagaatacatccacccaaactatcattatggctcatggcaattatatgaaggttatattaaccaatgggacgggaaatatttaaacggccagcttgtcggtggctttataaagaatattagtgcaaaagaaagacttgagatttgtgagcaacaaaaaagcgtatccccgaatgaaccgaagaccaaacctcagcacatattgtatgatgacgaccagttgatgcaaaaaataagcaaactattttataaagcattcaatcaagaacttatgtttgatttcaaaggtggtagcaaactccctatccatattggagaaatacctaaaggtgatgaatttattgataggcaaacgaatctttatagagatgctgtccgaaagaacccactacttgatatgcagggggatggtgttaaaagttatgcaggcatccttttcgaaacgctaacaagtaaacacgatatgattctactggatgaaccagaggctttcttgcacccaccacagatgagaaaacttggtgaaacattagcttcagaagttaaagggcaaatgattgtcgccactcatagcagcgatatcatgcgtgggttcttagagggtactaaaggaaatgtcagaattatcagaattcaaaaaaatgaaaacgggaatttgattcacgaagcaaatccagaggctataaaggaattatggagtaaacctaaccttcgcttctcgaatgctcttgatggtattttccacgaacaaattataatttgtgaagatgatagtgattgtagactttataattacacagcagaatggctgaaaaacaataataacaatcaactactagatacatcatacgtccctgctggcggtaaagcagcaatacatgggattgcatctgttttaagaaaagtgggcgttcctacaaaagctatttttgatattgattttctttctgataaaaaattgatagaggatactgtaaaatcttttggttctgaccctaccaacattctaaaagagtgggttaaagtagattcatttgttcgaaaaggaattaagcccaaaaccattgaagaaattaaaaaagaaatcattgaaatcattagcgaatcaaaacctaatgaattaaagaaaagtgatattcaggatgccatgaaacaagggcaagcatggagtgtgctaaaacaagcaggtgcggcgatattaccaagtggtgatgccactgttgcatatgaaaatctaatttgcatgctagaagaaacaggtatctatattgttcctgttggtgaaattgagcgttttaataaaaaaattggggggcatggtccaaaatttgtatcaaaagtcctttcagaacattcacttgatgaaaaggaatttgatgacttaaaaatatttgttgaaaaagtccacaaaggtccacactcagtattagatactaccccaattgatggcgataaagtggcggtagaaatggcgaaagatgggtaa

SEQ ID NO: 191131 - DNA, 1638 bp, Klebsiella oxytoca
atgttttcagtagatgtgtcacctgatatgaatatgtatacgttacttgttaaccaagcctatgattcctcattcgcattatgtgaatttattgacaacgctatacatgctcatcttacttccaaaaaaatgtctcccctgaatatcaacctagatttttattccaatgaaaacctggagtcgaatatgcggaataaaatagttatccgtgataacgggccaggcataaaccgaactttgttagaaaaagcattaaagcctgccagcaagcctgtaacaaaagggttaagtgaatttggcataggaatgaaagcagcggcagtctggtttgctgatgaatggcaaataaaaacacatcctttaaaagataataaccagtacacttgtaactttaacctaaatgaacttcttcaaaaacaacaatcacagattactgtctttgataacatctgttctgattcatggacgggtacggaaattatacttataggtgtacgccgagatattagccaagagcgctaccaggccattactgatgatattacacatatttatcaacgatttatttatggtgacaatccgcaagtaataattacatcaagctataatggctctccaaaaacattatcatttacaccttttagccctttaactcttcgctcaccaaaacacgttaaaaaaggaaatactgttactgctgtaggaccggaacatttatggaaagtcccagtagactttcagtacctaggtgaacgaattcacggttttattgaaataaaagagacaggaagttatatcaacaaccctggcttagtaatgtttaggcatgacagagtcatctgcggcattcctaccaaaaaatatcttcctccacgtttgttcaagacctccaataaacatagggcactgagagtgtatggcgaacttaatcttgattcatctccggtctcatatactaaagatcgttttacttttgataatgatgaattctgtgacgctctcattgaagccacacaagggctgaatgaacttcttagccaagctgatgcttatagagctaacatcaatacaccttcatcccctacaagtacaactccgatacatgtcccagcaccgactcaaacaccgccccctattcaaacaccaccgacttcttcggcagttccagtaccgacaccgggcttaaccccatatccaagcgtaacaccatataatccccctgctcctactaaaattcagagatcttctgctgtcgaaattaaactaaccgaacttaattcgcaaaaactctgccgaatatatcattctttatgtacagtttcttgtgctgaacatgctgtactagtgtacgttggtgcgtggtctttttttgaaactatggcaaagcttctcggcgcatcaagtaatattaacttccctgatttctttaagaatatgatggataaatggcaattcaacagggaggataaaaaatctgctggaagttcacttgcaaaaattcacgaagaaggaaacctcaataaacacgatagtataagttttaatactaacgcagcccaattagtcatacattttcaagtattggaaaaactaattattcgttcagtcgatgaaataataaaagtaaagtgtagttaa

SEQ ID NO: 191132 - DNA, 1404 bp, Klebsiella oxytoca
ttgctgttctcttgcgcgggattactaaaattgcctcgggaaagtgagaatccaatggaatataacagtaatgtagcatggtcagcagcccctccctcagtattcaagagaaacgtgccctatctttgcaaaaaaccttttcccataggactgaaagctggttttcgcttcattgaccttttcgctggcttaggtggatttcatactggcttatcccgacttggaggcaaatgtgtttttgccgcagaacttgatgaaaatctacgtaacctttatctgaagaattatggattagaaccggaaggtgatattcgtttcgttaatgaaaataatattccagatcatgaagtactatgtgctggctttccctgtcagcctttttccaaggcaggtaaaaagaaaggatctgagtgccctgagtcaggtaaactgattgatgatgtactccgcatagtcagaaaaaagatgcctcgttatgttatgctggaaaatgtgcccgatataatgagggttcagggaggattattctgggaatatattgtaaatagcctaattagtgaaggatatacggttcaacatagaatctatacaccacaggacttcggtattccccaaaaaaggaagcgtatttttgttgtggcatcaagggatgaaaatatgtgtttcaattggccacaaccgagtaataagtcattatctttgtcttctattattaaagataaccccttgaaggtcagatgtctcgaaaagcaaaaagaagaagtattagaactctggtctgattttattagaacgactaaagagtattcatccctacccatattagctcctgaattcggtgcaacatatcccttccacatatccatgaccgagctattatttgcaaaacagttcaggggcgctttcggcagggacatgtccgaagtaaaggatatagatgatgtgattgagtgtcttccaagatatgcaaaagcaaatataggtaaagtcagttctcgtgtggcagaagcaattcaagcatcacgtgaaatttatgcaaaacacaacaaatttttagatatgtggaaattgcggctgcaaaattttcctcttagttggcaaaaacttgaatggcagggtgatcgaaacggaactgagctatgggagcatcttattcagttcagggcttccgggatccgtataatcagaccaacatctgcaccatcattggttgcaatgtcaacgactcagacaccaataattggtaatctaagacgatatatgagcatcagagaagctgctgcgttacaatctcttgacaaacttaaatacttgccggaaacagatagtagagcctacaaagcacttggaaatgctgtgaacgcgcatattgttcatgaaatcgccagaaaattatttttgtaa

SEQ ID NO: 191133 - DNA, 471 bp, Klebsiella oxytoca
atgcgttatttttgtattaaaataacacgacaaaaatacaaaagtctcataattatgcgacaagacaaatatgatccttttatctccaactatcgtatagctaaatctgtatcaacggttttaaaagataaatcatggagttatagaagatgcgctcaccaatttaaccagcatcataagagccaaaaaatttctgttacaaaggatttagtgagccgtgtggccaatcaggaattcagagtagtgaatgaaaggattcggcttttatgtgagttccttgagatcagcatttatgaaagtgatcgaaaagaggaatcgcaatgcgttcctgtagaggctcttacggggcttagcaacgacattaagaatgaaatcaccagagttactgaattagtcaaagaaaaccctgcccttggagaaacaattgctgttctcttgcgcgggattactaaaattgcctcgggaaagtga

SEQ ID NO: 191134 - DNA, 462 bp, Klebsiella oxytoca
atggctactaccccaatccaaactcgccagttactcaccgttccgttcagcgccgccacggatttcaccgtccttgccgactattgcgatcgctttgctgaaatcctgattgaaagcgacgatccgacgctgcggctggcgctctgcggacggcttaccgcctgtctcgcgctgctgcggcccacgttgaacgaccccatcccgctccacctgatcaaaagcctgaccgttgatattatccccgtaaatcctccccgttttgaacccggatccgaattactttgcgactactcgcttatgctggcgcagcttctaacggggcgagtgttgctgccgaaaatggaacggacgctgaccggattactgtgtgaactggtctggtatttcgccgccgatctcaaagccccgcgctggatacgcacctccgatggcgtgaagtttattgacgaggtggtggcatga

SEQ ID NO: 191135 - DNA, 207 bp, Klebsiella oxytoca
atgatgcaacaggactggcatcccgctgacattattgctgcgttaaaaaagcggggaacgtcgctggcggcggtttcccgtaacgccgggctggcgtcttccacgctgaccaacgcccttaaccgccgctggcccaaaggcgaaaggctgatagcggaagctcttggcgtcgcgcctgataaaatctggccttcgcgctatcgctga

SEQ ID NO: 191136 - DNA, 885 bp, Klebsiella oxytoca
atgggaatactgaagcaggaaatgaaacgtctggcgcaacaggcgggcggcagtcataagaccgttcatgaccgcattaagctggcgcagcggttttgtgagcgtctggttctggcgcagaatgtgcagacccgccgggtggagcaacttaaggcgcggcatattgaaggctatatccgtgaacggctggcgcagggcattacaaagcgttccctgcaaaacgagatggcggcgatgcgctgcattctgaaacaggccggacgtgacagactggcgcagagtgagcggctgaataaccgctcgctgggattatccggcgcatcccgtaacggtacgaagctggctatcacgccggagcactatcgtgacgtgctggagaacgcccgcgtaaaagatccggggctggcggcagcgctggaactctcaagactgatgggactgcgttcgcaggaggcggtgcaaagtgcgcagtcattaagaacgtggaagcagtctctggagcgtggtgatacccggttaaccgtggttttcggcaccaaaggcgggcggccccgcgagacgattattcttgatactgtcgctgtcaaaaaagcgctggataatgcgctggctgtgacagaagatcgccacggcaggctgattgacaggccagatctgaaaaccgccatgaaatactggcacagtcaggcgtcacgtctcgggctaactggcgcatattctccgcactcgttgcgctacgcatgggcacaggatgccattcgttattatctggcgcagggattttgcgagaaggaagcgttggcaatgacggcgatggatttgggccacggtgacgggcgcgggcggtatgtggcgcaggtttacgggcgaagggatactgattga

SEQ ID NO: 191137 - DNA, 1263 bp, Klebsiella oxytoca
atgtccctgtccgacgcgaaaatccgcagtatcaagccttctgataaaccctttaaactgaccgattctcagggtctgtatctgcttgtcaatccgggcggttcacgcctctggtatctcaaatatcgcttcaaccgaaaagaatcccgaattgccttaggtgcctatccgcaggtctcgctttccgacgcccgccagcagcgcgacggtatccgtaaactgctggcgcagaatatcaatccagcacagcaacgcatgactgaaaaagccgccgcatcaccggaaaaatgctttgaggccgttgcggtggcatggcacaaaaccaacaagaaatggtcggctgactatgcagagcgcatcctcgccagtatgaagaatcatatctttccggcgattggtcacctgcccgtcacgatgctgaaaacgcaacatttcacggcgttattgaaagttatcgaggataaaggctttctggaagtcgcgtcccgtacccggcagcaactctgcaacatcatgcgttacgccgttcagcagggactgactgaaaacaatccggcgctgcatctggaaggcgtcaccgcgccgccagtcaaaaatcactatcccgccctgccgctggaacggttgcccgagctgctggaacgtatcggtgactatcaacaggggcggcagttaacaagactggcggtggtgctgaccctgcatctgtttatccgctccagcgagctgcgctttgcccgctggaatgagatagatttcagacacaaaatatggaccatacccgccacacgggaaacgattgagaaagtccgtttctctggccgtggcgcaaaaatgcgaactccgcatattgtgccgctttcccgacaggcaattgccattctgaagcagataaaggaaatctccggccatctggatttagttttccccggcgatcacaatccctacaaaccgatgagtgaaaataccatcaaccgggcgctgcgcttaatgggctatgacacaaaatcggacgtctgcggacatggtttcagaacaatggcctgtagcgcattagtggaatctgaacgctggtcgcgggatgccgtggagcgacagatgagccatcaggaacgcaacagcgtgcgggcggcatatatccatcgcgccgagcatcttgacgcccgtaaagccatgatgcagtggtggtcagactatctggacgtgagccgcgaggggtacgttgcgccctatatttatgcccggcaacataaagcggcctga

SEQ ID NO: 191138 - DNA, 279 bp, Klebsiella oxytoca
atgcttatcaataacaatagcttatgtgtttttgttgaattattcctgttacaaataagttgcgtgagggctatgattggtttttttgtatttatatatttaatgtattatttaaatgactcacaaggagcaatttcgtgcaacgagaaggcgttttcatgtgcgtggtttaataaaattaaatatggtaaatgcaatgcagatgccggcaaaaatgaccgcgagaatgtattttttatcattattttgtattatttcaacaggcaacaaattgattaa

SEQ ID NO: 191139 - DNA, 1290 bp, Klebsiella oxytoca
atggaaccaacattgtcattaaccgtgatgttctgtgctgcagtgggtgcttcagtatcagaatcgctgtcggaatccgagtcgctgtcagagtcagaatcgctgtcggaatccgagtcactgtctgaatccgagtcgctgtcagagtcagaatcgctgtcggaatccgaatcgctgtcggaatccgagtcactgtcggagtcagaatcgctgtcggagtcagaatcgctgtcagagtccgaatcgctgtctgagtccgagtcactgtcggaatccgaatcgctgtctgaatcggagtcgctgtcagagtccgaatcgctgtctgaatccgagtcgctgtcggagtccgaatcgctgtcagagtccgagtcactgtcggaatccgaatcgctgtctgaatccgaatcgctgtccgaatccgagtcgctgtctgaatcggagtcgctgtccgaatccgaatcgctgtcagagtcagaatcgctgtctgaatctgaatcgctgtccgagtccgaatcgctgtctgaatcagaatcgctgtcgctatccgagtcactgtcagaatccgagtcgctgtccgaatccgagtcactgtcagaatctgagtcgctgtccgaatcggaatcgctgtctgaatctgaatcgctgtccgaatccgaatcgctgtcagagtcagagtcgctgtcggaatccgaatcactgtccgaatccgagtcgctgtcagagtccgagtcactgtcagagtcggaatcggagtcgctgtcagaatcggaatcgctgtcgctatccgaatcgctgtcggaatccgaatcgctgtcagagtccgaatcgctgtcggaatccgagtcgctatcagagtcagagtcgctgtccgaatcggaatcgctgtccgaatccgagtcgctgtcagaatccgagtcgctgtcagaatccgagtcgctgtcagaatccgagtcgctgtccgaatccgaatcgctgtcggagtccgaatcactgtccgaatccgagtcactgtcggagtcggagtcggagtcactgtcagagtccgagtcgctgtcagaatccgaatcgctgtcggagtcggaatcactgtcagagtccgaatcgctgtcagagtcagaatcactgtcagaatccgagtcgctgtcagagtccgagtcactgtcggaatcagaatcgctgtcgctatccgagtcgctgtcagcgtcagaatcgccgtcagcatccgagtcactatcggagtccgaatcactgtccgcatctgagtcagtttctgaaatcgaagagtggtga

SEQ ID NO: 191140 - DNA, 357 bp, Klebsiella oxytoca
atgagcaaacccgttgaaaaacatacagctaacgcaagcctgatagcatctaccgatgatgcatgggactctcgtgagcttggttgcagcgaagctcacgtaaaagtgtcagacgaccaactggacatggagatcaatgacgccttagagttacatccaatctcaattaggttaaataaatcgttgattgaagaccttaaaatgattgcggatctacatggcttgggctatcaacccttgattaggcaggtcctgacacgtttcgctgactgcgagaaaaagcgaattctgcaggaagttcactctaaagaagtgtctaaacctcaaaaagaacctcgccagaaaaaagttgcgtga

SEQ ID NO: 191141 - DNA, 1014 bp, Klebsiella oxytoca
atgacaattaagaaactcgatgatggtcgatacgaagtggacattaggccagcgggtcgcaacggaaagcgtatccgccggaagtttgacaagaaaagtgaggctctcgcctttgaaaagcacacacagtttaaccaccacaataaagactggttatcaaagccaaaggacaagcggcgactgtctgagctaacaaaaatctggtgggatctcaaaggaaaacacgaagagcacggtaaatcgaacctcgggaaaatagagatattcactcgaatcactgacgatccgtgcgcgttccagatagataaggcgctgattagccagtacacggcagcgcggcggggtcaggggatcaagccatcgagcattaaccgcgatttgacctgtattagcggcatgtttacggcgctgatcgaggctgaattgtttttcggtgagcatcccattcggggcactaaaagactgaaggaagagaagccggaaactggctatctgactcaggacgaaatagcactgctactttcggcacttgatggggataacaagaagattgccgttctctgtctcagtaccggcgcaagatggggcgaagctgcgaagctgaaagcggagcatataatacataaccgcgtgacattcgttaaaacgaagacaaacaagccgcgtaccgtcccgatttctgacgaagtggcggcaatgattgccagtaacaagcgtggttttttatttcccgatgcggcatatcccgatttcaggcgcacgctgaaagaaataaaacccgatttacccatgggacaggcaactcatgcattgcgtcatagctttgcaactcactttatgattaacggagggagcatcataacgcttcagcggatcctcggacactcgcgaattgagcaaacaatggtctatgcacatttcgcgcctgagtacctacaggatgcggtgacgcttaacccgctacggggtggtactcgcgccgagagtgtccacgcaatgtccacagttgggtaa

SEQ ID NO: 191142 - DNA, 300 bp, Klebsiella oxytoca
atgtcaaccgtgataggtgagaaacttgcgctgatccgcgagtcggaaaggctaaacagaaagcaatttgctgaaattactgaagttccttatggctcactgacttactacgaaagtggccggagcatcccgccagctaatgtgataatgaagattctccagcaccctcgattcatgaaatacacgatgtggttcattgcggaccaaacatcaccggaagccgggcaaatagcaccggcactcgcacactatgggcaagatgcaacaaactcgcagcactcaggccaaaagactggctaa

SEQ ID NO: 191143 - DNA, 270 bp, Klebsiella oxytoca
atggctaaacaagttgtaagtatcagcgatgcgctgccctacaaagagtttgcaaggcatatcggaaaatctcccgatgcggtcagggggatgattgaaaaaggtaagctacccaccatcgagatgactgatccccagtcgacctctaaacgggcgggagaactctggatttatcttcctgcctggaatgcaggccttaaattggcatatgacagccgcccgaaagagatccgcgacggttggttgatgtggttagggctgggggagtaa

SEQ ID NO: 191144 - DNA, 1011 bp, Klebsiella oxytoca
atgaataccatcgatcctcgctgcttcgcctccagtaccataaacaccatcagcatttcaggtggaaaggatagcctcgcgcagtggctccgggccattgaaaacgatgttccacatatttccgtgtttgctgatacgggccatgagcaccctcaaacgatggaatacctcgattacctggaatcaaagctaggtaaggttattcgcgttaaagctgattttacaaggcgtatagaaggcaaacgtaaattcattgctgaaaagtggcccgtctctctggttcaggagtgcggaatgtcgccagatgaggccgcagaacgcattcatcgcgcgcttcagattcttaaaccaaccggtatcccatttcttgatttgtgcatgtggaaaggccgtttcccttcaacaaaggtacgcttctgcacgtttgagctgaaacatgagccagtaagatcgcaggttattgttcctgccttagatgaatatgacgaagtaataagctggcagggcgtcagagcgcaggaatcaccggaacgcgctttgctgccggtttgggaggaagacgcagaccacacaccgggcctgcatgtatatcgcccgatcctcaactggctgcatgaggatgtgttcgcccttgccagacgtcacggcattaagcccaacccgctttacctgcaaggctgtagccgcgtcggttgtatgccttgcattcacgcccgtaagtctgaactggcggaaatatttcagcgctggcctgaagaggtacgccgagtagctgaatgggaaaggctcgtagcggaatgttcacgccgtggcaattcgacgttcttcccatccacgcatgacccgcgccgcgctgaaaagcgaattgaagttgtcaccgttgatgcttatggcattgaatcttatcgcgactgggctttaaccacccgtggcggggtgcagttcgatctactggcagcggctaatgataaagcagtctgcagcagcgtctatgcgggggtatgcgaatga

SEQ ID NO: 191145 - DNA, 177 bp, Klebsiella oxytoca
atgattattcgccctaacgtgtaccgtataaaaaaaatcgaacgtagctcaaatggtctttactggcttgtttacgtggatgtgatctgctgcgggcatattggcgcaaaggtcattatttgcgattccgaaataaaggcaaacgcgatctctgtaggtgatgaggtgcgtaagtga

SEQ ID NO: 191146 - DNA, 1209 bp, Klebsiella oxytoca
atggtgccgaaactacgattcagtgagttcaacactccgtggaagcaagtgtcattgggggaggtctgtgctgatgctgcttatggcatgaacagtgctgcaacagcatttgatggaagcaataaatatattagaattacagatatagatgatgaaagtcgggaattcagcccttcaccattaacgtcaccatctggtacgcttgacaataaatatcttctcagagatggtgacattgttttcgccagaacgggggctagtgtagggaaatcatatctatataaaaaaaatgatggcaaattatattttgccggatttcttatcaggttatcaataaataaagcaaatccatgcttcgtttataaccaaacacttactaggaaatatcataagtgggttaaaatttattcaatgagatccgggcagcctggtataaatgctgaagagtataaagagtttgagttcgccataccatcctcagaagagcaaaataaaattgcagatttcctgtcctctattgaggaaagaatcacgttgctgaaaaaacagtacaacatgctgtgccagtacaaaaaaggcatgatgcagaggatttttagtcaggaactgcggtttaaagatgaaaatggagagacgtttcctgaatgggtacacactagtttgggaactatatctaaagtttatgatggtacccatcagacgccgaattatgttgagtttggggtgccattttatagtgtagaacatgttactgctgatgatttcgatgacacaaaatatatttcagaggatgttttcgaacaagagtcgaaaagagtatctattcagcaaggtgatatattaatgactaggataggcgatattggcactgttaaatatatcaactggactccaagggcatctttttatgttagtctttctttaataaaggtcaaagagtcttttgattcaaagatgattagttattgcatgcaatctgattttttccaaaaagaacttcatgaaaaaacaattcatgttgcttttcctaagaaaattaacttaggagaaatttctaattgtaaaattaagatgccatcctccaaaaaagagcaaacgaaaatttctatttttctttccgctatcgatgacaaaattaccgtaacaaaagcggaactggatgcgctaaaaacctggaagcagggcttgctccagcaaatatttgtataa

SEQ ID NO: 191147 - DNA, 537 bp, Klebsiella oxytoca
atgggtaaccgcagcccggacagatgcgcagcatcgcctccggggaaattcagccgttctgcatgcagccccgggggcggcgctcaacgcgccttgcccgggctacagattcattgccgtctgcgatccggtagcccggacagatgcgcagcatcgcctccggggaaattcagccgttctgcatgcagccccgggggcggcgctcaacgcgccttgcccgggctacagattcattgccgtctgcgatccggtagcccggacagatgcgcagcatcgcctccggggaaattcagccgttctgcatgcagccccgggggcggcgctcaacgcgccttgcccgggctacagattcattgccgtctgcgatccggtagcccggacagatgcgcagcatcgcctccggggaaattcagccgttctgcatgcagccccgggggcggcgctcaacgcgccttgcccgggctacaggttcattgccgtctgcgatccggtaggccggacagatacccaggttcattgccatctgcgggccggtag

SEQ ID NO: 191148 - DNA, 1797 bp, Klebsiella oxytoca
atggggacctggttaagtttccatgttcagaaagggatggttaagcagaccctgaatgattttttgaacaattctgtaaaatttgtcactccttttatgttcaaaagcctcgcaactgacggtaactggagtgcagctatagttgcagctgatgctaaagctgctgaacttggtttacccctgatggggttcggccaggtattttctgtcagctctttggctctgatttcagaccacatcgaaggagtgcgatttactcccgcagacggatataccggcgcgggaccgacgtttaaaatcaatcaggttaccggaaatctttatttcaaaggcagttgtaagggctttacgtccgtgggggctaaattcattcgtggtaactattctggtattccgcaattaactctcgatgcctgcgaattttcgaataatggaagcctgctgcgcaccacctgtgttaacgccgttaataccgcgtcaaattttgttattccggtcgtggatgcaacggggtttgtggttggggattacatctggattggcgattccaaatgcatgattgcggggatttcaggcaacaccattacgcttgtcaataatggcagcgcgccaacactgtattcaggcggaacaggaacagacagttataaagcggggcagttttttacccgtgatggtgatggaaagaacggtgcaacgattggcgaaggtggcacagaggctggctggggcctcaccatacagaatggtattaaactgatgaataatggctggttcggcctgtttcattacgtcagggccaaaggcgggacggtatctattaaaggaaaggtcgagggcgggaataatggttactgcgccatggggctggcttatgtccaggggggtgaaatctccgggtttaagttttacggtaacgggaataatggcctggatattttcgagacaaccggggacctgtctgtttcggacggtctggtctatgagaatggcgtggacgggatgtttatctgcggcaatggaaccggccccaaaatatcaagaattaaaacccgcaataacctccgtattggcatcctcgcgtacgggagaacctcagcaccggtggggttcaatatcactgactgcgaatgtattaacgacgggctgtataatatttgcatgacaggtgttcgttctggcaacgtccggggtaacacgctgggcggtgcgaaagaagcgattaaagttgaaggcagaaacgggttacttaatccatcaggaatcactatagattcgaacgtgttcacccttgagtcaactgataacgacattaacgccaacattggcggctacactgatggcggcgaaagtggcgctatctctgtcctgaacaatcgctacaacggtcgaaacccgaagcataccatcagcaactttaaccgctcacagagtcgctttgtgcctgttggccgcgtgagctttacttccagttataccgcagcagccggagcgacaatcagcgtccccctggtattctacaagccaaatgcgacgagcaatatcgatgtgcttggcggacaggtggaaatccagatttgttctaacccttcactgctgaccatcggaacggtgagcagtgcattgcgtacagccggaatagagctgagcaatggtgcaacaacaaacggcaaaatcctggcaatggcagcgttcggtacgctctcgtacaacttcacactgacaacggcagggacagtttaccttaacatccgttcgccatacggcgacggcgtcattcagttaacctggacataa

SEQ ID NO: 191149 - DNA, 285 bp, Klebsiella oxytoca
atgtcatttaccattacccgtaatttaactgttcgacggcattttccggcgctcggtgtggaaatgccgggagaagaaattgaaacagacgtaacctataccgccgtatcattgactattaacggagatggtacagcggatgcacagtttcagattgcggttgacggatgctatatccggggtagccgggattatcattttgattatcccggagaggggaatccgctggccgtcgcagaggcggctttaaaagctgaactcgaagcgcaggaggctgaagaatag

SEQ ID NO: 191150 - DNA, 165 bp, Klebsiella oxytoca
atgtccttgttaatccgggtctttagcctaagcttaaagcaggcgctgtcctgcccatatttggttgtctttctgtttctacccgtaggctcaaggatgagccacacctctgatttacacacccaatcgaccctctttttgatctgcaacctggcggagtgctga

SEQ ID NO: 191151 - DNA, 1149 bp, Klebsiella oxytoca
atgagaataatttcactttcagctacaaacacatacagtaaacttgagatactaccaatcaaatttgataatctgtcattgcttgtaggtgcatcaggggttgggaagactcagattcttcaagcggttagggatatctccctgattgcaagaggtgctccgataggaagcttcaagtgggaaattacttttgaagtggatagtagtatttacatgtgggtaggcgaaacagataaatccaaggataattcgactcaggccaaaattatgggtcgcttttatggcatcgaaaatgatgaaaataaaccagacatcctgaatgaaaccatcaaaaaagataatgaaaccattatcaagcgagtgggccttgatattatttataaaggtgaaaggaccgtaaaattatcagccaaagaaagcgtcgttaattcgctaaaggaagaagatgatattagaaaaatacatagcgctttctcttgcgtgcttaattctgtggatacaggatatccgcggaggccaaggtttttccctgtatctaaaaataaacccatgttttttgaggattttgtatctctcagaaactcaaataggccatttgtacaaaagctatttatatgtcaagaacaatttcctgaacagtttgatgaaataaagaattcttacatggacattttcccgtttgttgaggaagtggaaattgatcgacttccgatggggcattcagatgaggaaaatgaatacttccaatattttataaaaattcgggaaaggggcattgatgactggattgttcagagtgatatgtcatctggcatgttcaaaagtttgcatcagattggatgtatttaccttgcggcagatggttctgtttttttgattgatgagtttgaaaatggatttggggtaaattgcattgatgatgttacaaaggctctgatatcttgtggtaggaatattcagtttataattacaagccatcatccatacattataaataacatccctgtatctaaatggaaaataatttctcgtaaaggtagagaggtttcagcacacgacccttctgagttttctcttatgaaatcaaatcatgagtcattcactaagcttattaatctgagtatctaccaggatggtgcagacagatga

SEQ ID NO: 191152 - DNA, 675 bp, Klebsiella oxytoca
atgaacgtatatatcttagttgagggaaagcagactgagagaaaggtttatccagcttggctgtcacaacttgcttcccatatgaagaaagtagaatcacccgctgacgtagaagaaaattcatatttcttgataagcggtgaaggttaccctcgtcttctcgacgtatctctgaaagatagtcttaccgacatttgtgaatctgggaaattcgatgccttttggattgtattagactctgatggtgaagatgttcgagtaagaattgaggacataaatagccgaattgcttcattaggcatagagattggaagatgtaaagttgaaatcattctgcaaaatccatgcattgaaacatggggattgggtaataagtcagtaattagcgtaaatcaattacatggcgattttaataactgctttcatttttatgatgttgtcacaaatgatccagaattaatgactaagccagaagatttcattggtaccatagctaattatcatgaatattatattaaaaatatgtataaacaagtccgattaagctatagtaaaaatagacccattgcattgattgatccaactactttagaacaaatagtgagaagattagatgatacaccaggtcatctatcatcttttaaaacatttttttcacttgcaactaaattatag

SEQ ID NO: 191153 - DNA, 252 bp, Klebsiella oxytoca
gtgacagagaaattctacgcactggctaaccctaacaatgtcatcgtgctggtagaagccttggagaaggtgcagaccatcttccatgaccttaaggccaaaggtatcttgggtctgaagacttgtctaaagagaaagtttaagaggaaacaaaaaggatttcaaaaattgagtttttatacaatactaaagctcaatgttgagaaaggaataaaaatgatgcctataagtataggcatcattgctctataa

SEQ ID NO: 191154 - DNA, 237 bp, Klebsiella oxytoca
atgtttaaacagaacgaaaaggctatttcacagattgcggaatatatcccgcgcgcctgccggggtatgcagctgcaggaagcgaaagcgcgtctggagaaaaaaatcgcgctctataccgatgacggttgtgatgttgccgttcttaacgcggcgtttgcatcagctcttaacagtcatacgcgggagtcttttttttcgtgcatcgcagagcagctgcatgagggggccaaatga

SEQ ID NO: 191155 - DNA, 150 bp, Klebsiella oxytoca
atgaatcacatcgaattcattgagaagaacgttcgcgaggaactgcttcgccagggcttcacgcaggcagtggctcagggggggggcataccaggcggtcgatatgtacaaacggatgtcacaggcaagccgaaaagggggaatgtttga

SEQ ID NO: 191156 - DNA, 219 bp, Klebsiella oxytoca
atgactggtatcgaaaaagctatacaaaagtctggttctgcaagcgcgctgggttttgctctgggcgtaacgaaaatggcggtttctttttggcgcaaaaatggggttccatcctcacgtgtaatcaaaatttatgatgcgaccggagtaactcctcatgagttacgcccagatctttaccccaaccccaccgacggcctgccgaaacaggaaggctaa

SEQ ID NO: 191157 - DNA, 384 bp, Klebsiella oxytoca
atgagcgataaaaccccgaccgatggcctgatctctaggcttacagaattgaatgctaaagggatctcaaaaactgagatgtcccggattgctggcgtcagtaagcaggcagtctccggctggttcaaaacaggacgaatcagtaaagaatctgcattggcaatcgccgatgctgtcggagtttcggttccatggttgttaggtgaggatgttggggagaaaaacgggcttaaagctgacgagcaacgtttgctcgaactctatcgacaattgcccgaagatgagcagcagaacatgttgcggatcgtatctctgcggctcaaagagctcgatgagctgtatgccaagtacatggggcgaaggattaagggtgatacggagtaa

SEQ ID NO: 191158 - DNA, 552 bp, Klebsiella oxytoca
atgggggtaataccccctatggatgaggcagaccctactagccatgcgcgctcgccatacaaaatggatatagtgcgttttgtaagtatgtttgcgcttagcccagcaagaatgaagatactcaaaggatttcttgattttcgtatgtcgttaagccaagcggggttagttgagggttttcagtgggtagatggcagcttcacagaaaacattgagctaattgagagaagaccaccaaatgatgttgatgttgttactttttttcaattcagcgctggtgatgatgatgcgacggtaattggtagaaatccagaactgtttaaccatgatcttgttaaaactaaatatttagttgattcgtactatcaggggcttaatgctccaagccatgagcttgttgaaatgactgtatattggtacagtatgtgggctcataaacgtgacttgtcatggaaaggttttattcaaataccattgaacccacagcttgatgttgtggcaatgactatacttaattctgccactactggggaggcaaacaatgaatcgtaa

SEQ ID NO: 191159 - DNA, 930 bp, Klebsiella oxytoca
atgaatcgtaatgattatgttttcgctctcagtgaacgcgagcaaataagtaacttattaaaaaacatgccaatcggtcagtccattagcaggaaaagcttagaagatcgattaaaaaatgttgaaagaataatttctcaagctgacgttcgagagcatgaaccgacgcatgcggtgttaacctttagaggtcctacagtcattggtactcatgggatttcagcagtgtttgggtcgaaagctgtatcctcttttaatgatgcaatagcctatgtggcaagtgcctttaacggccctctaccagcatcaggaaggataccaaacattgaaaataaccgcctgatgatcacagcatcagcaaggggttcttttgggtttgtgcttgaagagttccgacctgatgcgccacttacattcgatgaagaaacaccagtctctaaagctattgataagacaagaaaaatattgcaggccagcttagataatgatgatgaagagctttccgacgctttagaaaatttagattttcgtgcaatagaaaaaatccgaagtttcatacattatctatatgaaaataaaactgtttttactttaaaaaacaatgacttcaatattgtttttagagagccaaagcaactcgaagttgtctacaatcaactaagtagcgataacattaagcaggaaaagattgttgaaacagtgatatttttaggcactcttcctaacaaacgccagtgcgaatttattgtgctgggtaacaccgacattaagacagcaagtatcgataaagcagttagtgatccaggtatcattaacaaacatttaggtgttactgcttctgcggtgtttgttagaaaaaccgttggcaatgggagacctagatatacattagtgtctcaaccagagtggaaatctggctctaacatttag

SEQ ID NO: 191160 - DNA, 231 bp, Klebsiella oxytoca
atgcacacagaaacatcaatgagggctgatggcatcgggtatgaagatgagtttttcgtggagatgcacccgcaaatagcgccggttatcgggattgcggttatgcagttactggttgaaaagcaagagccgtcaagagaggcgctgatagagatgattcaggtgttgtggcaggaagaccagatcgatttggctatggagttggctattgacgtactgtcgttgccatag

SEQ ID NO: 191161 - DNA, 354 bp, Klebsiella oxytoca
atgagcaaatcacttaacgcacgatgcatacgccgctgggaagttgagttcaaagggcactgcgattcaaaagttaacccctactggtgcaagcgtgacctgcgtgggtatatccgtgaggcggcactgactacggcgtattgcatggttgatagcttggcctacaacaacgcaatgcatgattttttcgcagatgtaggtgataggcatgactggtcgccagagttctcagcatggtacggcgggcgtcgggagctttatctcaaagaagctcgcgactacctgaatgaagaagccaccatcgacgagatcgacgaagaaatacagaacgagctggaggcctggaatgactga

SEQ ID NO: 191162 - DNA, 609 bp, Klebsiella oxytoca
atgactgagcgcggaatgatttttaacggggagatggtacgcgccattctcgatggccgaaagacgcaaacgcgacggacagtgaaaccgcagcctgatgaagacggtctggctaaagtaactaacggaccctgggttgataccagcgaacggaattaccgttgcccattcggtgatgtaggcgatcgcatctgggtgcgcgagacgtgggcagaagctggcgccagcgcgccggacctaaagctttatcgtgctaattaccctgagcatgttccatcacattatgaaaacgtgccgccggctaatgaaattcgctggacgccatcaatccatatgccgcgctgggccagccgcattcttctggaaatcattgatgtgcgcgtggagcgattaaacgctatcagcgagcacgatgctcaggctgaaggcgtggcgaagctacgaggagggttctggcagcactatcagccaggctggacgcagcatcaattgagcgcccgcggctcattcgtaaccctctggaaatcaatctacggcgaagagtcatggaattccaacccgtgggtttgggttattgagttcaaacgcgttgaaggtggtgcagcatga

SEQ ID NO: 191163 - DNA, 201 bp, Klebsiella oxytoca
atggcaatcgacaaagaaagacccgtcaatgaactgactgattatgcgcgtatcagggttggctcgcgaggtggtgcttacataccttctcaggaaatcgctaaccttcctgaagttaaggatatgcagcagcgcgcggcagcgatcgtaggtcgaactgttagagttcagattgcgcaaaaaaacaaaagcaaaggataa

SEQ ID NO: 191164 - DNA, 837 bp, Klebsiella oxytoca
ttgatcgctttactactcatacctattctggttagcggctacatccttgtagtcgctaatttgtatcattactatcagttacaccgttatgatggtcaattactatatttaaaggttgcagctcatggcacaatgagtgtcgttggtgtaattattgcagctgccgtcttaaagtttttatttccaaactttcatccaatagctatattgtctgatgttctacatattaaaaaaataatcaacggcaataaggtagaaacttggcttgctttgatttcattggcatcagttattttatctctaatatgggtgcttttgatttggtttaaaaacttagttttgggttttttttgtgagaaacaacatcatgaaaatgtgttgcacgcaaaaaaactacgcatactaagaaaaaccatttcaaactcaactctagatagcatgcttttggatgcaatggaaagtaatcccaaaatgccaattttggtaactctttcttcaagaaaagtttatgttggtatagtaaatgggatccaggagccaacagaaagtgaagctccaaatagttacatatcaatctttccaataatgtctggttatagagataaagataccttatctattactttcactaactcatatccatcagaggtaatggttcattctgctgtgactgttgcttcattgaaaacacacaaagtaaaaaacatggatatattaataagtgcagatgaaatatcgcatctttcatggttcgattttgagttgtttgaacaggtcaatgattcgattaaggaagagaccattgacctgagaagtgaaggtaattctaaaagttaa

SEQ ID NO: 191165 - DNA, 198 bp, Klebsiella oxytoca
atggcacacgtaaaagtaaaagacctcgttgcggctgcacatgccgcatcacaagatttgccaccagcatcagcgaagttaatgcgcgataccgctactcgtctggacgttacctacgccgcactaactgaagcaatggatcaaaacacagcgctggcggctatgttagctgcagcgcagaaaaaggagaaaaattaa

SEQ ID NO: 191166 - DNA, 201 bp, Klebsiella oxytoca
atgaaagagttctgggattcgttaaccaaagagcaacagagcaaattagcaacaaacgttggctccacaactggttacctacgtttggttttcaatggctacaagaaagctggttttgacttagcaaaaaagttggagaaaagcaccgcgggtgcaatcaccagatcgcagcttaggccagatatttattccaaaacataa

SEQ ID NO: 191167 - DNA, 585 bp, Klebsiella oxytoca
atgaaccacagatcaaaggggggaaccgtgggtaatgaaccaatctggaaagtagaacgtcaaccagcctggctggtggcagcgatcaagaaaacgattactgaactgcctggaggttatgccgaagcagccgaatggctgggtgtaactgaaaatgccttatttaaccgcctgcgcgtcgatggtgatcagatcttcccgcttggatgggcgatggtgctgcagcgtgctggtggtacaagtcatatcgctgacgcggtagcgcgccaatccggtggagtttttgttccgctggcggatattgaagaagtggataacgcggatatcaatcagcgcctgcttgaggttatcgaacagataacagcctattcgcaacagattcgcgcagcgattgaagatggtgtgattgagccgcatgagcgggcggcgatcgatggggagctctatagctctattcaaaaacttcaggagcattcggctcttgtttatcgcattttctgccagccagaaacggatgacgcccgcgagtgtgcagctccgggcgtcgtggcgaataaatcaatgtgtatggagaaatccgcatga

SEQ ID NO: 191168 - DNA, 1320 bp, Klebsiella oxytoca
atgaatcttagtccttacagccaggcactggcgaagctgcgcgcccgggaagcacattatttgaaagaagtaggtgatcaatggcggacgccggatctgttgttctggggggttaacgctatgtttggtccgctggtccttgatttgtttgccgacgatagcaacgccaaatgcccggcatggtacaccgctgaagttaacgcactaacacaggactggtctgatcgactggctgagctcggtggcgcagcctttggcaacccaccgtatagccgttctcagtatcatgaaaaacaggcgattacgggcatgacgcacatcatgagttatgcgtctcagcagcgcgaaaacggcggtcgctacgttttcctggtgaagtcagcaacgagtgagacatggtggcctgaagatgccgatcacgtctgttttatccgtggccgtattggcttcgatctgccgacctggtttgtgccggcggatgataaacagaaacccaccagcgccttctttgctggcgcgatagtgatcttcgataagtcctggcgcggcgagcgttttagctatatcgatcgtatcgatctggaagcgaaagggcgcgcaagtatggcgctggcacagttcgcagtcggtaagcaggctcagccagtagaaacgaaaacaatcccgaaaaccgcggttgaaaccgagataccgctgcagcagctggcaatcctcgatcagagtggtattcaggcatgggcctgtgtagtagctgcctttggcgataagccagagtatacctttgccgaatctaagttcgggcatacatgggcggcggattccgtagataaaccagagattactccggtgcatcatgatgtaattgcaaaggctcaatctttaattgcctataaaaattcgctagaggcgctggtgggatggctgaacgatgaagaattcgaatctgatgctgcccggtccgaaactatcgagcgcatgagttctgtctttagtgagtttgcggatgaatgcaaggtcacggactttattgtcattgtagctaatctggaaaagtcgaattggttcaatagtcgagtgatccgcaaccatgttcgtaaaaatatcactccagccgttgagaatcaggtagaagctcggatctggcctttggaagttaatctggtttttgaacaggtggatggtgcttcagaactgggtgagcctcagcaaaataaggtaaaggcccagattaatcagctctggctggagcgcatggcaaaggatgaaattattgcattggcagccggtatggtgagtgagctatcaggagtagcggcatga

SEQ ID NO: 191169 - DNA, 1059 bp, Klebsiella oxytoca
atgagagcgctgctaacccctgaagtggtgccacgcttaggcgtggtactgtttaagccaggtaaagaactgatgaggcttttccgcaacgggagagtgctaatcgagtctgagccaaaaagtatggcggggctggaggctggtgccgttcctgacgcgcgccagccactggctgaggataaggaactggatggcttttttaccagtgaaaaggtaattaatgcggcgggcggcctgcctgcccttgaatactggctggaacgcaataaacgcgaatgtcagtttcgccattctgattatcaccacaatgaactggtgaccatgcgtcatcctccgggagcgattcaactctgttggtattgcgacacgcgcctgcgggaacaaacaacgaaaaccctcagcgatctggctcgccgtaatgttgtcgactggatcattgatacagcgattttggatctgcaattgggcctcgaaagagagttatccctcgcagagctgtgctggtgggcagtatatgctggcgtcgccgatgagataaccgagacgatggcccagcgcggtcttcgcttaccagaagataaattccagtccgtatataaagaaagcgacatccggccttcagtagctgccaccagcattttgcgggaaaagttacctacagatgcgccaaagaaaaacggccacagccaaaacgccctggcgctgccagagcagccgaaggttctgtcgctggctgtcgatccggagtcgcctgaatcattcatgcttaaacctaagcgccgccgttgggttaaccagacatacaccgattgggtaaagcgtcagccatgcgaatgctgtcgtcgccccgcagatgatccgcatcatgtcatcgggcatggcatgggcggtaccgcaaccaaagcccacgatctcttcgtgttccctctgtgcagagagtgtcacgacgaactacatgccgacgtaaatgcgtttgaagagaaaaacggctcacagctgcagctgttgttccgtttccttgatagagccatagcgatcggcgtgattgtaaaagcataa

SEQ ID NO: 191170 - DNA, 1077 bp, Klebsiella oxytoca
atgaaaaacactgtaaaaatatccagcactgaattaatcaacgctgattgcctgcaatatcttccgtccctccctgataactccattgacttgatagttacggatccgccgtattttaaggttaagccgaacggttgggacaaccaatggaaaggggatgaggactatttacgttggcttgatatgtgtctggcgcagttctggcgtgttttaaagccgaacggtagcctttacctgttttctggtcatcggcttgcctcagatatcgaaattttagtgcggagtcggtttaacgtactgaatcacatcatctgggcgaagccatcaggacggtggaatggctgcaataaagagagtttacggtcctattttccagctacagagcgaatattgtttgctgagcattatcagggaccgtatcaaccaaaagatgatgggtatacggaaaaaagtaacgaccttaagcagcatttgatggcgccgcttatatcttatttccgtaatgctcgagagtcgcttggcgtcagtgctaagcagatagctgacgctaccggcaaaaagaacatggtgtcgcactggttcggcattagccaatggcagctgccaaacgaaagcgactatttaaaactgcaggcgctattttcaaagatagccgcagagaagcaccagaagaacgagctggcccaccctcaccatgagttagtagcaacctggcattctctgaaccggaaatattcagaattgctggaggaatacaaatccctccggcgtcaattcgccgttacggcgcttgttccctatacggacgtctggacgcataagccggtccagttctatccgggcaaacacccatgcgaaaagccggccgatatgctgaagcagattatcagtgtcagcagtagaccgggagacatcgttgccgatttatttatggggtcgggttcaacgttgaaagctgctgcagcccttggtcgtaaagggattggagtcgaactcgaaaaggagaggtttgagcagacggttaaagagatggatgaattagttaagagtatggcccccaatggtctgggggcgtaa

SEQ ID NO: 191171 - DNA, 414 bp, Klebsiella oxytoca
atgcattacccagcatttatcgaaattgataaagacggatccgccagcggatggtttcctgatgttgacggctgtatctttgcaggcgatacgctcgaagatgcaatctctgatgcacatagcgccattgacgcacattttgaagcgatggcagagcaggaaatggatattcctgcgccaggcaaaatgcaggatcacatagccagcgatgcagctgattacaccaacggtcagtgggtgttgatccacgtaaatatggataagtttgatggccgcgcagagagaataaatatcacattacctcaccgcctcttgtatcagattgatagcgcggtgaagaataaaccagagtacagcagcagaagcgcctttatcgccgcagcaactcgcaacgagttacacagggcaggatag

SEQ ID NO: 191172 - DNA, 390 bp, Klebsiella oxytoca
atgtccgaacctgtttctggtactgccatagcgaccgccgggctcatgggcgccagtattttcggcatggtaaccggaattgattatggcgttgtgttcggtgcttttgccggtgccgtgttttacgttgcaactgcggccgatattacccgcaagcgtctggcagcatacttcgttacgtcatttattgttggcgtacttggcgctggtttgcttggggcaaagttagcggtgtggaccggttacagagaacgcccgcttgatgcgctgggtgcggtcattatttctgcgttgattattaaggtgctgacttttctaaatagccaggacctgaatagcttgttcagtatgctgacccggctacggggaggaggctccagtggtaaataa

SEQ ID NO: 191173 - DNA, 279 bp, Klebsiella oxytoca
gtggtaaataatccggcagctctggtgaatgctgtgatttgtgcggtaattgtgctgatcctgatgttctatcagcgtgatggcgcgcggcatcgcccgggagtttcaatcatcgcttatctcatggtgcttgtgtatgccagcattccatttcgtttcctgttcggcctttacgagtcagcgaactggctggtggtgctggggaacatacttatctgcgctgcggttctctggtttagagggaatgtggcgcgcctgattgatgtactgagggactaa

SEQ ID NO: 191174 - DNA, 543 bp, Klebsiella oxytoca
atgactaaagaagatattttcaacagcatcctcggtaaagagggtggatatgttaacaatccgaacgataagggtggtccaactaactgggggattactcaggccgttgcccgtgcccatggttattcaggcgatatgcgtgaactgactcgccagcaggctctggatatccttacagctgattactggtatgggccgcgctttgacctggttgcgacagtttctccatcaattgcggcagagttgtgcgatacaggagtaaatatggggccatcagttcaggtgaaatggttccagcgctggctgaacgtttttaataatcaacagaaactttatccagatcttattgctgacgggcagattggaccgcgtagcatcaatgctttgaaagcctatctgaatacccggggtaaggaaggtgaagaagtgctgctgcgtgctctcaattgcagccagggccaaaggtatcttgaactggctgaacagcgcccggctaatgagtcgttcgtttatggctgggtgaaagagcgagtgaagctatga

SEQ ID NO: 191175 - DNA, 228 bp, Klebsiella oxytoca
atgtacagaagactgttagccatatgcctgatgacgatgttgatcgtgagctgcgcgaaaactttacccgccccggtggtggttgataccgcgtgcagctgggtgcggatcatctacctgactgaccacgatattaacgtgctcgataagcagacgaagcgcgacattctggcgcacaacaaagctttagtgaagagttgtccaaaaattaatcccactgggggataa

SEQ ID NO: 191176 - DNA, 243 bp, Klebsiella oxytoca
atggtgtcatttgcgggactcaggttgcgtttaaagtcatacaggcaggacgtgtgctggtggagagggttatctcaggcaagacttacgttccgtttaccttgtcatatgacgttagtgccgatgatgaatcgcttgtggtggaacatgatcgccctgacctaccacatcttcaactttcagcgtcattcatgccacaagagaacgtgtctcatttggggatggcattatgcaaagtcgtaa

SEQ ID NO: 191177 - DNA, 1923 bp, Klebsiella oxytoca
gtgaatatatcgaacagtcagattaaggggctgcagtcatccgcgcgcgccgggctgcgctcactctatcgcccggagccgcaaacggcagtggaatgggcagacaataattattatttgccgaaagaatcagcttaccaggaagggcgctgggtcacgctgcctttccagcgcgcaataatgaatgcgatggggaatgactacatccgggaagtgaacgttgttaaatctgcccgtgtcggttactcgaagatgctgctgggcgtctattcctattttattgagcataagcagcgaaattccctcatctggctgccgaccgacggcgatgccgaaaacttcatgaagtcgcatgttgagccgacgatccgtgatattcccgcactgctggcgctggcgccgtggtatgggaaaaagcaccgcaataacacgctcagcatgaagcgtttctctaatggtcgcggtttctggtgtctcggcggtaaagctgcaaagaactatcgtgagaaatcggttgatgttgccggatatgacgaactggcggcattcgatgaggacatcgagaaagaaggttcgccaacgtttctgggtgataagcgaatcgagggttctgtctggcccaaatcaatccgcggctctaccccaaaaattcgtggtacctgccagattgaacgagccgccagcgaatcgcagcattttatgcgcttccatgttgcgtgtccgcactgcggggaagagcaatatctcaagttcggcgatcgtgaaacgccttttggttttaaatggtctcctggtgagccctccagtgttttttacctgtgcgagcataacgggtgcgtcattaagcaacaggagctggactttaccaatgcgcgttatatctgtgagcgaaccggcatctggacggctgacggtcttaactggttttcttcatctggcggagaaatagatccgcctgacagtgtgaccttccatatctggacggcctatagcccgttcaccacctgggtgcagattgtaaaagagtggataaagaccaagggtgatacaggcaaacgtaaaaccttcactaataccaccctcggggaaacctgggagccgaaaattggtgaacggcctgatgccgatcttattgaagagcgaaaggaactctttgctgccgcagtgccggatcgcgttgtctatctgactgccgggattgactcacagcttgatcgttatgaaatgcgagtctggggctggggacctggtgaagaaagctggctggtggaccgacagattatcatggggcgtcatgatgacgagcagacccttaaacgcgtcgatgaggcgatcaataagacctataaacgccgaaatggcgcggagatgagcatttcccgcatctgctgggatatcggggggattgaccccacaatcgtttatggccgttcgaaaaagcatggtcttttccgcgtaatccccatcaaaggtgcatcggtatacggtaaacctgtagcgaatatgccgcgtaaacgaaataaaaacggggtgtatctgacggaggttggtaccgatacggcgaaggagcagatttataatcgattaactcttatcccggttggtgatgagccattggccggcgccgtacattttcctaacaacccggaaattttcgacctgaccgaggctcagcagctgacagcagaggagcaggttgaaaaatgggtaaacggcgagcggaaaatactctgggacagtaagaaacgccgtaatgaggcgctggactgttttgtctacgcgctggcagctctgcggataagcgtctcccgctggcagctgaatcttgagtctcttctgataagcatgcaggaggacgaacatacctctaaaccgaaaaagaccctggcggattatgcccgggcattagccggagatgaataa

SEQ ID NO: 191178 - DNA, 420 bp, Klebsiella oxytoca
atgaagttttacactccagcagaattacgccaaattgttctgatcccgttgtacagcgaccttgttcagtgtggttttccgagccccgcgcaggattatgttgagcagcgtatcgacctgaacgagctgttaatcaatcatccctcagcgacatattttgtcaaagctgctggcgacagcatgaaagatgcgggcattagcgagggggatttactggtcgtggatagttcaaggaccgcaatccatggcgatattgtgattgccgcggtggacggggaattcactgttaagaaactgcagttgcatccgcgggttcagcttaacccaatgaatagcgcgtattcgccgatagtcgtcggtagtgaggatactctcgatgtgttcggcgtcgtaacttacatcatcaaatcggctggctaa

SEQ ID NO: 191179 - DNA, 1095 bp, Klebsiella oxytoca
gtgtacgattatttgattgtaggtgcaggcttttttggtgcagtttgtgcgcacgagttaacaaaaaaaggaaagaaagtactcataattgaaaaaagagagcatattgcagggaatgcttatacagaaaattgtgatggcatacatgtacataaatatggtgctcatatttttcatacgaatgataaaactctttgggattacgttaaccagtttgcagattttaataattttattaattctccaattgctaattataggggtaaactttataacctgcctttcaatatgaatactttctatcaattatggggagttaaaacaccttctgaagcaaagcaggtaatagattcacagaaaaaaggattggtcagcagtactgcctctaacttagaagaaaaagctatttctttggttggagaggatatttataatattcttattaaaggttatactgaaaaacagtgggggcgcagtgctctggaactcccttcattcataattaatcgactccctgtacgtttcacattcgataataattattttagcgaccgctttcaaggaatccctattggtggatatactaaactgattgaaaatatgcttgaaggtattgaagtaaagcttggtgttgatttctttgctgaaaaagaaaagtatacaagcatggctaatcaaattatttatactggccctatagatcaatattttgattattgttttggcccgctagagtatcgttcactgcggtttgaaagtgagcgtttgtctgaagaaaattatcaaggtgttgcggttgtaaattatactgagtatgatataccctacactcgcataattgaacataagcatttcgaaggcattgattccgaacatacggttattactaaagaatttcccgctgaatggtcagtaggttctgaaccttattacccgattaataatgacaaaaatatggatgttttccgtcgctacagagagttagcaaaaaaagaagggaaagttgtatttggtggaaggttagcagagtacaaatattatgacatgcatcaggtaatagcatccgctttaaaaactgttaatgatttggcatga

SEQ ID NO: 191180 - DNA, 1050 bp, Klebsiella oxytoca
gtggttcaagttctattttcaacctatcttcgagctgttggtaaaactaagatatttgcatttagcggtgttttacaagttgttgcacttttaattcttaatggactttttttagtttattttaaattaggtattaatggttatctcatctctttgatcggatcttatatcttttcttcactgtattgtatctactacgccagagatataactatttcttataagttggtgaacaaagaagttattcataagataataagattctctttgcctcttattcctaattattctatgtggtggctagtgaacaattccacaagatatgtggttcttagctttgtcggactatctgccaatggtttatttgctgttgctagtaaaatacctatgtgtataaacgtatttgtaacagttttccagcaagcatggcaaatatcagcttttgaagaatttgaatctaaggatagagcaaaatattattcttcagtgttccgaagttattaccagtttttatttttattagcctcaatccttctggttttgaataaggatatctttcggtatcttgtaagctctgaatattttatggcttggcaaatggtacctttcttaatttatggtgttttatatcaaactttttcctcttttttaggaactatatatacagctaattataaaaccaaaagcgtctttttaactagtcttattggtgccgggatatcaataggagctaatttcatatttatacctttatatggtccagcatatgcgggggttggagcctcattaggtttctttattatgtggtatcttagacttaaagatacacgaaaaataatttatactgagttaaaattaattgagttttcatttctcaatgtggtttatattgcacaggtgatctttttgtttttaattgatgattactcatggctaattcagttatttatacagttgctatgtttcacaattattatttttcttaccagggattttttgggttctgtttttgttttcatcaagcagcgcatgttaaaaacgcgaacttaa

SEQ ID NO: 191181 - DNA, 1371 bp, Klebsiella oxytoca
atgaaaaattttacaaggcgtgaagtactcattcgtttagccgcaggagcggttggagcatctatgcctgtgaaagttgctttcggaggtaataaagaccagaactggttgttatcactggatgcatcaggttcgcaaattgatggcgagggggctactatccttgtttcaaagcctcttacgcttagggctggtcacttttcaaacatagccttctctcctgcgaaaggatactccgggcctggcccaatattcatggcaagagacggctttgttatacatgacaacgtccaagtgactggctttactggcccaggatgtaagattttaagtataaaagaacgaggtaattcgtttatagctatcggtaaatgttcttatagcaacaatggtgctttgaaacgaacagagctcacagcttctgctgacttaagatttgtttcctcagtaagtgtaaaagatgcctctttgttcaattcaggcgactatatatggattggtgatgggaagtttaaaatcgataatatatctggagataaaattaatcttgttcgtggcgatcttccgaatataattagccctaaagtatttagtggggcatatgataagtgctctttagggcagtttgtgacaatcgattcagacgataaaaatggaatcaggattggtgatggtgggtatagctggaatattgatacatcacaagctgaaatagagtgcagtaataatgcgtggtttggtatgtttcattattgtaaaaaatatttcgggaagcaactggttgagaatataacctctattggtaacggatattgcaatataggtatgggttatatgaactctggtacaatcaaaaattgcatatcacgtgacgcaggtaataactgtatagatatttttgagagcaggagtgatgttgatgttacgggtaatattgtatctggtgccggagtagatggtatttttgtcggtggcaatggagagacggcaagggtatatgacaaccaggtgactgactgccgtagaattggggtgctaattaatgctagaaaaaaccccatccagttagtttttgttaaaaataatataataaagaacatgggtatgaattctttaactctgacaggtgtggagggtggtgtagttgagagcaataccttggatggtagcagcttaaggcaggcaatctatttagagcaaagaaaaggacttgctctttcaggagagttaattataagggataactttatttctaattctgtgcttggtgatatatcaacaaactaccctagctatggaaaaaataataaggcaaaaattatgatacaatcaactaagaggcttgctattacaggaatagaggggtattaa

SEQ ID NO: 191182 - DNA, 1299 bp, Klebsiella oxytoca
atgagttctgaaatgaaaataaaattgggtgatattcaaggatggttgttctacttccttgttttctttgttgtttttgacggcatgcgtagtaacatgatcatttctggattagtatctccgtttcgagagttggcactgaatctgtttatcatttgctgtgctccaatgttaattgcttgtaagaaaagggattttaggattgccataccattcctatgcatttcattattggctattgtaaatattccaatcactttgtttaacaacattgctgattacaaaataggcaatattttaatatttgaaaataaatattcagccatatacaaacacataatattttctttgttatttttgtcattaatttgctttgctcggaaaaatttagacaaaatgacgaagggactagagatgttaattaatctcgctgcattttattcggtcataactataccaatctatctatatggcttcccgctgtttgttgaaaaatttagagattggggacgtatgggagttggctatcccacaatggatggacaaatgatttgctttgcaatcttttgcctgatatttttggttccacaaagaagcaaaatggtattcaacctgaagatggcttgccttttaattggtattatcgcacaaaatacaggtacagccatggtaactatggccgttttggctatggcagcctttgttaagaagccaggtaaaacgaccagctattttatcttcatcgtgccactagttgccgctgttgttatacaacaatattactcaaacccccaattttttacagaaatgctgtttattgccaataacaaaataaaccagattttgaatcctgaattgactgctaatgttggagacttagatactttacaaatgagagttgttcaatatgaaatgattaacaacatcatggaaagaaacactttatttagattgtttggtgttggcggccaagcatatatagaaaatgaatttaagttaactctagcagcatatggaatattttcatttgcatgttttgtattttcttttgtatggatttcatttgtttccatcacgtcaaaaaacagaaacaaatttttgattttgatgattatggtcatgtggggtttcacttcatatactctatccagcattcacctctttaccacttcattctgtttcagtatggtgttcgcttacacatacgtgagtggttcactatcaaaaaaagaaattgataacgaagatacaatggaaaagaagaatttaaaaaatatgacactaactgttcctcgctaa

SEQ ID NO: 191183 - DNA, 339 bp, Klebsiella oxytoca
atgaatattgccgcctccattgcccttttgagtgcttgcccatttgtgagtctggcagcagtaccggtgaccttttccgaaactgtcctggatgccgcagggccaaaaggccctttgaaaggcacgttacttaccccgaattcaaaaccaacagccgttgttcttattgttccaggctccggaccgaccgatcgggatggaaacaacccgcttggtgtgaatgcatcgccttaccgatttcttgctgaaggcctggctgccaaaggctttgcgacgcttcgtatcgacaaacgtggaatgttcgctagcgcaggatgccaatgcggtgaagattgctga

SEQ ID NO: 191184 - DNA, 648 bp, Klebsiella oxytoca
gtgaagattgctgactatgttgacgacgttcgatcctgggtagacgtgcttagacgtcatatgcacactccctgtatttgggttttaggacacagcgaagggggcgtagtcgcacttgcctcagctcaagagaaggatatgtgcggcgtggttcttatcgcaacgcccgggaggccgatgggcgaggtgttgagggggcaacttaacgctaatccggaaaacgaaatgctattaaagcaggcactgccgataattgatgctctggagcatcggcggcgagtcgatattacgaatgtgcacccagcactacaaagtctctttaatcctgcggttcaagggtttttgatcgatgcgttttcatataatccggctcatctcatttcgagtatttccaaacccgtgttagtactacaagggcagcgcgatctccaggtggaagaaacggatgcaagactgcttaaggccgcgaatcctcaagcgtcgctggttatactgcccaatatgaaccatgttatgaaagaggtgacctcggacgatcgcaaggcgaatatcgcgtcatacgctgaacccgcgctccctttagctcccggtttaatcgactcgattgaacatttcctgatccacaactcaccttttcccgaaaagtaa

SEQ ID NO: 191185 - DNA, 420 bp, Klebsiella oxytoca; identical to SEQ ID NO: 179755

SEQ ID NO: 191186 - DNA, 549 bp, Klebsiella oxytoca
atgctgattggctacgcgcgggtgtctaccggcgatcaaaacctcgatttacagaaaaacgcactggttcgctcagaatgtgaactaattttcgaagataccgccagtgggaaaaatgcgaagcggcccggactaaggaaagctattcgtcgtcttcgacctggtgattcgctggtggtctggaagctggatcgcctcggtcgcagtgtccgtgacctcataacgttggtatctgaactgcaggagcggggaattcattttcgaagcttgactgattcgatcgatacttcgacacctgccggccgcttcttctttcatgtcatgagcgcccttgcggagatggagcgcgaattgatagttgagcgtacccgcgccggtttagcagcagcgagggagcagggccgcattggtggccgccgccgggttatgaccgaagaagtagtggaacgctgccgcaggatgttggatgcaggtgctacccgtcagcaggtggccgatgtgatcggggtaggggtgaagactatttataaatattttccggctggctaa

SEQ ID NO: 191187 - DNA, 429 bp, Klebsiella oxytoca
gtggcggctaatctgctgggctataaccatatggcaggcacgaatatcaactggttctccgtcaacggctaccggggacacgccggggggtttacctgctgcatatcgctgccggaaaaatggcggcccaatatgcaggtggcagtggagtgggaggtggatcctgacccgtttccgaaggatatccccagattcagcgaccctaagtatgatgaatatatagaaaaacacagggctaactatcgccattataaagcggtggccactattcccgaatatgaagattcctgcggcctgcaggtgcatttcttgccctgtcagcagattaaagtaacggccacctgccacgggccgactcatcctgaccacccgattaaagaacctttcgatctgccggagcctgcccagtgcccgccagaaacgccatga

SEQ ID NO: 191188 - DNA, 324 bp, Klebsiella oxytoca
atgagggagaaaatgaagatgaacagttataattctggctattcattttcgtatggggggatgcaaatggcgggtgctcggcgaagtgacatggccagttcagaagcatcaatggatggtcgtatgggtcgtatggaatccgatatttcatacataaaacgtgatattagcgatgtaaaagatgacatcaaagatgtgcgcaatgatatcaaagatatccgtaaagatatgaagggtgacttcaggcttacatttggtgcgctaatagccgtcgctctcggtctggcgggccttatggcgcgtggatttggctggattggctga

SEQ ID NO: 191189 - DNA, 411 bp, Klebsiella oxytoca
atggaagaaaaatcggatagcccccaaaatacagcgatggaagacaaaaagagggcttttaaaaaactcctggagtcagttaccccaaaggatttttttcgctttctggatgccaagaacgtcaccactaaatgtcaaggctgcggtaaggaaggtttgcaggtaactgccacttcaggaaaaaccaatctgggtgagttaatggctggaaaagaaggtattgagttcgtcacatacttcagacttgagccaggccatccgggagacagcgaccaaaactactattacaaatctttttgtgaaaactgtggttttatgaccatgcatgcagtctcaccaattctgcaatggctccagtcagaagaagatgagggagaagatgagggagaaaatgaagatgaacagttataa

SEQ ID NO: 191190 - DNA, 954 bp, Klebsiella oxytoca
atgattaaatcacccatcaaatgggcgggcggtaaaacccgcgtgatgccgcagctgctgaagcacctgccgaaagccgattgtttgatagagccgttcgttggcagcggcaccgtatttatgaatacggaataccgccgctatgttctctgcgatagcaatcgcgctctgattaacttctttcgcgtattgacctctaacaccgagagactgatctacaccgcacgcggaatgtttctgggtggcaataacgaagagcaatattacaagcgccgtgcgctatttaactccatgcagtggagcgatacgggcaaagctgataccgccttgctttacgccgctttgtttctgtatctgaaccgccattgctttaacgggatatatcgcgtcaatcagattggtgaacataacgtcccgttcgggaaatatgccgcaccttactttccagctgatgagatgcgcagctttgccgaaaaggccaacgacacaaaagccgttttcattgatggcgattttcgtcataccattcctgacgttttgcagctggcatatgacgcggttatttactgcgaccccccctacattccggccagcaagacagccaacttcactgcctacggcaagccatttaccccggacgatcaccgcgacctggttgcaaccctgctcgatgctcatcgccagcacagcacccgcgcggtgatatccaacagcgataccccggaaacccgcgagatctatttccctttcaggctccacgcattaagcgtccgccgttctgtcagcgccagaagtcgcgacatggccggtgaagtgattggcgttcttcgcgtttgtgacggctgcggccgttctggtggcggatattgcccggattgcggccctgttatgggcgcttccacttacgacgcaatggctgcggcgggcgcattcgacggtgcggagggattctga

SEQ ID NO: 191191 - DNA, 696 bp, Klebsiella oxytoca
atgagctatctgggaagtaaggcggccagcggggtttatcaaaaaatcatcgccgaaatgccgccgcatgacacctacattgaaacgcacctgggcggcggcgcggtgatgctgcgcaagccaccggcgaggcagaattgggggatcgatatcgacccggaaaccgtcgaggcatttaaccaggacaaccctgattttctggataggctggcggaaactttgtttattgatgttggggatgccgtcgagttcttgcgttgctttgattacgcttctgctggccgcgtcttaatttattctgatccgccctatctccatgaaacgcgcagcagccgagtccgttaccggcatgaatattctgttgaagaccataaaagattgccgatgcttctgcgtgatctccccgataacgtcagcgtgattttgtcgggctacccgtctgagttgtacgatcgcatgctccatagctggcgttcgcgagagtttcaagctatgactcgcggcggcgtgcggacggagaagatctggatgaactacccggaggggagggcgtactctcatacgttcgccggtaaagactacaacgatcgctatcggattaaacgaaaagcgcagagatggaaggaaaaatttgcagcgttaccacacgccgagaggctggcgatcatggtggcgctaggtgaggtcgagatttga

SEQ ID NO: 191192 - DNA, 354 bp, Klebsiella oxytoca
atgttaaataatcaggattatgccttcattaacaatacagtaaattcaattaaatcaacgatgatcaaccttgctagtgagtacggccctgattattgttcagattttctgattacgttcgaatcaattaaaaacaatacgagtcggctacgactaacggatgtgaccattaacgaatacatatcgcttattcgtggtcataacatgaacgttcagaaccatccacaaggattgctggtacaggctcacgttagctcgattttactggctccgaatgatgctgtagccctctcgaattctctccagttgttccgtggccgcgcagccctcaacggcgattacgagaacatctaa

SEQ ID NO: 191193 - DNA, 597 bp, Klebsiella oxytoca
atgagtaattccctcctgccgccatcttccggcgactggcttcgctacaccgaagccggcacggccaggctgtctgcgatcactgtagcacttcgcacgttgtggacgccgacagcctgcccggtggatttgctgccatatctggcctgggcgctgtcggttgaccggtgggacaagaactggccggcagagcggaaaattgcggccattcaaaaatcgtactggttgcaccggcgcaagggaacgcgagcagcggtgcggcgagttatcgaggatatggggttttcggcgacgtttgccgagtggtttgaggtcggcggtgagcctggtacattccgtcttgaggttgacgtgaacgaagtcggcttaaccagccggacgcttgacgaacttaatcgcctgatcaatgacgccaaaccggttagccgacatatagataaattcacgatcgcggtgaaagtcagtggcgatatttttatcggctcaacgctctccagcggggaaattatcacgatttatccggaagaccatgagcctgaagaaaatattctttataacggcgtgatctttcacgatggcaattttaattacgggtga

SEQ ID NO: 191194 - DNA, 2094 bp, Klebsiella oxytoca
atgaccaatattaccgaatccccgtcgtgggaagatgaagtcagcctcattgccaggggggagcgtgttgccggcgggcaggatggcgcggcaaaccggccattaaagagcctggcaaaccgcacgcggttcctgaaagaggcaacagacagcgccgcactggaattgtccggcaaagtagaggcagttaaatcctttactgaaggcgcggaacttctgtcccccagagatgaaattttatacggaaatctgcgtctcgtatggacgggagcatttccaaaggtggtgcctgctgatgctacgccctacaccacgggcggggtagggtcagggcgatgggcgtacacttcggatgcggcagtccgtcaggatatggcctcattcagaacgccaggcacatcaatgctgacacactcagacggcaaaaccgcagaacagcatattgatgatttaaaccgggagaaactgtcgtttcatggtgccactgccgatgggatgctggcctttctgaaatacgccgcagcatctggccgcgagtgtattattgatgctgaggtcaatttaactgaagaactgaatttcgatgcgaatttcgcaaatatacacttgcgctgggaagcgccgattaacagcgatacgcagttatttaacctgcacaatcttggccctaaatccattctcaaggatatgtggtttcagaacatcacagccccctgggttattaatcgctgggatacagacggaaactggatagataacgcagaaaccattgccaattcagtcgttcagacgaatgaagaagcaggatatcaaccaaccgccagcgataaagacgtctggcctttattgtctgacacagtaaagaatcaacagatttgcggcggtcctgtcattcacacctcacggggtgtcagtgtgctcaatcctagggggcgttatatcgcgataacgttcatggattgtaatttctgcactgtatcagagccatcggttatgggcggcaagcaccagtacggcaccattcttttcaataacacagggacaactgcatggggtaagggaaataaagttatcgatggtgaagtcaggtacggttcaacatccggagtggtatatatgcgccataaaggaaagtctaatcatatttatggtactaatgcttaccgctgcggtgagtccggatttaaaacgtatcagaatgaagtcaatggccgctcagctcgttgctatggtgtgaaatgggataatctcaccgcagagcagtgctattacgacggctttgaccttgcgtcagattatggtgaagccgcgcagcgcgtggatgattacacactggcgcaatttgcctggaacctgcttccgcttaaacatgaagttaccaatctgacggctatcggttgtcacgggacaggagcatggggagacggtcagggcagcacttacaggaaccttcacatagaagattgctacagttcagggactaactttatcggcgaatataacatcattgatgatgtgttctcgaaaaacaataaccggaagaacggtaccgtatctgacccggttgcccagattaaagtccctggcaaaaataacaaagtcagcaaaatcaccatcatcgtggatgatgcagccattaccggaggctatggattatatgcgccatcatcaatggctactgaccttgatacagactggtgcacattgccgagcctgccttcgttcagcgaactgtcgaaaatgtctctgggctcgttttcctcaacggaaactcaggtatggattgacgggcatccgcgcggggcatttctgaagaatgccatagggcgactgctgttcgagttgacgcttggcacatccgggagcgagcgcggaaatgtaactctacagcctgtttttaatggcgtcttcacaaacggactcagggtcaggggagagaatggcggaatggctattatggcggttccgacacagggtaatgccgcctatctggataacggtactgtgacgttttatgagtcttcaggggctttgaaacttcagtttaaagattcctctggaacagtaaccacatacaaattaacagccggataa

SEQ ID NO: 191195 - DNA, 255 bp, Klebsiella oxytoca
atgtctttgattattgatacaacctttaaaggtatttctgttgagagcgcaaaagtcaccgtcggtgatatctatattgccgatgggcatgaagtgctttctataacagccaactggtcagcgccggattcttcagagtacttcaggcaaacaacctataactgcccgtacgatatcaccggtgctgacccggtaacacaggcttacgcttatcttaaaacactgggtgatttcagcggtgctactgaatcttaa

SEQ ID NO: 191196 - DNA, 2937 bp, Klebsiella oxytoca
atggatcttagtattcgcgttgcgttcagtgcaattgacaagcttacccgtccggtcagcgccgccagtaaagctattggcggcctttctgactccctcaaaaaaacacaatcttccattaaagacctggagaaaggtgcggcgtctttcgacaagctgcgctcacaggccaacgataccgcgcaaaaactcagaagcacccagcgcgcctttgatggcctcaaccagaaacagcgcgaaggcggccagcttactgaggctcaggcggcacgacttgaaacattgcgcggtaagctctctcgcctgacgaacacctacaacaaacagaccacccagctacgtgcggccggacaggcggtgcgccagcatggcgttaacctcacctccggcagtggcgcggtgcagtctgctatccggcgaaccgagcaatatagccaggcgcttgagcatgaacggcagcgcctggcggcggtaacgcgcgcgcaggccagctatgaaaaggcaaaagacgccggcgccaaactgcgcggtggcggcacagcgacggtggccggtgcggcagtggctggatacgcaagcggtagattcctgtcacccgcagtcggcttcgatactgatatgtcgcgagtaatggcactgacccgcatggataaaggagacagtcgatttacagatctgcgcgatcaggccaaaaaattaggtgctgaaacagcattttcaagcagcgatgcggcgcagggacaggcattcctcgcaatggccggctttacgcctgaggccattcaggccgcgttacccggcgttctggatacagctattgccggcggcgctctgagtggggatatctctcttggtgaaactgccgacattggcgccagcgtgctcaagcagtttggcctgcaagcaacggacatggggcgtgttggtgacgttctggcgggcacgtttacccgatccagtacaaacctgcgcgccctcggcgacaccatgaaatacgcagggccggttgcttccgctctgggtatcagcctggaagaagcggcggcaatggctggcgttcttgctaataacgggttgcggggcagcgatgcgggtacagctatgcgcgcatctcttacccgattgtcggcgccaactggagcggcagcgaaggccctcaaagagcttggagtgagcgtcgcggatagtcgcggtaagttgcggcctgtcgagcagattctcggcgacctgtacaaggcaacaaaaaaatatggtgataccgatcaaattagcttcttcaaggatgtcgctggcgaagaggcaatggtcggattgcagacactcgtcaaatccgtgggaagtggagatcttcagaggcttattgctgagctgaaaaaggcacagggagaatccgcgtctacagcaaaaaaaatgtcggataacctcgggggtgatatttccaacctcagcagcgcctgggaggggttgcagatccagatctccgataccgttaatggccctctgcgcagtctggtgcaatggcttgatgaaaccatttcacgcgtaacggtctgggttaaggctaacccccgacttgcgcaaacgctcctgcttgttgggggcggagcgttggcacttactgccgctcttggcgcgctctctcttgcagcgggcatcctgattgggccactggcaaaactacagctcggcttcacggtgctaaccggtggtcgtggcattctcggcaccgttgccgcattccgtaccctggggactgccgctggcccggtgatggcaagcatgcgcggctggcctgtcgttatatcgggtatcgcatccggtttcgggaggatctccgctctcatgcccgcgattcgggctgggttgatgggcgcgtttctggctccgggtgcgatgctgacgtctcttggtaaaagtcttggcatgctgtttttgaggctgaccggcctccctgcgctctggggaatgatcaccggtgcggtatccgttctgggtggggcgctgtccttcctgctcagtccgatcggactgattggcgcggcgttcgtcgcggcggggctactgatctggcgctattgggagcctatcaaggcatttttctccgggttctttgctggcgtatggcaggcgctgacgccactcagaagcgcgttttctgcactggcgcccgtcttctccgcgctgggtagcggcatcaaggccatctgggagtggttcaaaaacctgttaaccccaatgcagaccagcaaagacacgctggataaatgcgcctcggccggtgaaaccttcggccgggtgatgggggcggcgcttagcgttctgctgtggccgcttcagcaactcatgaacggcgtagactggttacttaagaagctggatctcatccctgacgggatcgataaagcacggcagcaggccgacaaagcgcaacgggagcttgaggcgtcagcggcggctctggctgggcatcagctccctctggggcaagcggaggtgtacaagcctgccggcgataaacctccggtcatcacaggtgataacggcactctgcgacgcctgaacagcatcgctgataacacaaaagcgacggcgaacaacacgaagaagattggtcccggcgacattgtctttaaaaacctgccgcgcgcgctggcgctgcgtggaccttatcaggaagcgcgagttatcccgcagcctgtgccgcgcgtttctgccgctgcggccggcggcgttctgtcggtaccgacggcgacgcagggtgcaacatctgcgccggtcgctgcggcttcgggtgctgcgccgttcttccagttggtctttaacgacgtcggtaagcgctcggatctggagctggaaaaaatggttcacaacgctgtgcgtgatgcgatggccagcacccgcaaagctaaccgtggttcataccgcgatcgggaataa

SEQ ID NO: 191197 - DNA, 789 bp, Klebsiella oxytoca; identical to SEQ ID NO: 181110

SEQ ID NO: 191198 - DNA, 186 bp, Klebsiella oxytoca; identical to SEQ ID NO: 181358

SEQ ID NO: 191199 - DNA, 162 bp, Klebsiella oxytoca
atgacgacccgcagactgcccattacccttaccgacagcatgcaggcgtttaagcaggcacagttgaccgacaccgaggtaatggaacgcgcgatgatgctgcgttcgggcatgccgattgacgtcacccgccaccatcgcgtaacggagcagtcgctctag

SEQ ID NO: 191200 - DNA, 453 bp, Klebsiella oxytoca
atgtattacacaacccgagagtggcaatataagcatattgccccggttattctctgtgagatgtttatcgacttattttctgaccgagataagaacgttacgcctgaaatgttaagaatacactgttttcatggggtagcctgctttgtggaggctgatttcaccgataaacaggggcgcgaatatattaatgtctatgacagatcgtggcggctgcagccttttcagatggaatatccaaacacgccggggccggtacctgaacccgaatcctttcatcgcgccgtcactgccgcgcaggaattggcaaaagagattgactactgccgtgtcgatctgatgctaaaagaaaatgaaatctatttcagtgaaataacattaagtccgaagcgaggtaaacttaatatcacaccggcgatatgggatgctaagctcggggacatgtggcactga

SEQ ID NO: 191201 - DNA, 147 bp, Klebsiella oxytoca; identical to SEQ ID NO: 181129

SEQ ID NO: 191202 - DNA, 252 bp, Klebsiella oxytoca
atgaaaacactgcttattactacattggtcatgggatttatttcagtgaatgccgcatctgccgctcaggaaattaaccacgcagatgggaaagaaaagatgggtgtagtctcagccagcaatgcctatacgcttgatgagttatcggatgttctttctcgtaaggctgatgagcaaggggcaacatcattcaaaatcctgtcgacaacgggggataacaggctacacggggttgctgaaatctataagtaa

SEQ ID NO: 191203 - DNA, 2721 bp, Klebsiella oxytoca
atgaattttgctacctggtcaataaagaatcccgttccccccatattgttattcatacttcttaccttgatgggaatctatggtttcaacaagctcaccattcaggatttacctgatatcgcctttcctgaaatagaagtatctttatctctccccggtgcagcgccctcccagctcgaaacagaagttgctcgcaaagttgaggactcaatcgccagcgtttctggcgtaaagcatataaccacattgatcacggacagcaacgtcataattacaatttcatttgttctcgaaaaagaaatttcagatgcactcatagaaacaaaagatgccattgaccgtatacaatccgaactaccaacggatcttgagtcgcccacagtctcagcagttcgcattaacaacagccctttaatgacctacgcagtttcttcctcaaaatcgaatgaggatattttgtcatggtttatggacgatacaatgggcaagctctttatgtccattaacggtgtggggaaattcagcagaatcggaggagccaatcgggaggtcagaattgaagttgatccggtcaaactgacatcgctgaatatcactgcggcagatgtttccagggccataaaacagatgcaactcgaatcgtcaagtgggcgaggctatgtcggacaatctgagcaatctgtcaggacaatagcaaccgtgttgcgcgtatcagatttaaatgccctgcctgttactcttccgggcggacgtcatattcggctggatcaagttgcgaatgtttatgatacccacgccagacgtacaaaatcagtcttattaaatggacaggaaagtattgcatttcaaatatatgcgtcaaaaggagccgatgaagtgcaaatcgcaaaagatacgttcctgaccattgagagtcttaagaaaaaatatccagacttaaccataactccgatttccagcgctgtgacaaatacgctggaacaatatgaaggctctatccgtatgttatatgagggagccatactggccattattgtggtcggattatttctccgtgactggcgggcgacacttatttcagctatggccctgcctttatccgtgatcccaactttcgggatcatgtactggcttggcttttcccttaatacactcacgcttttggccctgaccgttgtcgtaggtattctcatcgatgatgctattgtagaagttgaaaacatcgtgcgccataagcgtataggaaaatcgaccatggaggcaacaaaagaagccgtcaatgaaattgctctggctgttatcgccacaacgttgacgattgtcgtcgtgttcttgcccacgtctctcatggggggtgtgacagggcttcttttcagacaatttggctggacggtcgtcatttctgtgctcatttcgcttctggtggcacgactattaacacctctgatggccgcatattttctgagaaatgataactactgccaacataaagaagacgggatattcatgagaaaatatcttgatgtggtgcactggtgtctcgtccacaaaaagaaaacgctcgttatggctgtcctttttttctgcctgtcactttttatgatgacaaagcttccgacaggttttgtcccatcttctgatcagggatacacaaatcttagcattgaattacctccgggaagtacgctggaggatacactggagacggctgaaaccgtccgcaaatcagtagcgacgatagaaggcatcaacaatatatttacgatcgttggcactgctggggaaaacaccccaaatgacagtagcattggtgatttgcacaaaggttcattgattttgacttttttacccaagtacagccgtccttctcaagacatcattaacaaggaaatcaggagaatactgccagatatacctggagccaaattcacattgaaaaacgatgggccaggtgagggttttgctatcctgctttctggcgagaatatgacagcgttaaccagcactgtgaccgctctggaaagagagttgcgaagtctaaaaatcctgtccaatgtgaattcgaccaccagcctccagcgcccggaaatcaatatacatcctgatttctcccgcgctgccgaactgggaatcacaacagaatctattgccgatacggtacgtatagcgacttccggcgatttcaacccgtatctttccaaactgaatcttgataacaggcagatttatattcgggtaagcatggcagaagatgcactgcagaatatcgatagcattgctaatctccgtattccgacccgggctgaacagaccgttctttccaatatagcaaacattactttaggcaacggtccatcacagattgatcgttatgatcgtcaaagatatgtgacgatcagcgcagacctaggcgggactcctttaggtctggctctggcagaagcaatggctttaccatccattaaaagcatgccttccggtatcaaattgatagaaatgggtgaggctgaaatattgaaagagttgctttcaggatttggtgttgccatgctcaccggaatcctgtgtgtatttttcatcctgattcttttattcaaggacttctttcagtctgttaccattctttccgccttacctctgtctttcggcggttcaattattgcacttttgataaggaaggtgcgaataagcaggtcatttcttcccaagctgactcgctga

SEQ ID NO: 191204 - DNA, 981 bp, Klebsiella oxytoca; identical to SEQ ID NO: 84362

SEQ ID NO: 191205 - DNA, 924 bp, Klebsiella oxytoca
gtggcaaagcaaaagttcaaaatcaccaactggcccacctacaataaagccctcatcaaccgtggccccataactttctggctggatgatgaagctattcaggcctggtatgagtcagcaacaccttcatcacggggaagacctcagcgctattctgatctcgccatcaccaccgttctggtcattaaacgcgtgttcaggttgaccctgcgggctgcacagggttttattgattccatttttacactgatgaatgttccgttgcgctgcccggattacaccagtgtcagcaagcgcgcaaagtcggttaatgtcagtttcaaaacgttcacccggggtgaaatcgcgcatctggtgattgattccaccgggctgaaggtctttggtgaaggcgaatggaaagtcaaaaaacacggcaaagaacgccgtcgtatatggcgaaagttgcatctggcagttgacagcaaaacacatgaaatcatctgtgcagacctgtcgctgaataatgtgacggactcagaagccttcccgggtcttatccggcagactcacagaaaaatcagggcagcatcggcagacggcgcttacgacacccggctctgtcacgatgaactgcggcgtaagaaaatcagcgcgcttatcccgccccgaaaaggtgcgggttactggcccggtgaatatgcagaccgtaaccgtgcagtggctaatcagcgaatgaccgggagtaatgcgcggtggaaatggacaacagattacaaccgtcgctcgatagcggaaacggcgatgtaccgggtaaaacagctgttcgggggttcactgacgctgcgtgactacgatggtcaggttgcggaggctatggccctggtacgagcgctgaacaaaatgacgaaagcaggtatgcctgaaagcgtgcgtattgcctga

SEQ ID NO: 191206 - DNA, 705 bp, Klebsiella oxytoca; identical to SEQ ID NO: 8686

SEQ ID NO: 191207 - DNA, 1485 bp, Klebsiella oxytoca
atgaacgcttttgcacttgaagccgaagggatcagcaaattcttccccggcgtgaaggcgctcgacaacgtctcattacgcgtgcgcccggggacggtgcacgcgctgatgggcgaaaacggcgccgggaaatccacgctgatgaaatgcctgatcgggatctaccgtcccgatcagggcgcgatccgcgtcaaaggggagccggtccagtttcaggatacgatggatgcgctgcgctccgggatttcgatgatccatcaggagcttaatctggtaccgcatatgacggtggcggaaaatatctggctcggccgcgagccgatgaaatacggtttcgtcgatcatcgccagcttgcccggcagactcaggaactactgaataaactgaatattcgtttatccgccgatcgcctggtaggggaattaagcatcgccgcccagcagatggtggagattgccaaagcggtttcgtggaatgcggatattgtgattatggacgaaccgacctcggcattaactgagagcgaagtggcgcatctgtttaccattattcgcgatttacgccagcagggaaaagccattatttatattagccataagatggatgaaattttcaccattaccgatgagatcagcgtatttcgcgacggcacctgggtaggaagtcaacctaccaccgagtttacccgccagtcgctgattacccggatggtcgggcgggagcttacccagctctttcccaaattcaataataccattggcgaagaggtgctgaccgtgcgcaacctgtcgcgcaagggggtctttcacgatatcaactttagcgtgcgccgcggggagatcctcggcgtggcggggctggtgggggccgggcgcagcgaagtgatggaaagcctgttcggcatggagaaagccgatagcggcgaagtgctgattgacggtatgccggtcactattgattcgccttcgacggcgattgaaaaagggatggcgctgctgacggaagaccgcaaaaagtccggcctgttcctcgtactgtcggtgctggagaatatgagtatcgtcaaaatgccggaatatatcggtaaaaccggttttgttcagcacctaaaaatggccgaggactgtatggagcagatccgccgcctgaatattaaaacccccaccatggatcagattattaataaccttagcggcggcaatcagcagaaggtgcttattgcccgctggctgctggctcagccgaaaatactcattctcgatgagccgacccgcggaattgacgtcggggcgaaagcggaaatatatcatctgattagcgaactggccaaccgcggcgtggcggtcattatggtttcttctgaattacctgaaattctcgggatgagcgaccgggtgatggtgatgcatgaaggacggattaccggcatcctcgataaagaggacgccgatcaggaaaccattttgtcgttggcatcccattga

SEQ ID NO: 191208 - DNA, 393 bp, Klebsiella oxytoca
atgttcccgtcacagttaccgaaaccgcgccatcctgccgctgcggcgatcccctcgctgcgctgggccattattggccccggctggattgccgagcgctttgtgaaatcgttaaaagagctcagccgccagcgggtggttgccgtctcctcgcggacgcaacaaaaggccgatagctttgccgcccgctggggcatcccgcaggcttacgctcaggtggacgagatgctggcgcgaccggatattgatgcggtttacgttgccaccccgcataaccaccacttcccggacgggctgcgggttctgcaggcgggcaaacatgtactgattgaaaagccgtttgcgctgaaccggcgggaaggcgcggcgctaaaagcagaagccctgaaatag

SEQ ID NO: 191209 - DNA, 1134 bp, Klebsiella oxytoca
atggcgatagcggacacactacaaacagcagccgaaaactatacagagaaactgagcgaggccgttaagaagccggattttagtattacgctgggtggcgtggaactgactgagctggcagaccgtatcacggcgctctctgtcacggacaataacggctttgaggccgatcagctcacactctccattgacgacgcagacgggatggttgatctgccgccgcgcggcgcagagctggcggtctctattggctggcagggagagccactgatttacaaggggctttataccgttgatgaagtcgggcatggtggcccgccggatgtgatcgacgtgacggcgcatagcgcggattttcgcgaagaaatgaacgtaaggcgggaggtgtcctggcatgacgtaacagtagagcgtgtggtgtcggccattgcccggcgttatgacctgaagccgatgattagcgaagatctgatcaacatcgagatagaccatgctgaccagaccgaagagagcgacatgtcatttttaacccgcatggccgacatgctgggcgctattgccaccgtgaaaaacgggtgcctgctgttcatcctccccggcggcggcgtgagcgcttccggcagggcgctgtcttctgctgaaattacccgcgccagcggcgacggtcaccggtttcgcattgctgatcgtgatgcttacaccggcgtgcgggcgtactggctggatcttagttttggtaagaaaaaagcggtaaaggtcacaaagcgcaaaagtaaggcacggaaaaaagtagagaaaagcagcagcgcggaaggggattacatggagggcgcggaggggaatgtttacgtgctgcgcaaaacctaccagaacgaaacggcagcgaggcgcgccgctgctgcaaagtggatccagctccagaagggcgtggcgcaattctccatcaccctggcgcgaggccgcgcggatttatacccgggcatgcatctgaccgtatccgggtttaagcaggagattgacgcgcaggactggattatcgctaaagcagagcatgcgataggtgatagcggatttaccacacaactggaacttgaagcaaaaacaggcgactggattgcagaagcggaccagtaa

SEQ ID NO: 191210 - DNA, 1170 bp, Klebsiella oxytoca
atgtctgaaactcgttttcacggcgtccgcaaccgcgaaacaaccgatctgcaaacggcaatcaatgatattgattcgagcgtgatcgggattgtggcgattgctgacgacgccgatcccgaaactttcccgctgaatacgccggtactgctgacgcgggtgcgtaatgtactcagcaaagcgggtaaaaccggttcgctgtataaaacgctcaaagccatttccgatcagtgcagcccccgcgttgtggtggttcgcgtggcggaggccgccaacggtgccagccagtcgcaggcggtcatcggcggtgctgacggcgacagctatacggggatgtacgccctgctgacagcggaagccaaaacgggttatcgtccgcgcatcctggcggtgccggactatgacacagcagaggtgaccgggcagctttgcgtgattgcccagaatctgcgcgcctttgtttatgccggttgcaacggctgcgcgaccatggcggaggctatcgcttatcgcaaaacctttgcttaccgcgagcttatgcttatctggccggactttatcgcttataaccccctgacggatgataacgaaacatttcccgccccagcttacgcctgcggcctgcgcgctgctattgataacagccagggctggcacaaatcgctgtccaacgtagtggtgaataacgttctgggtatttcaaaagatgttttctgggcattgcaggcagaagatagcgacgccaacgagctgaacaacaacgaaattacaacgcttatcaagcgcgacggattccgcttctggggcaaccgtaccacggacaccaaaacctacactttcgaggtgtttacccgtaccgcgcagagcctggcggacagcatcgcggaggcgcaatttaccacggttgacagtccactcactccggccaacgtgaaagatgtggtaagcggtattcgcgcggctctcagtaagaaagttacggcaggccaacttatcggcgcggattgctggtatgacacgctggacaacggcaccacggatttacgccagggtaagctgattgtgcgctacagctacagcccggtcccgccgcttgaggatctgacgctttaccagacctttactgatgatttttacgaaccggcgttcgcgtcgctcggaggtgaataa

SEQ ID NO: 191211 - DNA, 516 bp, Klebsiella oxytoca
atggccgtccctcacaaactgcggctttttagctgcttcattaacggtgataactacctcggaaaagtgacctctttcactcgccccaaactctcacgaaaggtagaggactatcagggcggtggcatgctgggcgcggtcggtgttgatctcggccttgatgctggcgcgctggattccacgattgtatttggcggcgtcattaaggctcttttccttgaattcggggcagaaattgacggaacgcgactgcgctttgcgggtgagtattataccgacggcgacagtcagctggttgaggtcgagctgcgcgggcgatttaccgagcttgacggcggagattcaaaacagggggaagatacggaggaaagctacacctttaaatccacctattacaaattctccatcgatgatcagcccattatcgaaattgacctgctgaacttcatctacaaaaaggacggtcagaatatgttccctgaccgcattacttccgccctaggcatgggcagttaa

SEQ ID NO: 191212 - DNA, 312 bp, Klebsiella oxytoca
atgaccagtaaaaatactttcaaattgactcgtccaattgtgcgtaaagatggcgagattagcgaagtagagatcaccggcgccatcagtcaggccggatccctgcgcggtctgaaccttatccgggttgccaatatggatgcggattccatcgccacgctgttaacgcgagtcaccgcccctattctgacgcaaaaagaaatcaacgaaatgcacatgctggactttatcggactggcagagaagatggtccctttcttgaatccgccggagtctggaacatcgagcgcggcggagacggagagcgagtaa

SEQ ID NO: 191213 - DNA, 2988 bp, Klebsiella oxytoca
atgaagaatcttgatatccgcgttgcattcagcgcagtagacaggtttacccgccccgttaatgccgcccgccagagtgcgggcggcttgtctgactctctcagaaaaacacaatccaccctgaaaggcctcgataagagtaccgccaccttccagcgtatgactgccgccgtgagcaaaacagatcgctctgtctcacgtgcgcgcactcgctttgaggggctgtcagagacgcagcgtaaaaacgggacgctgacggaaaggcagcaaacactgatgacgcggctgggtgagcgcctcgacagactgagcgcaaagcgcgtgactgaggtggcccgcctgcgcgagagcgcatcagcattgcgccagcatggcgtgatgctatcaggtagcagcgcaaccatcagcaatgcaatacgccgcacggatgaattgagccggtcgcttgaacgggaaaaagcgcagctggctgcggtgactcaggcccgcaagcgctacgagggtgcgcagcagatggccgggaaattgcgcacaggcggcgcgctggcggtcggcacagcaaccgccgccggttatggtgccgggcggttcctgtcgcctgcggtgggctttgatgaggaaatgtccaacgtccaggcgttaacgcggctcgataaaaacaattcgcagctggccgccctgcgtgctcaggccaaaaaactcggcgcggaaaccgccttcaccacgcgtgacgccgccagcggccaggcctttctggcgatggcgggctttacacctgatgctattcgtgacgccctgcctggcgtgcttaacatggcattggcgggaggaatggacctgggcgcaagcgccgacattagctctaacatcctttcgcagttcaggcttgatcccaaagagatggatcgcgtcagtgatgtgctgactgcggcatttacccgcacgaataccgacttgctgaacattggcgaggcgatgaaatacgcgggcaccggccttgctggcctgggtgttgatgttgaacgcaccacggcaatgatcggcgtaatggctaacgttggtttgcgtggcagcatagcgggtacgggtttacaggcgactttctcccgtctggctgcgccaaccggtaaagcaaaaagcgcacttaaagaattgggtgtcgaagttgctgacgccgccggaaagatgcgccccgccgaaaccgtgctggctgatatttacaaggttgtaaaaaaatacggagaaacagatcagctttcatttttcaaagatattgcaggcgaagaggcggcgaagtcattccgcgcccttgtcatgtcagccggtagtggtgaattgcagacactgctcagcagcttgcaaaactcgacaggcgaagccgggacggtagcaaaggtcaaaacgaataaccttgggggtgatctgaaggagctggacagcgcctgggaggcgtttcgcatctctgtcgctgaaacggttgacgggcctttgcgccgactgacgcagggactcagtcatgttattggcaatatcaaaagctgggtagaagaaaacccgcgactggctaagacgctgtttgttgccggtggtgttgcgctgacgctgactgccgcagtcggcgggctgtctctggctgctggcttactgctggggcccctggcaaagctcaggctcggctttgcgctgctgtctggcggtggtattggaggcacgctgtcggcgttccgggcgctgtctgccgttgggggtagctcgctggcgaaattcagcggctggcgcatcgtgttcggcagtattaccgcgcacgccagcgccatggttaaaagtatcggcgcaatcggcggacgcctcgcagccctgaccggggttctggcgccagttcgcggcgcgctactcgcagcgtttacctctcctggcgcggcgcttggctccctggttaaagggattggcgggctggctctccggctgactggcattccggcgctgtttggcgtggctaagacgggaattatcgcgctgttgagtccgattggtctgctgggcgcggcgtttgtggcggctgcggtgctgatctggaaatactgggggccaattaaggcgttttttgcgggtgtcttcacagggttaatgcaggggctggcaccccttcgcgccgcattttcaggttttgcgcctgtctttggattgattggtgatggcgtcaaacaggtctggaattggtttaagaagttgctcgctcccgtggagcaaagccgtgagtcactgaacaaatgcgccagtgccggaaagacatttggagaggttctggggaccgcgcttagcgtactactttggccgcttcagaagttaatggaaggtttcggctggttactggagaaactcgatctcatcccagacggcattgaaagagccaggctggaagcagccagactcagggctattccggttatgtgggaatgggatgaaaaatccgggcgcatggttaaaagggagtggcaatggtcatctgaaaagcctgcaagcaaaggcagcgcaccgccgcccagtgtgctcgggggtagctctggaacagaacggaggctgagccagattgccgacaacacaaaaggccttttagatgaggaaaagcgcaagcgcgtcgggccgggagatatcgtatttaaaaacctgccgcctgcactggcggttcggggggaatggcaggagtcgcggcttgtccgtcagtccgtcagcgcccgcccgatcattgcggccggtgagccggtggtgttgcaggcgcctgccctgaaaccaatgcgcagggatgaggttaagcgcgcggcagctgcggcgcagggtggagttttttctggtgagatccacgtccatttgcatgatgtgcggagtgataacccgcgcgaggtggcgcggctggttggcgaagcggtccgcgcggaaatggataaacggcggcgcgctgaccggggttcgttccgagataatgattaa

SEQ ID NO: 191214 - DNA, 492 bp, Klebsiella oxytoca
atgatgatggtattcgggctttttgtttttgaactcaggacgctgccctatcagcagttgcatctgtcccgtaactggcggcacgtcaaaaatgatcgtgttggccgtagcgcaaaatggcagtacgtgggcgcgggtgaaaatcagctgacgctgggcgggctgctctatccggaaattaccggcggcaacctgtcgctgggtgccgtctccacgatggcttataccgggctggcctggccgttaattgatggggttggctcgatttacggaatgtatgtcatcacggggttgcaggaaacgcaccaggagtttgatcgatatggtaaggcgaaaaaaattgagttcacactctcactacaaagggttgatgaggatatcagggaggggctgcaaagcgcctctgtcagcgacctgatggcaacactgaaagaaggtgcagagactgcattaaatacagctcaggagacgctcgatggtctaacctcctga

SEQ ID NO: 191215 - DNA, 1842 bp, Klebsiella oxytoca
gtgagtagacttttattattaaaatcggcaaagacaaagccggatttagcaagggttttaggcgtaaaaccttctgcattaacgcattgcttgtatatcgttaagcctgaaaatcaatacatacaattcgagatccccaagagaaatgggggtaaaagaattatcagcgccccgtcaggaatgctaaaaaaactgcaatcctcgctttcagatttattgcttgactgcctagatgaaattatctctttgaaattccccaactcagagatagcgagtcaaaaagcaaaaaactctcttgttttaaaagtgaagtgctctggctcagaaacaaaacagccttcgctttcgcatggatttgaaagaaaacgttcaattattaccaacgcaatgatgcacttagggaaaaagcacgtctttaatattgatttagaaaacttctttggtagttttaatttcggaagggtgagaggttttttcataaaaaatggggactttttgcttgaaccagaaatagctacggtaattgcaaaaatagcctgttataataacgaactgcctcagggtagtccgtgctcaccagtcatttctaatttaattactcatgctttagatattaaattagcagcggtcgccgcaaaacattcatgtacgtatacgagatatgcagacgatataactttttcaaccagaaaggaaagtttacccccttctatagcgaaatcagataagcatacttttgttgcagggaaggccatcagaagagagattgcccgttcaggatttttgattaatgaatctaaaacgagggatcaatacaaagactcacggcaggaagttactgggttagttgtaaataaaaaaccaaatactaaaaaagaatactggcggcttgtccgcgctcagtgcaatcatctgtttaacacgggggagtttaaagagacgataaatggcgatgaggtcgctggcaacattcacaggctcgaagggaaactgactttcattgatcaagttgatcattataaccgacttcgccaaggcgaaaaattaaatcctaagtatcatttaaaaaaagatgctatcagaaaaagcaacccttcaaacaggcgttatttacacacatctagggagatgacatttagtaagtttcttttttatcgctggttctatggtaacaccaaacctacgattcttactgaaggtcagactgataatatttatttaaagtcagcaatatggagtcttgccgcccaattccctaaactggcaactgggaaaagtgccgcagagccttataagactttgacacagtttttcaaatataatgaacgaacccgatacttattagagctttttggtggtggtgattatctaaaggattttgtagtcaattaccaaaaattgtttaattcttataaagcacctaaaccgtcgcaccccgtaattttatttgtagataatgactctgggccaaaaaacctgatttgtgaagttaaaagaactaagggtattgatattttccctgcgggcataggtgtggccgacatccgtcaggctgaatttgttcatgttttttgcaatctttatctggtactcacacctcaggagatgggaagccctgagactgatattgagtatttctttagtgatgttgatcggctccgagaatataaaggaaagcgttttaatacggtcgccaaccgtgacaaagttaatgacctgagtaaagaagcatttgcgacgcatattattaaggcacagaagggtattattgatttttcacggtttactcatcttttagagcgcatagaaaaagttatagatcactataattcaattaagtga

SEQ ID NO: 191216 - DNA, 1242 bp, Klebsiella oxytoca
atggcaacaggactgacactcacgacggcgggcgccgctgaaatcgaggccgcgtatcaggcgggggaggttgtggatattaccgccgtattgatcggcgatggtggcggcgtgacattgccgaccgatcccgatgacctggcggcggtgacggcgctttttggtcagtttggccgtgaaacctttgactctgattcaagttatgaggggtttatcagcggtcagattgttatcaattgcaaggattatccgggtaagacgctcagagaggcggcactggttagcgctaagggtacgctcatcgcttacggcgtatacccggcgacatacctcccggcgcaatctgattccattatcaaagagatcattctgacgctggtgttgactctgacgcacaactcaaatgtgcagcttgttatcgatccggcgcttgccactctcacgcaggaaacgggtgataaacgctatctgcggcgaacacaaaaccttgctgatttaaacgatacagaagaggcccgggataatctggagctggggaattcagccacgcgggacgtgggcaccacggaggaaacggtggcggcgggagatgattcacgcattaccggcgcactgcaaaaagaaagtaacctctctgatttaaccgataccgcagaagcgcgggaaaatctggagctggggaattcagccacgcgggacgtgggcaccacggaggaaacggtggcggcgggagatgatttacgtattactggcgcactgcaaaaagagagtaacctctctgatttaaccaacgctgaaagtgcgcgcgagaatctggggctgaacagtgacggcgagggatttaagggtatcgttgacgccattctttatcctgggattattatccctagcgaaaaaagcccggctgagcgttttccgtggcaggcctgggagagtttaagcaatgcatttgccgacagggtagtacgcattggatctcagcacggtgcgaccggcggcagcaataaggtaaaaatcgcagccagcaaccttccgccgcactggcacaaatcgggtgatagatcacctggcgagacctgggatccgaccacgacacacggcacggacaaccagaagagcgggccgctcaatatgacggcaggaacctatatcgacgcagcgggcgagcaggaaaccgcaaacctatcactcgatgtgactaacgagtatgccaccctctgcctgtggaagcgcacggcataa

SEQ ID NO: 191217 - DNA, 216 bp, Klebsiella oxytoca
atgaaaacattcaatcaaattaaaagcctgatcggattttgccagaccgatgaatttttccttgaatacctgcaaaagcttcagggcgcgggggttattcaggtggttgatggcgatattgacgctgaaaataaaacgctgagtgaagatttttacaatcgccttgccagtgtgtatggcattgaagcagaggaaacactatggcaacaggactga

SEQ ID NO: 191218 - DNA, 516 bp, Klebsiella oxytoca
atgagtattattgcgcagcgccccgtcagacccgccgacagtgacgtgaccgacatggacgacggcggcgcggaggttgtcgttggcaccttctggccgacagtgaagctccgcgatctacgcctcgcggcccgcatcgccggtgatatcaccacctcccggctggcgcacatggcgacagaatccgcgttgcatgttgcggatcagctgaaggactggcgcaggcaacgcgaggcggaaggcagcgagtcgctggcctccgtgctgttcactgctgacggcgaacctgtagacatggtcaatggcgaaagcgcaaaggtttatcgcttccgccgcgcggtctattcctttacgcgcgcccgtgtactggagggctacagggacgttagcaccacgccaaaaggtgacaaagacgccgaagccctggacaggcaaatagacgatctctggcgggacgggcgctggagtatttcagatatccgggaagaagcccgtatttactcggagcttttctga

SEQ ID NO: 191219 - DNA, 1353 bp, Klebsiella oxytoca
atgcgcttgaccgctccaacaaaagttttctcagaaggttttagtgaaagtgatgacatttttaatcggaaaaagcttcatgatataataatgagagttgctactaatgctccagataaaagccttgtattagcattagacgatcaatggggtaacggcaaaacatcatttgtaaagatgatggcatctgaaattaaaatcaaccacaccaatcaattcgacgttatttactttgatgcctttgaaaatgactatcaatctgatccatttgtagctcttacatctaaaatttattctcttgttgaaaaagaagaaggacggttaaaaacccttggtcaagaactcttgaatgcaggcaaaaagctaggtgcctcatttgctctaaatggtgctaaatttgcggtcagcacattaactggcggattagtttcaggtagctttattgaaaaagcgggagacgcgattacagattccatatcatctcctcttgaggcatttattgaagaaaaaataaagtcctctgaggaagaactagccacgatagatacttttagaaaattacttacaaaaatacacaaagaatctgataagaaggttctattcataattgatgaactagaccgtgctagaccagactttgcattagacttacttgagaaaataaaacacatcttttcagtggagggttttgtttttttactcgtaatcaatcgctctcaatttgagaaaagcattgaatgcagatatggaaacataaattctcgcttatatttgaataaattcattcattactggttttccttgcctaaaaagagtttttttgctgaaggttgcaaggaaggttatgagcgttcaactttaacacattatcttttaaatatcgaccaaggaaatctactttctcgtaatggctcattggtaaaaacattagcatatcttttggagataaataactgctcactacgtgaagctgaacgttgctactcgacgtttgcagtaatgaccacacccgaggaaataaacacatatcgtcatgagatattccatgtagccattggtctcgttgccttcctgaaagtatataatcaagagcttttacttgatattttgtatagaaatatagatttagaagaagcactaatcaaactaccaataagtgacaaaaattcgaaagagataacagaggcatattatatagtaatgctgttaaaataccatttcttcactgatgaagagttatcatcacaagacattaaaaatgaatattcctttatgattggaaatggtaatagacgccaacgttggttagaaataatgtttgaaaaggtgcaaggctttactttgagtcattaa

SEQ ID NO: 191220 - DNA, 144 bp, Klebsiella oxytoca
atgaaacatttcagcactaaggccatcggttcagttatcgccaagcgcaaagttgagcgctggcgtgcgaaatatgcagctttaccacaagaagaacggttagctattatggttgcacttaacgaagtagactcagtcaactaa

SEQ ID NO: 191221 - DNA, 549 bp, Klebsiella oxytoca
atgttgatgaaagccaggggtgtgaagggtaaggcaccctctcatgttcgcgcatggactgaagaggaagatgccttgcttgtgatgttgtatgcagtacacaccggaaaagaagtagcgcagtgtatgggcaggcctttgggaggggttcaaaaacgcttaagaatcctgagagaaacacgccctgatctgttgtgtaagcatcgaccatttaccgatgaagaagagcagtttattcgccaaaactgcaagcagatgaccgttggtcaagtggctagcttgctaaagagaaagcgaggggatgtaacccagaaagcattgcgtatgaacgtcagcttttttaagtgtggcgatgcgcatcatagcactcgaatttcggatgatgacgtactgcttatcagggcactgcgtgacgacgaacaaggcggaaaactgacattttcagagatcgcggagaagttcgatataactgaacatgcggcatggtgggcgtacaacctccgccttaccgtagacgacagcgtttcgcgtgagctgttatctaaatga

SEQ ID NO: 191222 - DNA, 132 bp, Klebsiella oxytoca
atgaatgaagaaaccaattaccgccggttctggcgaaacgttgtgatctgcggcgtgctctgtctgctgcttttttggattccgtcggtaatcgccacgcttcgcatcttgaaaatgatttttgggggatga

SEQ ID NO: 191223 - DNA, 954 bp, Klebsiella oxytoca
atgattagatcacccatcaaatgggcgggcgggaaaacccgcgtgatgccggagctgctgaagcacttaccaaaagctgattgtttaatagagccgttcgttggcagcggtaccgtatttatgaatacggattaccgccgttatgttctctgcgatagcaatcgcgcgctgattaacttctttcttcagttgagggatgacacagagcgcctgatcgctgttgcccgggacatgttcaagcacggcaacagtaaaagctggtattacggcgagcgtgaccagttcaatactctggcatgggatgactcggaaagggattgttacgcgacgttgtgggcggcgtctttcttgtacctgaatcgtcattgctacaacggcctctatcgtacgaataaagagggcgacttcaatgtcccgtttggcagcttcaaggctccctattttccagaagctgaaatgcgcatgttcgccgaaaaggcgcgggacactcacgcaatctttctttgtaatgactttcgcacctctattccatacatcgcgaagaacagcacggattcggtaatttactgcgatccgccgtacataccggccagtaaaaccgccaacttcaccacctacggcaagccgttttccctggatgatcaccgcactttggtttcggctttgctgacagctaactgccagcacggcacccgcgcagttatctcaaacagcgacacccccgagacccgcgagatctactccgctttcaatctccacgccttcagtgttcgccgctctgtcagctccaaaagccgcgacatggctggcgaggtgattggtgtgcttcgtgtgtgcgattgctgcggccgttctggtggtggttgctgcccggactgcggcccggtgatggggaactccacctacaacgcaatggcggtaacgggcgcttttgacgatctggaggctttctga

SEQ ID NO: 191224 - DNA, 228 bp, Klebsiella oxytoca
atgtttccgcgcctctccgttgtttgtagcgcgccgctgccagtctgcaccagggcgctggccgcccttaaatgctttgctcgcggccagcgaaattactcccgcataaagcctcattcctaccttgtgatccgcatcggccgccgttggcgcttgctcagtaagaacggcggtcagcagtggcgactcatgacccacgaaacctataaccaggaataccgcaaatga

SEQ ID NO: 191225 - DNA, 198 bp, Klebsiella oxytoca
atgtcggttacgtcaataaagctggaaagcggaataagcaccaccgcgcgcaaaggtgagcgcgcccatttactcggattactgcgcatccgcatgggcctgctgaaagagcaatgcctaacccccgaagagatttattcagcacttgagcagtggattgccaaccacgaaacaattaccagcgagggaagtaaataa

SEQ ID NO: 191226 - DNA, 243 bp, Klebsiella oxytoca
atgagcaaaaatactaacgacaaactttgtctgggtaagccaaaggtaattgatggctccactttggcgatgggactttattccaaaagaacaggacgtttaggtcaggtgttaatttcaattaatactgtcgccatctatggaggtgcggttgaaacgctgccagagttaatgggaaagctcaaagaactattgactcctgaaaaaatcacaagttttaaacagcaggaaaggaattattaa

SEQ ID NO: 191227 - DNA, 378 bp, Klebsiella oxytoca
atgcaaatgagtacaggagaacgcctcaaagaggaacgagtacgcttgggactgagtcaggctgcgcttggtgagatcggtggcgttagaaaacaagctcagctcaattatgagaaaggagagcgaaatcccgattccgcgtacctttctgccatagctaaatttggtgcggatatccaattcattgttaccgggataaggtctgcggagatcctttctccggatgagaaagagttgctcaatctctttagacaagccccgttagcggtcaaagcagcagcgcttgcagcattaaacgcgggtaacgcagcggcagattcaataaatgtgtcaggtagtggtaaccgagtggctggcagggattacaacgaaaaataa

SEQ ID NO: 191228 - DNA, 648 bp, Klebsiella oxytoca
atggatgttaattcttctggtaatcaaaatcgtatctcaggtcgtgatttcaatgagaacaatatccagatagataaatttgatggtcgtcacacaattaacatcgcaatcccatcggaaaagcatgatgaacggccactagtaaaagcacaacgcaaagagcttaacactctcgttgcaacagtatccgctacatgtggtggcgaagcatatgagatttggcaaaagttgcatgctgaaataggcgtttccagtattgaggaaatgactgtcaatcaataccaaactgcgatcagctatttacaggctatgattgagcgcgtcaaggatagggatgcaagtaaggcgctggtcagtctcttgctacgcaatagtgaggatagcgaattaaggcaaaaattgattcgctactgccatgtcaactttggaactggcaggttaaatgatcttacgcgttcccagcttcagatgtctctcacgtggctagatcagcaaattcagaataccggttccaccattccagaaccatctaaccccagatatggcttattcgcctttctgaaaacctacccaaaacacaccacagcagttttcttatctggtgcccttgtgggggctttgctcgttgtaatcaccaatacactataa

SEQ ID NO: 191229 - DNA, 327 bp, Klebsiella oxytoca
atgactgatgaaactatgattccacgtgaaggcatttatgtgtctaaaactgatcctagccttcggattacagtaatagacgttgaggttgtcgatgatgaagatgattctccagatgatgagttgttttacttagtaagctttatcgagggtgaggatgcaggggatctttccgcggcggggtttgagctgaataccgaggaatggcttacattcgtcaaatctgaacaattggtgttcgaacgagatccatacttggacgatgttcctgaagactctgacatagctaaaattagagacttattgagcaaggctaaaaaacagtga

SEQ ID NO: 191230 - DNA, 402 bp, Klebsiella oxytoca
atgaagacagaaacccagcatgaatcaggcgcaaagccacaaagcacgcttgccgcaagacttgatgagctgatgaaactgaatcattggtctcgcacagaaatggcgaggattgcgggagttagtcctacctctgtaaccaactggtttaagagggaaaccattagcaaggagtcagcagccaaactagctaaggccgctaaaacctcgctctcatggatacttacaggagcagaggaactcggcgggacatacaccgaagacgaaattgcacttattgaagttttccgcgaattgccgcctatcgaaaggcgcaacatgctggctgcattccagatgcggctacaaaaactcaaagatttttactctgataacgtagatccgactaccagagaaaaataa

SEQ ID NO: 191231 - DNA, 1392 bp, Klebsiella oxytoca
atgctttgtggaggactttcactgcgagactttatgcacaagcttcataaagttttacgaccaaccggtccagttgtttcaatggaattgttatttggacgtgagaagcatgtcactgacctagagttagccctttatgccacaggtcggcatgcctttatttatggtgatagaggtgtaggtaaaacctctttagcgcagactgtcgcattcaaacttcaggaagaagctgatcctatactggttggttgtgagaaagagtccaccttctcaagcgttatgaatgatattgttttgcgtggaacaccgcaaaataaaaaaattgatactcaaggctggacttttggtttaaatgttgcaggagttggcggcataaatgcgggacaaaaccaaaaaatcaataatactgaccttaatattgactcagtttctgcagcagtccgagcgttacaatttctaaccaaggctcattctaaaagaccttatattgtaattgatgaatttgaccaaattgactctgatgcagagcgtcaaaagtttggttcgcttatcaaacaactgggtgatcaagcctgtgaagtaaaattaatttttaccggaattggtgattctctagtaaccctaatcggggggcataaatcaagtgaacgccagatacatcaggtacaccttgatagtttaccttggaacggtcgtttccagattattgataacgcatttgaagaattcggattgacagttgatgagtcggtccgatacaaaattgcgggtcttagcgatggatttccaaactatatacatctgatttgtgaaaaaatattgttgacatgtcaaagttcggtacgcgaatactcttcagttgattataatcttttcattaaagggttaaatgatgcaattgactccgtatcggagaccctaaggcaaagttatacagatgctacggaaggtcgagatgaatcatataaacatataatctgggctatgtcagatatggcagatttaactcgacataaaacgcacatatcagagtcttatgtcaaaatctgtaagtcactcgacgtactacctttggataaaggaacatttgaacgtaagtttaatgcacttaagaaacctgcgtttggttgcatcattattcctgcattaggaaatcgcccttcatggtttcgctttagagaaaatatgctacgtggttatatccgtatgcgagcagagcagcacggccttgagttggactttcagaattacagagttgcaggagagcattcagcgcgagctataggcaaatactcagcttataaacctttgactaatgttgaagggcgtgtcgccaagcttagaggtgatgatgactggcttgaagatttaaaatcaaactcaagtaattaa

SEQ ID NO: 191232 - DNA, 630 bp, Klebsiella oxytoca
atgaatcaatctcaattccagaaggcggctggtataagcgccgggttagctgcgcgctggtttccgcacattgatgctgcgatgaaagaatttggcattactgctccactcgaccaggcgatgtttattgcccagatggggcacgagtcgggaggctttacccggctggtggaaaatctgaactatgcagcagatagccttgtgcctacgtttggtaaacaccgtatcaccgcccagcaggccgcagcactcggcagaacggcaacacaaccagctaatcagcgagcaatcgctaatctggtgtatgggggcgagtgggggaaaaagaacctcggaaatcagtttgccggtgatggctggaaatatcgcggtcgcggcctgaagcaagtaacgggcttgagcaactatcgcagctgcggacaggcgctgaagctcgaccttgttacccagcctgagctgctggagcgagatgattacgctgcacgttcggccgcatggttttatgtctcccacggttgcctgcttcattccggtgatgttgagcgcgtaacgctgcttatcaatggtggccgcaacggtctggataaacgccgagcgctgtttaaccaggctaaatcagtactggtgtga

SEQ ID NO: 191233 - DNA, 285 bp, Klebsiella oxytoca
atgagcgaagctaaaccgcaggacggcagtaccgtaaagggctaccgcacattaaccacgggcgacattgagcggatgaatcgcccgaaagatgtgagtcgtcacttttgcaatctgctggatacagagcacaactccactatgaatggagtggtagggatattcactaaagaagagtccgagcgtaatgaggcgttacgttgccttgatattgctcgcaccaaaatgcaggaagcctgtatgtgggcttgccgagctgtagcgcgtcctgacgctgattgctaa

SEQ ID NO: 191234 - DNA, 591 bp, Klebsiella oxytoca
atgcaggaaataatgacaaaaatcgaactttctggagtccttggtaaaacctttgggaatgttcatcatcgattgatttcgactgttcatgaggctggagcagcattatccgcaacaattccgggatttgaaaaattcatgaataacagcaaagaaaaaggattaacctttgctgtattcaaagggaagaaaaatattagtgaggatgatttaggattccctgtaagtggagaggttatccgcatcgtccctgtagtcattggtagtaaaaaggctggcatcttacaaacaattctcggggcagtgcttgtggtcgcggggttcatttccacattcactcccgctgctgcggccgcaccatatctttatagtatgggcgcatcaatgatgcttggaggcgtgatccagatgctctctcctcagcccggtggccttgcccgtaaagaatcctccgacaataaagccagctatgcctttggcggcgtaaccaataccgcctcgcagggctatccggttggccttctttacggcaaacgacgaattggcggcgcgattatttccgccggtatttatgtcgaagaccagcaataa

SEQ ID NO: 191235 - DNA, 1248 bp, Klebsiella oxytoca
atggaaccaacattgtcattaaccgtgatgttctgtgctgcagtgggtgcttcagtatcagaatcgctgtcagagtccgaatcgctgtccgagtccgagtccgagtcgctgtcggaatccgaatcgctgtcggaatccgaatcgctgtcagagtccgaatcactgtccgaatccgagtcgctgtctgaatccgagtcgctgtctgaatcggagtcgctgtcagagtcggaatcactgtcggaatccgaatcactgtccgaatccgagtcgctgtcggagtccgaatcactgtccgaatccgagtcgctgtcggagtctgaatcactgtccgaatccgagtcgctgtcgctatccgaatcgctgtcggaatccgagtcactgtcagagtcggaatcgctgtcggaatcggagtcgctgtcggagtcggagtcggagtcactgtcagagtccgaatcgctgtctgaatcggcatcgctgtcagagtcagaatcactgtccgaatctgagtcactgtccgaatccgagtcactgtcagagtccgaatcgctgtcggagtcggaatcactgtccgaatccgaatcgctgtcggagtcagagtcgctgtcggaatccgaatcactgtccgaatccgagtcgctgtccgaatccgagtcgctgtcagagtccgagtcactgtcagagtcggaatcggagtcgctgtcagaatcggaatcgctgtcggaatccgaatcgctgtcagagtccgaatcgctgtcggaatccgagtcgctatcagagtcagagtcgctgtccgaatcggaatcgctgtccgaatccgagtcgctgtcagaatccgagtcgctgtcagaatccgagtcgctgtcagaatccgagtcgctgtccgaatccgaatcgctgtcggagtccgaatcactatccgaatccgagtcgctgtcagaatccgagtcgctgtccgaatccgagtcactgtcggagtcggagtcggagtcactgtcagagtccgagtcgctgtcagaatccgaatcgctgtcggagtcggaatcactgtcagagtccgaatcgctgtcagagtcagaatcactgtcagaatccgagtcgctgtcagagtccgagtcactgtcggaatcagaatcgctgtcgctatccgagtcgctgtcagcgtcagaatcgccgtcagcatccgagtcactatcggagtccgaatcactgtccgcatctgagtcagtttctgaaatcgaagagtggtga

SEQ ID NO: 191236 - DNA, 873 bp, Klebsiella oxytoca
atggctggtcagtcttcatctcaggcggcatcaccgtttcaatggtggaaacccgcgctcttttttctcgtcgttatcgttggtttgtggttcgttaaatggcaaccctactatggcaaagccttcaccgccgcagagacgcacagtatcggcaaatccatccttgctaacagtaacgctaaccctttcgctgcggcctgggattacgccctggtctatttcatggccgtatggaaagcggcggtcctgggcgtgctgctgggttcgctgattcaggtgctgatcccgcgtgactggctgctgcgcacgctggggcaggcgcgttttcgcggtacgctgctgggaaccgtattctctctgccgggcatgatgtgtacctgctgcgccgcaccggtggcggcaggaatgcgtaaacagcaggcctcgatgggcggcgcgctggcgttctggctgggcaatccgctgctcaatccggcgacgctggtgtttatgggctttgtgctgggctggcagtttgcgctggtgcgcctgctggctgggctggcgacggtgctggtggtgggagccgcgcgggtgtggttattccctcatgccgatggggtggtggataacacgctgttctgggtgattgctatggcgattgccggctgcctgtttgttattccgacggcggcggagattccgatagtgcagacgatgatgctggcaggtatgggcgtggcgcccgcgctggcgctgctgattacgctgcctgctgtcagcgtaccgtcactgattatgctgcggaaagcgtttccggcgaaggcgctgtggctcaccggcgtgatggtggcgctgtgcggcgcggtggttggcgggctggctttaatctga

SEQ ID NO: 191237 - DNA, 681 bp, Klebsiella oxytoca
atgaaaaagctctttgtgatgagtgtattagcttgttctgtctctacggccatggctgcagagacggcggtgatgaaagttcaggggacattaaccaatgcagcatgtacaccctcattaagtaatggtggcgttgtggattatggttatattcatcttagtgaattatctgccacggagattaatccgctggaagaaaaaaccatagatttaacgatttcctgtacgtcgccgacaaaagtagcctgggatggtctggataatcagtcttcttctcggccttctccgctcttaagtgtaaaaaattacgacggtaacatgacttcatcagttaccgatttcagttacggaatgggggaaactgatgccggtgtaaaaatcgggaactatgcactttatgtagacacatcacctgtcgctgatggtaagagcggaaccctgatcggtcgtaatactgactggtcggcagacgcctcctggactgatggtgttaacggacagcgtagcgatcaaatgtcatggttaaccgttgcgacaacaggatcgcttgaacccgttgcgtttacgacggcaacgtttcagttgaaggtccacgcaactctccaggataccaccacgttggcgatcaaggatgacacgaaaatcaacggacaggcgaccttcacgctgcattatctctga

SEQ ID NO: 191238 - DNA, 552 bp, Klebsiella oxytoca
atgaaaattcaacgtctggctacgctattgctgcttgccttaccgtgtttttcttacgctgaagagtgccagttaacgttgtcccagcaggtcttggattatcatcagatacggcgtgacaacattatttccagtcagcaaagctggaacaaaatgccggaaaaagagattaacgtcagcgtctattgcccggaaaaacagcagatggcgacgttgctacaaggggcttccggtcagaaagggcgttttcagtttggccaaaacggcggtgtggcaataaaagtgagcaatctgacgctggacggtaaaagctacaacgtaggcaaaacgagcgatcaggtgaattttacaccggaaaatgataatggagcttcgctctatattcgcaataacgaggcggtcatagcggtggaaaagggcaaaatacccagtggtcagcaaatgaattttaccgtgacaatttttccggtgctgaatgacagcgcgtttaaccatattgcggatcaaactgcgctagagagtgatctcatctggcagttgcttaccagataa

SEQ ID NO: 191239 - DNA, 768 bp, Klebsiella oxytoca
ttgcgcaagcagggcgacagcaccagctacggcctggcaaacagcggctcgctgggtaatgaaactaactactatatttctgccgatcgtgaccaggaatcaaaggaaaacagctttaacggcaacatcaacaccaacctgcactacacccaacttagcttaggcggggggaccagcggtgataaccagcgtaactacaatgcgacgctgtctggcggtattgccatgcataaagagggcgtgaccttctcgccatattccatcaaggataccttcgcgattgccaaactgaccgagccgaaagcgggtgtggagatcaccacgccgcagggcgccgtctggacagaccgctgggggcaggctgtcatcccaggtctgaccgagtggcgtaactcgcgcatcgaagtggatgcaaacaaactcccgcagagcatgaccctggcaaacggcatcaagtacattgcgggtgctcatggttcggtcagtgaggtgagttttaaggtgctaaatagccgtcgcgtgatgttacgcatcaagcaggcagacggtaagccgctaacgaaaggtctgtccgtggtggatgacaaagataattacgtggtgacggtagtcgatgatggacatgttttcctgaacgatgccgatcaggtcgccggactgtatgccatcaatgatgacaaccaacgtctgtgcaagcttgatttctcgcttcctgaaaagcatgacgaagacgcgttttatgaggaagttaacggagtatgtcgatga

SEQ ID NO: 191240 - DNA, 1434 bp, Klebsiella oxytoca
gtgcgtaaaaaaagccaacttgcactttttgtgcgcgctgtgatttatagcgcaatactcctgatactgcttgatgcgccatccctccatgcgagggaggtgacttttgataccgatattctcaaatcccgcgggctgggtgccgatctgaaccgctattttgccgaagcaccgcgttttttaccgggtacgcattccgtttcggtcaaagtgaacggtaacgatcgcggtacggcggccgtacgcttcagtgaagacggtacgatgtgcgttgataacgacttcttggaattcgcagggctcatgccggtgcctataaaggcgaatgaaacctgtcatggtattcgcagcgattatgctcaggcggtgattaaccccttgccaaaccaagaggcagtcgagctttatctgccaccggaagcgcttaacagcctgagcgcagacgttaaaaacttccagcatggcggcacggcaggcatgcttaattactcgttattcagtaccaaaagtgactacagcggaagtgacagtagcagtaaccgctactcccaggcaagcctggaggcggggttcaatacgatggactggtctctgcgcagccgttatatcgtgacggacgatgacggcaaccgaaacgctgagagcatttatacctacgcagagcatgtgtttgtgccccagcgcctgaccatgcaggtgggtgaaatcaatgccatgtccggtgtgctaagtggcgtgccgatcaccggtgtacagctgatgccaacgagcggtttgcaaaaagacagctcgggcgtgagcgtgtccggtatcgcacgtacgtcacaggcacgcgtagaggttcgtcagaacgggcggctcatctttaacattcttgttccggcggggccgtttacgctggatgatgtgcctatggtgcgtaacaacgtcgatctggacgtcaccgttgttgaatctgacggctcgacgaatcactacattgttcccgcatcatccgtaaaatcgcggaatctctcaagaccaaacggcctgaccgtttcggtaggccaggtgcgtagcatagacagtgactatagcgatccactggtattcaacgtatccgatggctggcaaatttttccctggatgaacctgcttgcctccggcgtggtggctgaagattacctggcggcaggggcacgcactgagtttatggtcaccgatggctggagcgtatccaccagcatggctgccagcaaggcgcaatttggcggtagcgataacggtatcaaaacgaattacagagcgattattcatttaccgagaacgtcggcttgtctgccagcgtggcgcattacagcggtgattaccgcgaactggcggatgcgatggacgacgattatcaagtcgatgacaacagctattccgccaacattcgctggtcgactccgttag

SEQ ID NO: 191241 - DNA, 708 bp, Klebsiella oxytoca
atgacatactctagaacttttttatttaaaacgctcaccgcagccgccttattctctgcacagtttgccgtacatgccgcaggtatggtaccagaaaccagtcttctggttattgatgaagcgactcacagcggcaccatcaacgtcaaaaataccgatagccatccttcgctactgtataccgacgtggtggatctgccggatgataaaggcctgaaactcgtgaccactcagcccgtggtacgtcttgagcctggtcagactcagcaattgcgcttcattttgcaaaacagcaagccactggatgttgagcattataagcgtgtgacctttgaaggtattccaccgaaaagtgacgataacaaagtcaaaattggcatcaatattcgtcaggatctgcccgtactgattcgccctgcgaagctggccgtggtgaccgatgcctggaaatacctcaactggagcgcttcaggcacctccgtcacggtgaaaaacccgagcaaatatgtggtgcgcctggcgcaaaacgtagtactgcagccttcaggtatcagcggctcgcttgccaaaacctacatattacccggtgaaactatgacggtttcaatgagtaaacccgtcagcggcaataacaaagttaaattcttcccggccagccgctatggggtcgaagttccaaattttatctcggatctcaataaaaaataa

SEQ ID NO: 191242 - DNA, 672 bp, Klebsiella oxytoca
atgaagaaagtactacttctgacagtattgcctctgtgtgtttcatctgcatttgctgcggaaacggcggtaatgaaggttaaaggcacgctgactaactcggcgtgtaccccagaattaagcaatggcggtgttgttgactacggtaacattcatctgggtgagctgtcggcaactgaagtaaatcaattgggcgaaaaaaacattagcctgacaattaactgttcagcacccactaaagttggcttttcatcagttgatgatcgaagtgatagtcaggcaaatatcaaggttgaaagcacaacatacggtaatcaaaccgttgatgcctatttgtttggtcttgggaaaacgactggggatgttaagattggtgcatatacagtgttcttggatcgcgataaaattaccgctgacggcattgccgttgatagcatttatgagcaatatcttgatggaagatggacaagtactactgtacgaaacacgcttcaggatgagaatattcggacaatgacagttgcagcaaaaggctctttagagccattggcatttactacagcagtgttccctctgataacctctgtcgctattcaagatacaacgactttggcgataaccgacgatacgaaattagatggtcaactgacaatcagcctaaattatctgtaa

SEQ ID NO: 191243 - DNA, 264 bp, Klebsiella oxytoca
atggctgttgaggaggataatttcgggcacctggtgcccgttgagctgtccggcacgccgcaggcgcagcatatgttttgtgtgctcccgtcggctctggtcgcgtacgcgggtctgacaagcaaagaagggttcaaatccttcgcgctgcagactgtcgaggagggtgatggtcgggatatacgtgtaacggttactgcgggattcatgcttttcttcgctgaacacgctggggacgtggctcatcagctcttcgcgggttaa

SEQ ID NO: 191244 - DNA, 306 bp, Klebsiella oxytoca
atgatgagcccagaacagattaatcgcccgttggttctcgccgaggtgacggcggcgttttaccgctatgaggaagcgctggtgagcatcgatgaaatccgcgcctttcgcgccgcccgtccggcagcgggtttgcagcgcgagctgcggcataccatcatcaccacctttggcgaggattacgcggtgtgtagcaccgaattcacccgcgcaggcagcgagcgcatcggtcgccagcagcagacctgggtacgcttcccctttggctggcgcatcgtcgccgctcaggtcagtttgatgagttaa

SEQ ID NO: 191245 - DNA, 438 bp, Klebsiella oxytoca
atgctggtggtgaccgttgtcgcccagctggcgctctccttgaccactcacggccggcggatgtacgccatcggcggcaatccggaagcggcgcgcctctcgggtctgcggatcacccggtacaaagtcgccgcttacgtgatcgcctccctgctggcggggctcggcggcattctgctggcgtcgcgcatcggctcatcgcaggtgaacgccggcggcggctatctgatggatgcggtggcggcggcgtggattggcttctcgctggccggttccggtaagccgaacgcgctcggtacgctggtgggggcggtcattttaggcgtgctctccaacggcctggtgatgctctcagtaccgtattacgcgatggacattattaaagggctggtgctggctggcgcgcttgcactgacttattttcagcgccgtacctaa

SEQ ID NO: 191246 - DNA, 513 bp, Klebsiella oxytoca
atgacggctagcgccttatccgcctggaggtggctttgcgcttttctcccggctcgcgctgcgcttagccgggctacggattcaccaccgtctttcccgatggcgctgtgtatgaccgggctacgggtttaccgccatctgcgtacacgtagcccggacaaggcgcgtcaagcgccgcctccggggaacagcgcgcaatgttgtttcagattatcttcccggtggcgctgcgctgaccggctacgggttcaccaccatctgaggacaggtagcccggacaaggcgcgtcaagcgccgcctccggggaacagcgcgcaatgttgtttcagattatcttcccggtggcgctgcgctgaccggctacgggttcaccaccatctgaggacaggtagcccggacaaggcgcgtcaagcgccgcctccggggaacagcgcgcaatgttgtttcagattatcttcccggtggcgctgcgctgaccgggctacgggttcaccaccgtctgaggacaggtag

SEQ ID NO: 191247 - DNA, 417 bp, Klebsiella oxytoca
atgaaaagattactcagtagtgccattttgttaaccgtaggcatgttctcaatgtctgtttatgccaatcctgataattcctgcgacggtgaacaaaccatctttgatgcttataccgctaagggtggcaagcacgtgggtgtgtgttacgtatacggcaatattcgttatgtgtatgggaaggatgataatcctgaaattttaattaatattccacgtgaaaaggttgagttcagtatgtctggaaatggtgatcaaagtgtcactattcccaatggtgagtatcgatatgagataggtgaatatttacgtggtggtccatttatacaggtatggaaagggagtaggtttgttaccgagatcaagttaaatggcgccacctttgaaaataatattgagcagtatattaataattaa

SEQ ID NO: 191248 - DNA, 897 bp, Klebsiella oxytoca
atggcagggaaaaatagcccgttggccttcggcggcctgattgtgctgacgcttatctggagctacagctggattgcgatgaagcaggtgacgctctatatcggcgcgttcgattttaccgcgctgcgctgtattttgggggcggctttgctgtttatcgttttgctgctgcgcggtcgcggaatgcggcccacgccatttggctacacgctggcgattgccctgctgcagacctgcgggatggttgggcttgcccagtgggcgctggtcagcggcggggccgggaaggttgcggttctaagctataccatgccgttttgggtggtcatgatggcggcgctatttttaggcgaacgcatgcggcggctgcagtatgccgcgataggcgtggcggcgctgggtttattgctggtgctgcagccgtggcagctcgatttttcgtcgatgaaaagcgccctgctggcaatcctctctggcataagctggggggctagcgcgattgtggttaagcggatgtatgcccgctatccgcgcgtggatttactggccttgaccagctggcaaatgctgtatggcgcgctggtgatgagcgccgtcgcctggctggtgccgcagcgcagcattgactggcagcctggggttttttgggcgttgggatatagcgcgattctggccacggcgctggcctggtgcctctggttatttgtgttacgtaatttgcccgccagcgtcgcggggctgagcaccctggcggtcccggtctgcggagtcctgttttcatggtggctcttaggggaaaacccgggtccggttgaaggcgccggtattgtgctgattgtcctcgcgctgaccctaatcagcctcaagaagcgtgacgctcgggggcaggacgcataa

SEQ ID NO: 191249 - DNA, 273 bp, Klebsiella oxytoca
atgaactacgacagcagtaaaccggtgggccagcgcgtcgtatcgtttttgctcaatggtcagccgattgaagatgacacggtttatcatattgccaccaacagcttccttgccgatggcggcgatggttttgccgcgtttacccaagggcaagcgcgtaatacttccggcggctactacgtttcaaatgcggtagtggactacttcaaagccggaaataaggtgacggacgagcagcttaacgacatgcgtgtcgtcgatgtgaagaaatag

SEQ ID NO: 191250 - DNA, 597 bp, Klebsiella oxytoca
atgaattatgaggaactttattgcattggttgtagagcaaattgcgaaatccttcctgtgcaggagttcaaagtttctcaatgccttataacgcatatatatatatggcctgtggttaattattttttcgaaaagggaattctatcaatcataaattctactcaagtgatttcatcatttccaggatttatttttgttgatttctcatggaaaaatatcaaatatttcctgaatgatgaatggattaggtatctcactgctacaaaaatgagaataatattaatgcctgatgaaaaaatggcccctctagcaacatattataatagaaatgagaatgctatttataatgtcatttatctttcagaaggtcttacaggcattcgtaacaagattaagaagttatttatcggaatgcccttgctcaacaaagtagctaaggagttaacaaaaaatgaaaaggatgtgttgtacttaacgctacagcaagtgggagtgcgtgaaatatcaaaaagaatgtcacttgatgttaaggcggtttataacatcagacaacgggtagagaataagattgggatgaaaataaggaggttttcgtaa

SEQ ID NO: 191251 - DNA, 537 bp, Klebsiella oxytoca
atgaacaaaaaaatcatcgtcctaggtgttattgtcggcctttcatcagcgacttctgcatttgccgcttcagataatactatcaccttccagggtgaggtaacagaccaaacctgtgcggtcactgttaatggtaatgctgtatcgcctgtagttttgctaccaacagttagcgttggtgattttagtcagtcaacaagcgcaggtcctacatcttttgaagtgggagtaagtgggtgtgctgttgaaactgctgaccgtaaaatttctactgtttttgtcggtaaccaggtaaccagctcaggtaatcttggtaatacgggaactgctgaaaatgtagccatccagattctggataccaaaggacaagttattgatttcagtaataactttaacggtgccggggatctaacattaaaagcaaatgctgattctgcaagtgccacttatactgcgcagtactttaaggaaggcgcacagaccccaactgtcggtgatgtgacagcttccctacagtatgcagtaacttacctgtaa

SEQ ID NO: 191252 - DNA, 735 bp, Klebsiella oxytoca
atgaagtttatatctaagttcttagcattttacagcatccttttttttactttattctctcttcaactaaatgctagtgtaattatgactggcactcgcattatctttaaagaaggaactcgctctgttgatgttaatctcaagaatcagagtgattttccttatgtcgtacagacctggtttgatgctggaaaaattactcgtgaacctgacatttccgtcaaggttcctttttttgcctcaccttctgttttcaaaattaaacctggatctggccaggtgattaaattgacttatacaggaggtctgaacctgcctgaaaacaaggaatctgtgttttattttaactttcttcaggtgcctccatcgaatattaacggaatagatgctaaaaataaaatgctagtcatgcttcgcaatcgagttaaaattttttatcgtcccttagctcttgcttccgggccaggaaaagcatttccggatatacatctcacccctgttgttggaaattcatcatcattgagaatacaaaataacactcctttttttgttaccattagtagtgttgtgataagcaatggaaaacgtaattttacttctgaatcaggtatgattgaacctttaggtagcctgaccttcactattccacaggcgggctcagttaaagggaaaaagactaaggttacagtagtaaacgatcagggagcaagaattaatgcggaatataatttgtag

SEQ ID NO: 191253 - DNA, 2595 bp, Klebsiella oxytoca
atgcggaatataatttgtagaaatgtctgcgtcggtaatggaagcattcgatggagatttaacaaaatagtactagctatattgccattaaatgtatgcattccttctgtaaatgctcaagattattacttcgaccctgaacttcttaaaggttcatctctcttagaagatatgggaagattcaaccaacaggatatgtcagttccggtaggtaaatatgtccttgatgtatacatgaatgatctacttgtagtccccagtaaagttatatttataaagggacgtttggacggaaaaacagaaccttgtctgccgcaagaactgattaataaattagctataagagttaaggcagactctggtgctcataacagtcaatgtacatttgtgtcagataccggctcaggtgtgcatgctgatgtagacttatcgcagtctcgtcttaacttattaatacctcagtcatatttattacgaaatccacgcggatacatccctgttgatagttgggaaagtggtaagctggcattattcctgaaacataatacaaattttacaaatactgagaataccagaacacattttaattataattatctctggagcaatattaattcaggaacgaatttggggctatggcagatccggcatacaggcaatctcaggtacgccgaaagtaatctatctggcagtaattataaatacaacacagctagaacatgggggcaacgtgctattcctgagttagaaagtgtccttacgcttggggacacttacactagcagtagcttattcggaagcctctcttttaacggaataagaattgccaccgatacacgaatgtggccgcaggggaaacggggatatgcacctgaagttagaggtgtcgcagcgacaaccgctagggtggtcattcgccagcagggaaacattgtgtatgaaactaccgttccacccgggagttttgtcattaatgatctttataatactaaaagcaatggtgatctgcatgttgaggtcattgagtctggtggcaacatttctaccttcacagttccctattcttccgttcctgattctgtacggccgggaaattgggaatactctctctcattgggtagagtgagaaattattatagcgtaaacaatcgttttcttgaaggaactttacaacgaggtatgtcaaatatactgacagcaaacagcggaatccgtatcgctgatgactatcaggccgctttgctcggaggagtcgttgcaacagggctcggtgcttttgggttaaatagtactttctcccatgccaaagttgagaatgggaagactgaacgtggctggcgtgcagaggcaagctacagccgaacatttgattcaggaactaacttagttctagctgcttatcgctattctaccagcggattcagggatcttcaggatgtacttggagtccgtcggcagtctcagaatggcactgatttctggtcagataccctaaggcaaagaaatagattttcagcaactatcagtcaacctatgaatgaatggggaatgcttaatatgtcaggcagtactgctgatttttatgatggaagaggcagaattagtcaattgcaactggggtacagtaataactggaagcaattaagttacaatctaagtattgcccgtcagcagaccgtaatgacaaacagccgattttactacagcctcaaagacagtgactatgatactggtaacaagcagaaatatacagaaaattcggtttcattaaatttctctattccacttgattttggtcagaatcgctcaaatctgacttttgggattaataaaaaccgagaatctcagagtgcccaagtaggcttaaatggctctgccggggagcaaggtgattttacctattccttgtattctggcgcagaagattatcgtaacagcggtaatgcttcttcttggggtggaaatgttcagcaaaatacatctttgggagcagtccgtgcaaatatttctacagggaaaaattatcgacaatttggggcaggatactcagggacattagtagctcatagaggcgggttgactgccggaccatatgcaagtgagacatttgcaatcatccatgcaccaggggccgctggagcaattgttaaaaatggccaaggcgcaacaataaaccgatttggatacgctatacacccttcccttacaccttatcagtttaacaatattggcttagattctcgttttattaacgcagatgttgaactgctgggaggaagtaaaaaagttgtcccttatgccggcgcaataccgattgtaacctttgaaactctacatggaagagcagtcctgataactgcaagttttaacggtgagtttcccccaatgggggctgatgttcacgactctcgtggtaacgaagttggtatggttggacaaggagggcagatttatgctcgtgttgaagatactgcaggaaaactgattgttaagtggggaaaggcagtaggtcaggcctgtgaaattaattaccgcctcccaaaagcagataagcagcccgttatacaaattaacctgccttgcgataagagataa

SEQ ID NO: 191254 - DNA, 1389 bp, Klebsiella oxytoca
atgattaagattataagaatatatgtgagcaaaagagatattactcttctaattctttctttgttttgcattatttttacccgatcgagttatgcaacgggatattgcgaaatagttagatcaacaacccagttgtcagcccaagccttgaatgcgggatatactgcatcatattggggtggtgcatatgatgcaaacacagcgactagcctaggtctcccgggaattgttgctattagtagctccggaagcttccagccatcaggaacccttctggcgagttcaacagcttcttttttgactgcaggacataaggaaacattcactgcaaatcagatattatttcgctgtgatgcgacagctgttaatgcaggactgtatgaattttacgcaaccaatggtgatgaagactacagtggtaaaaatccggcaagcgaagtggatggttcttactacacctatgtaaaaaatgtagcaatcagactgacgaacctgaaaacaggcgagtactactcacgctactggcaatcgcgtcgacttacggctgatgactggtattcggatggtatatatacgtatatccctgcaagtgccttcagtgatgtattcgttgagttatataaagtgaatggaacttatggaagccagaatagttcaagtccttatacttattcatggtggaactcaggtagtgcacagcctgcaggttatattgcatttaaggggggagatttaagcgctggattatacaatggagctgaccatgcagctaactattcaggattctatgaacactggccagctggatttggtttgaccaactatgtaactttcgtgaggggggcaacatgccttgtgaaggattatccttcagttgttttgttacctaccataactgtcaatgacctgaatgcgggaagtactagtcgtgctggattctcaattagcttagagtgcgaatccggagctatttccagcacatcaagctcgaccagctcttcagccaatgtttcgatgggttttatggtaaatcatgtgaatgcggtcagcaaagcacagagtttagggcttgtaaccaccggtggtggactgacatggttattggatgcaaattatggaagtggtgtaggtgaagcctcaggtgttggcattcggattcttgacagcgcaggtacctctcttaatcttttgccagccaaatcttcatttggtagtggaaatagttatggctggtatggttttaagaatttgctgtccctctctggaacgggtagtggatcagaaatttacacaggtgatttcactgcagaattgagtgctattgctggtcagacagttaccgcggggtctgtgaatgcgcagttacaggttgttgttagctttcagtaa

SEQ ID NO: 191255 - DNA, 681 bp, Klebsiella oxytoca
atgtggtggttactgttattcttaacatatccagctgttgctgttgttaatgttgagaaaactagggtgatattcaatcatggagaaatggttgctttggtcggtttgataaattcaggagaaactccaacacttgtacaactttgggtggatgatggtgatatcttttcctcacccgaaaatgccaaaacaccagtaattgcattacctcctgtttttcgattgcatccaggagaattgaaagatgtaaaattacagttaatatcgtctgataatattccaagtaacaaagaatctctatattggttgaatatttaccagataccaccaaaaaagataagtccagacactgataagcgagttatccttcctcttagaatacgtattaaagtgttttttcgtccggtaaatgtagcaccaccacagcaagttgacggggaaaaactgcaatttaggttgaacactaagaatcacaaagttatgatccttagcaacccgacgccatggtatatgacgttatcttcaattaaaacaggaaatgagaaatctgatggaatgatgctggcgccaggtgaagagaaaaatgttactttggaaagggccgtgaagtcgggaccagtacaatacgaaattattaatgacagtggaaacaaatggagttatagtacaaccttacaataa

SEQ ID NO: 191256 - DNA, 651 bp, Klebsiella oxytoca
atgttacctgactatgaagttaaacgtctgcgctatcctgtcaacattattgctcagtgtgttcgctggtatctggcttactcactcagcctgcgaaatctggaggagataatggctgaacgcggtatcaccgtcgaccactccacacttcaccgctggattatacggctggtacctctgctggatagggcatttcgacggcataaacgtgccgtgggacgccggtggcgaatggatgaaacttacatcagagccagtggtcagtggaaatatctgtaccgggcagtcgataccgaaggtcagaccatcgactttttgttgacggctaaacgggatgccgcagcggccctgcgcttcttccgcaaagccattcgccagcatggcgaacctgaggtggtgaccatcgataaaagtggcgccaatgccgcggccctggtcatacacaacgccgacaaacctgatgaggcaatgattgccatcaggcaaagcaagtatctgaacaacctggttgagcaagaccaccgaaatatcaaacgtcgagtacgcccgatgctgggattcaaatcgtttcggcgggcgcagacgatactggccggtattgagttaattcatatgatatgcaaagggcatatatcagtgcccggcaggtga

SEQ ID NO: 191257 - DNA, 489 bp, Klebsiella oxytoca
atgggtaatttgtttacacgggttttattcggagcaagatggataatggctccggtatatcttgggttatctgccagtttgatagttttagcctataaattctttgtagagttgtatgagatagtattaaacgtagcccattacaacaatgaagaaataatacttagcctgctatcacttatcgacttcgttctgattggaggattgcttgttatggtgattttttccggttatgaaaactttgtctctcggttgaatgtgaaaggagcagataacgagttgtcatggataggcaagatggatgtagaatctctgaaaaataaggtgttcttttcagtagtttcaatctcgactatccatttattaggcgtttttatggagtcaaaaaatattcctaatgataaaataataatgtacatggggctacaactttgcttcgttattactgccctgttaatgcaggtcttagaaaagctttcgaaaaagtaa

SEQ ID NO: 191258 - DNA, 498 bp, Klebsiella oxytoca
atgaagttatggaacaaaacgattttggccgcagcaattaccctcctcattactggttgtgatgacgcggataagaaagtggatagcaaccttaatcaagctaaggaagccgccagccagatcaaagatgctgctgctgacaaagcttcatccattaaagatgaagcggataagcatattgatgctgttaagcaggaagcagataagcaagcagatcaactaacggagaaggcaaaatctatcaaggcagaagctgacgcaaaagcacagtctttagctgaggaggctaaagctaaaggagatgaagtgaaagccgacgctgaacaaaaaagtgaccgtgttgtagaaaaggctgaacagattaaggcacaagccatctccggagctaacgtgctgacaactgacgctgcagctaaaacccaggaaatcaaagacagcatgaaaaaggataatccccctgcacgagctgactctactccaactgataataaaccgtaa

SEQ ID NO: 191259 - DNA, 249 bp, Klebsiella oxytoca
atgggtattttatcctggattgtcttcggactgatcgctggtatcatcgcaaaatggattatgccgggtaaagaaaacataggggtcatcgtcaccattattctggggatcgtcggtgctgtggtaggaggctacatcagcacgctcttcggattcggtaaggttgatgggttcaactttggtagcttcgtcgtggcagtgattggcgctattcttattctatacatctacaacaaagttaaaagctaa

SEQ ID NO: 191260 - DNA, 660 bp, Klebsiella oxytoca
atggaatactacgggattgttctgcttaagtttgttatcggatttgttgttgtcatatctcatctgaacttttctggaaaaacccagctttcacaaatgactcctgttgacttcatcgggaattttgttcttggtggaattataggtggcgttatatacagtgatgccatacctatgcatcaatatatcatcacgttgtttattggtgttgctcttatttctttactcaattcggtgagtaaacatgtctggcttttcagatcatttaccattggtgaaccaattccaattataaaggacggtaagtttcaaatggacaatatactcaggcgtcgaaataaaatagatatcatcaatgtcgcatctcaacttcattctcaggggatacattcatttcaggagatacgctacgcacaaatagaaccaagtggttctctgtctgtagtttgtgaaggtggtaaaatgccgtcaataattctcatgaaagatggcagagcacgcctttcagaactcaatggcattgagaaagacgaagagtggctcgataatctactcaaagaatccgggatagaaaaagagcaggtattcatcgcagaattctgggatggagagatcacttttatccttagtgatgggaaagtgaagcgacatccacattaa

SEQ ID NO: 191261 - DNA, 768 bp, Klebsiella oxytoca
atgagtctgcccggatttatccatcattcgcctgccctgcaggactcccgtcagccggcgccctttgactacggccgtgcactctcgctgcgtgagatggcccggcactatacggagctgccgaaatacctgctcgcgccggaagtctcggcgcttctccactacctgcctgactgggagcagcatgcactcatcaacaccctgtggaataccggtgcccggctgaatgaagccctggcgttgagaagacgggattttcatctcagcgaggctattccgcacgttgtcatacgcacggcaaaacaacgtcgcaccgccggcgggcgcccgaaaaaaggcaaaagtgcgaaccgggtggttccgctgtcggatccggcgtatgtggatgagatgcgcagattatttgcgagtacccgggagcggtttgaggaagatgcggacacgggagaacggcgtgccatgccggtctggggggtgaccgaccggacggtgcgtaactggatcgagcgggccgtgagtgcggcagagcgggacggggtcagattcagcattgcggtcagcccgcacaccttccggcacagttttgcgatgcatctcctgtatggccatgttcatcctaaggtcctgcaggggctgatgggacatgagaagtctgagagcacggaagtgtacacgaagatttttgcgctcgatgtggcggccagtcagcagatccagttcagtctggatacgcggaatgcgctggagttgctacgtcacagggaatga

SEQ ID NO: 191262 - DNA, 252 bp, Klebsiella oxytoca
atgaggtttgcaagtattcccctgaaagtactgcagagcctgatgggccacaagtcagtgagcccgacggtgatccgtacaaagtgttcacgcccgatgtcgcggctcgtcatcgggttcacggtcaggaagttgaatcgtcgttttaaacatttcctgaccatgaaagttgtcgtcgggcgcgcaatgatggcgggtggttgtggcttttttgttagtaaaacacggcttaagattcttttttacctgtaa

SEQ ID NO: 191263 - DNA, 513 bp, Klebsiella oxytoca
gtgcacttcgcaaagaaaccccggggtgcctggtggagcgtcaaatacctcggccggtatccagcacccgcctgtttcagcggcagtgccgtagtgcaccactgtcacgatcaccgcacgcagcagttccggcagcagacgctgtcagcaggaagagatgatcgggcgctatatcagtcatatcccggcgaagcatttaaaattgttcgtttttacggctttttgttcagccagaaacgaggcgagctgctgccgaaggtgtatgaagccttgcggatggaagagagggaaaaaccggagcagccgggcttcgccgcgctgatcaaagcgttcctgcacacagatccgtacagatgcatcctgtgcggcaatcgactgcgttttgtcagcgctcaggccggcagagactccacggagttaggggcagaaaagctgcacgggatcgacagaaaacgatggcttcagacacaggccgagcaggataagtgtgcctcaaaaatgagttacaggtaa

SEQ ID NO: 191264 - DNA, 525 bp, Klebsiella oxytoca
gtgtcaacagatgagatgtattcttatttacgtccctgtgtaatgctgatttctggatgcgcgtcagcacatgggaggtgttttacgccggagcccctcacagcgaagcgagaacgtagcgccctgccatacagctcttcaccgtcgatgacggccggaacagatccctcgaaaaaatcggcgaccacgtcacaccatggacccgactctgtgttgagcgcatgctcgcctgtggcttcaaagctacctagctgtgggtggcgcagcaaagcaatatcctccccgaatgcgactggcagcacatcactttcaccatgccccaccttctgtggtcctttttcaacaacaaccggcccctgctcaatgtgcggtttcggcaagccacccgcaccatgctacggtgagcccgcaaacaggacgttgagatcggcgtcttctgcgccctgcacagttaaggcagacagctcaaccagcatccgcacattcacctctctgttacccacgggggctcgatatcaggcatag

SEQ ID NO: 191265 - DNA, 474 bp, Klebsiella oxytoca
atggctgaacaaaagaaaaatgccctcgtactcaatggcataaacgacgacatcaccgaattaaaatccctgaccacactgcgtaagcgggtcgtcagcgacggagaaattgtttcaaaaggcgtcaacggattccggctggctggcgccagtaccggcgttatcctccgtaacgacggtaaaaactttaacttcctgacaaccgcagacggacaagcccgcgacggggcgttcaacaccctgcggcctttcgctttcagtttaactacaggccgggtttccctgcgcaacggcgtggatgtttctggcggcgcgttcatttcccataatgccggcatcactgcgcagaccaccggccccgacccgcttatcaaatgcggcgctgtctgccggaggctcaatggcgctcagccgggcgccggggatgatacagcactcggctgcaggcgtggggacgctacccttcaacagtag

SEQ ID NO: 191266 - DNA, 1017 bp, Klebsiella oxytoca
atgatacagcactcggctgcaggcgtggggacgctacccttcaacagtagtctggcgggatgggaagccggcgcgctctggcgcggtgtcgacgtgcttgccaggatcgcgccggtcgcgtccgccgtggccacggttgccacagtgctcacccttgtcagggctgcactggatatccctgcagccggcgaaggcagtgacagggttcccggacgcaacattgacatgcttgccgcccaggccagcctgtacacggccatgaagacgaacattcagccggggatgaagaccgttgacctgccagtcaggggatatatctcgtatgacggcaacggccggcagtcggtcaacctggtcaggacggggacgggcggggtttcggccacggtgccggtgctgagtgccgtgcgtgacaaaaccaccggcctggataaaatcacggtaccggccgtggcgggcgccccgtcgcggaccatcctgattaaccctgtaccggtcggtcctgcgacaccatcgcataccggcagcagtacgccggttccggtgacgccggtgcacactggtaccgatgttaagcaggcggacagcatcgtcaccacaacgttgccggcggcagatattcctgcgctgcaggacttcatctactggcagccggatgcaaccgggacgggcgtggaacccatctatgtcatgctgagtgatccgttggattcggggaaatatacccgcaggcagctccagaagaagtacaagcatgctatcgattttggtatcacagatacgaagataaatggtgaaacacttactaagttccgggatgcaattgaagcacatctttcagataaggatacctttgaaaaaggaacatatcggcgtgataagggatcgaaggtttatttcaatcctaaaacaatgaatgctgttattattcaggctaatggtgactttctgtctggatggaaaattaatcctgcggcagataatggtagaatttatttagaaacgggtgatttatga

SEQ ID NO: 191267 - DNA, 267 bp, Klebsiella oxytoca
atgaacaaaatggcaattattgaattggcaagaaatttcctggcttcaaaagttacagcgcttcaattttcagaaaatatatgtgttgaaagacggaaactctatgatattaaggagcaggatcagaacgtattgaattgtggagaagaattgttcatgattgcggaactttttgagcctgatccagaaagaaaaagttatgaactggatgaagtcggtttaaggaaagaagtcaaagccactctggagaagtttcatcttctctga

SEQ ID NO: 191268 - DNA, 360 bp, Klebsiella oxytoca
atgaaaagaggaattacggtcgtcatcaacggaaaatcatttgcatccaaaacatctgctaaaaaacacttcatggaccagagggagcgggtaaaggctgacggtccgttgaaaagtggtgaactgtatgaggacctgcttgatctctatatgaactatatcgaccttcatccggagcatgcgctgaatggacgcaggatcaccgccttcagcgttgactttgagcccagggaaaatgcaggtcaatggagttcatatctgtgctactgggtggagttctcgaccacccagaaaaaaccgttctcgcttccaggtgccgtggatgatattgctgccgcacaagccgcggctcagcaatag

SEQ ID NO: 191269 - DNA, 1206 bp, Klebsiella oxytoca
atgaaacgagattacggtagtgtcggtaccatagcgctcagagcaagcgctctacttcaggccatgagccgggatattgaggagcaaagaaaggaattcaatctgacagagtatcatcaaacatatactcgtaatgcggttgcaaaattgccgaagctaagccgacgcatcgtagaactggccatgaaagaaatggaagaaagcggctatgattttaataaaaagcaggttggcaacgtcgagcaatatgcactaacaattcagaacgtgattgatatatacgctcaccgacagataccaaaatatcgcgatgttcataaagaaccttacgtaatctttgtcgtcaacttgaaaggtggggtatcaaaaactgtcagcacagtcacgctggcgcatgcactacgagtacatcaggatttgctacgtcatgaccttcgtatccttgtgatcgaccttgacccgcaggcgtccagcactatgtttttggaccatacccatagcattggtactgttcttgaaaccgccgcccaggcaatgctaaataatctcgatgctgaaacactgcgagaagcagttattcggcccactattattcctggcgttgatgtcatccctgcttctattgatgacggctttgtggcaagtcaatgggaggctttggttgccgaacacttaccaggttttaagccttctgaagtactcaggaaaaccatcattgaccgtatcgccggcgattatgattttgtcttcattgatactggtcctcatcttgatccgttccttcttaatggcctggctgcgagtgatttacttctcacccctactcccccggcgcaagttgatttccattcaaccctaaaatatctgactcgtttacctgaaatgctcgaacgtctggaagaagaaggggttgagcctcgcctaagtgcgagcatagggtttatgtctaaaatgaccagtaagcgcgatcacgaaacttcccatagtctggctcgtgaggtgtatgcaagtaatattcttgactcatcacttcctcgattggatgggttcgaacgatgtggtgaatcttttgacactatcatcagtgctaaccctgtttcgtatccaggaagtgcagaggccttgaaaaaagctcgtaccgaagcggaacgatttactaaagccgtttttgaccgcattgaatacattcggggagcatccaaatga

SEQ ID NO: 191270 - DNA, 963 bp, Klebsiella oxytoca
atgaaaaaggttttagctcgagggcgagttctcggcaatagcaattcagagttcgctcgcatgcttgaaggtgacggagatgtcaaaacgtttactcttaagtcagggaagcaagcaaaattcattaaaacggttgtattaagcggagatatagaatctaaaacgttcgttgacgcatctgttaatggacgcgatcagactatgctttcgcgtgagtcagtcagtgatataactcgcacgattaagcttcagcaattttttccagctatcggtcgggaagtagatggacgaattgaagtattagacggtacgcgtcgtcgcgctgcctgtatttataacaacgtaaaattcgaaatactggttacaaaagacagtattgatattgccgacgcgagacaacttgcaaaagatatacagacagccagagagcatagcctccgggaactgggaaaacgccttgaagttacctatggggctagtatgacaaaagaagagatcgctctggctgaaagcatctctccggcaaaagtaacacgcgcatttcaagcggcatcagtaccggatgaaatgatctctgtttttccggtaataaatgatatttcgctgtcagactatcaatttttgctgaaactgtctgaagaggcaaacaacaaaaaaatgtcagtggcagagtttatggatagagttcgtcaaaaattgatggctttgcctgactatccagcaatagagaaaagcaaaatcctggcagtcttcaggggtgagggaaaattgcttacagaccgctctgtaaaaactgtttcaactgagaagttgaaagagttttctgatcgtaaccaatttgccaggaaaaagactgaccctagaaagaggcttgttgtgtatgagttctcccggatatctaatgaggtgcagttagaaatcgatgaggctatcaaaaatattctaaaaaaactgcccgaatag

SEQ ID NO: 191271 - DNA, 234 bp, Klebsiella oxytoca
atgagtgtttacgataacggcccgttaccggatgacaccttcaccagagcacaggctgaagcggtggctgcacagtttgaaaatgtcgccatcgaagacgatcagatttcgcattttcgcctggtcgttcgtcagaacggtgaaatggtgtggcgcgcatggaattttgaagtcgatgccgggaaatggctcaaccgttacatcgaacgttatggcatccgtaaaacgcagtaa

SEQ ID NO: 191272 - DNA, 324 bp, Klebsiella oxytoca
atgaagtggcgttactccctgcgctggaaattaccatcaccgtgtcccggtccgcatgaactggcatccgaagtggtggaggccggacagcctgcgcccgaatccattatgtcgctctgggtggcgggcgccgggtatgcggtgtgcgtggattttcccgatgagcggcaggtcaggcgctggagcgatgagcgcaaagccgctgcgcgtcgccgcaatcttgagtgtcgggttaaaaaaatagcgcccctgtttgctgatgagctgatagctcgggagattgaaaggcgaccagactattttctcggaaaatcagtcagctga

SEQ ID NO: 191273 - DNA, 162 bp, Klebsiella oxytoca
atgaaactgccgcgaagtaccctgttgtggtgcgtactgatagtgtgtctcacactgctgatattcacttacctgacgcggaaatcgctttgcgaaattcgcctgaaggacggacaacgggaggtcgctgcaattatggcttacgaatccaacggtaagtag

SEQ ID NO: 191274 - DNA, 246 bp, Klebsiella oxytoca
atgaaatataacagtgacaaacaaataataatgaagagagaaacccgcgctggactaatacgggcggcgcgtagcgcagccggtattagtctgcaccgcaggtgcgcggccttttttccgcagtcgggcaagataccccctgcccttccggttatttacgcagcctcctgtatcccgcgcatgaagtcccgcatcgccctgaaccgggttaggtcagccaacctcttttcaaagtcattgagatag

SEQ ID NO: 191275 - DNA, 144 bp, Klebsiella oxytoca
atgtgtcaacagatgagatgcattcttgtttacggcctgaatgatgtcggttttttgatgcgcgtcagcgcatgggaggcgctacgcgccggagacccccgcagcgaagcgaggacgaaaaaagcattacggcttcagccgtaa

SEQ ID NO: 191276 - DNA, 2136 bp, Klebsiella oxytoca
atggatgagtataatttcaacggtggggtaccaccattgccgggtaatgtatggctgcctgctgatgaagacggtccggggcgctgggtggcgcccactacgggaagtcaggctggtgatattctgactgtgtggccgtcaaacggatatacccctccagatacttcatttctgccgccatcaaccttaggacctggctgggctgattacgatatggcaggcgtggcttctgaccagggctaccttttatatggtgttccggtaagggtcgttctggatatactgacagaagagggtgactggcccggctggaccatcggtctctatgaagcttatcgggaacaggagcccgtgtctgccgccatggccactctcgaccggggactgatttcggggttacctgacccctccaggcctgccgttgtaccttatgcccggctggagccagaatccccgaacccggaaaaaatttcccgcgtaatgacaatccagcccttaaatgccgtcacagatgtgccggtaaatgcgttacccgcaccaggaggaacagtgaacgttcagcggcgtctgaccgatctggtatccggggggaatcagtacctggtggtgacaggaggaaaacccatgtctgttcgtgtggttgatgccagtctcgtgaaggacaagacaccacaatcagaccgattcctgaagaatacttatcaggcaaccattgcgcccgggcttccacctcttattttcactactgattatattaatgattccaggatgtttcccaagaattatgttccaaacgccagaggaattattagcggacagggggtttatggttcagccggctatacctcctctaccagaaatgacgatgtcattgtgagattcccggcagggagtggagccagcccgctgtatatatcctctgtagaggtattaaatcctgagtcactacatcagcgtcaactggctgagacagatatcaggaacagaatagatgcggcgatcaaaaccgaggaaaaccgtaaatacctgtttggcaaagcaggtattcaggagacgccggcgttcactccggaaatggtgaaatcagccagcgccctgctgacggcaccggcggcgatgatgcttaaccgggcacctgccgggatacaactatctgcaacgggcacgggagtaatgactgctgtgggtgaatgggcaggctcgattgccggcgcgttatggcgaggggcggtcggaacggcggctgccagcaccgcgggtcccatggttgctgccgcatcgacgatatttttctcgcggcctgcaggggggggcagtgacaaggttccgggacgcgatattaatatgatggcggctcaggtcagtctttttaatacgggtaaggtgaaaatcgaacccgggatgaaaacagttgatctgccggtacgcggctttatctccacggacagtaatggacggcagtcggtgatgatggtgaaaactggctccggcggtgtacctgccacggtaccggtactgagtgccgtgcgcgacaaggccaccggtctggataaaatcacggtaccagccgtcgcgggcgccccgtcgcggaccatcctgattaaccctgtaccggtcggtcctgcggcaccatcacataccggcaacagtacgccggttccggtgacgccggtgcacactggtaccgatgttaagcaggcggacagcatcgtcaccacaacattgccggcggctgatattcctgcgttgcaggactttatctactggcaaccggatgcgaccggtaccggcgttgagccgatttatgtcatgctcagcgacccgctggattcggggaaatatacccgcaggcagctccagaagaagtacaagcatgctgtcgattttggtattagcgatacgaagataaacagtgagacacttactaagttccggaatgcaattgaagcgcatctggctgataaggataccgtcgttcgagggacatacagacgggagaaagattcgaaagtatattttaattcaaaaactaataatgttgttattttagataaaaatggcgatttcatttcaacatggaatttaataccaaactctccacaatatataaactacataaacacaggagttctataa

SEQ ID NO: 191277 - DNA, 273 bp, Klebsiella oxytoca
atgagcataaagttaattgagcttgcgagaaaattagtttcgtcaaaaataagtgccgatgatttcgaaaatcaattttttaaaatatggagagatgaaggtaaatccggacaattagcaaaagatagtaaagatatgggtgattgcgctgctgaaatttttattcttgctgattgctatacaccagactcagtgcgcagggaaagtgaactggatgctgatggtttacgtaaagaggtgaaagccaccttagagaaatttcatcttctctga

SEQ ID NO: 191278 - DNA, 144 bp, Klebsiella oxytoca
atggaagtgagcgacaggcgattgaaatttctaaccatggaacagattttggcgccccgacctaaggtgccagtccataaggactggcgatccattaagttacaggaagtcgactacaaatcagagaagatgaaatttctctaa

SEQ ID NO: 191279 - DNA, 510 bp, Klebsiella oxytoca
atgaaatcatatctgtatgctggagtgttgttaacatctttagttcttgcgggatgtaatacttctttttcttcacctgagccagaatattatactcccccagtggttgattctgatattgcaaaaatccgtcttattggcgcaccaatatcatatgctatatatagcatagacagttctggacataaaaaaggcggctgggttgagaaacgcaaactttcttacgttttcactgatggtccaaccagagatattggattaccgaaagttactggtaagatgtatgaagaaaaatatttcgaaacttatttgaagccagatacagttacattgatctacaactcaactaccctttgtgtagtcaaggtcatgctggttcctgaaaaacaaaaaatttatgaagcgcgtataagttatacagataagtcagggtactgtgttctttacataaaggaagttgtacatgacaaatataataacatttatatcgagagtaatatcaagaaatga

SEQ ID NO: 191280 - DNA, 345 bp, Klebsiella oxytoca
atgaaaacaatgcttaaatgtataatcttgctcatgtgtgttatatcatcctcttgcgtttctatagataaaacaaaagcaagccgattaaatgagtattcagagacggagattaagaataaattaactattaatagtaccacacggaaagatgtacttatagcatttggccccccagaaaatactgagaactacaatgaagaaaaaaaatggatttatacatcagagattattaatcatgggctttatataatcatccccatatttaaagatagaaaacagtatctgtcacttgagttctctgataaaggattattgtcagactacaattatcaggaaaactaa

SEQ ID NO: 191281 - DNA, 744 bp, Klebsiella oxytoca
atgagtgaactgaaaattgataacccggctctgcggctgctcgacattcttgaacaaggtaaacgtcatcaggccgcaactacctgtcgtgaagtctggaaggcactgctgcaggcacagaatctgtctgagcaccagttgctttccaggctggcacgagtgatggaacttccagagcgaatagagcaggtgagggaagaccatttttcttcactacggaataaatccagctactggagggggcaggtcgagagtgcatttacttcacagtctttaaatgggcgatgggaaacgtttaaaaaccacatagacgaaagaaccctgtccgagctgagcctcttatccgatgtttttgaaacaaggggaactcacgccggcattgctgcagaagaaatcgaagcactgctggcaagaattacagaacttcgcggcgagatacgcagtgctgaactccccctcacgatgaaaaccatgcttctcaggcagctgtttcagattcaggaagcgctggaatcttacagtatttcaggaatcgagcccatcatggatgccgttcagtccacattaggacttgccgtcattgatcctgagtacaaacaagaaatcaaatcaggttcaggaagcaagtttggcgacagaatttcctctctgcttggggatgtcgcgaatgtcgtgactgtggccggtgcattaccgactctccctgctgcaattcaaacagctctgaattttcttggtaaatga

SEQ ID NO: 191282 - DNA, 1086 bp, Klebsiella oxytoca
atgctgagtcagctgacattacgattcccgaaaaaactcattgaaagcctgaagtcccgcgcctcggttgaggacacctcggtcaatgccctgaccgaacggctactcgacggcgcactgaagtccacctcgccggatgatgccttttttgccctgctggccgatcccgccggcacccgggaggcgctttaccgcaaggtggtccgcggggaaacgttcggccgccagacagtgaagcccgccgagctgcgctggctgtttgcgcaggcgtacgcggcctgccagaccgggagcgcctttatgagctggccggtgatggaggcgctgctgggcatcacctttgacgcactggtttacgccgccgataacggcatcccggttgacacctacaacataaaccgggcctttgatctgatgggcgaagactaccgcgccgaaacggacgcgttcatggcggccctgccgcactgcgtggacaccacctgggccgagttcctgctgcggccgcttaactccggagccctgaacctgaaggcctttcccgacgaggcgatcgcccgcatctgtacgccggcgcgcctgaaggctgtttttccgctggtcatccgggcgcagcagccggatccggagagtatgaagggatgggcggcggtgaccgggctggtcacggacgacgtctgcctgaccgcggaggtggctgacgtcatcctgcgtgcggaggtgcgcggaaaccggcagccgcagctgcccgggcaggcctggctggcgccgcagttcagcctgtttgtgaccgccgggcgggtgtcgctggcgcagggatgggacgtgttcagcgcgctggtccgctacatacaggcccgggccgggtccggggccacctacgactggaacgcgcgggacagtctggtgtcgctgtatatcccccgcggtgaaggagagaaggtgatcctggggctggacggcatccacatcgccatgacgacggaagagtatctggcgctggaggcgggattgctggcggcggtggcggcgccggacgtggcacctgtactggcggaactacgcgccctgtacggagatctgtag

SEQ ID NO: 191283 - DNA, 333 bp, Klebsiella oxytoca
atgactggcagcaggattataacgagtgccgtccacattcagcaccgaattatcagacgccatcagagtttgcagcacggtggcgaaatgaaaaatgtgaaggtaaacaaaccgacattactaactgatagttgtatcaaatactgggggcaggtcaggcgcagggaatataatgaagagagtacgaattcttcattaaatgatatgactccgactgagtttatccggagcttgcaaaataatgaagttctctgtattgattttggaccaaggtcacaagaggggaactatatagcaacagaattattaattattgttccaatgaaatattaa

SEQ ID NO: 191284 - DNA, 264 bp, Klebsiella oxytoca
atgctcaatcttggccttgataaagctttcttgaaaattcagattataatctcaattttaagtttagctatcaatatcgttttcatcggtaaaggtggcgcggtaataacggcttgggtttggacattgtccgaaatcattattactttatatcaagttatttatcttaggaatatgggtattaatattttgtctttcaatatgttattaccatcaagaattaaaggcgccttattttatgttcttaaacgcaatacgcactaa

SEQ ID NO: 191285 - DNA, 222 bp, Klebsiella oxytoca
atgaagcgtatttcactggagcgtaaggcagcaacactggcaaaactacttcccccctataacatgaccgtggctgctgttgcacagatggaaggaatatccgaagctaccctgtataactggcgtaatcaggctaaagcagaggggaaaccggtgccgggtaacagtaaaaacagcgaacagtggtcagcagaagcccgtttaccgcctgcacgccgttga

SEQ ID NO: 191286 - DNA, 834 bp, Klebsiella oxytoca
atgaaggagtttgagtggcatatcaagaccatccttgagacaaagatcaccgaaggtaaacgagcgctaatcgttgaagggaaaacggatgaactcgtttttactcagctcttaaaaaaagttgatcctcaatgggaaacaagatgggttcttgccgaagttggcgggaaacgcaatgtggtagaaatccttgcagcgcagccgacatggctgggcgttgttgatagagatgagtgggataatgctcaaattagccagaggcaacagcaacttcgtaacctgctagttttgcccagattttgcattgaaaactatcttgttgtcccgagtgagcttttacctggactgccacccaagcaaagagccaaactccccggtgagagcgcagcggcgatagaggctattacgtcatcgattaccgcaaatcttgaaagttggattcagtttggtaccgcatgggccattatcaacccgctttgggatgaactgcgattgctcggatttaaccgagaccttcttgatcctcaacaggtgattacagagcccgggtttttggcgcactgcgagcgttggcatgcacatctggatcctgcagtactgttacaaagatatcagagcaaactggccgaaatccgcgatttgccagttgaagaacagttacgcaccattgttcacggcaaaaaattttataaagccgttgtgaccccagctttcatgcaattacttactatgccgaaagcgatttcagttgatgtatggttcagagaaatgccggtgcctgctgaccttgactttatttggcatgaaatgaatttgcctgtagaagaaaattaa

SEQ ID NO: 191287 - DNA, 1089 bp, Klebsiella oxytoca
atgaaaatagcggcgatttatacgcagagtgttggcccgttgggcgatgcggaaattagtttcaaaaacgactggacgggagaggtggaggagaatgtcctactcaccggcccgaacggctgcggtaaatcgacgctgcttcgtggcacagctatcttgtgggatgcattagggtattggcttgatcataaaaagccaatgcctgcgagccattcggcaagaaagtggttagagcgctggggcacttttgccgtggttttctccgatctcaaatgttctaaccagtcccctattcgtgttggtttattcttcggaaatgaggacgttgttgatcaactcatcactaaacaaccggctagcacaacctggattggggaagttagtggggggaaaaagaaaaccagcctgatgactcaaaatggctttgtcacagattacgtgcttgatgagtggttacagacactttcaattactcgtgcacaagttgtacttggaagactcaattcaggtatgactctgactgttccaaatatcatctatctggatgcagaagaacgacgctggattactccaaagaacaatctttcttcgttagcgcctgatgacctaagtaaaaattggttagctacttactctccatccactgactggaaagatcagctggaagcctcgctgttcaatatgaaagcgacgctccccgatcagtatccggagatgatgaaaacgctgaatcagttcttctcagggaaagtcattgaagaagatattcagccagggcagcgtcagcaggtcaaacttgctaacggcgatactcatacgctggatgaactgagttccggtgagcatcaggtcttgatcatgctctttatggttcaacgctggcttcagccgggtggcgttgtattaatcgacgagccagatctacatcttcatccttctcttgtttcgcctctgcttgggacactagaaaacatcatccagaaaaagcatggccaactcattttgacttctcatgctactgatgtatggcagcgctacgaaagtctggggctgcgataccccctttctgttgaaaaggatgatgagtaa

SEQ ID NO: 191288 - DNA, 3645 bp, Klebsiella oxytoca
atgaatacgtcaaacatcaaaaaatatgccccggtggcacgtaaacagttccgcgatgcggttatgcaaaaactgactacgctaggcattaatgctgataagaaaggcaacctgcaaattgcacaagcaaccgatattggcgacagcgttcgttatggacagttctcgctggataaatcactggggtcacgccgcgagcgtctggccaagcgtgcagaaaagcagggctacgacgtgctggtggagcacattgcttacacctggtttaaccgcttctgcgccattcgctacatggaactgcatggctatcttgatcacggtttccgtatgctgtctcatgcaaatccgacgctggaaggtggttttgaggtgctggatcatgtgccggaagcggctgacgctctggggctggacaaatcacgcttggtggagatgaagctggcgggagatcgtgacgaagagctgtatcgcgaactgctgctggcccagtgccatgcattgcaccgtgcaatgcctttcctgttcgaagccgtcaatgacgatatcgaactggtattgccggataacctgactcgcaccgactccattctgcgtgggctggtggatattattcctgaggaggactgggaacaggtcgaagtgattggctggctgtatcagttttatatttccgagaaaaaagatgatgtgatcggcaaggtggtgaagagcgaagatattcccgccgccactcagctgtttaccccgaactggattgtgcagtacctggtgcagaactcggtgggccgccagtggctgcaaacctatccgggctccagccttaaaggcaaaatgccgtactacattgagccagcggaacaaactccggaagtgcaggcacagctggcagctatcaccccatccagcattgaaccggaaagcattaaggtgttggaccctgcctgcggctctggccatatcctgactgaagcctataacgtactgaaggccatttacgaagagcgcggctatcgtacccgtgatattccgcagctgattctggaaaacaatatcttcggcctggatatcgacgaccgtgccgcacagctgtctggttttgcaatgctgatgctggcccgccaggatgaccgtcgtattctggggcgtggcgttcgtctaaatattgtttccctacaggaaagtaatctggacatcgcagaactgtggaccaagctgaacttccaccagcaggtgcagcgtggcagcatgggagatatgtttgcagagggggcggcattgaccaataccgacagcgcggaatataagctgctgatgcgtacgttggcattgttcaccagtgcgaaaacgctgggatcgctgattcaggttccacatgaagatgaagcggggttaaaggcgtttctggatgggttgtatcgtctgactgttgagggtgatattcagcagaaagaagcggcggcagagctgatcccgtatatccagcaggcgtggatattggcgcagccctatgatgctgtggtggcaaatccgccatatatgggtgggaaaggaatgaacggcgagctgaaagagtttgctaaaaaactattcccggacagcaagtcggatctgtttgcgatattcatgcagcatgcgttttctttacttaaagaaaacggctttaacgcgcaagtgaatatgcagtcgtggatgttcctgtcgagctatgaagcgctacgtaactggttattggataataaaacatttataaccatggcgcatttaggtgcgcgggcatttgggcagatctcgggagaggtagttcagactactgcatgggtgattagaaaacatcacgcgaagtactaccgaccaacgttctttcgtttagttgaggggaatgaagaacaaaaacagaaatcattatttaagaaaactaactattttgataatgttgtggctgatgatttcagaaaaatccctggctcccctattatttatgatattgataaatctatttattcctcatttgaaaaattaccttcactgattgagacgcatcatgcttgttcggggttgcaaacagggaataatgatgttcacctgaaacaatggcatgaggtcaattatcatgggattttttcacaatatagcgacattaataatagagggagttttaaatggtttttccatcgtaaaggcggtgagtttagaaagtggtatgggaatattgactacattctgaattgggaaaacgatgggaaagacatccggaattctaaatctgctcgccctcaaaacttagataagtggtttttaaccggtgccacatggtcacacacatcgtcaacctcatttagtgcaagattattacgaaatatagacacaataaacgttgaaggaccatctgcgtttgcaaaagaacctgaacaactattgggatatttgtcgtcaaaattagcattttattttatgagtattttgagtccaactttacatttccttgttgggacggtatctcagttaccttataaaagtggtgttggggatgttaacgtaattcgtcgtttaatcgaaatatctaaaagagactgggattcttacgagacatcatgggatttttcaactaaccccttagttcagttcggatttcaacagactgcgttatctcattgctaccgttcaattaaacaaaattggcaagatagtatgtttgaaatgcaacatttagaggaaaaaaataacaaaattttcattgaagcatatggtttagagggagtgctagctccctacgtaaatttaaatgaagtaactttaaataataacccgcactttcgatatggtagtaaaaacaccgaagctgagctcaaaatcattcaacaaagcgatactatcgcagagcttatttcatatgctatcggctgtcagatgggtcgctactccctcgatcgtgaaggtctggtctacgcccacgcaggcaacaacggttttgccgaattagtcgctgaaggagcctacaaaactttccctgccgatcaagatggcattctgccactaatggattcagactggttcgatgacgatgttacagcgcgcgttaaagagtttgtctgcgtcgtgtggggtgcggaacatctgcaggaaaacctcgactttatcgccgaaagtctctgtttgtactcagtcaaaccgaaaaaaggcgaatcttcgttggatactattcgccgctatctttccactcagttatggaaagatcatatgaagatgtacaaaaaacgcccgatttactggctgttcagctctggtaaagagaaagcatttgagtgcctggtgtatctgcaccgttataatgaaggcacattgtcgcgtatgcgtaccgaatacgtagttccgctgctggcgcgctaccagggcaatatcgacctggtaaacgatcagcttaagagtgctgaatcgggagctgccaccacgcgcctgaaaaaagagctggatgggttgaccaagaagttcaacgaactgcgcaattttgacgatcgcttgcgtcactatgctgatagacgtatcactattgatctggatgacggcgttaaggttaactacggcaaatttggcgatctgctggcggatgtaaaagccattaccggtagcgcacctgaggagatttga

SEQ ID NO: 191289 - DNA, 399 bp, Klebsiella oxytoca
atgaaaaagaaagggaaaatagttttattgggtatgctgggtatagttttgtggggatattataactacacaacaaacaaagcatacatggagacgccggaatataaggataaaaaagctcgctcattctcaattgattatggccgagtcgtcaggtctgaaacgggacgaaagttttttgagagctatgaatgcactggcgattgttctgggcacatagccggttacgaatgggcacaagatcgcgaagtgactgaggactactgtttttcacttgaagcacctcgctcctttcaggaggggtgtgcaggggaagctggaagacaaagaattgcccgcgaagagtccaaagcagaagccgcagaatacagaggtaatggtagtagacgctgggaatag

SEQ ID NO: 191290 - DNA, 162 bp, Klebsiella oxytoca; identical to SEQ ID NO: 191273

SEQ ID NO: 191291 - DNA, 324 bp, Klebsiella oxytoca; identical to SEQ ID NO: 191272

SEQ ID NO: 191292 - DNA, 729 bp, Klebsiella oxytoca
gtgaatgcatcaacaacgtctctggtgaccctgaagccagcccgacaagcagcgctgcaggcggtcctgtcggtggaggaatcccgccgtctcggtgcgcgtctgcccgccatgccacacgtgcgcaccttcctgcgtctgctgaccgggaacagccgcatgaacacaaccgtggcgcagcgcattcccggcctcaactgggacccgaagcatcgcctgagcagcctcaaacaggtggaggaggcgcttgatgaactgattgccagccacggggagtgctgcccgctgccgctgccggtggatgttcaggctgaactgttcccggaggtgctgcacacccggactgaacgccggttgcagcgcagaaacatcgcgttcacccgcagcatgcgccgggaagaacggacgctggcatatcactggcggctgcggcagaacctgctggggcaggccgtcacggagctgaactttcagtccccggagacggtcagcagctggtaccgccggtgggccgaagagtttgacgcgcgtgagctggagtcggctttctggcactggcggtcgcggtttgcctcgctggcctccctggactggctgcgtgacgctggtgagccgctgtacggggtcattcatgaaatcggcttcattgtgcgtgacaccccggaggctgtccgtcaggcggagcgctggcaggtgccgaacaagctgacgaaccagaggcgcggatga

SEQ ID NO: 191293 - DNA, 432 bp, Klebsiella oxytoca
atgcgcaatatcattacccccgaagtactgaaaaccatgatcccacaggaatacgaagactggcgcgaaggaggggaggatttgcgccgtgaactgacccatgccgtgatgcgtgacctgaactgcccgaataactgggacatgaacggggagtaccgcagcgagttcgggggcttcttccccgtacagatccgcttcacgccctctcacggtaactttcatctcgccgtgtgcagtcccggcgatatctccccggcctggatggtggtgtttgtccctgccagcggtcgtccgttctcggttatcagcaccctgtctgactggtcgccggaagctatcagccacacgctgagtctggttgcccggctcgatgctgatggctacagtcaggccagcatcatcagcatgctggtcatggagggcgcacagtga

SEQ ID NO: 191294 - DNA, 2001 bp, Klebsiella oxytoca
atgtcagtgaccgagtctaaaacaaaaacccccgcgaaaaccagcaaaaaagcggtgaaaccagccgaatccgccgccctgaaagccgcgcttgcggccgcacagattgagatggtgccgctgtcggcactggtcaaatccccgctgaacgtccgtactatcccgtatccgccggagagcgtgcgggaaatggctgactccattctcgcggtcggcctcattcagaatctggtggttcataccctgccggacggactgtcgggcgtcgcagcgggcggtcgtcgtctggcggccctgcagcttttacagcgcgagcagcgcatcgatgccgggcatcaggtcatcgtgaagcgcgtcagcgacgaactggcggtggtggcttcgatggtcgagaacaacaaccgggtggcgatgcacccggcagagcaaatcaccgggttccgcgcgttgtctgagcagggcaagactccggcgcaaatcggggaccagctgggctacagttcgcgccacgtccagcgcatgctgaagctggccagcctcgctccggaactgattgccctgctggcagagaacacgctcgatgtggagcagtgtcaggcgctcagtctggaaagtgacccggcgcgtcagatacaggtatatgagcaggtgaaggcttcatacagcaacgctccggcccatctgctgaaacgcgccatcacggacaccgaaatatcggttcgcgacgcccgctttatgtttgtcggtcgcgaagcgtatgaggctgccgggggcaaagtgcgtgaggacctgttcagcgctcaggagggggacggaacggcagacggggtgctggtcgggcgtctggtgcaggagaagctggagtccgccgcgctggctgttgaaatgcaggagggctggtcatggtcactggcacgggaaggggcggtgcggaactacggtgacgaccgggaacattatctggtcctgccggagccggagggcgaactcagcgctgacgagcaacagcgtctcgatacgctgtacgccacgcaggaagccactgaaacgtttgaggacgaagccgccattcaggtgctgattgacgagattgaagatgcagcatcgatccgggcatggacaccggagcagaaagcggccagtggcgtggtggccagcctgagtgacggcgagcttcgtatccagcgcggggtgcagaagaaggtgcaggaggcggtcgctgacggacaggagtgtacgggcggtcaggcttccgtgcatgtggtgagccgcagtaccccggatgcggcagagggtatcagcgtaccgctcctgaaaaaaatgtcgtccgagagaacgctggcggtgcaggcggaactggtacggcagccacagaaagccgtggccctgatggtctggcggctgtgcagttgcgtgttccactactgtatcaccacccggcacccgttcgtgatgcgtcttgaggtccaccacagcagcctcaccagcgaagccccgacaggagaaaacggtcaggcatggcagtctctgatgcaggagaaagcccgtctggaggcgctgctgccggagggctggaagaacgatttcaccaccttttttgccctcgacggacagaccctgatgtcgctgatggccttctgtaccgcctgttcggtggacggcgtccagacccgcgaacacggacatacccgccgcagtgaccttgacggtgtcgaggcggctctcgggttccacctgcgtgactggtggcagccaacggcggataacttcctcgggttactcagcaaaaatcaaattgtggcggcgctgaaagacgccggactgaacggggccgcctcagatgctgaaaaaatgaagaaaggcgatgccgccagtcatgccgaacagtggctctccgggacccgatgggtgccgggatggatgcagtccccggatgctgcaacgccggaagaagcaaacaccacgactgacacagacgaacccacctcacacgctgcctga

SEQ ID NO: 191295 - DNA, 234 bp, Klebsiella oxytoca; identical to SEQ ID NO: 191271

SEQ ID NO: 191296 - DNA, 360 bp, Klebsiella oxytoca
ttgtcgaagaacaccacgataacaacgcatgatatcagcgaaccctggtgggggctaagacgcagtgtctccccgtgttttggggcccgtctggtccaggagggaaatcgcctgcattacctggctgaccgggcgaactttgatggtaagttctgtgatgcggatttgcgccatcttgaccagtctttcccggtactgatgaaacagctggagttaatgctcaccagcggtgaactgaatccccgtcatcagcacggcgtcacactgtatgcaaaaggtctggcctgcgaggccgatacgctcggttcgcatggctacgtttatatcgcgatttatcccactcccgtcaccacagaataa

SEQ ID NO: 191297 - DNA, 696 bp, Klebsiella oxytoca
atgagtgatatcccggcacagcagttcagccacaaccatcctctgttaacggtgcgcggctgccgcgccctgctggacgtgctggcctttgaaggcgatgaggccctgagcgaaccgttcagctaccagattgaattcaccagcgccgacaaaaccctcacgccgcagcagatgctgacgcaggatgccgccttcaccctgcaggccccggttgaccagggcttcggggtaaaaatccggcagccggtgcgcacgattcagggcgtggtgacggcgtttgagcgcctttccgcctcccgggacgaaacgcattattccctgactctgcagccgcgtctcgcgctgctctcccggagccaccagaaccggatataccaggatatgtcggtgccggatatcgtggagcatatcctgcgcacccgccacggcatgcgcggggaggactttatcttcacgctggcgcaggcgtacccgcggcgcgagcaggtgatgcagtacggcgaggacgacctgcgctttatcacccgcctgttgagtgaggtgggtatctggttccgcttcaccgccgacacccggctgaatattgacgtggcggagttttacgacgaccagcggcacgacggcaggggctggttctgccgtcggtgccgccctccggccagcacgacagcgggacggaatccgtgtgggcgctga

SEQ ID NO: 191298 - DNA, 792 bp, Klebsiella oxytoca
  misc_feature (721)..(730): n is a, c, g, or t
atgcaactcttaaaccgacagcaggagctcaatatagctaaatcaagcgcgattggtaatgtaagaattatcgataatgctgtgtcacaaccgaagccagtgaaacctaaaaaaatactaattttactcgttggtttttttatagggggaatgatatcagtagcactggtaattctacgcatatttttacgtcgaggaattgaaaacccagaacagttagaagagataggcattaatgtctatgcaagtattcctgtatccgagacctttgcgaaaaaagttatacaagcgccaagtttacgcaagagaagcaccccagagtatcaaagttttcttgcgctggaaaatccagcagatttggctatagaagcgattcgtggtttacgcaccagtctgcacttcgcaatgattgaagcgcggaataacgtactgatgatttccggtgccagtccaaatgcgggtaaaacttttgtcagtacaaatcttgctgcggtgatttatcaggctggaagtaaggttttatttattgatactgatatgagaaaagggtatacccataaattatttaattgtagtaatgaaaatggtttatcagatgttttatctggcaagatagatattactaaggcgatccaaacggttccatctgtgggattcgattatatttctcgaggaatagcccctcccaatcctgctgaattgttaatgaatcgtcgatttnnnnnnnnnngacatgggccagtcaacattacgatatggttatccttgacacacctcctatcttggcagtaa

SEQ ID NO: 191299 - DNA, 339 bp, Klebsiella oxytoca
gtgaatgatccgggcacccggttgcttctgcaggaacgcttccgccagcaggccaacaatataatacccttcgataaattctgcatcgttatcaaacataaagcagcggtcgaagtcaccgtcaaaggcgatacccatgtcagcgccgtgctcgcgcaccgcatccgcggtgtcctgccgacactccggcagcagcgggttcggaataccattcgggaaattgccatccggctggtgatgcaccttgataaaggtcaccggcacgcctgccgcaataaaacgtttttccacttcatcaatcacatgaccggcagcgccgttgccggagttcaccactag

SEQ ID NO: 191300 - DNA, 354 bp, Klebsiella oxytoca
atgccacattcacctgaagataaaaagcgtgccctcagccgggtaaggcgcatccgcggccaggttgaagcgctcgagcgggcgctggaatctggcgaaccctgtatgaccattctgcaacagattgcctctattcgcggcgccgctaacggcctgatgggggagatggttgagattcatctgcaggacgaactggttagcggcgaaacgacgccagaccagcgcgccgccagaatggcggaagtcgggcatctgctacgatcctatttaaaatataatcaccacgaggaagagagatatgaaatcacgtgcagccgtcgcgtttggcccaggccagccgctttcaatcgttga

SEQ ID NO: 191301 - DNA, 1260 bp, Klebsiella oxytoca
atgtctcttaacgactcaaaaatccgcaacttaaaaccatccgcaaaaccctttaaagtttctgattctcacggtctgtacctgctggttaatccaggtggttcacgtctctggtatctcaaataccgtattaatagaaaagaatcccgcctcggcttaggtgcctaccctgatgtctctctggctgacgctcgtcaacaacgtgatggtatccgtaaattgctggcgcataatatcaacccagcacaacagcgctccgctgaaagagccactgcgttgccagaagaaaccttcaagtctgttgcactgagctggcataaaagcaaccgtacatggtcagagaaccacgcaacccgtctgctcgccagcatgaacaaccatatttttccaatcattgggcatctacctgtctctgaactaaaaccacgtcactttatcgacctgctgaaaggcattgagcaaaaaggtctgctggaagtcgcagcacgtacccggcagcatatgtgcaacatcatgcgtcatgcggtccatcagggattaatcgataacaacccggcggcaaaccttgatggagtgacggcacctcttgttagacgacattatcccgccctgccgctggagcggctgcctgaactgcttgaacgcattgaggcatatcatcaaggccgtgaactgacccggcttgctgtcctgctgacgctgcatctgttcattcgctccagtgaattacgttttgcccgctggtcggagattgatttcaggaaccgggtctggacaattcctgccactcgcgaggccattgcaggtgtgcgttattccgggcgcggtgccaaaatgcgcactgctcacatcgtgcccctctcagaacaggccatcgccattctgaaacggattaaggaaatatccggcgtttatgaactggtcttccccggcgaccataacccgtacaagccgatgtgcgaaaacacagtcaataaagcactgcgcctgatgggctatgacacgaaaatgaacatctgcggtcatggatttcgggcaatggcatgcagcgccctgatggagtccggtttatggtcacaagatgcggtggaacgacagatgagtcatcaagagcgcaacactgtgcgtatggcatatattcataaagcggagcacttggaagctcgaaaagcactgatgcagtggtggtcggattatctggattcgagccgtgaaggctacatgccgccgtatatccgggggaaaagaaaacagccataa

SEQ ID NO: 191302 - DNA, 429 bp, Klebsiella oxytoca
atgttgaacaaagttaatgctgtttttacccgatacacagatcatcctgattttggcaagcttctgctccggcttacttttggcatactaatgttgtttcacggtgtggcaaaagtaagccatggggtgggctggatttctgacattctggagaacaaagggcttccgggtttcatcgcctatggtgtgtacatgggcgaaattatcgcgcccattcttatcattactggctggtttacccgccccgcagcattcatttatgccttcaatttgctggttgcgactctgctggttggtacggggaaatttttcacaatcacggatgtaggggcatgggggttggaaagtgaagctttgtatttcttgggcgggttgtcaattatgtttctgggggcaggaaaataccgactgggtagcgggaatgaatga

SEQ ID NO: 191303 - DNA, 1161 bp, Klebsiella oxytoca
atgaagaaatatcgaatccggcctgtagccgttacactcgttgtgtcgctggcattggtggcatgcaaacaagaggatgctggaaatacagctacggcagataaaaaactggacgtcggggttgtaactatacaatcccaaccattagctttgttaaccgaactcccaggacgcaccactgctgtcaatcgggcagaagttcgcccccaagtcagcggcgttattcttaagcgtttattcaaggaaggtagtgacgtcaaggcaggacaacaactttatcagattgatccggcaagttttcaagcaacccgtgataaagctgcagcaacgctgttttcagcgcatgcacaagctcaacgcgacaagcctctcgctgcagctaatgccattagtcaacaacagtacgtgtcagatatagcatctgagcgcgaggccgcggctgatctgaaaacgacagatatcaatctcaattatacgcaagtccgtgccccgttatccggtacaattggccgctcatcggtaaccgaaggggctctggttactgatgggcaaagtactgcactggccacaattacccaactcgatcccatatatgttgatgtaacccaatcttatggcgacattttacgtatgcgccgtgagttcgacagcggtcagctgacacgtgttggtgataatgcagtaaaggtaagcctgaccctggacgatggatcgacctattcactggccggccggcttgagttttccgaagtgtctgttgatgagggcacaggttctgtcacattacgggccaccttccctaatcctaagcatcttctgcttcccggtatgtttgtgcatgccaagctaaacgaaggaactaaccagaatgctattctggttcctcaaaaggctatcagtcgtgacagtcagggcaatgccaccgtcttcgtagtagatggtaatgatcaggccaagcagataagcattaccactagccaaatgtacggcggtaattatctggtcacaaatgggctatccaatggtgacaaagtcatcatcaacaacctgcaaagcgtcaaagacggtcaaaaagttaatccgactgaagcccaaccatcaagctctaagaaaaagcagagcagcggaaatatgtcattcattgaatctgcagagcgctga

SEQ ID NO: 191304 - DNA, 3153 bp, Klebsiella oxytoca
atgtccaaatttttcattgatcgacccgtccttgcatgggtggttgctatcgccatcatgcttttcggtgccatttgcatctttcagatgtctattaaccagtaccccagtatcgcaccggtacaaatatcagtgacggcaacctattctggtgcctctgcacagactgtacaggacacggtggtaaaaccgatagagcaagagctcaccggactggataatctacgttatatcaccagtcaagccaacaatgatggcagtgccaccattatcgtaacgttcaatcaggggaccaatcctgatattgcccaagtgcagacacagaacaaggtgtcattggcggagtcgtcccttccttctgccgtcactgatcagggtctggatgtgcgtaagtaccagcaaaactttttccaggtcattagtatttcatcaaaaagcgggaggctgagtagtgcacaactgggcgacctactcgtttcaaatctacaggattccattgcgcggacggccggtgtaggtgactatcaggtcatgggggctgaaggagccatgcgtatatggatggatcccgctaaactgcacaagtacaacctgatgcccagtgatgtggtcaacgccattgatgcacagaacgtccagttgtcatccggtcagataggtggcgcgccgacccttccgggtacgcaaacaaatgcgactatcatgagtaaaagccggtttaccaacccggatcagtttaaaaacatattgctgaaagaaaatacggatggttcacaggtcagggtcaaagatatcggcacagtggaattcggctctgaaaattattccatatcatcaagttataatgggcaaccctctgccgggatagcactgcgattggcttctggcgccaatgttttggaaaccgtcaaagcggtggagaaaacgattgaggcacatctatccagtcttcctgatgatatcgaagtccagttcccgtatgacaccgcaccggtaacatccgcctctatcgaagaagtcgtcaagacactccttgaggcgatcgcactggttttcctggtcatgtacttgttcctgcaaaatatccgggccacgctggttccaacgctagttgtccccgtcgtgttacttggcaccttcggtatacttcacatctttggttataccatcaatatcttgaccatgttcgggatggtattagccatcggcctattggttgatgatgcgattgtcgttgtcgaaaacgtcgaacgcgtcatgcaagagaaaaaactgggggcccgagaagcaacaagggaatcgatgggggaaatccagggagcccttgtcggcattggtatcgtgatcactgcagtcatgctgcccatggccttcatgagtgggtccaccgggattatctaccgacagttttctatcaccgttgtgtcttccatgctgctctcggtggtgatggcattaatctttacaccggcgctctgtgcttctctattgcgcgcaaaagatgttcagggcgagagtaaaaccggtttctttggctggttcaaccggttagtggaaaaatccactaacggttatgtcagcagtgtcgcgggtgttattaaacgacgtattctgttttcggcaatttatattgtggtccttgctgctgttatcttcttttattcccgccaggcaaccaccttcctccccgatgaggatcagggagtagtcatggttcagctcacgcttccccccaatgcctctgcagaaagaacccaacaggtgattagcgatgtcaccaactatgaactcgaacatcataaggatgccttgagttctgtcttttcagccaatgggttcagttttgcaggtcgcgggcaaaatatggcaatcgggtttataaaactgaaagactggagccagcgaacagagtctgccgatcagatagccagtgccaccatgcagcacttcgccaattacaaggatgccaaaatactggccatgattcctccggcggttatggagttggggaatgccacggggttcgacttcttcctattagacagccaaaacaagggacataatgcgctaatgaacgcgaaggatcagcttttagctctggcagccaaggacccccgcctgtcccaagtgcgtctcaatggtatagaagatacaccgatgtaccagatcaatattgatgatgaacggcttcaagcccttggtatttcgatctctgatgtaaacgatacattacaggatgccttggggggcaactataccagtcagttcacctatgagaatcgcaccaagaaggtgtatatacaggggcgcgcccggggacgtgtgacgccggaagatattaaccagtggtatgttcgcaatagcagcggcgacatggtgccattctccgccttcgccagtggacactggagttatggttctcctgaccttcatgctttgaatggtactgcgggtgtggaaatccagggctccccaggaaagggttatagctcaagtgatgcaactagagctattgaagagatagtgcaaaaactgcccgggtattcattacagtggtacggtctctcctatgaggaacaggcggcaggttcccaggcgccaatgctgtataccctctccattatcgtggttttcttggctcttgcagggctctatggcagttggtcgattccaatttcgattctgatggttgtgccattcggcgtgttgggtgccttactggctattctgttccggggcattgacagcgatattttcttcaacgttgggctgctcattacagtggggttatccgcgaagaacgcaattctcattgtcgaattcgccaaagatattcatgagaaagaaggcaaaagtttgttggacgccgcattgcaagcttcccgtattcgcatacgtccgatcataatgacatcaatggcatttattctgggcgtactgccactctcttttgcttcaggtgccggtgcaggtagtgaacattccatcggtacgggggttgtgggaggcatgatcgcggccaccttccttgccatcttttacgtaccacttttctatgtgctggtcgtgagcttattcaatcgccgtaaagagaaaagtataacccaagccagcagtcagcttgcggcggaggactcccgaaatgatcaataa

SEQ ID NO: 191305 - DNA, 1422 bp, Klebsiella oxytoca
atgatcaataatcacctgctgcagcatatcgtattggcaagcgccatgacgttggcactgagtagctgttccctggaaccgaaatatgaacaaccctccgcgccggtgccaggccagtatcctggggaacaagggaagaacggtaatgtccagaaggtcgtggatatcggctggaaaagctattttattgacccagccatgcagcagttgatcggtattgcccttgccaataaccgggatctgcgtatttcagcattgaatgttgaaaaggccgcggcacagtttcgtatccagcgctctcagctctaccctgcgttggatattaactcatcgcttactggccaacatttacccaaagggttatatcaaacccagacctctgggccggtgacttatcacgacaacagcgccaatgtggggatcagttcctgggaaattgacttctttggacgcctgcgcagtttgaaacatcaagcgttagaaacgtacctggctcaagttgccacgcaacgttcggagcgaatcagcctggtggccgaagtcgccgagggatatatgacgctcgctgccgacaatagcctgctggatcttgcgcaaaaaacctataatagccagctcagtacattacgcctggagcagctcagtttgcagcatggcaataccaatgcccagaacgtggctcagacagaaatgacggttcagtcggcagcggtcgatattgcccaataccagcgtcaggttgcagacgatattaacgcactacagttattgttaggcgcaccaataccgcacgctattattggcaatgcgaaattggaaaatgttgccgctttccgcgaactccccgcaggtttaccttcagatctgctgacccaacggccggacattattgctgcggaagagacactgaaagccgccaatgcgaacattggcgtggccagagcagcctttttccccagcatcagtctgacagcgacggccggcaccgaaagtggttcactcgggaacctgtttgccggacatcagggagcctggaccttcgaaccctccctgaatttaccgatcttcgattggggctacaatcaggccaatttagatgtcgccaaaattgaaaaacgcagcgatatcgcaagttatgaaaagacgatccagacggcgttcagagaggtagccgatgcccttgcggctcgctcgacctacgcagatgaacttaaggcccgggaagaaaaccagtccgcaagccaacgcaattttgatttggctacactgcgttatcatcagggcgaagatagctctctggacgtccttgttgcgcaacgttcattatacagtgcgcagcagactatgttatcgacacgactttctgcattgaaccagcagataaccttatacaaaaccctggggggcggctggaaagagtaa

SEQ ID NO: 191306 - DNA, 1185 bp, Klebsiella oxytoca
atgatgaaagatgtttctatcaagcgcatcgcaccagtactcggcctactcggtgcgatcggaccactttcaatcgacatgtatcttcctggtatgcccctcatcgcggccgatcttggcgttaatgagggcatggttcagtatagcctcatgtctttttttattggcctgatgattggtcagttattttatggtcccgcatcggataaattcgggcgtcgatcaatgatatttatagggttaagtatatttaccgtagcatctatagcatgctctctgggaaatactgccgacgaattgattgtatggcgctttgctcagggcttcggaggttccatcggcatggttatcgctttagcgatagcacgtgatctttttgttggccgtcaggcggctacactcgttggtgtaattatggtggtaaccggcgtcgcgccaatcattgccccactgctcggaaccgccattctgaaaatacttccgtggccccttctttttgttttaatggcgctattcagcgcattttgcttattcctggtagcagaacagcttcccgaaacacgcacaaaattattacggaaagaaagtaacccacttgaagcagtaaaaaactatgggcgtcttctctgcaaaagaaacttcatagcatacgcgggtacgcaagcttttgcccaagcgggctttctagcctatcttgcaggatcatcttttgtatatatatcggtctataaagtttctcctgtgatatatagtctactttttgcgttaaatgctattggcatgatcggcggggcccaactggcaccacaacttatgaaatatttcaatcctaaaacaattatccgaggcgcattgttggtctatacaattgtggcgattctgctagtgatgctgcaaattagcggtagtgccagacttttatgggtagctctattgctttttctagtggtatcttcactgggttgtattgtcccacttagtgggacactggccctcgagtcatatggcaatatttctggtacagcatcagcattgatcggggcgctgcaatttggtgttggagctattgcttcattttttgttggtgtagctgctgatggaactgctctgcctatggtagcaacaattgcgcttagtgggtttgccgcatgttccatcgcgttttgttgttttcctcatagataa

SEQ ID NO: 191307 - DNA, 258 bp, Klebsiella oxytoca
atgaaaaaattattaaaaatgacgctgctggccctggccctgacgcccggcatggcgctagctcagcagcagttttcctcccctgatgaggccgcaagcgcgctggctgaggcaatcggcaggcatgatgaatctgctctcaacgagctgctcggcgatagctggcagcaatttttaccgccggatggcatcgaccctgacgccgtcgctcgctttcagcgtgactggaaggttggccaccgtatcgttctgcagtaa

SEQ ID NO: 191308 - DNA, 1893 bp, Klebsiella oxytoca
atggctatcgaaatcaaagtaccggacatcggggctgatgaagttgaaatcaccgagattctggtcaaagttggcgacaaagttgaagctgaacagtcgctgatcaccgtagaaggcgacaaagcctctatggaagtcccgtctccgcaggctggcgttgttaaagagattaaagtctccgtcggcgacaaaaccgagaccggtaaactgatcatgattttcgattccgccgatggtgcagcagccgctgcacctgcgcaggaagagaagaaagaggccgctccggccgccgctgcgcctgcagccgcgagcgcaaaagaagttcacgtaccggatatcggcggtgatgaagttgaagtcactgaaatcatggttaaagtgggcgacaccatcgccgctgaacagtcgctgatcaccgtagaaggcgataaagcctctatggaagttccggcgccgttcgcgggtaccgtgaaagagatcaagattaacaccggcgataaagtctcaaccggctccctgatcatgatcttcgaagtagcgggcgcagcgcctgccgcagctccggcaaaagcggaagccgctccggctgctgctgcaccggcagcttcgggttctaaagaagttcacgttccggatatcggcggtgatgaagttgaagtcactgaagtgatggttaaagtgggcgataagattaccgctgaacagtcgctgatcaccgtagaaggcgataaagcctctatggaagttccggcgccgtttgcgggcaccgtgaaagagatcaaaatcagcaccggcgacaaagtctcaaccggctccctgattatggtcttcgaagtggaaggcgcagcgcctgcagcggctccggctaagcaagaagccgctgcacctgcggcagctccggctcaggcggcgaaacctgctgcagctcctgctgctaaagcggaaagcaaatctgagttcgctgaaaacgacgcgtacgttcatgcaacgccgctgattcgtcgcctggcgcgcgagttcggcgtcaacctggcgaaagtgaaaggtacgggtcgcaaaggccgtatcctgcgcgaggacgttcaggcttacgtgaaagaagcggttaaacgcgctgaagctgcgcctgcggcaaccggtggcggtatcccgggcatgctgccgtggccgaaagtggacttcagcaagtttggtgaagtggaagaagttgaactgggtcgcattcagaaaatctctggtgctaacctgagccgtaactgggtgatgatcccgcacgttactcacttcgacaaaaccgatatcaccgatctggaagcgttccgtaaacagcagaacgccgaagctgagaagcgtaaactggacgtgaaattcactccggttgtcttcatcatgaaagctgttgccgctgcgcttgagcaaatgccgcgcttcaacagctcgctctctgaagatggccagcgtctgacgctgaagaaatacatcaacatcggtgtggcggttgataccccgaatggcctggtggttccggtctttaaagatgtgaacaagaagagcgtaaccgagctgtctcgtgaactgaccgtgatttctaagaaagcgcgtgatggtaagctgaccgctggcgaaatgcagggcggttgcttcactatctccagcatcggcggcctgggtactacccacttcgcgccgatcgttaacgcgccggaagtggctatcctcggcgtgtccaagtccgcgatggagccggtgtggaatggtaaagagtttgttccgcgtctgatgatgccgatctctctgtccttcgaccaccgcgtgatcgacggtgctgatggtgcgcgctttatcaccatcatcaacaatatgctgagcgacattcgccgcctggtgatgtaa

SEQ ID NO: 191309 - DNA, 927 bp, Klebsiella oxytoca
atggagcttcgccagctacgctattttgtgcgcattattgaaaccggcagtatgggccgcgccgcgcttgacctgaatatcggcgtctccgcgcttagccaacaaatggcgcgcctggaaaatgaactcgccattcgcctgctacaacggacgtctcgcggcgtaatgcccaccagcgctggcctcgccttctattcacaggcgcagctggcactacgtcacgctgatgatgcggttcttgctgcgcgcgaggcgcggctatctggccacgtcagcgtcggcatggcccccagcaccgcctctgtgctcggcgtaccctttatcaacgcgatgcgcgaaagctatgccgacgtccgcctgcatctggtagaaagtctctccggcaaccttgaacgcatgatcaacacccgtcagctcgatttagcgatcgtgttccagaaggagaagcttgtgcgctggagcgccaggccgattcttgaagagcgtctgtttctgattggcacccataaggtactggctccccttcccgacgatagcatctcgccggaccagctctccgctgtcccgctgattatgccaagcctggggcatgggttgcgcggcaggctggaggcgatgtgccaggagcatgcgcttaatgtcgatgtggtcgctgaaatcgacggtctggccctgctaatgcgcgccgtgcgcgacggcctcggcgccactttgcagccgggagcagcgatttctcatctcgacggcgagcccctgagagtgatcggcatcaacaatccgatactcagtcggcctaattttctcgtcagtctttccgatgatgaattgaccccatcgggtctcgctgcgcgagtcatactggcaaaagtcatgcgtcagctggtcgaatctggccgctggcctggcgccagcctttacgcacactaa

SEQ ID NO: 191310 - DNA, 336 bp, Klebsiella oxytoca
atgagtaaagtgattgattcgcttgaaaaggtactccttccgtttgcggtcagaataggaaggcaacctcacgtcaatgcaattaaaaacggctttattaagttaatgccattgacgttagccggggccatgtttgttttaattaataacgtatttttgagctttggcgacggttcattcttttattcaatgggcatccgtctggatgcctcgacaatcgaaacactgaacggttttaaagctatcggcggcaacgtttataacggtacgctaggtattatgtcgctgatggcgcctttctttattggttcggctctaaataactgttcggaatag

SEQ ID NO: 191311 - DNA, 312 bp, Klebsiella oxytoca
atggagctgcttgaagcgcggctttccgccgctgaaagccgggcggcggtggccgaaggccaggtgcgggatttacaggcgaagcagaattccgctatacaggcggcgcaaaccagcgtagcggttaaaagcatggccccgaccgctgagagtaaaaaaaatatttcagttcctgagctgaaattatccggctatggcgatctgaaaatctacggcgatgtcgaattcaatatggatgcggaaagcaaacatggcttgctggccatgaccaatgccgacgtagcgatacaacctatgataagtgggatttaa

SEQ ID NO: 191312 - DNA, 537 bp, Klebsiella oxytoca
atgacgaaagccaaagactttgccgattacgtcgataagctgatgactacggacaaacgaccacgaaatttcgtcaatgttgaattttcacgccgatcagctgcttcttatcagatgtatgataatccaccactcagactggatggacataaattcaccaatcttaatgtgatgcagatttattttcctgttggcgtggaaatgcgtaactgctggattaaggcggaagaaaaaccaatgaagtggataagtgtgagtttttctgatgcgaatttatctggcatgagaattgagggcggcctggaaggcagtcggtccagattttcatcgattggattttcatctgtcaacctgatcaacgcaggccagtttatcgaaaatcttatagcccagtggccggtgcagatgccggaaagcaatgcttccgtcagggtaatcataaacggtaattttttcacctgctatgcgcgaattttgttcagtgggttcaatgatatacatcactttatcatactgaaaagtcagtgctttcgataa

SEQ ID NO: 191313 - DNA, 621 bp, Klebsiella oxytoca
gtgctacaggcggatgcgtacgccgggttcaacgagctgtaccgcgatggccggttaacggaagccgcctgctgggctcacgcccgccgtaaaatccacgatgtgcacgttcgcacgccgtcagccctgacggaggaagccctgaagcgtatcggcgaactgtatgccgtggaggcggaaataagaggaatgctggcggaacaacggcttgctgaacgtcagcggaaaacgaaaccgctgcttagtaccctggaaagctggttgcgtgaaaaaatgaaaacgctgtcgcgacactcggagctggcaaaggcgttcacgtacaccctgaaccagtggccggccctgacgtactatgcagaaaacggctgggccgaagccgataataacatcgctgaaaatgcgctgcggatggtcagtctgggtcgtaaaaactggttgttcttcggctcagaccacggtggtgagcggggagcgttgctgtacagtctgatcgggacgtgcaaactgaacggcgtggatccagaaagctaccttcgccatgtccttgacgtcatagctgactggccggtcaatcgggtcagcgagctgctaccctggcgcatcacactgccaactgaataa

SEQ ID NO: 191314 - DNA, 1389 bp, Klebsiella oxytoca
atgggcaaccgcgcccgcggctatattccgcccgaactctgggaccacgggattaacgccgggctgctgaactacaacttcaccggcaacaacgtccataacgacatcggcggcagcagcaactacgcgtacctgaacctgcagagcgggctgaatctcggcgcctggcgtctgcgcgataacaccacctggagctacagcagtagcggcagttcgtcggccagtgaaaacaagtggcagcacgtcaatacctggctggagcgcgacatcaccgcgctgcgttcgcgcctcacgctgggcgacagctacaccaacggcgacgtcttcgacggcattaacttccgcggcgcgcagctcgcctccgatgacaacatgctgccggacagccagaaggggtttgccccggttatccacggcattgcccgcggcaccgctcaggtgtcggtgaagcagaacggctatgagatctaccagagcacggtgccccccggcccgttcaccatcaacgatctctactccgccggcaacggcggcgacctgcaggtgaccatcaaagaggccgacggcagcagccaggtcttcaccgtcccttattcgtccgtgccggtgctccagcgcgagggccatacccgctatgcggtcaccgccggggagtaccgcagcggcagcaatcagcaggaaaaaccgaaatttttccagagcaccgtaatgcgcggtcttccggcgggctggaccctgtacggcggcacccagttggcggatcgctaccgcgcctttaacctcggcgtcggcaaaaatctgggccaactgggggcgctgtcgctggatatcacccaggccaacgccaccctgcccgatgacagcgagcatcaggggcagtcggtgcgtttcctctataacaagtcgctgacggataccggcaccaatattcagctggtgggctaccgctactcgacgcgcggctatttcggcttcgccgacaccacctataaccggatgagcggctacaacgtcgagacccaggacggcgtggtgcagatgaagccgaagttcactgattactacaacctcgcgtacaacaagcgcggcagggtacagctcagcgtcacccagcagctggggcgtaccgccacgctctacctgagcggtagccaccagacctactggggaaccagcagcgccgaccagcagctccaggccgggcttaacgccgccgtcgacgatatcaactggaccctgagctacagcctgaccagaaacgcctggcagcagggccgcgaccagatgctggcgctcaacgtcagtatcccgttcagccactggatgcgttccgacagtactccgcctggagaaacggtaacgccagctacagcatgtccaacgatctga

SEQ ID NO: 191315 - DNA, 927 bp, Klebsiella oxytoca
atgctaagaaaaaacaccccttcgagcatcatgaataaagaggcagactggttaactataaatgaagctataaaactagctagtaagtcgaaaggtagaaaaatcaaagccagtgatatctatcgtcatgcattaagcaaaaatatttatctttcaatttattttcaatctcccatttttatacgaaagataaaaacaataaaaaacaaactaaagttaactcctcttaataacccctccatggctagactttgttttcttgaaggtcattgttttttaaataatcggaagtgtattctcagtactaaaggaaagtatatttgctcaaggcaacggattatagatacaagtctagatggttacgaatacattttagcacaaaaatacctagctctgtcattaaatattccattaccaataactggagcaaatgatgttaattatggcatcacggtaagattagctggggaaatataccaaatctttgaaagaacaacctggtcggagagagtgaaatatcaactcagtaggtttcctagtactttatcgcacgaaataacaaatcaactagcttacgaaaaaacggacagattttcttcaaaaggatatttcccccttcatgacttgccaaaggatgcttgctttgtcataaggtatactgaatttgaaaaacttatcgacctatgcaataagaatgtaaaagagccgacttccacaactcgcatatctactccactatctcgattattctggcttgcctgcaaaaataatgaaaccattcgccctttaattaaacagccatataagttgttgtctatatttgaacagtgggcttctaatgatggaatcacggatcgactaagtggtgatacgcttaaatcagcactggaacgtggttccccttcctctacatctttacccggctaa

SEQ ID NO: 191316 - DNA, 585 bp, Klebsiella oxytoca
atgatcccatctattaattataccatcctgaccgatgcattgcatgcgctgaaagaaggcaaccttcgtcactgcgaagcactgggattcactttcgacgaaatgagcgcccttaatcagttgtcacttgatgagctgtttattgtcagccaatcatcagcaccgtttgtcgcggtcagcgtccgccatgacgttttgtgccacctccttgcgctgtcccgtcaggaggttcagcgccaacagcagattaaccgggcgatcctgctgggtggttcgatcgcattactcaaccagtattttggcctcacttctaatgaagtctgccttcgccgccggttacttggcgtcagtgtcccctatggccggacgcctgaaccggatgaagagacggatgcggctatctggcagcaatggcaacagtgccgggtggataagcttgaatcgcctgaggcactgaccgccatgatgcaggtcactgaaaatctgttgccggacgccggaggtctgtcactcaccaccgtcagaaagcgtatcgtactttgcgaacaggaagccgctgacaggaggacgtcacatgccggatga

SEQ ID NO: 191317 - DNA, 216 bp, Klebsiella oxytoca
atgccggatgagatcgaccgcgatcaggaatttaatcaacagcggctggaagagatgattgaacagaaccgtttcagaccagctgcaaccccctcactcttccactgtcgtttctgtggtaagcccatcccggagatacggcgtcagacactaccaggtgtgacaacctgtatagaatgccaggcgatccttgaacaccgcaaacgagggaaataa

SEQ ID NO: 191318 - DNA, 234 bp, Klebsiella oxytoca
atgagaaaacccatctaccacgtatttgtcacccaggaaggcccgtccgatatgcagggtgagaaaaatacgtactggacaaaagtcggcgtcgcctttgctcaccacggtaaagctggtctgaatattgtcctgacgcccggtattgccgtctccggcaaactggtcctgctggaaccccgcgaggaaaacagtccgtcgcagagtacggatcctatcgaagccgcgcagtaa

SEQ ID NO: 191319 - DNA, 711 bp, Klebsiella oxytoca
atgctttccaccactgcctttctggcggcggctatgcagtgcgccgccagcattcatccgtccaccgcactcgacgtggcacgggtggaatccggttttaacccgtatgccatcgccgagatagtccccagagccagaagaacctccggtgacaatcctgttatctcccatcttcccgccagccggaccgatgctgagcgcattatccgacgtcttgccatacaggaccagcgttattccgtcgggctgatgcaaatcaccagcaccaatttccgtcactacagagtgacggccatcgatctgcttgatccctgcaccaatctgtctgtttttgaacgcattctcagcgactgctaccggcgtggcggcaccctgaaaagggcgctgagctgctattactccggcaatttccgtaccggacaacagccggaagcggctttttccgggaccagctatgtgcagcggatgggttacgcttcgacgtctccccgatatgccgtaccgggcacccgcgaggatagttccacaaccccgccgcccctggaaaccatccctaccgatcccccgtcccgcctccgcgtgatctggccggggaccgtcgtgcgtggcgtccccgcgaaactccgtcaggacaacaccgccatagcaccgatctccgcgccgtcagtgcgccggagtctctcccagttaacccgtgaggaggaagaataa

SEQ ID NO: 191320 - DNA, 705 bp, Klebsiella oxytoca
atgaaaaggcgttttcatgccctgattttcgcgtgcgtgatggccagcccgctggcgcacgccggtattcccgttctggtggatgccgatccgctgcgtgaggccgaatggctgaaagaagcgcagcgctggatgctgaccgcgcaacattatcagagccagatccaggcgtataaagaccagttggcgacggccaccggcgtccgtgatattgctgattttgtggatcaggcgaagagtctgaaatcggatctggagcaacttcgcagaccagggcagacactcaatgacctgctgcggtccggcggcaccgccggacagtttgatgcgctgtatgcgaagtaccgggtcttcgatacctgtaacgcggaacagtcgggaagctatgccgatacctgtaaacaactggtcatcaataaggcgattcagtttgagcagactgatgagatccaggagcaggtcagccagacgctgggcgagattaacgacctctcgaaccgtatcgcactatccaaagactcaaaggagtctcaggatcttgccaacagtattcagctaaaatcagtgatgctgaacacgctcactgaccagtgggaaatgagcgtgaaggcggcagaaaagcgcgaaaaagtactggaagacgagcgtgttaaacagtggaatcagcagcaattagatgctcccacattgaaatttcatgaataa

SEQ ID NO: 191321 - DNA, 1068 bp, Klebsiella oxytoca
atggctgatctcggtacatttgaatttatagagaagcagctaattggtggaataacacaaaccaccagtggcctgatgatggaacattctgcaatggttatggggctggcggcgacgtcagccaccctctatatcctgtggcgtggataccagaccctggcgggtaagctgtccacaccgatggaggacgtcatgtgggacctcatgaagatggcgatcattctgtcttttgtggccaacgtcagcggttatcttgatagcgttatcgacgccatcaatggcttaaaggagggattttccggcggcgataatatctggcagatgttagatacgctatgggataaagcgaaggtattaggaaaaacgttacacgatatggataattcaacctacataaaagatgaaggcatgaccgctcagttttatgtctggcttggtgtatttgttttaatgctggttacggcctttgtctcaatgatcgcggaggtgatgattttactgctgagtattactgcccccatattcatattctgtctgatatatggatttttaagacctatgtttaataactggctgcaaaatatttttgcggccatattaacggttctgttttcagctttatcattaagaatggttataaattttatgaccaaaatattaacgcaatcactggccggagcagcacacgccaacattgtggagttaagcgcacaggtctgcctggcaggcatctgcgcggcaatactggtgtatctctccgcaaaactggccgcctccctggccggggccagtgcaaccgtatccatgcaggggctggcagcagtgggtattggcgcggcggcgtatggtaccggaaaactggcagcaggagccgggaagcagacaacccgcgccattcaggacaacattcagggctggagagatgccagtgcggataaacccggcagcggtccgggatacagcgcggcgaaagcgcgtcaatacgcgattgagcagatgatcgcccgcaacgaagcccggcgactggcacaagccagagactcggcggttcagaaattccatcgttaa

SEQ ID NO: 191322 - DNA, 306 bp, Klebsiella oxytoca
atgaataaagaagacctgtttattgccaatattcactcaacgcatcaggacagaatatcggtcatatgtatctacgactatctgtcgaaagaagcccatcagggatgtggactttattatgagatatatgaaagccggtttatcggtttattacgacatcatctttcactgcttaatgagccggacgcagagaagctcaggcgatatgccgaaagtcagggaacgaaggtcgatgatgaaacgtaccgtgcggcattaaacgctgaacgggaatgccgggctgaaatagcccgcgaacagatgtga

SEQ ID NO: 191323 - DNA, 1086 bp, Klebsiella oxytoca
atgcacgtcatttacggagaaactattaacgatgtaataatgaaactcttggaaaaagtgcttaatgaaggagttcgtgtttcgacaaggaatggggatgctataactatttatgatgttagtatgatcttgcgaaaccctagatcaagacatttaagtttagcgggtcgaaaaaacaacatattctccacatttgctgaagccatatgggtatttgcaggcgataaccgaattaaaccatatctaactttttttttaccaagagcgcctaaatactcagatgatggtgtcacttggcgagcagcttatggagaaagactatacgctcacgggcaacttgaaaatgtcgtgcaacaattcaaaaacgaaggaatatttacaagaagagcggtcattagcctatacatgcctgacagagatacaaatgaaagcctcataaaattatacaacatagaacatagtgtcgatataccttgtaataacttaattcatttttttatcactcctgacaaaaatttaaatattaaaatagtccaaagaagtggcgatctaatatttggagtaagcaatataaacattttcgagtttagtttacttcaagaaatagtactttcaatgttacagagggaagttgatagcgagattaaactaggatacttacatcattcagtaactaatcttcatatatatgatgatagaatagaacaagccaatgaaatacacaaaagaaaagaagaacaaatgacagatttgataaacgatgatgaaatatcatttcctccatcactaccaaatataaaatcattattctgtgatatagtctcattccttgaaagaataataacagaaaatgcatataaaatagacacaatagagaaggaaactgaaaaactaaaaaaaatatttattgaacattttgtagaaactgaaagaaatttactctggggatatgcagaagcagctttatcatatatttttcaggaaaggtttaaacaaccaatagtgttaacagctaagttaagcgatgatttcaatctaagcgtaacttccaatcacttcaataattctaataaggagcgcctatga

SEQ ID NO: 191324 - DNA, 558 bp, Klebsiella oxytoca; identical to SEQ ID NO: 171779

SEQ ID NO: 191325 - DNA, 663 bp, Klebsiella oxytoca
atgctaattgagcctaactctcacctttatgtctatgcaataacgagagactttggttttgcacccaatccatttcatggaagttgtaccttggcaacatgcaaacctggaattagaaagtctgctaaagtgggtgattggatactcggagttggtggagctaatttaaaatcagctaaaaaaaaatgtatcctattaatgaaagtttcagaaaaaattagtttcaatgcttattgggaggataccaggttttctatcaaaaagcctgctagaaatggtagtcatgtacaaattctgggcgataatatctaccatcaaaatgaaaaaaatgaatggatacaagaagattctcatcatagcaatcctgatggttcatttaacatgacaaatcttgaacgagatactagttctaataacgtgttgatttctgatcatttttattatttcggtaataaagcgattgaagtagacttagactctcttgaatatcatagaattagaaactataaaaaaattcctttaaattctacaataccagccattaaccttataaaaagaattgaatttgattttagaagtgataaaaattcagttatatctgacccatgcaatttttctgatttctataaacgtgtagatcagcgaactggagaactttattga

SEQ ID NO: 191326 - DNA, 885 bp, Klebsiella oxytoca
atgagcaaccataagaaaaatatcgatacagattggtataatttccaagaagagatttgtgaacattttaaaaatttaggtgccaacgctaagacgaatgttacagtagaaggtgtaagaggaatttcgaatatagatgtggtagtggaatccaaatatcttgggactgatttcaaatggttcgtagaggctaagtattggaatagtaatgtcacaaaagaaattgttcatgctttttttacagtgcttcaaaataccggtgccgatagaggtttcattatttcaaaaaaaggttttcaatcaggtgcaatagaagccacgaagcatacaaatataagtttgtatacacttgacgaatttaagaaaaaaacaaaccatcttgtacaatctaatatattaaaatcttttttgaatcgtgctattttaactagcactagatactgggggcatacaaagaaaacaaggataaaatatgaacttagatatgaaatgtttgatgatagagaaatcctttcatgcgctgtaattctcattattgttaccgacttaattatcgatgaagagattacctatccatttgatgtttctcactacacagggaaacaaatagatccaattaacagttttcatgagttaatgcattggttgaatttaagttcgaatgagttagatcgtagaatactagatgctgaaataatgatgaaggtcaacggagatttcgatcctatatatgaatattacacacctgacatcattagaatttgcactaaagaaagaattgataactttttagattatagtttctttcctgaaaaggaaaggaaaatcttgattgcacaaaaaaaaatggcagaagactacagaaaaagtcggaagattaattga

SEQ ID NO: 191327 - DNA, 756 bp, Klebsiella oxytoca
atgagtgaaaaagaatcgccatcaatgaaagcgttacgcattgtctatggtgatgaggtcatcgtcgtacagtgtgttccgcgtcaggtcgtaaagggcagggtgctcatcaaggtgcatccggactgccgggttattgtctctgtacctccagaaacatcggagcacgagctgttgtctgcgctgaaaaaaagagggcgctggatataccagcaactgcgtgatttcagggagcaacagacacacattgttccgcgtcagtatgtcagcggagaaagccattattatctcggtaagcaatatcagttgaaagtgacagaagacgctactgtgccgcaacgagtgaaaatgttgcgtgggcgtctggaagtgactgtcagacacaaatcggcagaaaagattaaagccttgctggctgaatggtatcgggaacgtgccagagatgtttttcagcgcaggcttgatttactgattccgcagaccctttgggtcagtgagcgtcctccgatacgtctgcgggcgatgcaaacgcaatggggcaactgttcagcaaaaggctgtctgaccctgaatccatggctggttaaggcatcctcagaatgtatcgattatgttttgctacatgagttatgccatgtggctgagcacaaccacagcgagaagttttaccgtctgatggggcaggttatgccgggctgggaaaaggttaagaagcgactggatggtatggctgggatgttgttggcagatatgtag

SEQ ID NO: 191328 - DNA, 3285 bp, Klebsiella oxytoca
gtggataagcactaccaacctaaattccaggaagaatacagcgccaaaattccggcactgacgttactgaccagcctcggctggacgtttttatctccgaaacagattatggattaccggggctataaacaggatgaggtggtgctgcgtccggttctgcgtgaagagctgtcgaagcgttcctttatggcgggtggcaaaacctgccagttatcggaaaaagcactggctaacctgatatcacaggtctgttctccggcgctgaatgaagggctgctcaaagccaatgaacggatgtataaccatctgctctacggtatcgccgtcacggagtttgtcgatggcaagaaggtcaaccccaccattgcgctgatcgactgggaacatccggaaaataaccagttccattttactgaagaatttacggtattgcggtcaggtggtgttgaaacccggaggccagatattgtctgctttgttaatggtatcccgctggctgttattgaagcgaaaagcccggctggtcatggcaagaaagggccaaccattgacgaggggatatcccagagtatccgcaaccagttcaacgatgaaatcccgcagctgtttgtctacagccagttattactttcgattaacggtcatgacgggcgctacggtacctgccatacgccaatgaaattctgggcggcatggcgcgaagaagatattaccgatccgcagatgtatgcgctgcgcaaccatcctttatcgactgaacaaattcatgcgttgtttgatcatcgtccttcagtcgatctcaaatggtatcaacagttaatcgatgggggggaactggcagtcagcgggcaggataagctgctcatcagtctgctttcaccggaacgtctgctggagatgacccgcttcttcaccctgtttgataaaaaaaccggaaaaattgttgcccgctatcagcaggtgttcgggataaaaagactgctggaacgcatcagtacccgcagaccagacgggggcagggaaggtggggtgatctggcataccacggggtcaggtaaatcttacaccatggtattcctcagcaaggcgctgattcttcatgacagcctgaagcagtgtcgtattgtggtggtgacggaccgcgtggaccttgaagggcagctcagcggcacttttgtttctggtggcgaactggcagggaaggatgataaggccaaagcgatggcgacctcaggtcagaagctggcacagcagattggctctggtaaagaacgtataatctttacccttatccagaaatttaactcagcgacaaaattgcctgaatgcgtcaacaccagccccgacatcatcgttctgattgatgaaggacaccgtagccagggtggtgagaaccatgtgcgaatgaaactggcactgccgaacgccgcctttgtggcatttactggtacgccattgctaaaagaagataagaccaccaataaattcggaccgattgtccacgcttataccatgcagcgagcagtagaagataaagccgttacacctttgctgtatgaagaacgtattcccgaccttgaggttaacgatcgggcaatagatgcctggtttgaccgtattaccgatgggttaagcgaagcgcaaaaagccgaccttaaacgtaaatatgcccgtaaaggtgaggtctacagtgcagatgaccgcatccggctgatcgcactcgatattgccacacacttctcgaaaaatattgatgaggggctgaaagggcaacttgcctgcgacagcaagatttccgccatcaaatataaaaagtatcttgatgaagccgggttgtttgagtcagctgtagttatcagcccgccggatacccgggaagggaatactgaggtggatgaaagcaaactgccggaagtgacgaaatggtggaaagataacgtcggcacgcaggatgagtctgtgtatacccgcaatatcatcagtcgtttcgatactgatgataagctcaaattactgatcgtcgttgataaactgctcaccggatttgatgaaccgaagaataccgtgctgtatatcgacaagccgcttaagtcccacaaccttatccaggcgattgcgcgggtgaaccgactgcatccactgaaaaagttcggtctgctgattgattatcgcggtattctggctgagctggacacgactatcggcaaatatcaggacctcgcctcccgaactcagggcggatacgatatcaaagatattgacgggctgtacagcgccatgagctctgaatacaagcgtctaccgcatctgtataaccagctgtgggccatatttgccggtgttaaaaacaaaaatgatactgagcagttacgtgcggtactggtgcctaaaatggaagaacgtgacggagagatggtcgatatccatcagaaaacccgtgatgatttcttcgaggcgttaacggcctttgccggatgcctgaaagtggcactgcagtccgccaccttcttcaccgacaagagctttacggaacaagaccgaaacctctataaagaaaccgtaaaacagatgtccagcctgcgccagtgggcgatgcaggtaagtggagagcaggtcaattatgacgactacgctgagcaggtgaaaaaattgctggataagcatgtcaccggcgttgaggttcgtgaaccggatggcgtgtatgaagtcggtaaaatgggcaagagcgaaaaacccgaagagtgggataacaataaaacccgcaatgaaaccgacatcattaaaacccgcgtgacgaagatgattgagcaggaattgcgtgatgacccgtatgctcaggaggcattttcaaaactcctgcgtatggctatcgaagaggctgaaaaactgtttgaccatccgctgaaacagtaccttttgttccgtgaatttgaagaacaggttgaagcccgtaagctcagcgatatcccggatgcactggcggtaaacaagcatgctcaggcgtattacggtgtatttaaaaaagagctacctgaggtttttgcggtaaacgacgttcaggtgcaggataagtggacgaagctggcttttgaagtggacaacattatcgtcaaagcggtggcagaaaactccctgaacccccaggacattgagaaagtcgttaagacaagtctgctaccactgctgtttacggcctgccgggaaattggtgccggaatgaatcaggttaaccgtattgttgaaaccatcatccagatactgcgcgttggtttgatgaaatcatga

SEQ ID NO: 191329 - DNA, 1785 bp, Klebsiella oxytoca
atggcagtgaacaatctggatcgttcccggtggtacatgggaaatgttctctggttcggaggctacaacagcaaaacggatcgggagaataactttggctttctcttatcagagaatggtaatgagctgttttttcataagaatgagataagccggaactatacacccgctgacaatgcaccggtgctgttcagggaaggtacaggtaaaaatggtaagcctacggcttttaatgttcacattcttgataaaacagatgaggagacggctgagctccttattgaatatctccgggctattattgaggagggcgttgatttcgctcgttggcgttatcgtgactgcgttattaatttcctcactcagtcctttggcgaaagggctataattcggttagttaccagtgatatagctgctacaaaagtcttaccgctatttttaaaatcacgtaactacgataaccagtttgcacttttcgcatctgataagaattttgatgatttgaccgcacaacaaatatctcctgcggtcatgccttcgtcatttatcgataataacattgatcaattcgctgtttgggtgaaaagatgttctgcggctacggattgccagggggcttcaacatcggacatcatcaatgaattactcagccatatatctataagtgctattctctacctggctttttacgattgtataagtagcgagcggattcttgagcatcggcatgatgatatagagaattttgttcgacgtagtttcacgaaaaataaaatggatatacaaccatttgtccgtgatgcctatcagcagaaattctcatcgagagagcaattttataaacattccgtgattagtccttttatcaatacgtatttgattaaacagaagatgttcagaaaagatttcagttttgttaatgatatcgagtcgaatactgaaattgcttctgatcctgaatacttcattctgagtaaattgttaccgttgcttgggcgcaacgatgaacagtccgttctgagtattattctgcatgagatatggcacggagtcttgtcgggtaaaattccggtaaatcatccttctgttttcaaattgttcccacaatgtagttcattacaaattcgtttcccaagtttagaattatcctgtgaggcgtttcactggaatgcaaaacaacctgacggaacgatagagaaaaaattcctttgtcgttcgaaaatctgccatgatccgcaggtattacccgacctcagtcgggattacatcgacttcactatttatgactggcttgcccactatggcatgacctatctgattgcaggcgaaccttctaagcgggatttcccaattaaactggctgggtatttcaatcgtatcagagaattacattcccgcttgcattgccgaagttgtggggtgctgatggttccagatatgaaatatgctcgtgtggaagtcagcgtctgggatacaaagtcgaaaggatttgtgaaaaaacctttccaggccgcgtatcgcctgaccgtctttaaatgtgccagtcattcgtgcgaacagtttggtatcgggcattacattaatcactgtattggttacaaatgcagcgaaataattgacgccagggatttgcatgaaaaatgttcagaaggacgatttatttgtgcatcctgtggttcctgctgtacgacgcatcaggagaaatttggtaatgtaaacaagggcgaaacagaacaggtcaagtacaatcgcctttatcgggactcgccgttcttttcatcataa

SEQ ID NO: 191330 - DNA, 684 bp, Klebsiella oxytoca
atgaaactgacgaaaagcggtccactgactgaccgggaaatcgactggctggaagaaatattaatgaagtatggaatggatgattctgtactctgtttctctgagctggatggattgctgacggcgattgtctctggcccgaatacgatttcccctaatacctggctcagtgctatctgggggcgaggtgattaccaccctcgctggaccactgaaaaagagatgacgcgttttgtggggctgtgttttcagcatatgaacgatatcgctggctgcctgtatgaggcccctgaacagtttgaaccgattttcaatggacgtgaggtgaaggggaagacatataccatcgtcgaagagtggtgtttcgggtatatgaaaggccggtctctggatgactggtcagccttgccagagtccttacgtccctcgctggaggcgatagcccttcatggtattgaaaagaacttcccagtggttgagaaaatgtcacctgttcaatttgaacagagtattactctcattcagcctgcggcactggcgctttaccagcactggttgtcggtgagaatgtcagaggcatcatcccggcctgttcccgtgaagggggcagaaaaactgcccggtcgtaatgacccgtgtcagtgtggcagtggtaaaaaatttaaaaagtgctgcctgcactga

SEQ ID NO: 191331 - DNA, 1227 bp, Klebsiella oxytoca
atgattcctaaggggtggtcatctcagaaactctcatcggttgcgtcgataatcgattgcaaacacaggactcctgagtacgttaaatcgggaataccacttgtctcaccggggacgataaaatggggagccttagatctgatttcacctgtaaaaagagttacagaagaagaatatcgctctctgatggatcactgtgttgttgaacaaggtgatttggttatgagtcgtaaccagtctgtcggtgttgttagctatgtggattccaaaaagccatttgtattagggcaagacactgtcttaattaaagcaatccatgcagattggcggtttatttactacacattacaatcagatttagtccagcgacagatagcaaaaagtgcaggtggttctaccttttctagaattaacctttctgatattagagcgttaaacataaaaactcctgctatttgtgaacaagataaaatatctcaaattctgaccgcctgggataaggcaatttcggtgacggaaagccttctcgccaacagtcaacagcagaaaaaagccctgatgcagcaattgcttaccgggaataaacggttgctggatgagaatggggtgaggtttagtggggagtggaaaattactaaactaatacaaatgggcaaagttgtatccggtggaacacctgatacaaacatggccatgtattgggaaggcgatattctatggcttaccccaactgatgttactgcattaacgggtaggttcgttagcaatactagtagaaaaattactcctgcgggattactaaatagctcagctgttcttttgccaaaaggtagtttgatggtatgtacaagagctaccattggtgctttagcaatttcgacatcggaaatttgtaccaatcaaggttttaaaaacatcattccgaatgaagggtttaatatcgaatttatttattatttgttgcaaatgaacacaaatgagatgatcaaaaaatcatctggctcaacatttttagaactttccaagaaagattttgaaactttaagcttttcttgcccatttattaaagagcaacaaaaaatcgccgccgtgctgtccgctgctgacaccgaaatctccacacttgagaaaaaactcgcctgcctgaaagacgagaagaaagccttgatgcagcaactgctgaccgggaaacgtcgggtgaaagtggatgaggcggttgccgtatga

SEQ ID NO: 191332 - DNA, 1524 bp, Klebsiella oxytoca
atgaacgacaaaatcagtcaggacacgatcaacaaagccctgtgggccgcgtgtgatacgttccgtggcaccatcagtgctgatacctataaagactttatccttaccatgctgttcctcaagtacatttcagatgtctggcaggatcactatgacgaatacaaagaacagtatggcgatgtgccggaactgattgaagcgatgatggccaacgagcgttttgtactgccaaaaagtgccagcttttatgcgctgtacgaacgccgccatgagccgggtaacggtgagcgtatcgatcaggctctgcatgcaatcgaagaagccaacggaaccaaactgaaagatgccgggaaaagcgtgttccaggatatttcgtttaacaccgatcgtcttggcgaagaaaaacagaaaaacaccatccttcgtcagctactggaagacttcgccggtgaagatctcaacctgaagccgagtcgtgtcggtacgctggacgttatcggcaatgcttacgaatacctgatcaaaaactttgccgccagcggtgggcagaaagccggggagttctataccccgccggaagtttcggacctgattgcagaactgctcgatccgcaaccgggtgataccatctgcgatccagcctgtggttccggttcattattgatgaagtgtgggcgtaaaattgtctccgggcatgatagtcgtaactatgcattgttcggtcaggaagcgatcggttctacgtggtcgctggcgaaaatgaatatgttcctgcacggggaagacaaccataaaatcgagtggggcgataccattcgcaacccgaagctgctcgataaaaatggcgacctgatgctgtttgatatcgtgaccgctaacccaccgttcagcctcgataagtggggccatgacgaggccgagaacgataagtttggccgttttcgtcgcggtgtaccgccgaagactaaaggagattacgcttttatctcgcatatgatcgaaaccctgaaaccgggaactggccgtatgggcgtagttgtgccacacggtgtgcttttccgtggctccagcgaaggtaaaattcgccagaaactgatcgacgaaaatttgctggatgcggtaattggtctgccggaaaaactgttctacggtacggggattccggctgcgattctgattttcaaaaagcagaaagttgatgacaaggtgctgtttatcgatgccagccgtgaattcaaggcaggtaaaaaccagaaccagcttagcgaagaaaacattaagaaaatcgtcaagacctaccgtgatggcgataacgtcgagaaatatgcctaccttgccagcctgaaagagattcaggacaacgactataacctcaatatcccgcgctatgtcgatacctttgaagaagaggaagagatcgatttgctggcggtacgtgctgagcgtgagcaactgaaagcggaattggcgaagctggaaacggagatggctggatatttgaaggagttgggttatgattcctaa

SEQ ID NO: 191333 - DNA, 1029 bp, Klebsiella oxytoca
atgaaaaagattggctttttatcatttggtcactggacgccgtcgccgcagtccggaacgcgttcagccgctgatgcgctgttacaatccatcgaccttgccgtcgccgccgaagaactgggcgcggacggcgcctatttcagggtgcatcattttgctcgccagctcagttccccgtttcccctgctggctgcgataggggcgaaaaccaaaaaaattgaaatcggcaccggcgtgatcgatatgcgttatgaaaacccgctgtatatggcagaggatgcgggtgcggcggacctcatctccggtggccgcctgcagctgggtatcagccgcggctctccggagcaggttattgatggctggcgctattttggttacgtccccggcgaaggcgaaaatgagtcggatatggcgcgtcgtcacaccgaagtgctgctggacgtcctgcgcggggaaggttttgcgaaacccaatccgcagcctatgttccccaacccgccggggctgctgcgtctggaaccgcattccgaaggtctgcgcgaacgaatctggtggggcgccggttcgaatgctaccgcgaagtgggcggcaacgctgggtatgaacctgcaaagttcgacgctgaaggatgatgaaaccggggaaccgtttcacattcagcaggcgaaacagatccgcgcctatcgcgaagcctgggcacaggcgggccatacccgtacgccgcgcgtctcggttagccgcagcattttcgccctgatggacgatcgcgatcgtctctatttcggttcaggccgtgacgagagtgattcgatcggtttcctcgatgagaaaacccgcgctattttcggtcgcagctacgccgcagagccggacaagctcatcacgcagctgaaacaggatgaggccatcgccgaagcggatacgctgctgttgacggtgccgaaccagctgggcgtggaatataatgcgcatgtcattgagtcgattctgaagcacgttgcgccggcaatgggctggcgcgatgcctga

SEQ ID NO: 191334 - DNA, 417 bp, Klebsiella oxytoca
atgaccaaaacctacatgctggatactaatatctgctcttatatcatgcgcgaacaaccggaagcggtgctgaaacgcctagagcaagcggtgttgcgccgtcaccggatagtggtgtcagccatcacctatgccgaaatgcgttttggtgccatccgtaaaagggcttcgccccgtcatgtgcagctggtggacgcattctgtgcgcgccttgatgccatactggcttgggatcgggccgcagttgacgctacaacagaggttaaggccacgctagcggctgccggcacgccaatcggcccaaacgacacagccattgctggacatgccattgccgctggcgccatcctggtgacgaataatacgcgtgaatatgagcgagtcgctggtctgacgtttgaagactgggtgcaataa

SEQ ID NO: 191335 - DNA, 231 bp, Klebsiella oxytoca
atgcgaactgtatctgtattcaggaacggtaataaccgggccatccgtctgccccgcgatctggactttgacggcgtgaacgaactggaaatcatccgcgagggcgataccctcatcctgcggccggtaaaacccagttggagttcgttccgccaggaggaaaaagctgacgcagattttatggcggagcgtgaaaatgttgttagtgacgagggacgttttgagctatga

SEQ ID NO: 191336 - DNA, 435 bp, Klebsiella oxytoca
atgagcacacatacccgcattcgcaaattcaataccaaagacacttaccccaaccagtcgctggataacgatctttgccaggcggttcgcgcaggcaataccgtttatgttcgcggtcagattggcactgacttcgaaggcaatctggtagggcttggcgatccggccgcgcaggccgagcaggcgatgaaaaacgttaaacagttgctggaagaggcgggcagcgatctgtcacatatcgttaaaaccaccacctatattattgacccccgctaccgcgagccggtttatcaggtggtcggcaaatggctcaagggcgtgtttcctatttcaacagggctggtgatttccgggctcggtcagccgcaatggctgatggaaattgatgttatcgccgtgattccggacgactggcagcccaaggtgggagaatag

SEQ ID NO: 191337 - DNA, 675 bp, Klebsiella oxytoca
atgacgttatccattattggacgttgctcgaaaaccggccagatgggcatcgccatcagttcctccagcatcgctgtgggcgcgcgctgcccctggctgcgcagcaaagtcggcgcggtatcgacccaaaacatcaccttaccggcgctggggccgcgcattcttgacaggctgcagcagggcgctaccgccgaaaccgcgcttaaagccgggctggacaccgatgattatgccgcctggcgccaggtcaccgtgatgacaacggatggacaaagcgcgttctatagcggcgagaagacgctgggcgtcaacaacgcgctgagcggagagaactgcgtggccgcgggcaatctgctggcgaatcccgatgtgattgccgcgatggtgcaggccttcgaacaacggtcgggacaccttgccgacaggctcattgccgcgatgcaggcaggcatgagcgcagggggagaagcgggcccggtgcattcggcggcgctgtcgattgtggattctcccgtctggccgattgttgatttacgcgtcgactggaccgacgccgaccccatcgatgaactcaacaaactctggcaagcctatcagccgcagatgcaggactatatcacgcgcgcgctcgaccccactcaggcgccgagctacggcgtgccgggcgacgagtaa

SEQ ID NO: 191338 - DNA, 1158 bp, Klebsiella oxytoca
atgattaccagtcgcacactgcttgagcgcctagtggcgtttgacaccaccagtcgcgaatccaacctggcgctgatcgattttgtctggcactacctgaccgacctgggtgtcaactgcgagctgatccacaacgccgggcgcagcaaagccaatctttatgcgcggcttggcccggccggaagcggcggcatactgctctcaggccacagcgatgtggtgccggtggacgggcagaactggagcgtaccgccttttgccttgtcagagcgagacggcaagctgtacggccgcggcacagcggacatgaaaggctttatcgcctgcatgctggcggcagtgccgcattttcttgcgcagccgctcgcacagccgctgcatctggcgatttcttatgacgaagaggtaggctgtcttggcgtgcgtactttgctggatgtgctggccagtcgcccggaaaagcccgatctctgcctgataggcgagcctaccgaactgcagccggtgctcggtcacaaaggcaagcttgccgtgcgctgcgaagtgcagggcgcggcctgccattccgcctacgcgccgcagggcgttaacgccatccaatatgccgcgaagctgatccaccgcctgacggctatcggcgaggtgttcgccgcgccggaacgccaggatacgcgttttgatccgccgttcaccacagtgcaaaccggcctgattcagggcgggcgggcgctgaatattgtgcctgccgaatgcacatttgactttgaagttcgcacgctgccgcaggatgacgcgcagcaggtggcggaggagctggaacgctacgcgcagcgcgaactcctgccgcaaatgcgcgccgtgaacagcgacaccgagatccgcttttatcccctcagcagctatcccggtttgtacaccgccgcgcaaagcgccgccgcgcagctgctcgcccatctcaccggctctgaggcgttcagcaccgtggccttcggcaccgaaggcggcttgtttcatcaggccggcatccccagcgtgatatgcgggccgggcagtatggcgcagggccacaaaccggatgagttcatcacaatcgaacaactggatgcatgcgacgccatgctgcgccgccttgccggatggatgagtctgaaggcgtaa

SEQ ID NO: 191339 - DNA, 1149 bp, Klebsiella oxytoca
atggtaagtgcagaagtcaccacatttccgcagcccgcaaggctgcatcccgccgagaacaaagccaatgttgccgtgcggcttgatggcgtactgaaacgctttggcgacgccatcgcgttacataaaatttcccttaccattgaggaaggagagtttattacgctgctcggcccgtccggctgcggcaagacgacgctgctgaatctgatggcgggtttcgccgaagcggatggcggcgaaatctttattgatggcgaactggtcactgagatcccgccataccagcgtgaaatcggtattgtgttccagaactacgcgctgtttccgcatatgacggtcgagaagaacgtgggctacggcctgcgtatgcgcggcgtgccaaaagctgaaatcgtcgagcgcgtcgaacaggcgctggcgctggtgaaactggctggttacggtcatcgcaagccgcgtgaactctcgggggggcagcagcagcgcgtggcgctggcgcgcgcgctggtgatccgccccaaagtgctgctgctggatgaacctttctcggcactggataaaaatctgcgcctgtcgatgcaggttgagctgaaagcgattcagcgcaagctgggcgtcaccactgtgtttgtgacccacgatcagggcgaagcgctgagcatgagcgatcgcgtggtggtgatgtcggcgggacatgtgcgccagatagacacgccggatgaaatctatcgtcgtccgcaggatgcgtttgtcgcgagctttgtcggcgatgtgaacatcgtgccggggcgctacgccggtcgcgacggcgcggcggtgctggagctgggtggcaatgtgttgcgtctgccggcggaccgcgtgcatgccgacattggcgaacgccttgacgtttacatgcgcccggaaaacatccaactggcgccgcttggcccgcgttcgctgttcagcgctacggtaatcacccatgtcttccagggcgatcatgtggatgtgcatcttgatgtacccgcgctcggcaacgcctcgctgtttgcgcgccagtcgggactcgattcgctgtcgcgctggccggtgggcagccttgtcggggtaagcgtggatgatgaaggcgtttgcgcgttcagcgcggcgaagcagggataa

SEQ ID NO: 191340 - DNA, 996 bp, Klebsiella oxytoca
atgatacctgagatgatgaatgcggtcattgcgcgccagccgggcggccctgaggtgttagaacaagtacagcgcgcggtgccgcagccttcggcgggcgaagtgctgattcgcgtcgccaacgcgggggtgaatcgtcccgatatcatgcaacgcaacggcatgccgctgccgccaggcatcaccgatgtgctggggctggaggtctccggcaccgttgtggcgcagggtgcgggcgttgaatctcccgctatcggcgcgccggtgatggcgctgctcaacggcggcggttacgccgactattgcgtggcgcgcgccgagctctgtttatccgtgccgaaaaacctgccgctcgcgcaggcggcgggcgtgccggaagcggcgtttaccgtgtggcataacctgttcgagctggggcgtatgcaaccgggtgaaagcgtgctgattcacggcgcggccagtggtgtgggtacgttcgccattcagtgcgcgcaggcatgcggggcgcgagtgatagccacggcgggcggcacagataagatcagggcgctgcgacagcttggcgtagggcgcgccattgatcgtcacagcgaagatttcgtcgcggttatccttgaagaaacccagggacgcggcgtggatatagtactggataatgtcggcggcgattatgtggcgagcaacctgagcatactggcgcctggtggacgtcatgtcagcctgtcatttatgcagggcgcaaaaattgaactcgatttgcagctggtgatgcgcaaagggctgagcctgacctcttcaacgctgcggccaaagagccccgtcgagaaaatgcgactggcgcagcgcatcagccgccatctgctgccgctgatcgccgcgggtaaaatcacgccgatccttcatcaaaccttaccgttagcacaagctgcggacgcgcatcgcattcttgaagccaataccaacatcggcaaagtgctgctgcaggtggcgccatga

SEQ ID NO: 191341 - DNA, 615 bp, Klebsiella oxytoca
atgatgcaactttattttgccgccacctctgcctacgtacgaaaagtgatggtatgcgcgacggtgcttggccttgctgatgagattgaaccgctggattccgccgcgcatccgatcgagcgcgacgaacgcatcgccacgtttaacccgctggccaaagtcccggcactgcgcaccgaaagcgggctatgcctttacgacagtcgggtcatttgcgaatacctcaacgcgcgtgcccgcggcgggctcttcccggaaggcggcgacgtgcgctggggcagcctggcaagacaggcgctgggcgatgggataatcgatgcggcattgctggcgcgctacgaattcagcacgcgtccgccggagaaacagtggcaaaactgggcggacgcgcagctgaaaaaggttgccgccgcgctgctggagattgagcgtcaggtcagtgattttagcgaccgccccaatgatattgggcttatcgccatcggatgcgcgctcggttatctcgacttccgctttgcggaactcaactggcgcgccagccatccgctgaccgccgcatggttcgccgcttttgatgcgcacccggccatggtcgccacgcgtccgcacgtttaa

SEQ ID NO: 191342 - DNA, 450 bp, Klebsiella oxytoca
atgtcgcagcaaatctattttctcaacggtcctaacgccaacctgtacggactggataaaaacggcgcttacggcagcgaaagttttgtcagcatcggcgagcgctgtcaacgtcgcgccgaatcgcatggcgtagtgctgcactttcgccagagcaaccacgaaggggtgctggtcgactggattcaggaagcgcgccagaacgcggccggattgataatcaacgctgcgggactgacctaccgttcagtgccgattctggatgcgctgctgatgtttgacggcccgatcatcgaagcgcatatgagcaacatctggaagcgcgagccgttccgtcatcactctatggtgtcgaaagcggcgaccggtgtgatcgccggactgggcgcgctgggttacgaactggcgattgacgcggtggtcaacctgatggagacacctgccgcatga

SEQ ID NO: 191343 - DNA, 930 bp, Klebsiella oxytoca
atgagcacgttagtgttttacagcgaattcgacagtttcgaagagtggtctgccttgcttgcaccttacttgcccggcgtgacgatttgccgcgccgaaacggtgcaaaaacctgatgaggtgcactatgcactggcatggaaaccgccgcgcggcttctttgcgccgtaccgcaatctcaggctgttggtcaatcttggcgcgggcgtcgattcgctggtcgggcgcaacgacctgccggatattcccattattcgtctgtccgatccggatatggcgcgcatgatggccagctatgtgctttttgctgtgctgcgttacgcacgcgacatcccggcttttgagcgcgcgcagcgtgaacgacgctggcgctatctgcatccgcgcgcgcctgccggcatccgcgtcggcgtgctggggttaggggagttaggcgcgtatgcggcgcgcgaactggcgcgtcagggcttcgatgtgcgcggctggtcgcgttcgaaaaaagagattgcaggtattcgatgcagcagcgggctggcctcactggatgattttctcagtcagagcgacattctggtggtgatgctgcctctgacgccgcacacgaccagcttgctcagcgcggaacggctggcgcgcctgcctcagggcgcggcgttcatcaatgtatcgcgcggcgcgattgtcgatcaggcggcgctgacggatgcgctgcgttcagggcaaattgctgaagccacgctggatgtattcgatcgcgaaccgctgccgccgcacgacccgctgtggcagatggacaatgtgctgatcacgccgcatctggcctcggtcgccattcccaccagcgccgcgcggcaggtcgctgaaaacatccagcgcgccgcgcgcggcgaaccggtgactaatcaggtgttcccggagcgtggctattaa

SEQ ID NO: 191344 - DNA, 963 bp, Klebsiella oxytoca
atgctcagtcgcatcacccagcgtcagctggaatattttgtcgcatccggtgaagctggcagcattattggcgcgtcggaacgtattcatgtttcatcgccgtcaatctctgccgccatcacccacatcgaatctgaactgggcgtacagctatttgtgcgccaccatgctcagggcgtgtcgctgacctctatcggtcatcaagtgttaaaagaggcgaagctgattctggaacagatgtcgaatctctataccattgcatcggaatcgctgaacaatgtgcgtggcccgttgcgtgtgggctgtctggataccctggcacccatgttgacgccagaacttgtttttggttttggccgtgcttttccgggcgtgcggatcacgctggtggagggcaaccatgaacagttgctgaaacagctgcggtccgctgatatcgatatcgccctgacctacgatctagtgccagccaatgatatcgccttcacatcgctggcgcagttgccgccgtatgtgatggtgggcgaacatcatccgctcgcgacacaatcggcagtgacgattgaggatctggtagcgatgcccatggttctgctggatatgccatggagccgtgaatatttccttggcctgtttagcgaggcgggcgtcgcgccgaatgttgtcatgcgctccagcaatatggaagtggtgcgtgcgatggtggctaacggcgtgggatttggcatcgccaacgtacggccgaaagcgcatttctcccaggacggaaaacgcctgattcgcgtgcggctggccggggtgaataagccaatgcaactcggttatgccaccgtcgccaacacacagcactccatggtggttaacgccttcgccgaacgctgccgtatgtttatctcagaccagtatattcctggcatggcggcgccgagctatttcgatccgcaggtggtgcgggtggcgtga

SEQ ID NO: 191345 - DNA, 1032 bp, Klebsiella oxytoca
atgttgcgtaagatttgtgccttaacgttgttgaccacgagcgtgctgtgcgcaggtaatgcaatggccgctgacaagctgattgtcagcacctggggcggcagcttcagggatttgattgacgaaactatcgccaaagagttcaccaaagaaaccggcgtggaagtgcagtttgttacgggcggcaccatcgaccgtctgaacaaagccaaactggcgggcggctcgccggagacggacgtgacctttaccacggcgcatgtgggctatctgtatgccaatagcggcctgtttgaaaaactcgatatgagcaaaatcccgaacgcgacgaatctggtgcagcaggcgaaagtcagcccttttcacctcggcgtgtggggctatgtttacaccatcggctaccgtcctgacatggtgccgaagggcgaaacgtttgagagctggaatgatctgtggaaaccagagctaaaaggcacgctggcgctgccagactgggatccgagccatattatcgcagtttccgccaagctctccggcaccgatgcggcgcactgggagcagggtcaggcgaagctgaaagcgcttatccccaacatcaaatctttctataccgatgacgctaacagccagcagctgatctccactggcgaaacgcccgtgcaggtcatgctgtcgatgaacgcctataacatgatttccgaaggggtgaacatcaaactggcgatgccgaaagagggcgcgattttgggcgtcgatacaatcggcatcaacaaaggcaccaaacatagcgagctcgcttacaagtttatgaatattgccctgaaacctgaaattcaggagcaggtggcgaagatctatcgaggcagcccgactgtgaccaacgcgcatatcgatccagaactggcgaaactgccgggtatgctgactacgcctgagcagtggaacgccaccatcaatactgatccgaaactacgcgccgagaaaaccgccgagtggcgtcagtggttctctgaaaacatcatgtctcattga

SEQ ID NO: 191346 - DNA, 855 bp, Klebsiella oxytoca
atgacgagaaaaccgacatttttaccctggtttattattcccgccacgctgaccgcgttcggactggttgtcgccatgtgcgcggtaatgcagttcagcgtacgcgcctatattcccggttcgctcgacgtgggcggattcaccctggcgaacttcaacggcctgtttaaatccatctatgccgatgcctttatcaacaccgtctggctgagcgccaaaactgctgtctttggcctgctgatgagttatccgctggcttatgcgctggtgcgaacccgcaccgtgtggatcaaatccgcgattctgataatcgcgattacgccgctgtttctcggcgaagtagtgcgtacctactcatggattatcgtactgggcaacagtggctttctgaacagcctgctgctggcgctgggagtcatatcaaaacccattcagtttatgtttacgcaaactggcgtggttgtggcactggtgcacgtcactatgccgatcatggttctgatgctggcgaccgcgctgtcacatatcagtcctgattatgaaaaagctgccaccagccttggcgcaggcccgatccgcgccctgctgacagtgacaataccactctccatccccggtatcgtctccagtctgaccaccgcgttcgcctggaccttcagcgccttcgccacgccgcaactgattggcggtggacgcgtgagtaccgtggcgacaatggtctatcagcttggtttttcgtcgatgaacttcccgtttgccgctgcgctgagtattgccggtttgatcctgaccattctgttgttgatggcgctgaaacgcatgacccgattcctgcacgcgatgggagggcattaa

SEQ ID NO: 191347 - DNA, 819 bp, Klebsiella oxytoca
atgacccgttcgatgaacgataaactggtgacgctggcgggccgcctgctggtcgctgctatactgatttttgtaatgctaccgaccatcgtggtgtttatctcctcgttcagcagcacatcagtgctgttctttcctccgaaaggctggtcgctgcgctggtttgaacgcgcggtgagctacgatgatttccgtcacggtttctcgtcagggctgattgtcaccgcatgggcgtcatcgctggcagttatcatcggcgccacactggcaattgccattgagcgctattcgtttccgtgtaagcagattctggaagggatcctgctttcaccgctgttcattccgcacttcaccattgggttgggtatgctgatgctggtatcacagctcaacctcgggcgcggttacccgctggtaattttctgccatatcgtactggtgctgccgtttgtgttgcgcagcgtctatgtgtcgctgaaaaatctcgagcagcgcattgagctggcggcggccagtctcggtgcctcgccgctgcgggtagtgtggacaatcaccgtgccgctgattttaccaggcctgtttggcggatggctttttgccgcgatcctctcttttaacgaatttactgcctcgctgtttattaccacacaggcaacacagacgttaccagtggcaatgtataactatgtacgtgaatttgcagacccgacactcgcggccctgtcggttatatatattgtcgtgacagcaacgatgttaattatcgccaataagtttttaggcctcgggaaagttttaaacgtcgaagccagacattaa

SEQ ID NO: 191348 - DNA, 1251 bp, Klebsiella oxytoca
atgtcagtcgaaaagataaatactgtgattgtcggcgcgggtcaggccggtattgctatgagtgaacatctggcgcagatgggcgtgcctcacgtcgtcctggaacgcagccgcatcgctgagcgctggcgctccgagcgctgggattcgcttgtggcgaacgggccagcctggcatgatcgcttcccgtcgctaaaattcgataatatctctcaggaagccttcccgccgaaagagcgcatggcacagtattttgaagactatgcgaagatgcttgatgcgccagtgcgcaccggggtcgaagtgcatcaagttgtgcggttgctcggacgtagcggattcaaagtagtgacctcagccggcgaatttgaggccgacaatgtagtggccgctaccggcccgttccagaagccctcctttccgcaaatcgtgccggaaaccacaggattgcagcaaattcactcctcagcctataaaaatccgcagcagctgcctgcgggcggcgtattggtggtaggagcaggagcttcaggcacgcaaattgcggaagagctacgtaagtcgggccgtgaggtttatctgtcggtcggcgaacattaccgtccgccacgcgcttaccgcaacagagattattgctggtggctcggcgcgcttggtctgtgggatgaagtcaaaatcaagccgaagaaagagcatgtggcatttgcggtaagcggctatgaaggtggcaaaaccgtggatttccggcgtctggcgcatatgggcattacgctggtgggcattacgaaaagctgggataacggcgtgctgagttttgccgaggggctcgcggagaatatcgctgaaggcgataaagcctactttgacgtgctgcgcgacgccgatgcttacattgaacgcaacgggctggatctgccaccggagccgcaggcgtgggagctactgccggatccggaatgtctgctccatccgctgacgcaattagatattgccgaagcgggcattacctcgattatttgggcgacgggctttaaatttgatttcagttggttacaggttgatgcattcgatgaaaaaggcctgccgtttcataaacgcggtatttctgctgaacgcggcatttatttcctcggcctgccgaatctggtaaaccgtgcgtcatcatttatatatggcgtatggcatgacgctaaatatattgccgaccacatcgcattgcagaacgtttataccaactacgttaaatcgtaa

SEQ ID NO: 191349 - DNA, 1164 bp, Klebsiella oxytoca
gtgactattacctgtattgaagagttacggcaacttgcgcgtaagcgcgtgccgaaaatgttttacgattatgtggatgcaggctcctggactgaatacagctatcgtgccaacgaagcggatttgcgccgcctggagtttcgccagcgcgtggcagtcgatatcgccgggcgcagcaccgccacagtgatactcgggcaggccgtgacgatgccaatggcaattgcgcccaccggtttaaccggcatgattcatcccgacggcgagatccttgctgcgcgtgcggcgaaacggtttggcattccctttacactatcaaccatgagtatttgctcgatggaaacggtggcgcaggcaacggattatcatccattttggttccagctttatgtcatgcgtgatcgccactttgtcgagaatcttatcgatcgtgcaaaagccgtgaactgcggagcgctggttgttactatggacttgcaggtgtttggccagcgccataaagacatcaaaaatggcctgtctacgccacctaaaatgacgctgcgcaaccttttggacatcgctgtcaaacctcgctggtgtcgtaatatgctcgccacgcgtaaccgtaactttggcaatatcatcggccacgcaagcggcgttgataatatcgatgcgatggttgagtggacagcccagcagttcgacccgcgtctttcctggcaggatattgagtggattaaacagcgatggggcggcaagctgatcgttaaaggtattatggatgtagaagatgcgcgactggcggtagcggcgggggcagatgccttgattgtctccaatcacggcgggcgtcaactggatggcgtgtcgtcatcgattactctgttaccggagatagtctcggcagtaggcgatcggattgaagtgcattttgatggcggtattcgttccgggcaggacgtgctgaaggcaattgcgctgggagcgaaagggacttatatcgggcgcagcatgctgtatggattaggggcgcttggggaagagggtgtaacgatggcgcttaatatcattcgtaatgaattcgatttatcgatggcattttgcggcaagaccaatgttgctgcggttgatgcaagcatcctgcggggtaatgtattttcggcgcagcacaatacttga

SEQ ID NO: 191350 - DNA, 207 bp, Klebsiella oxytoca
atgaaacgagacaaacgccgccatcatgcgcgccgtttgaaggcgaaacgtcgcatgtatagcaatgcaggcgacggtaacgcggccgcgatcggaatggtagcgcgcacaccctgcctttgtagctgttggatgtgcggccaccagcgccagcactatgggcaatctatgcaggaacgccgcgcgcgtttacgctacaccgactga

SEQ ID NO: 191351 - DNA, 858 bp, Klebsiella oxytoca; identical to SEQ ID NO: 102269

SEQ ID NO: 191352 - DNA, 285 bp, Klebsiella oxytoca; identical to SEQ ID NO: 102270

SEQ ID NO: 191353 - DNA, 255 bp, Klebsiella oxytoca
atgactgaacagccgtggtcttgcacggtgacctgcaagcctgcaggcatcgacataccgcagacaagacaggacacaggccgtacatcccacagtgtattgtttcctgaaagctcagtgaatcatcccgttaattgcgaaagtcattcacccctgtggctcactccctttgccatcggtctcctgttcgcatttagcagtgtgaagctggcgccgggttatacagacagctgcagtctcatcctgccgggctaa

SEQ ID NO: 191354 - DNA, 312 bp, Klebsiella oxytoca
atggatacaggtattttgcacctgacgggccgatcctgccatgacaataaatcgcagcgcgcggatccttttgttgtcttatcccgcattattgcgggtaaaaccaaatacgtaaaggatcgtttttctgctcagatcctccatgaagccagtcatgacgcgggttcatggctgttttacggtttttgggagaattggagtaatgccaggatgtacatgttaggcaggaaacagaagagaagagagcgctacgcgatttccggcctggtacacccctgtaaccttgcgggatttcgcgtaacgctttcataa

SEQ ID NO: 191355 - DNA, 270 bp, Klebsiella oxytoca
atgaacttcacgataaaatcccgtaaaaccggcgaaattttcagtttttacgcacccgacagtggtggctatgttcacctggagtccccgggacactctggtaatacaggtgcacagatctgccgtggtggagggtttatgggaagtacgctttcctgtggcgcttctgtggacgatctggccagtgttgcccgtaaatggtaccgccagtacatggaggaacggagaaagtacttaacgctaatgagccagcttgaggacctactatga

SEQ ID NO: 191356 - DNA, 222 bp, Klebsiella oxytoca
atggcgactgtggttgtctcagcccaggcgaatggactcaaacgggtgatacggcgccaggggaaaggagcaggcacccgccgcaacgacgaagagcgcgggcgcgaaacggcgttgccctgcagagtgccggcagctttcgccggcacggtgaaagcggcgcggccggaacggtcgcagcaagcgctgccgttgaccctgacctcagacatcagacactag

SEQ ID NO: 191357 - DNA, 327 bp, Klebsiella oxytoca
atgagtacacgaaacatcaacctcaaaactgccgctcaggaatcttccaggaaattggggggaaaccctgtgccatacacgatcctcattgccgagagggaaaaaaattcagaggaagagtgggatgtcctggaattcagcagcctgacggagctgaaaaaatatcgtaaaaactccccggaaaagatgcgctttaactattcctacgcgctctgccggggcatgaataagcagttccgatatatcaacgtggctgaagccgaccacttcaaacagtttttgcgtcagatagcgtgctcaggcgtcgatatccgggacatctactga

SEQ ID NO: 191358 - DNA, 177 bp, Klebsiella oxytoca
atgaaagagcgagacgtatttagtgaactgcaggaaggcatgattgcatggcgagagtttaatgcagggaatgaaacgctgcgatcgcacagtagctgtcttaaacctgtcgtcctgcctgcgagacgggcaaaaaggccgcgcgcctgcggcgccggaaaaaccgggctgcgctga

SEQ ID NO: 191359 - DNA, 1095 bp, Klebsiella oxytoca
atgaagctcaaacaactgtctctattagtaccagtcttgttgatggctggcatggcgcaagccgcagaaatctataataaggatggaaataagttagatctatatggcaaaattcaggggatgcattatttctctgatgacaaaagttctgatggagatcaatcatatatgcgatttggtctaaaaggacaaacacaaattaccgatcaactcacgggttatggacaatgggagtataatgttcaagctaacaatacagaaagttccagcgatcagtcctggactcgtctgggatttgctggtttgaaatttggagatgctggttcattcgattatggtcgtaactacggtatcgtttatgacgtcactggctggaccgatatgttgccagaattcggtggtgatacttatggctcggataacttcatgcaacaacgtgcgaatggtcttgcgacttaccgtaattccaatttctttggtctagttgatggtctgaattttgcactgcagtatcaaggtaagaacggcagttcagacggtgagggaatgactaacaatggtcgtggtgcattgaggcagaatggcgatggctatggtggttcattaacttatgatatctggaatggaattagtgctggttttgcatactctcattctaaacgcacagatgatcagaatacacagctagcattaggtcgtggtgacaatgctgaaacctacacgggtgggttaaaatatgatgataataatatttatttagcggcacagtacacacaaacttataatgcaacacgtattagtgaccagggattcgctaacaaagcgcaaaattttgaagtagtggctcaataccttttcgacttcggcttgcagccttctattgcgtatttgcaatctaaaggtaaagatatcgagcagtatggcgaccaagacatcctcaaatatgttgacataggcgcaagctattatttcaataaaaactttaaggcatttgtagattataagattaatcttcttgatgataattcattcactcgtgctgccgatatttctactgacgatattgtagcattgggtttagtttatcagttctaa

SEQ ID NO: 191360 - DNA, 645 bp, Klebsiella oxytoca
atgaatacatccagagcaatttcatttaaagatctacctggtatattcaaaagcattcattccaatacagggatgggacttacctgttttttttcgaataatgatcttaggattagaagtttagcctgtggatatccagaatatttgctttcaacagaaataaatatacttttccattatttaccgaacctgtttcagcaaacatttatagctactctattgaatacaggagttgatgtaaatgaagccaccagccttactcgtaaatctttcatactgaaacctccatatccctatgtttgtctccccacagttaattctacaaaagatataccacgttgccttccatccccatctcgtagacgtatcattccgctgttgagtaaacattatgtaacacaactcagacaaatgctctccgaacgtgagttgacgcatcattcccaaaaagacacatcgatttgggatatcgacagggcaactgcaacccgatggttaactgaggcaatccatcgggcaaatggtgatggtatacagtttcctctggatatctctcttgagacattcaaaagctcatacgctgtttacatgctcactttgggtgtcaccccttttcttcttcggaaatttattgttggaaattag

SEQ ID NO: 191361 - DNA, 651 bp, Klebsiella oxytoca
atggcgctcattaagatccttggtggcactgggtatgccggtagtcacatagcctctaccggaacaacccgcgggcataagatattatcatatagtaaaaatctaccggcggaaaaagtgaatggtgttacctacatcactggcgacctacgtgatgaagcattccttgccactgcatgtagcaatgcagacgtagttatctcagcattatcagctcgtggccctctggcaaaagaaatggattttcgcacccttctgcgcagagcggctcttattgcagctcaacagggaatcagatttggcgtcatcggtggggcaggctctcttcttagaaaaccgggagggccacgttttgttgatacccccgaatttcttgagatagctaaaccagaagcacttatacttgccgctgttcttgaggatctttatatttcggatcctcgtttagattggtttttcgttagtcctgccgccaattttggccctcatgctcctggaaaaactaccggaaattatcgtataggaggcgacatacttctttatgacgaaaatggtaattctgatttgtctggtggggacctcggcttagccgttatcaatgaagttgaaaacccggaacatcacagaaagcgtttatccgtagtatattaa

SEQ ID NO: 191362 - DNA, 876 bp, Klebsiella oxytoca
atggaccacagtaatataataaatgacctcttaaaatggatagaatgcaatctagaatcaccattgaagcttaatgatgttgctacacgtgcagggtattcaaaatggcatttacaacgtatatttaaatccataactggacagacgttgggaaattatataagggctcgaagattaacattggcagcattaatgttaagactaacaaatcgacctttacttgacattgtaatgcattacgagttcaaatcacaacaaagttttacaagggcctttaaaatacaatttggtaatacacctgcatcatacagaaatagccctaattgggatttttcaggtatgaccccatctttagagttatcgttatacatttcacctattcctgagtatataatactccctcatataaagacatatggaataacattacatgactcttgcgagtttaatacatttcaatcatgctgtcagaaaattagattttctgccaaatctcttttcaataaaaaattcgggcatatacaaccgattacatatggtatatgtcaatcaaagaggagtaaattgaaagaaaatgaaatagaaattacatattcgagcacaactataaaacagtttttgtcgccaaatatatatagcatctgtgaaatagatattaaaagtggtttatatgtgcgttttccgtatcatggggatagcaaaaattttcaggattttattatgataatatatcattacacattgccaaaaatgaaattgatacgtcgaaatactgatgacatagaatgctattataatgtatttgatcatgccgaggaatgtgtttgtgataaaatccattgtgattatcttatacctgtggaaaagaaaatatag

SEQ ID NO: 191363 - DNA, 942 bp, Klebsiella oxytoca
gtgtgcgctcatctccccgccgtaaatcgcatcttcctgacgcatccgctctttaatgaacgcatgcccggtcttcgacatcaccggcgtgccgccgctgcgggtcaccatatccaccgtattccacgtcagacgcgggtcgtgaataatccgggcgcccggctgcttctgcaggaacgcttccgccagcaggccaacaatataatagccttcgataaattctgcatcgttatcaaacataaagcagcggtcgaagtcaccgtcaaaggcgatacccatgtccgcgccgtgctcgcgcaccgcatccgcggtgtcctgccggcactccggcagcagcgggttcgggataccgttcgggaagtggccgtccggctggtgatgcaccttgataaaggtcaccggcacgcctgccgccacaaaacgtttctccacttcatcaatcacgtgaccggctgcgccgttgccggagttcaccaccagcttcagcggacgggtgaagctggccaggttcacgtagcccatcaggtggtccacgtactcctgcagcaccgatatatgacgcagggtgccgcgacgggacgcgtccaccggcgcaaactggttctcttccgccaggcgctggatatcgcgcagcccggtgtcgccgctgatgggcttcgcgttttcacgcaccagcttcatgccgttgtagttcatcgggttatggctggccgtcacttctatcccgccgtccacgcccaggtggaaggtggcgaagtaaatctcttcggtcccgctcagaccaatatccagcacgtccgttcccgcatccatcaggcctctggccagcgccagcttcagcgactcgctggtcagacgcacatcgccacccaccacgatcgttttcggcttcagaaattcaccgtaggcgcgtccgatacggtaggcgatatcttcgtttaa

SEQ ID NO: 191364 - DNA, 1098 bp, Klebsiella oxytoca
atgcttgtcctggcagcggaccatatcatcaataatcagcaggtcttccacgacgccattcgcgtcgcggagcagtatgcgcaggctgaccatctggtcaccttcggtatcgttccgaacacccccgaaaccggctacggctatatccagcgcggcaatgcgctgggggaaggggagcacacgccttatcaggtcgcccgctttgtcgagaagccggacctggagcgtgcgcaggcctatctggcctccggagaatattactggaacagcggcatgttcatgttccgggcgaaaaagtatctctccgaactggcaaaattccgcccggatattctcgaagtctgcacggctgcggtccgcgccgccgacagcggcagcgactttatcagcatcccgcatgaggtgttcagcacctgtcccgacgaatccgttgactatgcggtgatggaaaagaccgccgatgcggtggtggtggggctggatgccgactggagcgacgtcggctcctggtcagccctgtgggacgtcagcccgaaagatgagctgggcaacgtgctgaccggcgatgcctgggtgcacaacagccagaactgctacatcaacagcgacgaaaagctggtggcggctatcggcgttgaggacctggtgatcgtcagcaccaaggatgcggtgctggtgatgaataaaaaccgcgcccaggacgtgaaaaaggtcgtggagtacctgaaggccaaccagcgcagcgaatacaaacgacaccgcgaaatctaccgtccgtggggccgcagcgatgtggtggtccagacgccgcggttcaacgttaaccgtatcaccgtcaagccgggcggggcgttctccatgcagatgcaccaccaccgcgccgagcactgggtgatcctcgccgggacggggcagataacggtcaacggcaagcagttcctgctgactgaaaatcagtcgacctttattcccattggtgccgagcactgcctcgagaacccgggacgtatcccgctggaagtgctggagatccagtccggctcctacctgggcgaagacgatattatccgtattaaagaccagtatggtcgttgctaa

SEQ ID NO: 191365 - DNA, 231 bp, Klebsiella oxytoca
atggtctgctattacgacaattgcaagtatcgctatatcatttctccaaataactttgttagcccatattcttgcgccacaccaatttggtatactcactatatcattgctgattattatggttgcagatataatacagaaaaaagaaatatcgaattcagagttaacaaccttatattggataaacgtctcattaggtatttttgtatttgctgtcgttttcttatttag

SEQ ID NO: 191366 - DNA, 453 bp, Klebsiella oxytoca
  misc_feature (437)..(446): n is a, c, g, or t
atgaatgcctctcaaaagcagaaaaaaacgctctcatttggcctggccaccgtccctattttagccatgctaatgctgttaattattggctacggcatcatggggttgcgaatcgaaccgctactgctctgttccgctgccgtagccgccgtattagccttatggcagggctttacgtgggaagagatcattagttcggtcgtggataaactggcgaaagcgatgccagtcattatgatcctcatctgcgttggcgctttaattggcacctggatgttcagcggcaccattccttatatggtgtattgggggcttaaattaatcagtcctgagtatattcttattgccgcattctttttgaccagcgtcgtctcggtgtgtaccggaacatcatggggatcggcgggaacggtgggggtggcgctgatggggggcgnnnnnnnnnngcgctga

SEQ ID NO: 191367 - DNA, 159 bp, Klebsiella oxytoca
atgtacatgctttgccgcttaggttacattgttcacacttttttccggcgtagcccaaaacgcgctgtcgtcaagtcgctgcgggcatggccttcattatccgatctggagtcaaaatgtcctcacgtaaagagcttgctaacgctattcgtgcgctga

SEQ ID NO: 191368 - DNA, 1641 bp, Klebsiella oxytoca
atgagtgaaatgataaccgtcggcgacgccatcgccagaacgctggagcagtatcacgttgaagccatatatggcgtcatttctattcacaatctgccgatcgccgatgccgtcggccagcgggaaaaaatccgcttcgtcccggcgcgcggggaggcgggatcggtgaccatggccgacgcccacgggcgtttttccgggctcggcgtggcgctgaccagcaccggcgccggggcgggcaacgccgtcggcgcgttggttgaggcaatgaacgccggcacaccgctgctgcacctgaccggtcaggtcgaaaaggcctggctggatgccgacaccgggtttattcacgaaacccgcgatcagctgaccttcctgaaagccagctcaaagcgcgcataccgtatcagtaacgccaatcaggcggtagcgctcctgcataaagcgattcaggatgcgcagacgccgccgtgcggtccggtctcggttgaaattccgatcgatattcaaagcgtgaaaattccgctttcgctgctgaccacgccgctgaaaacgccaccggtggcggaagctgaagaggcaatggttgatgcgctgtgggttcagcttaagcaggcgaagcggccgctgctgtggctcggcggcggcgctttagaaagcggcgaggcggtgaagacgctggccgatgccgggatgacggtgatttccagcacccatggccgcggtattctgccggatagccaccgcgccagcctgcgcgcatttcacaattccccatcggttgaagcgttgatttcacaatgtgatttcacacttgtcgctggttcacgtctgcgcagtaacgaaacgcgctcatggacgctggaactgcccgcgccgcgggtgcagattgatatcgacccggcggcggccagccgtaactatctgatggacaatacgctggtggcggactgccgcgcgtttttagacgcgctggcggaacgagcgcaggggcgaatatggggcgacgcgcgctgggatagccaaataaaagaagcggtggcgatggcggagcaggggctgcgcgaacagtgcggtgattacgccagattaaatgacgctatcgcgcaggcgctgccggagaacggtatcctggttcgcgatattaccgtgtccggcagcctgtgggggagccgcctgtttcgcgcccacggtccgctgatgaatattcattctctggccggtgctatcggtatggggctgccgatggcgatcggcaccgcaattgctaatccgcagcgtaaagtggtggggctggtcggcgacggcggactgagcctgaacctcggcgagctggcgacgttggcacaggagaaggctaacgtgacgctgctgattatgaatgacggcggctacggcgtgatgcgcggtattcaggataagtactttggcggccgccagtattataacgagctgcatacgccggactttacgctgctggcgcaggccatcggtctgcaggcgtggagcgtcgatcgggcggatgatttccaggcggtgatgactgaagcgctggcgatgccggggccctcggtggtggaagtgaagatgggccagatcggcgcgctgcgttttgccgggccgccgcaaaagacgctgtactaa

SEQ ID NO: 191369 - DNA, 1470 bp, Klebsiella oxytoca
atggacgagttagacatttttatcggcggtcagtggcggcgcggcggcggcaacctgatgcacagccgctttccggcggatggatcgcttaacgcttcattatatgcggccagcctggacgacctgcaggaggcgatcgactgcgccgatcgcgcatggcgggaaccgacgtggcggaacatgctgccgcatcagcgggcaaagatcctgcataacgtcgccgatctgattgaagcgcaaattgacgagttaacccgtaaacagagccgcgacaacggtaaaccgctggcggaagcgcggggcctggtcatgagcgcggcgggcaccgcgcgctattttgccgccgcctgcgaactgctggaaggcgagctgccgacgccgcgtcaggcggatctgctgaccttgagccgctatgaaccgctgggcgtagtggcggcgattacgccgtggaactcgcccatcgccagcgaaatgcagaaggtggctccggccatcgccgccggtaacgcggtgatcctcaagccggcggaagcgacgccgctgatggcgctggagctggcgaagatttttgcacaggccggattacctcccgggctgctgagcgttctgcccggaaaaggctcggtcattggcgatgcgctggctcgccatcctaaggtgcgcaaaatttcctttaccggcggtaccgctaccgggcggcatctggcgcacgtggcggcggaaaagctgatcccggcgtcgctggagctgggcggaaaatcgccaactattgtgctggaagatgccgacatcgaacaggcggcgcggggtatctgctacggcatattcagctccggcggccaggcctgcatcgccggatcgcgtctgttcattgatgaaaaagtctatccgcaattaatggcccgcctgctggaattaacccgagggctgcgggtgggccacccgtttagcgcggatacccacgtcggaccgctgattaacgataagcatcgtcagagcgtgctggagtatgtcgagctggcgaagcgcgaaggcggtagcgtgctgtgcggcggcgagatcccggcggatccggcgctggcggcgggcagctacttcctgccgacgatcgtcgagggactcaacaaccgggctcgcgtctgtcaggaagagatctttgggccggtactggtggcgatgcgctttcgcgacgaagcggcgctgatccgcgaggccaatgattcggtgttcgggctggccgcggggatctggacgcgcgataccggccgcgccctgcgcctgagcgaacagctggaggccggtacggtgtggatcaacacctacaaggttttctctatttcgtccccgtttgggggttttaaagagagcggtctgggccgcgaaaaaggtatccagggcctgaaggcctggatgcagcagaagagtatttatctggcgacgggtaatagcgtcaaccactggtgtgattga

SEQ ID NO: 191370 - DNA, 765 bp, Klebsiella oxytoca
atgaaaaaggtgatgttaatcggctatggcgcgatggcgcaggcggtcattgagcggttaccgccgcaggtgtctctgggctggatcgtggctcgcgagccgcatcatgcggcgatccgccagcagtttgccggggcggttacgccgctgagcgatccgcagcagtgcgatcggacaccggatctggtgcttgaatgcgccagccagcaggcggtagcgcagtacgccgaggcggtgctggcccgcggctggcatctggcggtgatctccaccggcgcgctggcggatagcgaactggaacagcgccttcgccaggcgggcggcaagctcacgctgctggcgggcgcgatagccggtattgatggcctggcggcggcgaaagagggcggccttgagcgcgtgacctatcagtcgcgtaaaagtccggccagctggcgcggcagctacgctgagcagcttatcgatctcagcgcggtacatgaaacgcgcattttctttgaaggcagcgcccgcgaagcggcgcggctgtttccggcgaatgccaacgtggcggcgaccgtggcgctgggcggtattggtctcgatgccacccgggtgcagctgatggtggatccgacgacccaacgcaacacccatacgctgcacgccgaaggactgttcggcgagtttcacctggagctgagcggtctgccgctcgccagcaatcccaaaacgtcgaccctggcggcactgagcgcggtacgcgcctgctgcgaactgacataa

SEQ ID NO: 191371 - DNA, 795 bp, Klebsiella oxytoca
atgaatgcacaaattgaaggacgcgtcgcggtggtcaccggcggctcgtcagggattggcttcgaaacgctgcgcctgctattgggcgaaggggcgaaagtcgccttttgcggccgcaacccggaccggctggccagcgctcacgcggcgctgttaaacgaatatcccgcaggagacgtgttttcctggcgctgcgacgttctgaacgaacaagaggttcaggcctttgcagatgcggtcggggcccactttggcggcgctgacatgctgataaacaatgctggccagggctatgtcgcccatttcgccgatacgccgcgcgaggcctggctgcacgaagccgaactgaagctgttcggggtgattaatccggtcagggcattccagccgcagcttgaacggtcggacatcgcttcaattacctgcgtgaactcgctgctggcgctgcagccggaagagcacatgatcgccacctcagccgcccgcgccgcgctgcttaatatgacgctgaccctgtcgaaggatctgattggcaaagggattcgcgtcaattccattctgctgggcatggtcgaatccgggcagtggcagcgccgttttgcagaccgcagcgataagagccagagctggtcagagtggaccgccgacatcgcccgtaagcgcgggatcccgatggcgcggcttggcaaaccacaggaaccggcgcaggcgctgctgtttctcgcttcgccgctggcttcgtttaccaccggcgcggcgctggatgtgtccggcggcttttgccgtcacctgtaa

SEQ ID NO: 191372 - DNA, 771 bp, Klebsiella oxytoca
atgacgggttttcgtgaacaaggaagcggtacgccgctgacgctgctgcacggcatcagttccggcgcggcctcctggcataaacagatggcgcttcccggctaccgcgtgctggcctgggatatgcccggttatggcgaaagcccgatgcttgcgacggcgagggcggatgccggcgcctacgccgatgcgctggcgcggatgcttgaccgcgccggggtgcagaaaaccgttctgctcggccattcgctgggcgcgctggtcgccgccgctttcgccgccagatatccccagcgcgtgcggtatctggtgctggccgacgtcgcccagggctacggccaggcggaggccgagcagcgggaaaaagtctggcaggggcgtcagcagcaaatggctttgggcggcgaggcgatggccgaggggcgggcggcgaagctgctgcgcgccggcgcgcgcgaagccgatgtggcgacggtcgcggcaggcatgcgcaggctgcgcagtgaaggctatctcgccgccgcctggatgctggcgcacgaggacatccaccgctggcttgccgggtatcgcggccgcttcgccgtgtggtgcggcgagcaggatgccatcacccagcccgagctggtgcagggggtggcgctacgctacggcatgccgtatctcgccatcccgcaggccgggcacgccagctatctcgataacgctacgttttttaaccaacagcttttacgcataggggaagaggtgcgcgatgaatgcacaaattga

SEQ ID NO: 191373 - DNA, 531 bp, Klebsiella oxytoca
atgactgattcaaccgtaactgcaaaaccgagtctcaaacctgaacatctgacgatggaagagtgggtcgagtcgcgtatcgcgcgctttgaaggccgtaaatacgactggaatgcgctgaagttccaggcagattttgacccgaaatatcgtcgcgcgcagatgcgctacatcggcaccggcgcgaccggcgtcgccagcgatagcaataccgtccaggcggaacactttaccttctccaccatggtactgccgtccaggtgcgaaggccccctgcacctgcatgatgatgtggaagaggtgttcttcatgctcaaagggcagatcaccctgatgattcaggatggcgacaactacaccgagaccgttctgcgcgaacgcgatctgatttctgttcctgccgggatttatcgcgggctattcaaccacggcgaggaagaagcgctgatgtgcgtgatgctcggtacgccaaagccgcatattccgacctacccggaagatcatccgctgtcgaaagtgaagcgtagctaa

SEQ ID NO: 191374 - DNA, 1257 bp, Klebsiella oxytoca
atgaccacattagagactaacgccgcgcctgctgaggcgagcggcgagggcgtccgcacgcctgaaaaagcggttcgctgggccattccgctgtcgctgctggcctgcgtactgctggcgttcttcgacaaaatcagcatcgccgcgctgttttccgatagccacttccagcaggcgatggggatcgatttcgacaccacccgtctgggcatactgatgagcgctttcctgctgagctatggattctcttcggtgctgctaagcggcctgggcgaccgtattgcgccgctgcgcctgcttaccggaatgatggcggtgtggtgcgttttgatgctggtgatgggctttacccataactatacgctgatggtgacgctgcgaattttgctgggtatcgccgaagggccgctgttcccgctggcgttcgctatcgtccgccatacctttccccagcatttgcaggcgcgcgccaccatgctctggctgctcgggacgccggtcggcgcggcgattggcttcccgctatcgatttggctgcttaacaccttcggctggcagagcaccttctttgtaatggcgatgctgacggtaccggtactgatttttgtgcgcatcgggctgcgcggcatcacgctggaggcaaaagccagcggcgggcaaacgtcgcaggaggcacgccgcagcgcgcgccgcgagctgtttgtcagcccgcacttctggatgatctgcatcttcaacatcgcctttctcgcctatctgtggggcatcaacggctggctgcccggctacctgattaagggtaaaggcattcatctcgaacacgccggctggctgtcgtcgatgccgtttatcgccatgctgctcggcgaaattatcggcgcctggctgtctgaccgcgtcgataagcgcgccgccgcctgctttatttccctggcgggcgcaggcattggcctggcggcggtgatgcatttcaccaccccgctgccggtgattgcggcgatgagctttagcacctttatgtgggggaccggcgcgccgaatatctttgcgctgctggccaaggcaacccatccgcgagtcagcgccacggcgggtgggattttcaacgggctgggaaactttgccggggcgctatcgccggcggtgatgggcgcgctgatcgccttcacccacagcatggattccgggctgatttttctggcggtgatggcggcggtgggctgcgtcctgttactgccgctgctaagacgttactga

SEQ ID NO: 191375 - DNA, 1188 bp, Klebsiella oxytoca
atgacggcgcggatcgtgatagtcggcggcggccaggcgggcggctgggcggcgaaaacgctgcgcgaccagggcttcgggggcgagatttgcgtagtggcggaagaggaatgggatttctatgaacggccgccgctgtccaaagccgcgttgctggataccgatgcgcagctaccgcgcttgttttcgcacgaggcgcagcaggcgctgaacctgacctggtaccgtccgctgcgtgcagagcggattgaccgactagctaaaacggtgattttaagcaacggcgaacgcctgagttacaacgtccttttaatcgccaccggggggcgagcgcgtctaccggacgagtcgtgggcggcgcatccccaggtttataccctgcgtcactggcaggatgcgcagcgtctgaaaagtcgtctggcggcaagtcaaaaactggcgatagtcggcggcggctggattggccttgagattgccgcttcggcgcgcaaatgcggcgtggccgtaaccctttatgagcagcagccagcattgtgcatgcgttcggtgagcgcggaagtttcgcaggcgctggcgcagatgcaccgcgagcagggtgtcgatattcgctgcggctgcggcgcgctggagctggaagaggataacgctctgccaacgctgcactgcgatggccggcgggaaaccttcgatgcggtggtggtggggatcggggtcgatcttaatctcgaactggcgcgcgacgcggggctgaaaaccgagcgcgggatcgttgtggatagccaggggcgaacgtcggatccgttcatctttgctgccggggatgtggcgcagcatcatcactacggcctgtgcatccagtcctgggccttcgcccagaatcaggcggtggcgacggcaaaagcgattctcaaccccgatgcgccagtctacgacgacgcgccgtggctgtggtcggatcaatatcagcacaatatccagatcctcggtgttccgcagccgggcagcagaacgatagcgcgtgaagattcgctgtacttctcgctggacgaaaacgggcggctgacgcagctggtggcgttcaacgatgcgcgcaccgtcaagctggcgaagcgctggatggcggcggggcgagatttatccgctgtaccgctcgccgacccggctttttcactgatgtcgttgcgatag

SEQ ID NO: 191376 - DNA, 927 bp, Klebsiella oxytoca
atgagtattaccggaattgaaaagctggaatttggcgtagatgacctgaaccatagcgccaaatttatgcacgattttggcctggctggcgacgccagcggccgcgtgttcaccaccctcagcggcgcgcgcattgagcttaaccctttggaggctgccgacctgccgccggcttttgaaaccggcaatacgctgcgccgtatgacctggggcgtagcggaccaggcggcgctggaagcgctgcgtccaaagctggaacgtcagcctggcttccgcagggtcgacggcgcgctggagtgcctcgacccgaacggcatgacgctgcgagtgcaggtcagccagcaaaaggcggtggagctgaacgtcgagccaattaatcagtggggcgatattcgtcgtatcgacacgccgagtccggtttacgaccacgcgcagccgatcaacgtcggccacgtggtgttcttcgttgaagagctggcggcggtcgaaagcttctatcgcgaggtgctcggcttccaggtgtcagaccgctacattaaccgcgcggtcttcctgcgctgcggcgcgcgcggtggccatcacaacctcttcctgctgcagctgccgaaccgtaagcgcgggctgaatcatgttgctttcaccgtccgcgatattcacgaggtgatcggcggcggcatcgcgatgaacaaaaatgcctggagcactttcatcggccccggtcgccacccggtctcctcggcctacttctggtacgtcaacagccccaccggcggcgccttcgagtactacaccaacgatgattatctgacggaaaactggcagccgcgcgaactggagcactcgttggtctcctttaccgagtgggcggtggaaggcggaatcgaccacgatacccgccgccagcagaaaaaaacggaggcggtatga

SEQ ID NO: 191377 - DNA, 789 bp, Klebsiella oxytoca
atggcgaacgagcaggaagtgaagtatctggtgccggggcttgagcgcggcctgcagctgctgctggcttttggcgaacagcatcgcgatctgaccttcgccgagctgcaccggctggtggatatgccgaaagcgaccgcctatcgcgtggtgcaaacgctggagtatatgggctttctcgaacgcaacgcgcgcaccaataccttttcgctggggatgaacgtgctgcggctgggctttgaatatattgcctcgctggatatcgcccaggtaggtcagccggttatcgagcagttgcgtgatgtcagccagtgcagcagccatctggcaatccgcgatggccgggacatcatctacatcgctcgcgtcagcgcggccggttcgcggataaaccaggtcagcgtcggcacccggctgccggtgcactgcacctcgctgggccgcatgctgctgaccgatgtttcacgcagcgagtttgaacagctgttccccaacgagcggctgccgggcaacaccccgggccagctgcacgatcgcgaagcgctgtggcagatggtgcagcaggataaagcccgcggctatgtgattggcgagtctttctttcgccacggcatttcgtcgattgtctacccggtgtatgaccgcagcggccgggtggcgggagtcgttagtatcctggtgccctccgatgagatcccgcaaagcgatcgcgagcggctgcagaacgacgtcagcctggcggcggacaaaatttccggtttcctgggatatttgtctcaggcaagttaa

SEQ ID NO: 191378 - DNA, 750 bp, Klebsiella oxytoca
atgaacggtctgttgaacggaaaacgtatcgtcgtcaccggcgcggcgcgcggcctgggctatcacttcgccgaagcctgtgccgggcagggcgcggcggtagtgatgtgcgacattcttcggggcgaactggcggaaagcgctcatcgtctgcaggaaaagggctactgcattgaatcccatgagatcgatctcgccgatagcgagtcgatcgaccgggtattcagcgctatcggcgagcggggggcgatcgacgggttagtgaataatgcggcgatggccaccggcgtcggcgggaaaaacatgctcgattacgatccggatctgtgggatcgggtgatgacggttaacgtcaaaggcacctggctggtgacccgcgcggcggtgccgctgctgcgtgaaggggccgggatcgtcaatgtcgcttcggataccgctctgtggggagcgccgcggctgatggcctacgtggccagtaaaggtgcggtgatcgcgatgacccgctcgatggcccgcgaactgggggagaaacggatccgcataaacgccatcgcgccggggctgacccgcgttgaggcgacggaatacgtgcccgcggaacgccatcagctgtatgaaaacggtcgcgcgctcagcggcgcgcagcagccggaagacgtcaccggcagcgtagtctggctgctcagcgatctgtcgcggtttatcaccggccagctgatcccggtcaacggcggttttgtttttaactaa

SEQ ID NO: 191379 - DNA, 1023 bp, Klebsiella oxytoca
atgacaacaacggtacaaaactatcttgataaaggattacgcggcctgtggtatccggtgctggcgagctgggaagtgcagtcggcgccggtggggattacccgcctcggcgaacagattgtggtctggcgcaataaagatggccaggtgcaggcgctggaagaccgctgcccgcatcgcggcgcgcgcctgtcgatgggctggaacctgggcgatcgcattgcctgctggtatcacggcgtggaagtggccggtaacggcgaagtgaaagacgtcccggcggttgaccgctgcccgctggtgggtcagcagtgcgttcgcagctacagcgttcaggaagcgcatggcgccattttcctgtggtttggcgtcaccgccgaccagcagcctgatgagctgagctttccggaagagctggccaatagcgacaaatttagccacttcctgtgtaccgcagcgtggaaatgcaactaccagtacgcgctggaaaacgtgatggacccgatgcacggcacctatcttcactcctcctcgcactcgatggcggaaggcgatcgcaaagccgacatggtgctgcagccgacgaaaaccgggtttatttttgagaagaaagggcaggttggcgttaacttcgactgggtcgaactgggcagcagcggggcctactggatgcgcctctctattccgtacaaaaagcgcttcgggccgggcggccacttctggattgtcggcatggtggtgccggaagataacgacaactgccgcgtcttcttctggcgcatccgcggcgtacagggctggcagcgcgatctatggcgatttatgtaccgcaaccgcctggaaaaactgcactgggaagtgctcgaacaggatcgcgtggtgctggaaagcctggcgccgaatgcccgcgatcgcgaatatctttatcagcacgacgtcggcctttcccgcctgcgccgcatgatgcagaaagcggcaaaagagcagttggcggccctggaagagcagcagggagccgcctga

SEQ ID NO: 191380 - DNA, 309 bp, Klebsiella oxytoca
atgagcgaaaccctggactttaacccggcgctgccggaaagccgtcagtttacgccgccggtggaaggcggaaacggcaacattcacaaacccggcgactacaccaatctgatctggcaaacccgcagccgggtgccggaaagctgggagctacagcttatcgccaccctcgagacgctctttgaacagggcgcagaaagcctcggtgagctggtgaacggcctgaacggcgtcagaatgcacgaccagcagggggaaccgtggagcgagagcagcttccaggcatttctgcaggtaaacggatactga

SEQ ID NO: 191381 - DNA, 324 bp, Klebsiella oxytoca
atgagctggattggcgtgtgtgacgcggagcaagtacaggaagatttcccctatagcggcagtatcgacggtaaagaaatcggtatctatctgattgatggcgaatattacgcgctggaagacgtttgtccccatgcgtatgcgctgctgagccagggctttgtcgaagatggcaaggtggagtgcccgctgcatgaagcggtattcgacgtcaaaaccggccagtgtctgcacggccccggcgggcgcaacctgcatcgctacccggtgcgggtatacgacaagcagatccagatttcttttatcgaggagaacgtggcatga

SEQ ID NO: 191382 - DNA, 1212 bp, Klebsiella oxytoca
atggcggcaagatggcaaggtactatcgcattacttttgttaataattatttcttacgtcgatcgggtaaatatctcagtgatgattctgaaccccgaatttgccgctcactttcatttaaatgaaaacagaatgttacaaggcatgctgatgacatgctttcttcttggttatggtttatcggctttaatattaactccccttatagaaagtaagctcaactatcgccaggggctgttaagcggcgtagcgatatgggcgctggtttgcgcggtttctccgctgctgggctccctgctgggcatgttaatcgcgcgcatcgttctcggcgttgccgaggggccgttattctcgctgaaaacccgctttatcagcgatagcttcgccgccgatgaggtcggtaaacctaacgccgtgaccgctctcggcgtttcgctcgggctggcggctggctttccgctggtcacctggctgatggcgcacgtcggctggatgggatcgttttacgccctggcgctgctcaacctgctgctcggcggcggcttagtctggcgctttttacctgctccagtcgtcaatgaacgccgcgccaggcccggtatgattacaaccttgaccctcgcctggcgcacgccgctgctgggctggatcctgctggtggagatcgccaccctcagctatctatggggcagcagcgcctggctgccggcctggctgcgcgacgagcatcacttctcgctacaggctaccggcctgctggcggcggttccgtttctgctgagcctgggttcaaaatttctcggaggggtacttctcgataaaatgcgcccggagcaggcgccggtgctgtttattatcggcggcctgctgaccgctctgtcggtactggcgctgatgctcagccaccagcaggcgatgctggcgctgtttatgctggcggcgaacgttttctgggggctgcagggcgcggcgatcccggcggtcgtgcagcatcatgcgccgcgcgaagcggtaggcagcgcctatggcattattaatggcatcggtaatatctgcgcggcgtttatcccgctgctgatgggaatggtcatgaaatcggcgggatcggtaagctcaggattctcggtgctggtagtatcgcagctgataacgctttgcgccggaggcatgctgctgctgcgcatgcgtcgcgcagcagcagtcagcgtctga

SEQ ID NO: 191383 - DNA, 921 bp, Klebsiella oxytoca
atgagcaccttaggtcatcaatacgataactccctggtatccaacgcatttggctttctgcgtctaccgatgaattttatgccgtacgacagcgatgcggactgggtcatcaccggcgtaccgtttgatatggcgacctccggacgcgcgggcgggcgtcatggcccggcggcgatccgtcaggtgtcgactaaccttgcgtgggagcataaccgtttcccgtggaactttgatatgcgcgagcggctgaacgtcgtggactgcggcgatctggtttacgctttcggcgatgcgcgtgaaatgagtgaaaagctgcaggcgcacgcggaaaaactgctggcggcaggtaagcgcatgctttcattcggcggcgaccactttgtgacgctaccgctgctgcgcgctcatgctaagcacttcggcaaaatggcgctggtgcatttcgatgcccacaccgatacctacgccaacggctgcgaatttgaccacggcaccatgttctataccgcgccgaacgaaggcctgatcgacccgcaccattcagtgcagatcggcattcgcaccgagtttgataaggacaacgggtttaccgtgctggatgcgggtcaggttaacgaccgcagcgtcgacgacgtgatcgctcaggtgaaacagatcgtcggcgatatgccggtatacctgacctttgatatcgactgcctggatccggcgtttgcgccgggcaccggtacaccggtgatcggcggactgacctccgatcgcgcgatcaaactggtgcgcggcctcaaggatctgaacatcgtcggtatggacgtggtggaagtcgctccggcctatgaccagtccgaaatcaccgccctggcggcggcgacgctggcgctggaaatgctctacattcaggcggcgaaaaaaggcgaataa

SEQ ID NO: 191384 - DNA, 1977 bp, Klebsiella oxytoca
atgtctgacgacatgtctttatcttcgccttcgtcagcaggcgatcacggtgtactacgttccatgcaggaggttgcgatgagctcccaggaagccagcaagatgctacgtacttacaatattgcctggtggggtaataactactacgacgttaacgaactgggccatatcagcgtctgcccggatcctgacgttccggaagcgcgcgttgaccttgccgagctggtgaaagcgcgtgaagctcaggggcagcgcctgcctgcactgttctgcttcccgcagattttgcagcaccgcctgcgttcgattaacgccgcctttaaacgggcgcgtgagtcttatggctataacggtgactactttctggtttatcccatcaaggttaaccagcatcgccgcgtgattgaatcgctgatccactccggcgaaccgctgggtctggaagccggctcgaaggccgagctgatggcggtactggcgcacgccggcatgacccgcagcgtgattgtttgtaacggttataaagaccgtgaatatatccgcctggcgctggtgggtgaaaagatgggccataaggtctatctggtcattgagaaaatgtcggaaatcgccatcgtgctggaagaagccgaacggctgaacgtggtgccgcgtcttggcgtgcgtgcgcgtctggcttcgcagggctctggcaagtggcagtcctccggcggcgaaaaatccaaattcggcctcgcggcgacccaagttctgcagctggttgaaattctgcgcgctgcagggcatctcgacagcctgcagctgctgcacttccaccttggctcgcagatggccaatattcgcgatatcgccaccggcgtgcgtgaatcggcgcgtttctacgtcgagctgcataagctgggcgtgaatattcagtgcttcgacgttggcggcggtctcggcgttgactatgaagggacccgttcgcagtccgactgctcggtgaactatggcctgaacgaatacgccaacaacattatctgggcaattggcgatgcctgtgaagagaacggtctgccgcatccgacggtgattaccgaatccggccgtgcggtcaccgcgcaccacaccgtactggtatccaacatcatcggcgttgagcgtaacgaatataccgaggcgaccccgcccgcggaagatgccgcgcgtccgctgcaaagcatgtgggaaacctggctggagatgcaggaaaccggcaaccgccgctcgctgcgcgaatggctgcacgatagccagatggatctgcacgatattcatatcggctactcctccggcacctttaatcttcaggaacgcgcctgggccgagcagctgtatctgaatatgtgccatgaagtgcagaaacagctcgatcccagcaaccgcgcgcatcgcccgataatcgatgagctgcaggagcgtatggcggataagatttacgtcaacttctctctgttccagtcgatgccggatgcatggggtatcgatcagctattcccggtgatgccgctggaagggttgaacaaggtaccggaacgccgcgcggtgctgctggatatcacctgcgactccgacggcgcaattgaccactacgtcgatggcgatggcattgcgaccaccatgccgatgccggaatacgatccggaaaatccgccgatgctgggcttcttcatggtaggcgcctaccaggagattctgggcaatatgcacaacctgttcggcgatacggaagccgtagacgtgtttgtcttccctgacggcagcgtcgaagtggagctgtcggatgagggggacaccgtcgcggatatgctgcagtacgtccagctggatccgaacacgctgctgacgcagttccgcgatcaggtgaaaaagaccgatctcgacgctgacctgcagcagcagttccttgaagagttcgaagcgggtttatacggctacacttatctggaagacgagtga

SEQ ID NO: 191385 - DNA, 1155 bp, Klebsiella oxytoca; identical to SEQ ID NO: 172923

SEQ ID NO: 191386 - DNA, 1395 bp, Klebsiella oxytoca
atgcctgacaacaaaaaacaagggcgttcaaacaagacgatgacgttctttgtctgcttcctcgccgcactggcaggcctgctatttggcctggatattggtgttattgcgggtgccttaccctttattgccaacgagttccagataagcgctcatacgcaggaatgggtagtaagctccatgatgttcggcgccgcggtcggcgcggtcggcagcggctggctctccttcaaactcgggcgtaaaaaaagcctgatgattggcgccatcctgttcgttgccggttccctgttctccgccgccgccccgaatgtggaagtcctgctcatttctcgcgtgctgctcggcctcgccgttggcgtcgcttcctacacggctccgctgtatttgtcggaaattgcgccggaaaaaattcgcggcagcatgatttcgatgtaccagctgatgatcaccattggtattctcggggcgtatctttcggataccgctttcagctacagcggcgcctggcgctggatgctcggggtgatcattatcccggcggtgctgctgctgattggcgtagttttcctgccggacagcccgcgctggtttgccgctaagcgccgctttgtcgatgccgaacgcgttctgctgcgcctgcgcgacaccagcgctgaagcgaaacgcgagctggatgagatccgcgaaagcctgaaggtaaaacagtccggctggtcgctgttcaaagaaaacagcaacttccgccgcgcggtgttcctcggcgtcctgctgcaggtgatgcaacagttcaccggtatgaacgtcatcatgtactacgcgccgaagatttttgaactggcgggctatgccaacaccaccgaacagatgtgggggaccgtcatcgtcggtctgaccaacgttctggcgacctttatcgccatcggactggttgaccgctggggccgtaaaccgacgctgatcctcggctttatcgtcatggcactcggcatgggcgtgctgggcagcatgatgcatatcggcatccactccgccacggcgcagtactttgccgtcctgatgctgctgatgttcatcgtgggttttgcgatgagcgccggcccgctgatttgggtgctgtgctccgaaatccagccgctgaaagggcgtgatttcggtatcacctgctcaacggcgaccaactggattgccaacatgatcgtcggcgcgaccttcctgacgatgctgaactcgctgggcagcgccaacaccttctgggtctatggcggccttaacatcctgttcatcttcctgactctgtggttgatcccggaaaccaaaaacgtttcgctggaacatattgaacgtaatctgatgaaaggccgtaaactgcgcgaaatcggcgcgcgcgactag

SEQ ID NO: 191387 - DNA, 459 bp, Klebsiella oxytoca
atgcgcagcctgcgggaaaatcttgccaaagcgaacctcaagctgggacgacattaccctgaaccggtgctagtttatcagcagcggggaacctccgccggtaccgcctggctggagaaaaacgaaattcgccttaacccggtgctgctgctggaaaaccagcaggcttttatcgacgaagtcgtgccgcacgagctggcccatctgctggtatggaaacactttggccgcgtggcgccgcacggaaaagagtggaaatggatgatggagagcgtactgggcgtaccggcgctgcgtactcatcgtttcgaactcgattctgtccgtaaaaataccttcccctaccgctgccagtgtcagcagcatcagcttaccgttcgccgccacaatcgcgtgatgcgcggtgaggccacctatcgctgcgtgcgctgcggcgacgtgctggtggcggaaaagtaa

SEQ ID NO: 191388 - DNA, 708 bp, Klebsiella oxytoca
atgtcccgtatttatatttttgctgccgcgtttcttagcgtggcggcgtgtgccccgcttgctgcggagggaatcaacagtttttctcaggccaaagccgctggcgtcaaggtcaacgccgacgtccccggcgatttctactgcggctgtaaaatcaactggcaggggaaaaagggcgttatcgatctggaatcatgcggctataaagtgcgtaaaaatgagaaccgcgccagccgggtagagtgggaacacgtggttccggcctggctgtttggtcaccagcttcaatgctggcaggacggcgggcggaaaaactgcgccaaagacccggtctatcgcaagatggaaagcgacatgcataacctgcagccggcggttggcgaggtcaacggcgatcgcgccaactttatgtacagccagtggaacggtggcgaaggccagtacggccagtgcgcgatgaaggttgattttaaagataaagttgccgagccgccggctcgcgcccggggcgcgattgcccgcacctacttctatatgcgcgaccgctaccagcttaatctttcccgccagcaaacccagctgtttaccgcctggaataagctgtacccggtaacacgctgggaatgcgaacgcgacgcgcgtattgcaaaagttcagggcaaccataatccttacgtcctgcaggcttgccaggcgcaaaagagctaa

SEQ ID NO: 191389 - DNA, 732 bp, Klebsiella oxytoca
atgcgcatccctcgcatccatcacccggaacgcatcactacgggtagccagatagccctctccgacgacgcggccaaccatgtcggtcgcgttttacggatgggtaaaggccaggcaatcgagctttttgacggcagcaatcaggtcttcgaggcggtcattgtcgaggcaggtaagaaacatgtgctggttgaagtacagagcggcaaaatcgataaccgcgaatcccctctgcatatccatttaggccaggtgatgtcacgcggcgaaaaaatggaattcaccatccagaaatcgatcgaacttggcgtaagcctcataacgccactgttttccgaacgctgtggcgttaaactggacgccgaacgtttgcacaagaagattcagcagtggcagaaaatcgccattgccgcctgcgagcaaagcggccgcaacgtggtgccggagatccgcccggcaatgcagctcgaagcctggtgcgcggagcaggacgagggcctgaagctcaatttacaccctcgcgccagcgccagcatcaatacgctgccgctgccggtcgaacgcgtccgactgctgatcggtccggaaggcgggctttcggcagaagagatagcgatgaccgctcgctaccagtttactgatatcctgttgggaccgcgcgttctgcgtacagagacaactgcgctcactgccattaccgccctgcaggtgcgttttggcgacttaggttga

SEQ ID NO: 191390 - DNA, 948 bp, Klebsiella oxytoca
atgattaagctcggcatcgtgatggaccccatcgcaaccatcaacatcaagaaagacaccagcttcgctatgttgctggaagggcagcgtcgcggctatgaactccactatatggagatgaacgatctgtacttaatcaacggtgaagcccgcgcccgtacgcgcaagctgagcgtcgagcagaactacgacaaatggtacgagttcaacggcgagcaggatctgcctctggcggacctggacgtcattctgatgcgtaaagatccgccgtttgataccgagtttatctatgcgacctacatcctcgaacgcgccgaagagaaaggcacgcttatcgtcaataagccgcagagcctgcgcgactgtaacgaaaagctgtttaccgcctggttctccgagctgacgccggaaacgctggtcactcgcaataaagctcagctgaaagccttctgggaaaagcacggcgatgtcatcctcaagccgctggacggcatgggcggtacctccattttccgcgtgaaagagggtgaccctaacctcggcgtgattaccgagaccctgaccgagctgggcagccgctactgcatggcgcagaactatctaccggccattaaagacggcgataagcgcgtgctggtcgtggacggcgagccggttccttactgcctggcccgtattccgcagggtggcgaaactcgcggcaacctcgccgccggcggccgtggcgaagcgcgccccctgaccgaaagcgactgggctatcgcccgccgcgtaggcccgacgctgaaggccaaaggcttaatcttcgtcggcctggatatcatcggcgatcgcctgacggaaattaacgtcaccagcccaacctgcgtacgtgaaatcgaagccgccttcccgatttccatcaccgggatgctgatggacgccatcgaaaagcgcctcaataaataa

SEQ ID NO: 191391 - DNA, 564 bp, Klebsiella oxytoca
atgaatttacagcatcactttctgattgccatgcctgctctccaggacccgatgttccgtcgctccgtagtctatatctgcgagtataacgatgacggcgccatgggcatcatcatcaataagccgatggaaaatctgcaggttgaagggatcctggagaagttaaaaatcacgcctgagccgcgcaatcccgagatccgcctggataaaccggtgatggttggcggcccgctggccgaggaccggggttttatactgcactcgccgccctctgacttttcttccagcattcgtatttccgataatacggtgatcaccacctcccgcgacgtgctcgaaacgctgggcacggataaacagccggacaacgtgctggttgcgctgggctatacctcctgggagaaaggtcagttggagcaagagatactggataacgcctggctcaccgcaccggcggatcggaacattttgttcaatacgccaatagccgaccgctggcgcgaggctgcgaagctgatcggcatcgatatcgtcaccatgccggccgcagcggggcatgcctga

SEQ ID NO: 191392 - DNA, 417 bp, Klebsiella oxytoca; identical to SEQ ID NO: 172916

SEQ ID NO: 191393 - DNA, 654 bp, Klebsiella oxytoca; identical to SEQ ID NO: 172915

SEQ ID NO: 191394 - DNA, 981 bp, Klebsiella oxytoca
atggaactggaagaaatagtggcccttagtgtaaagcataacgtctccgatctacacctgtgcaatgcttcagcgccgcgctggcgtcgccagggaaagctggagcctgcgccttttacctcccctgatatcagcaaaatactccatgactggctcaacgccgagcagctcgcgcagtggcaggccagcgggcaggtcgatttcgctttagcgccggctggcgggccacgccttcgcgccagcgcatttgcccacagccgcggcctgtcgctggcgctgcgtctgctggcggaaacctgcccgcagctggaggcgctcggtgtaccagccgccttaagcgagctgctcaatgaggagagcgggcttatcctcgtcacgggcgccaccggcagcgggaaatcaactaccctggcggcgatggtgggctatcttaatcagcgcctcaatggtcatatcctgacgctggaagatccggtcgaatttattcaccacagcgagcgttgcctgatccagcagcgggaaatcggccgccactgcccctcctttgccgcggcgttacgcgctgcgctgcgtcaggatccggacgtcattctgttaggggaactgcgcgatagcgaaactatccgcctggcacttacggcagcggagaccggacatctggttatggcgacgctgcatacgcgcggcgcggcgcaggcggttgaaaggctggtggatgtttttcccgcccaggagaaagagcaggttcgcagccagctggcgggaagtttgtgcgcggtactggcacaaaaattgtttccggatgctgcaggcggcagagttgcgctatacgagcttttagttaataccccagcagtggcgaatttgatccgggagggaaaaacgcatcagctgcccggcgtgatgcaaaccgggcagcaatctggcatgcaaacatttacgcaaagctttcagcaacgtacggcagcgggtcttttatag

SEQ ID NO: 191395 - DNA, 705 bp, Klebsiella oxytoca
atgaacgatattgcgcataacctggcacaggtccgggacaaaatctcagccgctgccgcacgctgcggccgtgctccagaagaagttacgctgcttgcagtcagtaaaacgaaacctgcgagcgctatcgaagaagcgatggccgcaggccaggtcgcgtttggcgaaaactatgttcaggaaggggtggagaaaatccgctactttcaggagaccggggcaagcgggctgcagtggcactttattggtccgctgcagtccaacaaaagccgcctcgtggccgaacattttgactggtgtcataccgtcgatcgactcaaaatcgccgctcgcctcagtgaacagcgccctgccgacatgccgccgctcaacgtgctgattcaaatcaacattagcgatgagcagagcaagtcgggtattccgcctgcagagctggacgcgctggcggcagagatcgctaaattgccgaatctgcagctgcgcggtttaatggccatccccgcgcctgagtcagaatatgtaaggcagtttgccgtcgcccaacaaatggcggtagcatttgcgcggctaaaaacgcactaccctaccgtcgatacgttgtcgctgggaatgtcggatgatatggaagccgccatcgaggcgggaagcactatggtgcgcatcggaaccgcaattttcggcgcgcgcgactacagcaaaaaataa

SEQ ID NO: 191396 - DNA, 567 bp, Klebsiella oxytoca
atgaagacgttgactttcctgctctcaacggtcattgagctttatacaatggtcgtgttgttacgcgtctggatgcagtgggcgcgctgcgacttttataacccgttttcgcagttcgtggtcaaggctacgcagcctgtcgttgggccgctgcgccgcattatcccggcgatggggccgctcgacagcgcctccctgctggtcgcctttattctctgcgtcgtgaaagctatcgtcctgtttatggtcgtcaccttccagccgattatctggatctccgcgctgctgatccttatcaaaaccgtcggctcgctgatcttctgggttcttctgttaatggcgatcatgagctgggtaagccagggccgtagcccggtggaatatgttctgatgcagctggcagacccgctgctgcgccctatccgcaggctgctgccctcaatgggcggaattgatttctcgccgatggtgctggttctgctgctgtacgtgatcaatatgggtatcgccgaactgttgcaggctaccggtaacgttctgcttccggggctgtggatggcgctatga

SEQ ID NO: 191397 - DNA, 291 bp, Klebsiella oxytoca
atgagtgctgtccaggcctgcgctgacggtctggtcttaaggctgtatattcagcctaaggccagccgcgacagcatcgttggtttacatggcgacgagctcaaagtcgccattaccgcgccacccgttgacggccaggccaacgcccatctggtaaaatttctcgccaaacagtttcgcgtagcaaaaagccaggtgcttattgagaagggcgaactgggtcgccacaaacagataaaaatcattcatccgcagcagatccccgacggggtcgctgcgctgacagaatag

SEQ ID NO: 191398 - DNA, 594 bp, Klebsiella oxytoca
atgcaaaaagttgttctcgccaccggcaatcccggtaaagtgcgcgagctggcctcgctgctggcagattttggcctcgatatcgtggcgcaaaccgaactgggcgtggattccgcagaggaaaccggcctcacgtttatcgaaaacgccattcttaaagcgcgccacgccgcgcagattaccggccttccggctatcgccgatgactcaggtctggccgtcgatgcgttaggcggcgcgcctggcatctattctgcccgctattccggtgaagatgcgaccgaccagcgcaatctggaaaaactgctcgacgcgctacgcgacgtgccggacgataagcgccaggcgcagttccactgcgtgctggtctatctgcgccatgcggaagatcccacgccgctggtgtgccacggcagttggccaggcatcatcgctcgccaggccgccggcagcggcggctttggttacgatccgattttctttgttccgacggaaggtaaaaccgcagcggagctgagccgtgaagagaagagcgccatttcccaccgcggacgagcgctgaaactgttactggaaggcttacgtaatggctaa

SEQ ID NO: 191399 - DNA, 1137 bp, Klebsiella oxytoca
atggctaatttgccgcccctgagcctctacattcacatcccgtggtgcgtgcagaaatgcccgtactgcgatttcaactcgcatgcgttgaagggcgaagtgccgcatgatgactatgtccagcatctgctgaacgatctgcgcgccgacgcccactatgcgcagggacgtgaaatcgggacgatttttattggcggcggtacgccgagcctgctctccggcccggcgatgcaaaccctactcgatggcgtacgcgcggctcttccgctggcggccggagccgaaatcacgatggaagccaaccccggcaccgtggaagcggatcgcttcgtggagtatcagcgcgccggcattaatcgcatctccatcggcgtacagagctttagcgagcaaaagctgcagcgtctggggcgcattcatgggccacaggaagccaaacgcgcggcaaacctggcaagcggtctgggactgcgcagctttaacctcgatttaatgcatggtctgccggaccagtctctggaagaggcgctggacgacctgcgccaggcgattgcgctcaatccgccgcatctctcctggtatcagttgaccattgaaccaaataccctgtttggttcgcgaccgccggtcctgcctgacgacgatgcgctgtggaatatttatgagcaggggcatagcctgcttagcgccgcgggctaccggcaatatgaaacttccgcctatgcaaaaccgggatatcagtgccagcataatctgaactactggcgctttggcgactacctgggcattggctgcggcgcgcacggtaaagtgacgtttgcggacggacgcattctgcggacggcgaaaacccgccacccgcgcggttatatggaaggccgttacctggagcgccagcatgatgttgagaacgcagataaaccgtttgagttctttatgaaccgtttccgcctgctcgaagcggcgccacgggatgaattcagccgctttaccggcctcgacgagcggacgatccgcccgcaaatcgatgccgctattgcccagggctacctgacggaagatgaaggctgctggcagattaccgagcacggcaagctatttttgaactcccttctcgaattattcctcagcgaataa

SEQ ID NO: 191400 - DNA, 987 bp, Klebsiella oxytoca
atgaaaaaactctcgttttctcgttctctggtgtgtgtttctttgcttgccctgctctcagcgggcgccagcgcagctgaaaaagttacgttaaaactggcacataaccttgaacgcagccacgttgttcatcaggcgtttgagcagatggcgaaagaggttaaccaactttccaacggcaatatgaaaattcgcatttaccccagtagccagatgggcagcgcgcgtgaaacgatggagttattacaaaacggcgcactggatatgacgaaaggttccgccagcgacctggagtcatttgataacgtctacgcgatatataatttaccgttcctgttcaaggatcagaatcacttcaataaagtcgtcttcggtgaagtgggtaaagaaataatggagtccacgaaagataaaggattctttgccctttccgcttatgttgccgggacccgaagtttttatgctaaaaaacccattactaaaccggaagatttaaaagggctgaaaatccgcgtccaggccagtccgacaacgttgaaaatgatcgaattaatgggcggttcgccaacgccaatttcgtttggtgaagtctataccgcgatgcagcagggcgtagtggacggcgcggaaaataacgtaccttcctgggtgcaaacgcgccatatcgaaatcgctaaggttttctcagaagatgaacatgcctccatcccggacttcctcgttatctccagcaaaacctgggacaagctgacgccggagcagcagcaaatcctgaacgaggcggcgaaagcctcagaggcctatcagcaaaaactgtgggacaaaattgacgccgacacccgcgcgcaggccaaagccatgggcggcgaaattatcaaagttgataaagcaccgttccgcgccgccgttcaaccgctctttgatgacttcaaaaaagatccgaagcaggcggctctgctggccaaatttgaagctgctgctgaataa

SEQ ID NO: 191401 - DNA, 504 bp, Klebsiella oxytoca; identical to SEQ ID NO: 172907

SEQ ID NO: 191402 - DNA, 1302 bp, Klebsiella oxytoca
atggacagctatatcgcactgatgctatttggctctttctttattctggtttttattggcgtacctatctccttctccattggcatcgctaccgtcggttcgatgctgctgatgttcccctgggatatcgcagtgattaccgtttctcagcgcctggcaaacggcctcgataacttcgcgctgctggcgattccattctttatctttgccggaaccctgatgaacagcggcgggattgccatacgtttaatcaatctggcccaggtgatggtcggacgcgtgccgggctctctgggccacgtcaacgtgctggccaatatgatgttcggctcgatttcaggctcagcggtcgccgccgccgccgcggtcggcggcacgctcaaccccatacagacgcagaaaggctacgatccggccttctctacggcggtgaacgtctcatcctgcatcacgggtctgcttattccgccgtcaaacgtactgatcgtcttttccctgaccgcaggcggcgtctcggtggcctcgctgtttatggccggctatttgccgggcatcctgatgggcctggctattatggtggtctgtgccgtcattgctaaacgtcgcggctatccggtttccgagcgtccgacctgcgcccaggcggcaaaagcgtttttcgatgctctgcccagcctgctgctggtcatcattgtgatgggcgggatccttggcggcatttttaccgcgacggaagcctctgccatcgccgtggtctacacctttatcctgtcggtactgatatatcgggaagtgaagtggcgcgatctgccgaagctgattctggaatcggtagtcatgacctctattgtgctgctgctgattggcttttccgtgggcatgtcgtgggcgatgaccaacgccgacattccctacatgataagcgacgcgctaatgggcgtttctgaaaacccggtggtgattctgctgctgataaatatcgtgctgttaatcgtcgggatctttatggatatgaccccagcggtgctgattttcacgccgatattcctgccaatcgcgcaggacctggggatggatccggtgcacttcggtattatgatggtcgccaatctgtgtatcgggctgctcaccccaccggttggcagcgcgctgttcgttggctgttctatttctggtgtcaaaattcagcagttgatcaaaccgctgctgccgttctacgccgccctgctgatcgcgctgatgatgattgtctatatcccgcagatttcgctgtttattccgcagctgctggggctgatgtag

SEQ ID NO: 191403 - DNA, 1008 bp, Klebsiella oxytoca
atgaaatatgcatggaaaacgctcaccgtcctgatgatcgcttccccttgtcacgtgctggcggatgccaacacgccaacagacgacgtggtaaaacagcagtttgctgaacagactggcgggattatgcgcttgcaaaatgtgacgctgaagcagctagacgccaggggaaatcaggcgacctatatgctggaaggcgatatggccgccgcggaagatctctatattcgcgtcggcgtcgcgggagattactttttttatgagcgagtctggaccagggggcggccggtaaagttctccgccatgatgaccgcggtagggaccaaagactccggctggcagaccgaattcttttcgctgcagatggcggcgaagaggggcgggagaacctttaaggaaatcggaggggatgaaagtaaaaccctgatcgtcaatgaccacaaatttatggcgcaatttgccaaaattgacgccagctttgccgccagcaaagccacgatgaagacgctgcaagggcaacaggatgcgctgaaaaccgagatcgccgcgttagagaagcagattaaccgttcatggggtacggatgcgaacggcaagccgctcgatcgcagcgacgtgcagcaggcgatgctggaaaaaatgtatgaagtagaccggcaaaacgatccgctgaagttcgagaatcattactacaaaactctctatgaacccgcactggccgtctgtcagaaaaaagcggtttgcgatgccgcgccgctgcgcgccgagcgcgatgccgtgctgaatgagcagaagcgtaactattatcgccagcataaagagatgagtgaaaatatcaaagcggagatggccgcgcgcgataaaaagatagcgccgctgcagaagcaaaaaggcgaactgaacgcgcagctgatggcgctggagatccgctaccgggagttggctcgcgacgaaaaatactggcaggaggggctggagaagatgcgccgcaacggggttctaaagtag

SEQ ID NO: 191404 - DNA, 717 bp, Klebsiella oxytoca
atgcgcaaaacgctgttagctgtggcgctttccgtcaccgctttgtccgcgcatgcggactaccagtgtagcgtcacgccgcgtgacgatgtcatcctcagcccgcagcaggtgcaggtgaaaggcgaaaatggcgatctggtgattaagccggacggcagcctgagctttaacgggaaagcgtattctctgaacgccgctcagcgcgaacaggctcaggactatcaggccagcctgcgcagcagcctgccgtggattgatgaaggcgcacgctcgcgggtagaaaaaggccgcgccgcgctggataaaattattaccgaacaggtaggggccagcagcagcatgcatagccgcctgaccaagcttgatgcgcagctgaaagcgcaaatgagccgcataattgaacatcgtaacgatggcctgacgttccactataaagctatcgatcaggtgcgcgccgacggccagcagctggtaaaccaggcgatgggcggcatcctgcaggacagcatcaacgagatgggcgcgaaggcggttctcaaaggcggcggtaacccgctgcaggggatcctcggcagccttggcggcctgcaaaccgccattcaggatgaatggaaaaatcaggaagccgatttccagcagtttggtaaggatgtctgcagccgcgtggtttcccttgaggatagccgcaaagcgctggtggggtccttaaagtaa

SEQ ID NO: 191405 - DNA, 327 bp, Klebsiella oxytoca
atggcaacgaatcgtagccgtcgtctgcgtaaaaaaatgcatatcgacgaatttcaggaagtgggtttttccgtcgcgtggcgttttgcggaaggaaccagcgaagagcagatcgaccagaccgttaacgatctgattgatgaggtgattgagcctaataagctggcctttgacggcagcggctatctctcctgggaaggcctgatctgcctgcaggaaatcggtaaatgcaccgaggagcaccaggccattgtgcgtaaatggctggaagaccgcgggctggccgatgtacgcaccagcgaactttttgatatctggtgggactaa

SEQ ID NO: 191406 - DNA, 720 bp, Klebsiella oxytoca
atgaaaaacgacgtcatatctccggaattcgatgaaaacggccgtccgctgcgccgtattcgcagcttcgtccgtcgtcagggccgcctgactaaaggtcagcagcacgcgctggacaccatttggccggtgatgggcgttgaatttaacgatgcgccgctcgattttgccgcgctgtttggccgtgaagcgcccatcacgctggagattggttttggtatgggcgcttcgctggtggcgatggcgaaagagaagccgcagcagaatttcctcggcattgaagtgcactctcctggcgtcggcgcctgtctggcgtctgctgaagaagagggcgtgcaaaatctgcgcgttatgtgccacgatgcggtagaagtgctgcacgcgatgatccccgataactccctgagcatggtgcagctgtttttccctgacccatggcacaaagcgcgtcataataagcgccggatcgttcagccgccttttgccgaactggtgaaaagtaaactgaagctgggcggcgttttccatatggcgaccgactgggagccctatgccgagcatatgctggaagtgatgtcctcgcttgaaggatatcgcaaccggtcagaaagcaacgactatgtgccgcgcccggaatcgcgcccggtaaccaaatttgaacagcgtggccatcgtcttggccacggcgtatgggacttaatgttcgagagggtgaaataa

SEQ ID NO: 191407 - DNA, 1059 bp, Klebsiella oxytoca
ttgacttttctcgccgcgcaattttcagcccaggtactggactggtacgacaaatacggacgtaaaaccctgccctggcaaatcggcaagacgccctacaaagtatggctctccgaggtgatgttgcaacaaacgcaggtggcgacggtcatcccctattttgagcgctttatggcgcgtttcccaacaattaccgatctggccaatgcgccactcgatgaagtcctccatctgtggaccgggctgggctattacgcccgcgcgcgcaatctgcataaagcggcgcagcaggtggccaccctgcacggcggaaacttcccgcaaacttttgatgaagtcgccgcgctgccgggcgtgggtcgttccaccgccggggcgattttatccctttctctcggtcagcattatccgattctcgacggcaacgtgaagcgcgtgctcgcgcgctgctatgctgtcagcggttggccggggaaaaaagaggttgagaaacgcctgtgggatattagtgaggacgtgacgccagcgaaaggggttgagcgttttaaccaggccatgatggacctcggggcgatggtgtgtacccgctctaagcccaaatgcgagctctgtccgctgaataacggctgcgtggcctacgccagtcattcatgggctcaatatccaggcaaaaaaccgaaacagacgatcccggaacgtaccggctatttcctgctgatgcagcacggcgatgaggtatttctctgccagcgcccgccggtgggtttatggggcggattgttctgcttcccgcagtttgaagatgaagatgcgctgcggcagtggctggcgcagcgccagattaaggccgataatctgacgcaattaaccgcgtttcgccacactttcagccatttccatctggatattgtgccgatgtggcttacagtgcactcatccggcgcatgcatggatgaagggggcgcactctggtataacttagcgcagccgccgtccgtcggtctggcggcccccgtggagcgcttgttgcaacagttaaaagccggagcaccggtttag

SEQ ID NO: 191408 - DNA, 276 bp, Klebsiella oxytoca
atgagcagaacgattttttgtactttcctgcagcgtgaagccgatggccaggattttcagctgtatccgggcgaactgggcaaacgtatctataacgaaatctctaaagaagcctgggcccagtggcagcataaacagacgatgctgatcaacgagaaaaaactcagcatgatgaaccccgagcatcgcaaactgctggagcaggagatggttcagttcctgtttgaaggtaaagacgtacacatcgaaggctatacgccgccagaaaaacagtaa

SEQ ID NO: 191409 - DNA, 1086 bp, Klebsiella oxytoca
atgatgaaaaaatacttagcgctagcgctgattgcgcctttgctcgtttcgtgttccagctcaaccaaaaaaggcgccgagtataacgaggcgtgggtgaaggacaccaacggctttgatattctgatgggccagttcgcccataacatcgagaacatttggggttataacgaagttctgctcgccgggccgaaagactacgtcaaatacaccgaccagtatcaaacccgcagccacatcaactttgacgccgggacgattaccgtcgaaaccatcgccggcaccgacccggccgggcgtctgcgccaggcgattattaaaaccctgctgatgggcgacgaccctaactccatcgacctctattccgacgtcgatgacattcagatctcaaaagaaccgttcctgtatggtcaggtcgtggataacaccggtgagtcgattcgctgggagtggcgcgcctcacgctttgcggactacctgctgcaaacgcgtctgaaaagccgcagcaacggtccgcgcatgatctacagcatcaccatcaacctggtgccgaaccatctcgacaaacgtgcgcataaatacattggcatggtccgtcaggcgtcgcgcaaatatggcgttgatgagtcgctgatcctggcgattatgcaaaccgaatcgtcctttaacccctatgcagtcagccatgccgacgcgctggggctgatgcaggtggtgcagcacagtgccgggaaggatgtgttccgctcgcaggggaaatccggcctgccgagccgcagctatctgttcgatccggccaataatatcgataccgggaccgcctatctggccatgctgaacaacgtctatctggccggtattgctaaccccacctcgcgtcgctatgcggtgattaccgcctataacggcggcgcgggcagcgtgctgcgggtcttctccagcgataagattcaggccgcgaatatcatcaataatatgacgccgggcgacgtttatcagaccatcaccagccgtcacccgtccgccgaatcgcgccgttatctctacaaggtaaacaccgcgcaaaaaggctaccgccgcaagtaa

SEQ ID NO: 191410 - DNA, 1257 bp, Klebsiella oxytoca
atgaatcttaagctgcagctcaaaatactgtcgttcctgcagttctgcctctggggaagctggctgaccacgctcggctcatatatgttcgttaccctgaagtttgacggtgcggccatcggagcggtttatagctcgctcggtatcgctgcggtatttatgccgacgctgcttggtatcgttgccgataaatggatcagcgccaaatgggtttacgccatttgccatctggtcggcgcgctgacgctgtggctcgccgcccaggtcactacgccgggcgagatgttcctcgtcatcctgcttaactcgctggcctatatgccgacgctggggctgattaacaccatttcctactaccgcctgcagtctgcgaacatggatatcgtgaccgatttcccgccgattcgcatctggggcaccatcggttttatcctcgccatgtggggcgtcagcttctccggctttgagctgagccatatgcagctctatatcggcgcggcgctctccttgctgctggtgctcttcactctgacgctgccgcatattccggtggccaatcagcagaaaaaccagagctggaccgccatgctgggccttgatgccttcgcgctgtttaaaaacaaacgtatggcgatcttctttattttctcgatgatgcttggcgccgaactgcaaatcaccaatatgttcggcaacaccttcctgcacagctttgataaagatccgctgttcgccagcagctttatcgtgcagcacgcctcggtgatgatgtcgatttcgcagatctcggaaaccctgttcattctgaccatcccgttcttcctcagccgctacggcatcaagaacgtgatgctgattagtatcgtggcgtggatgctgcgcttcggcctgttcgcttacggcgacccgactccgttcggcaccgtgctgctggtgctgtcgatgatcgtttatggctgcgccttcgacttcttcaatatctcggggtcggtgtttgtggaaaaagaggttcgcccggaaatccgcgccagcgcccagggaatgttcctgatgatgaccaacggtttcggctgcatacttggcgggatggtgagcggcaaagtggtggagcactttaccgtcgaagggattaccgactggcaaaccgtatggctgattttcgccggctattcgctggttctggcgtttgctttcgtcgcgctgtttaaatacaagcacgttcgcgtaccagccggtgcgcagaccgtcgtacattaa

SEQ ID NO: 191411 - DNA, 2187 bp, Klebsiella oxytoca
atgccctggcctaagccttttactctccggaaacgggtatccgcgctcatgaaatcaatgcacattgccgccagccgcgagctggtatcccacctgtccacccaccgtcgcgtggtggccctggacagtactgattttaccgatgtggcggcagtcgtcattaccgtggcggacagccgcagcggcatccttgcgttgctgaaacgcacgggctttaacctgccggtctatctgttcagcgaagctgagcacgaaaaaccagaaggcgtgacggccatcgttagcggcaaagagcaggagtggctcgaactggaagccgccgcctgcgactatgaagagaacctgctgccgccgttcttcgatacgctgactcagtacgtagagatggataacagcaccttcgcgtgccctggccatcagcacggcgccttctttaagaagcatccagcggggaggcagttcttcgacttctttggtgagaacgtctttcgcgccgacatgtgcaacgccgacgttaagcttggcgatctgttgattcatgaagggtctgcgaaacacgcgcagaagttcgcggcgaaggtcttcaacgccgataaaacctattttgtccttaacggtacctcggcggcgaacaaagtggtgactaacgcgctgctgacccgcggcgatctggtgctgtttgatcgcaataaccataaatccaatcatcatggggcgctgattcaggcaggcgcgacgccggtctatctcgaagcatcgcgcaacccgttcggttttatcggcgggattgacgatcgctgcttcgatgaaaaatacctgcgcgatctgattcgcgagacggcgccggaaaaagctgatatgccgcgcccgttccgccttgcggtgatccagctcggaacctatgacgggacggtatataacgcccgccaggtggtcgataaaatcggcagcctgtgcgactacatcctgtttgactcggcctgggtcggctacgagcagtttatcccgatgatggccgactgttcgccgctgctgctggacctgacgccgaatgacccgggcatttttgttactcagtcggtgcataaacagcaggccggtttttcgcaaacttcgcagatccataaaaaggataaccatctgcgagggcaggcgcgtttttgcccgcataagcggttgaataacgcctttatgctgcatgcctcgaccagcccgttttatccgctgttcgcggctctcgacgtgaatgccaaaatccatgaaggggagagcgggcgccgcctgtgggccgaatgcgtagcgctgggtattgacgcgcgcaaagcgattatcgctaactgcaaaatgatccagccgtttattccgccaatggtcgcgggacgcccgtggcaggatcaccccaccgaaaccatcgcccgcgagcggcgcttctttagctttgaaccgggcgcgcgctggcacggctttgagggctatgccagcgaacagtacttcgttgacccctgtaagctgctgctgacgacgccaggaatcgatgcgcagagcggggaatatactgattttggcatcccggcgaccattctggcccactatctgcgcgaaaacggcatcgtgccggagaagtgcgatctgaactctattctgtttctgctgacccccgccgaaagcgaggagaagctggcgcagctggtggcgatgcttgcccagtttgagcagcatatcgaatcggatacgccgctggccgaggttctgccgagcatcgttaacaaatacccggtgcgctatcgggactacaccatccgcgagctgtgtcaggagatgcacaacctgtacgttagctttgaggtgaaggatctgcaaaaagagatgttccgcaagcagagcttcccgcgggcggtcatgaacccgcaggacgccaaccgcgagtttattcgcggtaacgtcgaactggtgcgcttaagcgaagcggaagggcgcattgcggcggagggcgcgctaccgtatccaccgggcgtgctgtgcgtcgtgcctggcgaaatctggggcggggcggtgctgcgctattttctggcgctggaggagggcgtcaatatgctgccgggcttctcgccggagctccagggggtctatagcgaaacggactctgacggcattaagcgtctgtatggctatgtgctgaaagcataa

SEQ ID NO: 191412 - DNA, 717 bp, Klebsiella oxytoca
ttggttacagggccatttattaacgccggtgcggtccttctgggcggcgtacttggcgcactcttaagtcaaagattgccggaacggattcgtacatcaatgacctctatttttgggctggcgtcgctaggcatcggtattctactggtgatcaaatgcgccaacctgccggtgatggtgctttcaacgctggtgggcgcgctgttcggcgaagtatgtaatatggagaaaggcattaatacgctggtgagtaagcttcagcagctgctttcgccaaaaaagggccagataaagagttcggcgcatgagtcgtatattcaaagctacgtcgcgattatcgtcctgttctgcgccagcggaaccgggatattcggcgcgatgcgcgaaggaatgaccggtgacgccagcattctcattgccaaagcgtttctcgacttctttaccgccaccattttcgcctgcaccctggggctggcggtctcggccattagcgtgccgatgctggccatccagctggcactggcggcctgcgcatcgttgattatgccgttaaccacgccgatgatgatggcggatttcagcgctgtcggcgggatgctgctggttgccaccggtttgcgcatctgcggaattaaaatgttcgccgtggtgaatatgctgccggccctggtgctggcgatgccgatttcggtagcctggacggcgtttttcgcctga

SEQ ID NO: 191413 - DNA, 912 bp, Klebsiella oxytoca
atgctgagtaacggagcaaaagattataaagctaagctatttgaaaatcatgatgaaaatattcattttcttttgaataccccactctcccttcagcgccaggtctgggagtctgcagccataaaggcaacactacctgcgggtgtatgcatcgaaacggttaacgatacagagataactgcggaatggatttcatatcccgattcgataaataccaggattattctctatttccacggcggtggaaattctcagggatcgtgtctgactcacagaaaactcgctgcctgtctcgcacaatattctggttgccgaactctggtactggaatatcctctggcgccagaaaatcgatttcctgcggccttattaaattgtcatcaggcctatttatggctgcttgctaatggttattcagcagaggacattatcctcgcgggagactccagcggtggtggactggtcatgtcgcttttactcctgttaaaacagcatcaagatcctttgccggactcgtctgttctgctgtctcccatgttagatttcacactttctggtaagagcataacgctgtgtaaggatctcgatccgctgctttgcatagaagacctgataatgaccgtgaaatactactgttcggacagtgaacgaagcgatcctcttgtctctcccctgtttggtgatttgtctggacttcctcccgtatttattcaggtgggaagcgaggagttattgcgcgatgatgcattacgcctctcccgatatgctaaaaaggctgggatgcaagttgagcttgagatatgggacgggctctggcatgtatttcagtcatcggtaggaaaggtacctgaagcggatgaggcgttacaagccgtagctaaatttatccgaagcagagagtcattgccgtga

SEQ ID NO: 191414 - DNA, 879 bp, Klebsiella oxytoca
atgaatggggttatggaactagaattctggatgcgtgttgccattggtgaagctgaagagagtttgcgtgaggggaataaaggttttggcgccgttatcatcaaggatggtgagatggttgcggcggcgcatgactatgaggaaacagagggagacgcaacctcacatgctgaaatcaacgcgattaaaattgccagccaaaaaattggcaaaaatttaaacgggtgcatactgatatccaccagtgagccttgtcctatgtgcgcatttgccatcgcctggtccgggataagcgaaatagcttttggtttttctattcaggatgcacttgctcaagggcggcggcggattgcatttcagtgcgtcgaggcttttgataaggcgggcacagaggtcattgttcataaaggtattctgcggcgggaatgcgcaattctctatcgtgctgacgttcgcagcgaaattaatcatctgcgcaacgcaaccgatgaagaccttaaggcgctgaacgcggattccattgcccggcgtactgcatggttctgccaaaataaagccgggttgaatattggcgatagccatttattagacaccgcacaccgcttacttataacgcgattccacgctgcagaggttgaaatgcccgtggtgaacagaactgagaagcaaattactttccactctatgaatttctgcccaacgcttgaggcatgcagaattctgcgccttgatacccggcacgtttgcaaactcctgaatgaagagtccaccgatatgttagtgaaaaagatagatagccgacttcgcttctctcgaaattataataacctcagaccatattcctctttctgcgaagaatctatttctattgaggattga

SEQ ID NO: 191415 - DNA, 549 bp, Klebsiella oxytoca; identical to SEQ ID NO: 172892

SEQ ID NO: 191416 - DNA, 474 bp, Klebsiella oxytoca
atgaatagaataaaaattgtgattggcttttttatttctggcgctctggcaggggggatctataattttgtgaacgataaaatacatcataaggaagagtgtacggcatcgctcgtggtcttcaaggataatacacaaactaatttgaccttaaatttcatgtattcacttgctgaaggtaagggtaccgttgcggtcagcggtagctatctggatggcgggaaactgcagggccatatcagaagagatgtcatctatgatatggtcaaaaatcatgaaactcaccatttccactccagagaaataaaccgatacggtaacattgactccgtgtcggatgagttcctggccagcatcctgcctgacttttacgtttatccaaatgaaaaaataagctatattatttcaaagcaaaatgagcatagctttctgataaaaattgggtcacgaccgctactgtattgtgctaattaa

SEQ ID NO: 191417 - DNA, 825 bp, Klebsiella oxytoca
atgtattggatcataaacaaaaatatagaattttggcctgaaaataagcggttaatctcgttgaaaaacccggcgctgagcgtcacattgacggctccggcaagccactgtcttgttcttttactggaagcctcaccggagctggtcagccagcagactttttttaaaaaagtttgggaagatgaggggatcctggttcctgcaaataccttgtatcaaaacatatcgattgtcaggcgcggactgcgcgatgtcggagaaacggataactcattagtcgtgacggtgccgcgtaaaggttttcatatcaatgccaacgttaacattgaaaaacgtgaaaaaatatctttagattcagtaggttctgctgatgcatctctcgcggtgcaggatagcgttgcgggaaaaaaagcaaccactgaatctgtggctaccgtgcatacggctgataagaaaaacgcccgctcaaaggctgtcacactcttgattatggcattgagtttactggcgggctttttttctctgcattacctctggcactttaatgatgaaaagcccttttttagcagctatacattagttgaaagcgatcgcggatgtcatttttataccatagatgataatcatgccagcattgataaatttaatagttataagtcattgattttcaaatccggactggactgcaagaagtatccctttgtttatttttccatgtcgcagatgactcctggttttatagtgtttatttgcaggaaaagttacaccgcgaaggcttctgccggatgtgttacgctctcttttcgtggaattgtacatgaatag

SEQ ID NO: 191418 - DNA, 405 bp, Klebsiella oxytoca
atgttttcttatattatgctgggaaccaatgaccctcaagcttcctataaattttatgcgcctttgatgcgcgtgcttggccatcctctcgatgggcgtagcgaaaaaggcgccgcatggggaacgttcaaagataatcatactaccggattatgcgttggaatgccgtttgataatctccccgccacccgaggtaatggcgtcatggttgcattgaatgcggtatccgttgaaatgatccaggaactttatagattagcgattgagaatggtggcgaagatgaaggcccaccggcttttcgtccgcactacggcgctgatttttacagtgcctacgttcgcgatcctgacaaaaacaaaatcgcttttgttttttacgacccggcaaaaaaagcgatggtttaa

SEQ ID NO: 191419 - DNA, 363 bp, Klebsiella oxytoca
atgagtaagattataaggcacgaaattaatgaaagctgggcaatatccggagtggtcgaatcctgtggtttggtctttgtgagttactgtattggtaacatcgggaagcccatcgaggaacagataaatggcgctttcgataatttgagcgaaaggcttaacgctatcggcctgacgctggagtcagtcgtaaaaattgatgctctgtttcgcgacgtatggaatatcccattaatggaaaaagtcatgcgtcagcgattcaacggccattatcccgccagaaaatcaattcaaaccgagtttgcccatgctggcggggccacaggtatgctctttcagcttgatgcgattgcctgtcgttaa

SEQ ID NO: 191420 - DNA, 519 bp, Klebsiella oxytoca
atgaaaaaattatcagcagttgcgtttgcatttggtctgttatctgtgtctgcatctcaggcactggctgcagatgccaccgttaacttcagcggaaccattcttcaggaagcctgtagcgtagctacctcgaataatactgtaaacgttcagctcggcacattcggtatcgcgcaattcccgactgtgggaacgacgaccctcccggttcctttttccattaacttaacgggttgtccggcatcaggtggtccgactgccgcgctggttaccttttcaggcgcagcggatgcggcaggcgacctggcactgaccggcggtggcgcaaccggtgtatcgattaatatcaaaaaggctgacggcaccaatatcgatattaactccgccgattctggtattgcgttgacatctgccgctacgcagcagctcaactttacggctaattatatcagtacctcagccgctgtcaccgcgggccaggctaacgccgtagcccaggtaaatatctcttatatgtaa

SEQ ID NO: 191421 - DNA, 699 bp, Klebsiella oxytoca
atgaaagcgttcctttttttatctttatttttggcttcagtctcagttagcactagcagcgttgcagctgtttctgtcggtggcactcgtctggtttttaacggcaatgaaaaagaggcttccattactgtcagtaactcaaacaaagggattccggtacttattcagtcctgggtagaccggggggagcatgacaaatctaaagctccatttacgatcacgccaccattgtttcgcctggaaccagggcaggataataccttacgcgctatttacagcggcgaacgactcccggatgatcgcgaatctttattctggctcaatattaaaagcatcccgtcaattaaaaaagaggacatgcgcgaaaacactttacagctggcgattaaaaaaaggctgaaatttatttaccgccccgcatcaattaagagtataccggaagaaagcgccagcctgcttagctggaaaagagtaggtaatcagattcaggttactaacccaacgccgttttatatgaactttgggatgatcaaggtaggaggtcagatgtttaagcctgtgctccctgaacaaacctatgtagcgcccaaatcagagctgttaattactattccatccggtgcggccagcaatagtgttgactggaaaataattaatgactacggaacgagtggcaaagagtttcacgccacatattaa

SEQ ID NO: 191422 - DNA, 2523 bp, Klebsiella oxytoca
ttgcgacagataaatttcactgcgaaatatacatcccttttgattatcattacgcttctgaatgttcctgataaatcttttgcggatgagtattttaatcctgccttgcttgaggttcgggatggtgtttcagagcgtacaaccgacctctcggtctttgaagtcgccaatggtcagcctgcgggaaaataccgggtcgatatctcagtgaataatgagatggtgaccgccgaggcccgtgacgtgatgttctcgaaaactgctgatggcaagctggaaccctgcgttaccctggaggaactcacccagtgggggattaataccgccccgtttccagagctgcaggacagtaacagcgaatgcattaagctggacgctattccagacgcgtttactgactttcagtttaaccgacagcggctaaacctgagcattccccacgcggcattaaaggcacgcagtcaggatgaagtgcccgtcgagctttgggatgaggggattcctgccgtgttactcaattacagcatgaacagttatcagagccagtataacggtgctgatacctataaaagtacgtacctcaacctgcggccgggaataaacatcgggccgtggcgtctgcgcaactacaccacctttgagcatagtaatcagagtggaagtaaatgggacaacgtctacagctatcttcagcggaatattatctctttgcgaagccaactgacgttaggtgacagttccgccccttctgatgtcttcgatagcgtaccgttccgcggtgttcaactagcctcagatgatgacatgctgccttccagcgtacgcaactatgcgcctgtagtgcgggggattgcccgcagtaatgcccttgtcaccatacgccagaacggatacgtggtttatgaaaccaaagtggcgccgggagcatttgaaataacggatctcgcctctacaggcggggcaggcgatcttgacgtcacgattaaagaagcggatggaagcgaacaacatttgattatcccctatgcctctttgcctgtgctgcagcgcgaagggaaatttcgttatagcgtaacgggcggtcagtttcgcgcctatgatccgcaaacggaaaaaaatctgtttgtgcagggaaccggtatttatggtctcccgctcggttttacgctgtacggtggggtgcaaaacgcaggcagcaaataccagtcttacgctctgggcgtgggcaagaacatcggcgcatggggcgctttttcagccgatgtcatccactcggtgtcagcgccgacggatacgggcaggcaacagggtcagtcgctacgggtgcgctatagcaaaaatttcctgcaaacgggaacaaacttcaccatcgccggttatcgctattcaacctccggatttcgctcgctggaggagacgctcggcacctacagaagcgatagtaacattccatcatatgttactgaccgccgtcgtaaccgggctgagctgtcggtgaatcaggatcttggcgccaattttggcgcgtttaatgcctccttgatcagtgaggattactggcataacaaacgtaacagcctgtcggcgaacctggggtactacaaaaacttcaacgccattggcatcagtttgaactactcctggaaccgcaacaccggcctgtatggccatgccgatcaggataatgttgtctcttttgaaattaatgtgcctctggataagtttctgccccagacttacgcctcctatggcacaacccggacgagtggaaacgggaccagccataacctgaggctcaacggctcggcatttgatgatggcagccttgactggggcatcaacgccactcactccagccataacgaacaactggtaggagcaaatgccaactggcagacaagctatggaacggtaaatggttcttacagccacagccgtgatacccggcaattggggtacggcatcgccggcgggctcgtcgttcatgaaaatggtatcaccctgtcacaacccttaggtgaaaccattggcttggtaaaagcaccggatgccgaaggcgtcggtatcaataactatagcggcatcactacggacagccgcggctatgcggttgttccttacctgaccccgtaccgccgcaatgatattagcctgaatagcaagaccctgcgggacgataccgatatcacctatatgaccagtaaagttgtccccacccgcggggcactcgtcagagcagagtataaaacggccattggccaccgcgtcctgatgacgttaacgctgcccggcggcaaaccaatcccctttggggcggtggtatcgctgcttaaaacagagggaaacacctctattgtcggtgacggtggggaagtattcctgagcggtttaccgcaaaaaggaactctgcttgtgcagtggggcaacggtcaggggcaggaaaccacctgtcaggctgattatatcgcccgtaaaccctctggcgcatccggtctatggagcgcgacgagcgtctgtcaataa

SEQ ID NO: 191423 - DNA, 1173 bp, Klebsiella oxytoca
atgaagtggtttgtttttatgttcgttactaccgtaacggcactcaccgtcacccccgaggttaaaagcggatcgtttgatccagtaaccggcgcttatactaccgatccgataaccgtcacgctgacgccaaagaccgttacggccagcgcgtcggtaatccctgacggtgaaaaagttttttgggcacccgccatcggtagtggtaattatgttcaagaaaatgggctgatttactggggatcgcatacttatagcatgacaagtaacactgtcgccacagctgccgccgcctcaattaatgccaggggaacctgtactgcaaccgccagcggtgcatctcttaccataaacggctgcttcacctttaaggtcaattacgatatacgcatgggcaaaggtgccacatgtaaatcttttttcggttcggggaatgaaccatacgttataagttcgtttggtactttcgttcaattgaaatctaataataatgggtcacaaagcactcgatccttgacccgtccagattcagcaaatgtcggtgtaacaacgcttacttacccacgtcagactttcacgacaatgccatcatcatcctcctacgatacaaatctgcaggctacactttctgccgcaacgccaccaagtgtctttctttactgcactgtaacgcaaggcgcccttacatctttggccagtggatcgacaatcagccattcttttatactggtgccttcaggcaaacgacccgcctacgccccgacgatcagttattcaccggccttacctatcaccaatactatcgccgttaatatacgcaatattgctgcgatagaaattctccccagcacggtattcaacaccggaactatctccgcgtggcgcaccacctatatggaacagccgcttaccgtaaccgggcagggcaatttaacccgcaagtttggcgcatcagaaaactttaacgttattgaatcctggacctgcgcgacaacagggcaaatcgattttcgaataatgcgcgacaataccaacaccaatgtctgttcaggggcaacctatacccataccgtgcaaacgccacagtcgttgacggcacagtggaaagcgttaaatcagacctcatcaggcgcatggagcgcggcggcaacggtcacttttacgctgccctag

SEQ ID NO: 191424 - DNA, 1389 bp, Klebsiella oxytoca
atgaataaaaacgacatgagtcctttacctaccaatacccacgagtggttttttaatcgtaacagcatcatcattttgctcgatattgttctgtttatcgttctctacaacacgctaccctatgagccgaaggtggtcatgggactgagtatgctcgcttttatcgccgtattatggttaacggaagcgctgcacgtgaccgttacggcaataatggttcccgttatggccgtgctgttgggggtattcaatacccaggcggcgctaaacagtttcgctaactctacgatattccttttcctcggcggctttgctctggcggcggcgatgcatgtgcaggggctggataaagtcattgccgataaagtattagcgatggcgaggggcaaaatgagcctcgcggtctttatgctgtttggcgtgacggcgctgctgtcaatgtggatcagtaatacggcgacggccgcaatgatgatgccgctggtattggggatcctgagtaaagtcgatggcaaaaacagccattcgacctatgtgtttgtgctcctggggattgcctatagcgccagcattggcgggatggcgacgatcgtcggcagtccaccgaatgcgattgccgccgccgaggtggggctctccttctttgactggatgaagttcggtttcccggcaatgatcgtcttactgccagtcgctattgcgattctttacctcgtgttcaggccggaacttaaggggacctttgaaacgaacactgaacaggtcgattgggataaaggcaaagttgtcaccctggctatttttgcgcttaccgtattcttctggattttcagcggacccattaacgacctgctgggcggttttaaatccttcgataccattgtggctttaggcgccattatattagtcaatttcgcccgggtggttcactggaaggatatagaaaaaacggctgactggggcgtgctgttattattcggcggcggtatctgcttaagtaatgtgttgaaagagaccggcaccagcttgttcctggcaaaccagattagcgggatggtggctcatatggggatatttattattatcctggtgattgcaacattcgtggtgtttctgaccgagtttgccagtaatacggccagcgccgctttgcttattcccgtatttgcctcagtggccgaagcgttcggcatgtcgcctgtgattctgtcggtattgattgccattgcggcttcatgcgcttttatgctgcccgtggcgacgccgccaaacgctatcgttttcgccaccggccatatcaagcagcaggagatgatgcgcgccggcctgtttttgaatattgcctgtatcgtcgttttgaccggatttagcatgttattttggatgtaa

SEQ ID NO: 191425 - DNA, 279 bp, Klebsiella oxytoca
atgctttttagccgtccggagggaaaggttgttagccgcctgggcgtgtcgatttccagaatagcgcgcttttgcccggtttttcgccgaattatccgtttttacgcgctgctttatctctatttcggaaaaggattgccaaaaatattcgatagtttccagcggcaattttcaggtgccagcgaaaatatcagcgccggtataccgggacattgttcaacggaacaaattcagatggatgaattattcctgataagatgctccttctcgtttcaataa

SEQ ID NO: 191426 - DNA, 1371 bp, Klebsiella oxytoca
atgtcagtttttcattccgttagcgacctgattggtcatactcccctgctgcagcttcataagctggataccggcccctgcagcctgtttctgaaactggaaaatcaaaatcccggcggctcgataaaagaccgcgtcgcgctatccatgattacgcaggcagagcgcgaaggaaaattaaaacccggcggcacgattatcgaagccaccgccggcaataccggcctcgggctggcgctgatcgccgcgcagaaaaattatcgcctgatcctggtggtgccggacaaaatgagccgcgagaagattttccacctgcgcgcgctgggagcgcaggtacagcttacccgctcggacgttaacaaaggccatcccgcctactatcaggactacgcccggcgtcttgccgacgaaacgccaggcgccttttatatcgaccagtttaataacgaggctaacccgctggcgcatgccaccaccactgccccggaaatcttccggcagctggagggcgatatcgacgcgattgtcgtcggcgtcggctccggcggaaccctcggtgggctacaggcctggtttgctgaacactccccgaaaacggaatttatcctcgccgatccggcgggctccattctggcggaccaggtcgaaaccgggcgctacggtgaaaccggctcctggctggttgaagggatcggcgaagactttattccgccgctggcccatcttgagagcgtccgcagcgcataccgcgtcaccgatagcgaagctttcgccactgcccgccagctgctgcaggttgaaggcattctggcaggctcctctaccggaacattgctcaccgccgccctgcgctactgccggtcgcagacatcccctaaacgcgtggtgaccttcgcctgcgacagcggcaataaatatttatcaaagatgtttaacgatgactggatgcgccagcagggctttttaagccgcccttcgcgcggcgacctcagcgattttatcgctctgcgccacgacgaaggggcaaccatcaccgccgcgccggacgataccctggcggccatcctcgcgcgtatgcgtctctacgacatctcacaactaccggtgctggaaaacggccgcgtcgtcggcatcgtcgacgaatgggatctgattagccacgtccagggcgacagtcagcgcttttctctgccggtcagggaagcgatgacccgtaacgtggagaccctggataagcacgcgccggaaagcgcgctgaaggccattttcgatcgcggtctggtggccgttatcgccgacaacgatcgttttcttggcctcattacccgcagcgatgtgctgaccacctggcgtaaccgactcgaacagtaa

SEQ ID NO: 191427 - DNA, 1146 bp, Klebsiella oxytoca
atgacaaatttgcataccctgagcgtacatagcggcacatttaccgatgaacacggcgcggtgatgccgcctatttatgccacctccacctttgcccagcccgcgccgggccagcataccgggtacgaatattcgcgcagcggcaacccgacgcgccacgcgctggagacggcgattgccgacctggaaagcggcacgcgcggctacgcctttgcttccggccttgcggccatctcaaccgtgctggagctgctggataaagacagccaccaggtcgccgtcgacgatgtctacggcggcacataccggctgattgaaaacgttcgccgccgcagcgccggcctgcgggtgagctgggtgaagcccgacgatctggcggccatcgaagcggctattcaacccgacacgcgcatgatctgggttgaaacgccgaccaacccgctgcttaagctggccgacctcagcgccatcgccgccattgcgcggcggcacaatattatcagcgttaccgacaacaccttcgcctcgccggccatccatcgtccgcttgagctgggctttgatatcgtggtgcattcggcgaccaagtaccttaacggccactccgatgtggtcgccggactggcggtggtcggcgacaacgccgcgctggcggaaaagctgggctatctacaaaacgcggttggcggcgtgctcgatccgttcagcagtttcctgacgctgcgcggtattcgtaccctggcgctgcgtatggagcgccacagcagcaatgcgctgctgcttgccgagtggctggagcagcagccgcaggtcgaaagggtctggttcccgtggctggcctcgcatccgcatcatcagctggcgcgcaggcagatggcgcttcccggcgggatgatttccgtggtggtcaaaggcgacgatggctacgccgagcggatcatacgcaagctgaagctgtttacgctcgcagagagcctcggcggcgtggaaagcctggtgagccagccgtttagcatgacccacgcatcgatcccgctggagcagcgtttagccaacggcattactccccagctgattcgtctgtcggtagggatagaagatccgcaggatctgatcgccgactggcgccacgcgctgcgcgactaa

SEQ ID NO: 191428 - DNA, 900 bp, Klebsiella oxytoca
atggataagctacgggcgatggagacctttattgcggtcgtggagtgcggcagctttaccggcgccgcggcgcggctcgagatgtcggcggtgatggtcgggaaatatatcgcgctgatcgaacggcagcttaatacccgtcttcttgagcgcaatacccgccgccagagcctcaccgacgccgggcgggtctattttgacgaggcgaaacgcgtcctggagcaggtttcaatcgccgagagcgcggtggagaggctgcggatcgcgcccgcgggcacgctgcgggtaagcgcgccgacgtcgtttggcgcctgcgtcattgctccgctgaccgccacgtttctgcaggcatggcccgacgtgcgcgtggaactggatctgactaaccggatggtcgatctggtggatgaggggttcgatttggcgatccgcatcggcgagatccgcaatagcgatctggtggcaaaatatctcgcgccctaccggatgacgatctgcgccgcgcccgggtatttagcccgctacggtacgccgacgacgcctgctgacctggccgatcacctctgtttgtcgcatacggtgtggaccgcgcgcaatgagtggaagctgccgggcgcggaggagggcgtccgctggaaacgcgacgctgttctgcgctgtaatgatggctatgcgctgcgaacggcggcgatcgccggggccggactggtgttgcagccggaagtcctgctggccgatgcgctggagagcggtaaactggtgcgcgtgctggaggcgtataccccgcagccgaggccggttcacctgctctggcggcaggatctgcggccgctgccgaagctgacgcgctttgttgagcatcttctgcaggggcaacgccagaacgggcggaccgcttaa

SEQ ID NO: 191429 - DNA, 603 bp, Klebsiella oxytoca; identical to SEQ ID NO: 172878

SEQ ID NO: 191430 - DNA, 339 bp, Klebsiella oxytoca; identical to SEQ ID NO: 172877

SEQ ID NO: 191431 - DNA, 189 bp, Klebsiella oxytoca; identical to SEQ ID NO: 172876

SEQ ID NO: 191432 - DNA, 1182 bp, Klebsiella oxytoca
atgcacgatcggcgactcgccgcccgcgcgggtgaacttaagccctccgccgtccgcgaactcctcaagcacagtaaactgcccggcgtgatctccctgggcggcggcattccggctccggagctttttgataccgaaggcctgaacctggcggtgcagcaggtgatgaacgggcgctttaacgatgcgttccagtacggtttgaccgaaggttatccgccgctgcgtcaggccgtcagcgaactgtgtcaggcgcgcggcgtggactgcccggcaagccatgtttatatcacttccggttcgcagcagtcgctggatatcgtcgcccgcacgctcctcgatccgggcgatgcgattgtcgttgagcgcccgacctatctggcggcgctgcaggtcttccagctggcgcaggccaatattctcagcgtggataccgatgatgacggcatgctggtggaacaactggccgatctgctggaaaccacgcgcgtgaaagccgtttacctggtgccgacgtttggcaacccaggcgggaagaccctcagcgaagcgcgccgtcgtcgcctggttgagctggcgaaaaagcacgacttcgtgatcattgaagacgatccgtacggtgaaatcagcttcaccgatgaagtgcgccgtccgctgtatcagcacgcggttgaactgggctgtgtcgatcaggtggtgtatacctccaccttctccaagatcctcgcgccggggatgcgtattggctggatcgtgatgccggactggctggcgcagcagacggtgatcgtcaagcaggcggcggatctgcacaccaacatgctatcgcaggtcatcactgcggaatacctgagcatgaaccgtctggaaaagcagattgccctgatccgcgaagattaccgcaagaagtgcgtggcgctggccgacgcgctggaatcgcagcttggcgagcatctggagttcagccgtcctaaaggcggtatgttcctgtgggctcgcttccgctatccgttcgataccatggaatggatgaagaaaacgctggaaaacggcgtggtctacgtgcctggggaagcgttctataacgacaacccggatacccgcacgctgcgtctctcctactctacggtatcggctgacggtctgatgaccgccgtcgagcgcctggcgaaatcgctgtaa

SEQ ID NO: 191433 - DNA, 1872 bp, Klebsiella oxytoca
atgagcaaaggttcgacaagcagtgacgccccgtttggtacactattaggctacgcaccgggcggcgtggcgatttattcatctaattacagtagcttaaatccgcaagattatccggatgacgccacgttccgcagctatatcggtaatgagtatatggggcataaatggcagtgcgtggagttcgcgcgccgctttctgttcctcacctacggttttgttttcaccgatgtcggcatggcctacgagattttctccctgcgttttttacgcgaggtggtcaacgacaatattctgccgctgcaggcgttcgccaacggctctcgtcgtccgccgatcgccggctcgctgctgatctggcagaaaggcggcgagttcaagcacacgggccacgtggcggtcattactcagctggtagggaacaaggtgaggatcgccgaacagaacgtgattcactcgccgctaccgcaggggcagcagtggacccgcgagctgacgctggaagtgaaaaatggcctctacacgattaaagacacctttgccgataccgaaatcctcggctggatgatccaaaccgccgataccgaacacagcctgccgcagccagtgctgccgggtgaggcgatggcgattaaaggcgcgcggttgccgaacaaaggccagtttcgcggcaactggctcaacgagaaagattccctgcaaaaagcctatgtcgaagccaacggccacgtcatcaataaagacccttaccagtatttcactattaccgaaagcgccgagcaggagctcatcaaagccaccaacgagctgcatctgatgtacctgcacgctaccgacaaggtgatgaaggacgatagcctgctggccctgtttgatattccgaaaattctctggccgcgcctgcgcctctcgtggcagcgccgacgccatcatatgattaccggtcgtatggatttctgtatggatgagcgcgggctcaaggtgtatgagtacaacgccgactccgcgtcctgtcataccgaaggcgggctgatcctcgaacagtggctgaagcagggctactgcggcaccggccataacccggcggaaaacttgctcgatgagcttgccggagcgtggaagcacagccgggcgcgcccattcgtgcacatcatgcaggataaggatctggaggagaactaccacgcgcagtttatccagcgttcgctgacgcaggccggtttcgagagcaaaattctttacggccttgatgagctacgctgggatgccgccgggcagttaattgatgccgatggacgcctggttaactgcgtctggaaaacctgggcatgggagaccgccattgagcaggtgcgcgaagtcagcgccgacgagtacgcggcggtgccgatccgtaccgggcaccctgataatgaagtgcgtctgattgacgtcctgctgcgcccggaagtgttagtcttcgagccgctgtggacggttatccccggcaacaaggcgattttgccagtgctttggtcgctgttccctaatcatcgctatctcctggataccgattttgtggtcaacgagcagctggcggaaagcggctatgcggttaagcctatctcaggccgctgcggcagcaatatcgatctgattggcccgcaggatgaagtgctggataaaaccagcggccagtttttcgatcgcaaaaatatttaccagcagctgtggtgcctgccgaaggtggatggcaaatacatccaggtttgcacctttacggttggcggtaactatggcggtacctgcctgcgcggagacgattctctggtggtcaaaaaagagagcgatattgagccgctaatcgtgctaaaagacaacgatagccgttaa

SEQ ID NO: 191434 - DNA, 561 bp, Klebsiella oxytoca
atgagcacaccttcgcatctgaccgcccaaccgctggtctggggtcatgggccacgcacctttgaggtgttccttgaacccacatgcccctattccgttcgcgcctttaataagcttgatgacctgctggatgaagttggcgcagataacgtgacgatcaaaatacgtttgcagtctcaaccgtggcatctgttttccggcgtcatcgtccgctgtattctcgccgcgtcaactctcccgcacggccgcgagcaggcgcataaggtgcttaaagccgtcgccgaccaccgcgaagagtttgagtttaccgaccactgtagcgggccgaatatggacgccacgccgcagcagattattgagcgtcttgaacgctatagccgcgtctcgctggccgcggcgtttacccgccccgagctgcaaaacgagatcaaatggcatagcaaatacgcccgccagaacggcatccacgtgtcgccgacctttatggttaatggcctggtgcaggcggatctcggcagcggcgacgacgtcagcgtatgggccgcgcggattctggcttag

SEQ ID NO: 191435 - DNA, 867 bp, Klebsiella oxytoca
atgtcagagaataactaccagccacctaaagtgtgggaatggaagcaaaacaacggcggcgcattcgccaatatcaaccgcccggtgtccggcgcaacgcacgagcgggaactgccggtgggcgcgcatccgcttcagctctattcgctggggacgcccaacggccagaaggtgaccatcatgctggaagagctgctggcgttaggcgttagcggcgcggaatatgacgcctggctgattcgcatcggtgaaggcgatcagttctccagcggctttgtcgaggttaatccaaactcaaaaatcccggcgctccgcgaccattccaccactccgccgacccgcgtttttgaatccggcagcatcctgctctatctggcggaaaagttcggtttcttcctgccaaaagatccggcaggccgcactgaaaccctcaactggctgttctggctgcagggcgcggccccgttcctcggcggcggctttggccacttctttagctatgcgccggtgaaaatcgaatacgcgatagaccgctttacgatggaagccaaacgccagcttgacgtgctggacaagcagcttgcccgcggtcgttttgtggcgggagaagagtacaccatcgccgatatggccatctggccgtggtacggcaacgtggtgctggggaatgtctataatgccgccgaattccttgatgccggaagctataaaaacgtgctgcgttgggcgcaggatgttggcaatcgccccgccgtacagcgtggacgcatggttaaccgtacctctggcccgctcaatgagcagcttcatgagcgccatgccgccagcgacttcgaaacgcaaaccgaagataagcgccaggcgtaa

SEQ ID NO: 191436 - DNA, 288 bp, Klebsiella oxytoca
atggaaaatcattttggaaaaggcttaatggcggggctacaggcatcccatgctgacaccgccgcgcatgcggcgaatttttgcaccgactataaacgcgggtttgtgctcggctactcgcaccgcatgtttgaaaaaaccggcgaccgccagctcagcgcctgggaagcggggatcctcactcgtcgctatggcctggaaagagacatggtgatggactttttcaaagagggcggttcttcgaccgcgatgcgctactttatggcgggctatcggctggaaagctaa

SEQ ID NO: 191437 - DNA, 888 bp, Klebsiella oxytoca
atgacgcgattaacggccaaagatttcccgcagcagctgctcgagtattatgactactatgcccacggcaaaatcagcaaacgcgagtttctccagctggcggggaaatataccgtcggcgggatgaccgcgctggcgctgtttaatctgctgaagcccgactatgccctggcagagcaggtaccgttcaccgacccggatatccgcccggagtatattcattatccctctcctgatggccacggcgaagtgcgggcttacctggtgacgccgacgaaaatagccgacaaagcgcccgccgtggtggtggttcatgagaaccgcggcctgaacccctatattgaagacgtagcccggcgggtagcgaaagcggggtatatcgcgctggcgccggatggcctgagctccgtcggcggctatccggggaatgatgatgaaggccgcgcgctacagcagaaagtcgatcccgtgaagctgatgaatgacttttttgcggcggtcgaatttatggcgaagcatccgcaggcgacggggaaggtcggtatcaccggtttttgctacggcggcggcgtcagcaacgcggcggcggtggcgatcccggagctggcctgcgcggtgccgttttacggccgccagccgccgttgaaggaggtcgataaaattaaagcgccgctgctgctgcactatgccggccttgatagcggcattaatgaaggctggcccgcctatgaacaggcgctgaaggcgcataataaagtctacgaggcctatctctatcagggcgtgaatcacggctttcataatgattccacgccgcgctacgatcgggctgcggctgacctggcctggcaacgtacgctggcgtggtttgaaaagtatttacgctag

SEQ ID NO: 191438 - DNA, 495 bp, Klebsiella oxytoca; identical to SEQ ID NO: 172869

SEQ ID NO: 191439 - DNA, 1527 bp, Klebsiella oxytoca
atgactccttctgaataccagaatcctattttatgcgccgattattccgacccggatatcgtgcgcgtaagggatgatttctttatggtctcttccagttttaaccatgtgcccgctttaccgatcctgcattcaacggacctggttaactggactattatcaaccacgttctggatgaactgccgctaccgggttatgaccggtatcagccgggtaagggcgtatgggcgccatcgattcgctggcacgatggcaagctgtgggtctgcttcagcaccccagatgaaggtatttttatctgccataccgaggacccgtgggggaaatggagcgctccgcactgcctgcgtcaggccagagggtggatagatccctgcccgttctgggacgacaatggtcaggcctggttggtacatgctttcgcccatagccgcagcggcattaagcataaactgcagttgtttgcgatggcgccggacgccagcgaattactgggcgaagggcagattatctatgacggctgctgcgatttacccacccttgaggggccaaaggtttatcaacgcgccggttggtactacatctttgctcctgcgggcggggtagaaaatggctggcagacggtgctgcgcgcgcgccagatgacggggccctgggaagccaaaaacgtgcttttccagggaaacacatcgataaatggaccacatcagggcggctgggtggagggcgagaagggcgaatgctggtttgttcatttccaggacttacatctctatggccgcgtggttcacctccagccgatgttctggggtgacgacggctggccgcgtatcggtgagcagattggcagttgcggcgtcggacagccggttttacgttggccgcgtccgaaagggttaacgccttcaccggcgttggcgccgcaaaccagcgactattttgcgcaaggccaaccgggaatacagtggcagtggcaggctaaccccagccctgagtggctgctgccggcggaaggcgaactccgattacgctgcaccccattatcccaagtcgatggacagagagcgttatactgggcgccgcagctgttgctgcagaaattcccggcgctaacttttagcgcgaaaacaagcgtaacgttatatgccgctcaggacggtgatgccggaggcctgatcgtatacggcgaacgctacgccgctttgctggtggagtttgggcaagggagttgccggctcgtgtggcgacacggttggatgagcgatgcgggcgttgtgcgcgaaactcgtcaggttcttgctgagcttaagcgcggcaagtgtcagctgcaggttgccgtaggcgaaggcggcttgtgtcaattttcctggcgagctgaggaggaggagtggcagggggttcccctttgttttgctgccgggaaggggaaatgggtcggtgcgaaatttggcctgctggctgcttcaatggatggcctgcaaagcgagggctactgctctttgcaggactttgaggtcatcctataa

SEQ ID NO: 191440 - DNA, 1419 bp, Klebsiella oxytoca
gtgaatcacgataataaactgtcatttgcggagaagctgggatacggcatgggagatgcagcctgcggtatcgtctactcttcggtaaccatgtttctgacatggttttatacggatatttacggactctccgctgccgcagtcggagtgatgttcctggtgacgcgggttctggatgcgattaccgatccgctaaccggcatcgttgcagaccgtgtgaagacccgctggggccattttcgcccgtggcttatctggtttgccgtcccttatgccgtgctggcggtaatgaccttcactactccggaatttggcgcatcgggtaaactggtttacgcctacctgacttacaccttactcatgctgtgttacacctttatcaatattccctactgcgcgctgggcggagtcatcacgcgcgatgagaaggatcgcctatcagcccagtcatatcgttttacgatctcttctctggccagtctgatggtttctgtcgcaaccctgtttctggtggattttttaggtaaagaaaataagcagtttggttttcaggcgacaatgggaatcatgggcgcgatcgctattgtaatgctggctttctgcttcttctctactaaagaacgcgtggctccagcggttgaacagcaggggagcatacgcgaagatctccgtcagcttctggcgaatgaccagtggcgtattgtggcgataatcacttttttctcgagtatggccggggttatgcgcagcgccgccacgctctattatgcaacctacctgatgttaggcggcgtggagtccgcggcgggaacagccatgaaatcagcatttgtttccaccagcgtcgttggcacgattatcggcagcatcgccgccggatggctggccaagcgctatcgcgcggtctcgctgtttaaaaatatcaacctcctgctggttctggttggcgtcgtaatgttctttgtgccgccgacctggctgccggtggtgttccctttatactttctggtcggcttcttccatcagatgtaccagccgtttaaatggaacatgatggccaacgccgccgattatggcgaatggaagtttggtcgtcgcatcacgggattatcttattccggtaatctgtttgctttgaaaatgggcatggcggttgctggtgccgccgtaggtttttcgcttgggctatttggctatcaggcgggcgtaacggcgcagactccgctggcgacaatgggaattgttgggctgttaacgctcggtccatcactatcttacctgctcctgtggtggctggcgcgtttctataagctggatgacaaaatgatgcagacaattcagcgagagctgtccatgcgccagcaacaggcgcattcagagacgcaattgccgctaaacgccgttccggaaaaggcctga

SEQ ID NO: 191441 - DNA, 426 bp, Klebsiella oxytoca
atggcgatgcattttaacgaaaacctcgatgataacggcgaaatgcacgacatcaacgtgacgccgtttatcgacgtcatgctggtgctgctgatcatctttatggtggcggcgccgctggcgaccgttgacgtgaaggtcaatctgcctgcgtcctccagccagccgcagccgcgtccggaaaaaccgatctatctgtcggtgaaggcggacaaaaccatgttcctcggcaatgaccccattactgacgagaacatgattgcgtctctggatgcgctgaccgaaggtaagaaagacaccacggtcttcttccgtgcggataaaaccgtggactacgagacgatgatgaaagttatggataccctgcatcaggcgggttatctgaagattggtctggtgggcgaagaaaccgtcaaagcgaagtaa

SEQ ID NO: 191442 - DNA, 732 bp, Klebsiella oxytoca
gtgggtaataatttgatgcaggcggatctctccgtttggggtatgtatcatcatgccgatattgtcgttaaggtagtgatgatcggcctgattctggcgtcggtcgttacatgggctatctttttcggcaaaggcgcagaaatcctggccagcaagcgccgcctcaagcgcgaacagcagctggttgctgaagcacgctctctcgaccaggccagcgatatcgctaacggtttcgatgcgaaaagcttgacctcgcagctgatcaacgaagcgcaaaatgagcttgagctttctgcgggttctgaagataacgaaggcattaaagagcgtaccggtttccgactggagcgtcgcgtcgcggcggtaggtcgttacatgggacgcggcaacggttatctggcgaccatcggcgcgatttccccgttcgtcggcctgtttggtaccgtctggggcatcatgaacagctttatcgggattgcccagacccagaccactaacctggcggttgttgctccgggcatcgcggaagcgctgctggccacggcaatcggcctgttcgctgcgattccggcggtcgtcatctataacattttcgcccgaatgattgccagctacaaagcgtcccttggcgatgtcgccgcccaggttctgctgctgcaaagccgcgatctggacctgagcgccagcggcgttaagccggtacgtaccgcccagaaattacgcgtaggttga

SEQ ID NO: 191443 - DNA, 1188 bp, Klebsiella oxytoca
atggttgataaacatcttgatactgcgctggttcatgccgggcgcagcaaaaaatatactcagggctcggtcaacagcgtgattcagcgcgcgtcatcgctggttttcgacaccgtcgaagcgaaaaagcacgccacccgcaaccgcgccaaaggcgaactgttctacggtcgtcgcgggacgctaacccacttctccctgcaggaagcgatgtgcgaactggaaggcggcgccggctgcgccctcttcccctgcggcgcagcggcggtcgcaaatactatcctggcgttcgtcgagcagggcgaccatattctggtgaccaataccgcctacgagccgacccaggatttctgcactaaaatcctcgccaaactcggcgtaaccaccggctggttcgacccgcttatcggcggcgatattgcccgtctggtacagccgaatacccgagtggtattcctcgaatcgcccggctccatcaccatggaagttcatgatgtcccggcgatcgtcgcggcggtgcgcagcgtcgctccgcaagccatcattatgatcgataacacctgggcggcgggagtactgttcaaagcgctggagtttggtatcgatatctctattcaggccggaaccaagtacctgatcggccattccgatgcgatggtcggcactgcggtgtccaatgagcgctgttgggcgcagctgcgggaaaatgcctacctgatggggcaaatggtggatgccgataccgcctacatgaccagccgcggcctgcgcaccctggccgtccgcctgcgtcagcatcatgagagcagcctgcagattgccgaatggctggcacagcatccgcaggtagcgcgcgtgaatcatcccgccctgcccggcagcaaaggccatgagtactggaagcgggacttcaccggtagcagcggtctgttctctttcgtgctgaacaaacgcctgagcgatgccgagctgtccgcctacctcgaccacttcagcttgttcagcatggcctactcctggggcggctttgaatcgctgattttagccaatcagccggaacacattgccgcaatccgtcctgatgctgaagttgacttcagcggcacgctaattcgggtacatatcgggttagaaaatgttaccgatctgctggatgatttagcggcgggcttcgcgcgtatcgtgtaa

SEQ ID NO: 191444 - DNA, 660 bp, Klebsiella oxytoca
atggttgtcattcaagaaatcgtcgccgctctgtggcagcatgattttgccgcgttggcaaacccccacgttgtgggcgttgtatatctggtcatgttcgcaaccctgtttctggaaaacggtctgctgcccgcctcgtttttaccgggcgatagcctgctgctgctcgccggcgcgctcatcgccaaaggcgtgatggactttgtaccgactgtcgctatcttaaccgctgcagccagcctcggctgctggctcagctatattcaggggcgctggctgggtaataccgccacggttaagcgctggcttgggcatctgccgcataaataccatcagcgggcaacctgcatgtttgacaagcacggcctgctggcgctgctggccggacgcttcctggcgtttgttcgcacccttctgccaaccatggcgggcatttccgggctgccgaaccgccgcttccagtttttcaactggctgagcgcgctgctgtgggttggggtagttaccggtctgggctatgcgttgagtatgattcccttcgtaaaacgtcatgaagatcaggtcatgacctgcctgatgattctgcctatcgcgctgctgatagccgggctgctcggtacggttatcgtggtgattaaaaagaaatactgcaacgcctga

SEQ ID NO: 191445 - DNA, 900 bp, Klebsiella oxytoca
atgaaccgcgctgagatatgccagctattaacgcataaggttaatcagctgaaagataaagaagaaatgcttaatggtctgctgccgggtatccgcctgctgtacggcactcagccggggacgcgtacgccggtcatgtaccagccggggatcgtttttctcttttccgggcataaaattggctatatcaatgagcgtaccttccgctatgacaccaatgagtatctgctgctgacggttccgctgccgtttgagtgcgaaacttttgccaccccggaagtaccgctggcgggaataaggctgaatgtcgatattcttcaactgcaagaactgctgatagatatcggggaggatgagcagtttcagccgtccatggcgtcaagcgggatcaactctgcggtgctgtccgaagagattctgtgcgcggcggagcggctgctggatgtgatggaacgcccgcttgacgcgcgcattcttggcaaacagatcatccgcgaaattctctatcacgtgctgaccgggccgtgcgggggagcgctgctggcgctggtcagccgtcaaacccacttcagcctgatcagccgcgtgctgaagcgcattgaaagccagtacactgagaacctcagcgtcgatcagctggcggctgaggccaatatgagcgtctcggcgttccaccataactttaaatcagttaccagcacctccccgctacagtatctgaagacttatcgcctgcataaagcgcgcatgctgatgatccacgacggcatgaaagccagcgcggcggcgatgcgggtagggtatgagagcgcatcgcagttcagccgcgaatttaagcgttatttcggcatgacgccgggagaagatgcggcacgcatcaggacaatacaggggatgtaa

SEQ ID NO: 191446 - DNA, 1164 bp, Klebsiella oxytoca
atgaataatttcgacctacataccccaacccgcattctgttcggtaaaggcgcgattgaaaatctgcgcgatcaaatcccggcagatgcacgtgtgcttgtcacctacggcggcggtagcgtgaagaaaaccggcgtgcttgatcaggttctcagcgcgctgaacggcattgacgttcgggaatttggcggcatcgagccaaacccgtcctacgaaacgctgatgaacgcggtgaaaatcgcgcgtgatgaaaagatcactttcctgttggcggtgggcggcggctccgttctcgacggcactaaattcatcgccgcggcggcccactacgatgccagtatcgatccgtgggaaattctcgaaacttacggcagcaaagtggccagcgctatcccgatgggctccgtgctgacgctgcctgcgaccggttccgaatctaataaaggcgcggtgatctcgcgtaaaaccaccggcgacaaacgcgcgtttatgtccacccacgtccagccggtgttcgctattctggatccggtttacacctacaccctgccgccgcgccaggtggctaacggcgtcgttgacgcattcgtccataccgttgagcagtacgttacctatccggtcgacggtaaaatccaggaccgtttcgccgaaggcattctcctgaccctggtggaagacggtccgaaggcgctgaaagagccggaaaactacgacgttcgcgccaatattatgtgggccgccacccaggcgctgaacggcctgatcggcgcaggcgtaccgcaggactgggcgacccacatgctgggccacgaactgaccgccatgcacgggctcgatcacgcgcagacgctggccatcgttctgccggcgctgtggaatgaaaaacgcgaggctaaacgcgctaaactgctgcagtacgccgctcgcgtctggaacatcaccgaaggttctgaagaagagcgtattgatgccgccatcgccgcaacgcgtgatttcttcgaacgcatgggcgtcccgactcgcctttccgcctacggtctggatggtagctccatcccggcgctgctggcgaaactggaagagcacggtatgacccaactgggtgaaaatcaggatattactctggacgtcagccgccgtatttacgaggctgcacgctaa

SEQ ID NO: 191447 - DNA, 828 bp, Klebsiella oxytoca
atgacacatccaaccgttataaaactacacgacggcaacctgatgccgcagctggggctcggcgtgtggaaagcaggcaacgaggaagtcgtctccgccattcataaggcgctggaagtcggttatcgctcatttgacaccgccgccgtataccagaatgaaaccggcgtcggcaatgcactgagcagcgcaggcgtcgcccgcgatgagctgttcgtcaccacgaagctgtggaatgacgatcaaaagcagccccgtgaagcgctgcaggaaagccttaaaaaactcaaactcgactacgtcgacttatacctcattcactggccggtgccggctacgaaccattacgttgatgcctggaaaagcctaattgagctacagcagcaagggctggcaaaaagcatcggcgtctgtaatttccaggtccaccatctgcaaaaaatcattgatgaaaccggcgtcgccccggtgataaaccagattgaactgcatcctctgctgcagcagcgtcagcttcatgcctggaatgcgacgcataaaattcagaccgagtcctggagcccgctggcacagggcggtgaaggggtattcgatcagaaaattattcaccaactggcggacaaatacggcaaaacgccggcgcaaatcgtcatccgctggcacctcgatagcggcctggtggtgatcccgaaatccgtaacgccgtcgcgcatcgccgagaattttaacgtctgggacttccgtcttgataaagatgaattgagtgaaatcactaagctggacaaaaacaaacgcctcgggcctgacccggatcagttcggcggctaa

SEQ ID NO: 191448 - DNA, 456 bp, Klebsiella oxytoca
atgagctgtattttctgtcaaattgttgaggggaaagccccctgccacaaggtgtgggaagatgagcaccacctcgcctttctctccatttatccaaataccgacggttttacggtcgtgatcccgaagaagcactatcccagctatgcgtttgatatgccgccgcaggcgctggccgacctggtgctggcgacgcagaaggtggcaaagcttctggataaatccttcgatgacgtgggacgtacggggatgttttttgaaggctatggcgttgaccatgtccacagcaaactcagtccgatgcacggcaccggggatatgtcccaatggcggccgatcgagtcgcgtcagaccaagttttttgcgcaatatgaaggctatctctcctcccacgatcacgagcgggcggatgatgaaaagctggcagcgctggcggccagaatcagagaagcatag

SEQ ID NO: 191449 - DNA, 2184 bp, Klebsiella oxytoca
atgagcgcaatatccctgatccaaccggatcgtgaccttttctcctggccgcagtattgggccgcctgttttggccccgcgccttttctgccaatgtcgcgagaagagatggatcaacttggctgggatagctgcgacatcatcctggtgaccggcgatgcttatgtcgatcacccgagcttcgggatggcgatttgcggacgcatgctggaatcccagggattccgcgtggggattatttcccagccggactggaacaacaaagatgactttatgcgtctgggtaaaccgaacctgttcttcggcgtgaccgccggtaacatggactcgatgatcaaccgctacactgccgaccgtaagctgcgccatgacgatgcctacacggcgggtaacgtggccggtaaacgcccggatcgcgctacgctggtctacactcagcgctgcaaagaggcgtggaaagatgtcccggtgatcctcgggggcatcgaagccagcctgcgccgtaccgcgcactatgactactggtccgataccgtgcgccgttcggtgctggtggactctaaggccgatatgctgatgttcggcaacggcgagcgtccgctggtggaagtggcgcaccgtctggccgccggcgagcctatcgggcaaattcgcgatgtacgcaacaccgccatcatggtgaaggaagcgctgcctggctggagcggggtggactccacgcgtctggacacgccggggaaaatcgacccgatcccgcatccgtacggtgaagatctaccgtgcgcggataacaaaaccgtcgcgccgccaaaacaggaagcgaagcgcgttaccgtccagccgccgcgtccgaaaccgtgggagaagacctacgttctgctgccctcgtttgagaaagtaaaaggcgataaagttctctacgcgcatgcctcgcgcattttgcaccatgaaactaaccccggctgcgcccgggcgctgatgcagaagcacggcgagcgctatatctggattaacccgcccgccattccgctctcaaccgaagagatggatagcgtgtttgcgctgccctataagcgcgttccgcatccttcttacggcgatgcccgcattccggcctatgagatgattcgcttctccattaacatcatgcgcggctgttttggcggctgttcgttctgctcgattaccgagcatgaaggtcggatcattcagagccgttccgaagattcgatcatcaatgaaatcgaagcgattcgcgatacggtgcccggctttaccggtattatttccgatcttggcggcccgacggccaacatgtatatgctgcgctgcaagtcgccgcgcgccgagcagacctgccgccgcctgtcatgcgtttatccggatatctgcccgcatatggacaccaaccatgagccgacgattaacctttaccgtcgcgcccgcgatcttaaaggcatcaaaaagatcctcatcgcatccggcgttcgttacgacattgcggttgaagatccgcgctacatcaaagagctggccacccaccacgtcggcggttatctgaagattgctcctgaacataccgaagaggggccactgtcgaagatgatgaaaccgggtatgggcagctacgatcgctttaagcagttgttcgatacttattcgaagcaggcgggtaaagagcagtatctgattccatactttatttccgcccacccggggacgcgagatgaagatatggtgaatctcgcgctgtggctgaagcagcatcgtttccgcctggatcaggtgcagaacttctatccgtcgccgctggcgaactccaccaccatgtattacaccggcaagaacccgctgggtaagattggctataagagtgaggatgtggtggtgccgaagggcgacaaacagcgccgcctgcacaaggcgctgctgcgctatcacgatccggccaactggccgctgatccgtcaggcgctggaaacgatgggtaaaaagcacctgatcggcagccgtcgcgattgcctggtaccggcgccgacgctggaagaaatgcgcgaggcgcgtcgccagaaccgccatacccgaccggcgctgacgaagcatacgccgattgtgcaccagcgttcgaacggcggggcgacggcgaagaagcccgtgaaacgcggcaaggttgccggtcgttaa

SEQ ID NO: 191450 - DNA, 1413 bp, Klebsiella oxytoca
atgtcactcagtcggcgtcagttcattaaggctacaggcgtagcgctgtgcgcaggcgccgcgccgctgaaggcacaggctgctggtcagcagcccgcgctgccgattcctcctttgcttgagtcccgccgcgggcagccgctatttttgacgctacagcgtgcgcactggtcgtttacgccgggcacccgcgcatcggtgtgggggattaacggccgctacatggggccaaccatccgcgtctggaacggcgatgatgtgaagctgatctacagcaaccgcctgacggaaaacgtcgcgatgacgatacgcggtctgcaggttcccggtccgctgattggcggcgcggcgcgtatgatgtccgccaacgccgactgggctccggtgctgccgatccgccaaagcgcggcgacgctgtggtatcaggccaacacgccaaaccatatggcgaaacaggtttataacggtcttgccgggatgtggctggtagaagatgaggttagcaagaatttgccgatccctaaccactacggtgtggatgatttcccggtgattattcaggacaagcgcctggataacttcggtacgcctgaatatagcgaacccggcagcggcggcttcgttggcgatacgctgctggtgaacggcgtgcaggggccttttgttgaagtgtcgcgcggctgggtgcgcctgcgtctgctgaatgcgtctaactcccggcgctaccagctgcagatgagcgatggtcggttgctgcacgtcatctccggtgaccaggggctgcttccggcgccggtttcgctaaagcagctgtcgttggctccgggcgaacggcgcgaaatcctggtcgacatgaccaacggcgatgaggtgtcgataacctgcggggaagcggcgagtatcgtcgatcgtattcgcggtttcttcgaaccgtcgagcatcctgatttcaacgctgattctgactttgcgcccgacgggcctgctgccgctggtgaccgatagcctgcctgtgcgcttgctgcctacggaaatgctggccggcgcgccgatccgcagccgcgatattacgcttggcgacgatccgggaatcaacggccagctgtgggatccgcagcgtattgatattacggcgcagcagggaacctgggagcgctggacggtgcgcgccgaccggccgcagtcgttccatattgaaggcgtcatgttccaggtgcgtaacgtgaacggttctgcgccgttcccggaagaccgcggctggaaggataccgtctggatcgacgggcaggttgagctgttggtctattacaaccagccctcctggccgcactttccgttccagtacttaagccagacgctggagcttgccgaccgcggctccattggccagattctggtgaatccggcgccgtaa

SEQ ID NO: 191451 - DNA, 738 bp, Klebsiella oxytoca
atgctatttatttttcgactaattatcgttgtcatttactgtattctggtgtgcatcttcggctgtatctattgtctgttcagtccgcgtaatcctaagcacgtcgccaccttcggtcacctttttggcaagctgtcgccggtcttcggtctgaaggttgaactccgcaagcctgccgatgccgaaagctacggtaacgctatctatatcgctaaccaccagaataactatgatatggtgacggcatcgaatatcgtacagccgccgaccgttacggtaggtaaaaaaagcctggcgtggatcccttttttcggccagctctattggttgacggggaatctactgattgaccgcaataaccggacaaaagcgcacggcaccattgcagaagtcgtgaacgcatttaaaaagcgtaaaatctctttttggatgtttccggaagggactcgcagccgtggtcgcggtttgctgccctttaaaaccggtgcctttcatgcggctattgcggcgggcgtacccattattccggtatgcgtgtctaatacttcgaataaaattaagctcaatcgcctgaataacggtctggtgattgtcgaaatgctgccgccggtcgacaccagccagtacgggaaagagggcgtccgcgcgctggcgatgcactgtcgcgagctgatgtccgcgaaaattgccgagctggataaagaagttgccgaacgcgaagcggccggcaagaaataa

SEQ ID NO: 191452 - DNA, 2259 bp, Klebsiella oxytoca
atgagcgatatggcagagcgccttgcgctgcatgaatttacggaaaacgcctaccttaactactccatgtacgtcatcatggacagggcgctgccgtttattggcgatggcctgaagccggtccagcgtcgcatcgtctatgcgatgtctgaactgggtctgaacgccagcgcgaagttcaaaaagtccgcccgcaccgtcggtgacgtgctgggtaaataccatccccacggcgacagcgcgtgctatgaagccatggtgctgatggctcagcccttctcctaccgctatccgctggttgacggtcagggaaactggggggcgccggacgatcctaaatccttcgccgcaatgcgttataccgaatcccgtttgtcgaagtatgctgaactgctgctgagcgaactggggcaaggcaccgttgactgggtaccaaacttcgacggcactttgcaggagccgaagatgctgcctgcgcgcctgcccaatattctgctaaacggtactaccggcattgccgttgggatggcgacggacattccgccgcacaacctgcgtgaagtggcccgggcggccattaccctgattgaaaagccgcaaacttcgctggatgacctgctggatatcgtgcaggggccggattatcctaccgaagcggaaatcattaccccccgtgccgaaatccgcaaaatctaccagaatggccgcggttcggtgcggatgcgcgcggtatgggccaaagaagacggcgcggtggtgattagcgcgctgccgcatcaggtttccggcgcccgcgtgctcgagcagatcgccgcccagatgcgcaacaaaaagctgccgatggtggatgatctgcgcgacgagtcggatcacgaaaacccgactcgcctggtgatcgtcccgcgctctaaccgcgtcgatatggagcaggtgatgaaccacctgttcgcgacgaccgatctggaaaagagctatcgtatcaacctgaatatgatcgggctcgataaccgtccagcggttaaaaacctgctggaaatcctctcggaatggctgaccttccgtcgcgataccgtgcgccgtcgtctcagctaccgtctggaaaaggtcctcaagcgcctgcatattcttgaaggtttgctggtggcgtttctgaatatcgatgaagttatcgagatcattcgtcacgaagatgagccgaaaccggcgctgatgtcgcgcttcggcctcagcgagacccaggcggaagcgattctggagttaaaactgcgccatctcgccaaactggaagagatgaagattcgcggcgagcagaacgagctggaaaaagagcgcgacaacctgcaggccatcctggcctctgaacgcaagatgaataacctgctgaagaaagagctgcaggccgacgccgacgcctttggcgacgatcgccgttcgccgctgcgcgagcgcgaagaagccaaggcgatgagcgagcacgatatgctgccgtctgagccggtgactatcgttctgtcgcagagcggctgggtacgcagtgccaaaggtcacgatattgacgcgccggggctgaactataaagcgggcgacagttttaaatcggccgtgaaagggaagagcaatcagccagtggtctttattgacactaccgggcgcagctacgcgattgacccgattaccctgccgtccgcgcgcggtcagggcgagccgcttaccggtaagctgacgctgcctccgggggcgacggttgaacatatgctgatggaagccgatgatcaaaaactgctgctggcttccgacgcaggctacggatttatctgtactttcaacgatctggtggcgcgcaaccgcgccggtaagacgctgattagccttccggataacgcgcacgtgatgccgccgctggtaatagaagacgaatcggacatgctgctggccattaccgctgccggccgcatgctgatgttcccggtcagtgacttgccgcagctgtcgaaaggtaagggcaacaagattattaatattccgtcggcggaagcggctgcgggccaggatggcctggcgcatctgtttgtcctgccgccgcaaagtacgctgacgattcatgtcggtaagcggaaaattaaactccgtccggaagagctgcaaaaagtgaccggcgagcgcggccgccgcggctctctgatgcgcggattgcagaaaatcgatcggatagagattgattctccgcgtcgcgcctctgcgggcggtagcgaagagtaa

SEQ ID NO: 191453 - DNA, 408 bp, Klebsiella oxytoca
atgaagaaaatcgccgcaatgaccgccatcatcgctttagtttccatgccggtactggctgctgaacagggcggattttccggccctggctccacgcaaaccagccagacaacctcgcaaaatggcgggtttattggcccgaacgggagcgtaacgacggttgcgaatgcgaaaagcctgcgtgacgatacctgggtgaccctgcgcggtaaaatcgtggagcgtatttccgatgatctgtataaattccaggacagctccggcaccgtcaacgtcgatatcgatcacaagcgctggaacggcgtgaccgttacaccgcaggatacggtagagatccagggcgaagtcgataaagactggaactcagtggagatcgatgtaaagcagattcgtaaaatcaccccctaa

SEQ ID NO: 191454 - DNA, 660 bp, Klebsiella oxytoca
atgcgtattttattggtggaagacgataaactgatcggtgacggcctcaaggcagggctgacaaaaatgggattcagcgtcgactggtttacccgcggtgaggaaggaaaagccgcattgtacaacgccccctatgacgccattattctggacctgacccttcccggcattgatgggctggatatcctgcgcgaatggcgcgacaaaggccgccatgaaccggtactgatccttaccgcccgcgacgcgctcagccagcgggttgaagggcttcggctcggcgccgatgactatctatgcaaaccctttgcgctgattgaagtcgccgcccgtctggaagcgctgatgcgccgcgcccacggccagagcagcagcgagctgcggcacggcagcgtggttctcgacccgggccggctcacggccaccctgaacggcgaaagcctggcgctcaagccaaaggagtttgctctgctggagctgatgatgcgtaacgccggacgcgtgctgccgcgtaagctgatcgaagaaaaactctacagctgggatgacgacgtttccagcaatgcgatagaggtgcacgtccaccatctacgccgtaaactcggcagcggtttcattcgcaccgttcacggtatcggctacaccctgggggacgcatga

SEQ ID NO: 191455 - DNA, 1350 bp, Klebsiella oxytoca
atgaaacgactgggcaaactgagcctgcgcgttcgcctgacgctccttttcctgctgctgaccagcgccgcatggggcatcgccagctttgtggcctggcaacaaacgaccgataagctggataagctcttcgatacccagcagctgctattcgcccgccgccttagcgcaatgaattttgacgagcttcacactctctcttcgcaggtgcgagagaagaagaaggtcaagcacggtcatctcgacgacgacgcgctggctttcgctatctttaccaccgatggcaagatggtgcttaacgatggcgagaatggccaggatatcccgtggggccgcaatcgggagggattcagcgacggctatctgcgcggcgatgacgacgagtggcgttttctgtggctcaccacccgcgacggccgccatcgtatcgttgtcggccaggagtgggattaccgtcgcgagatggcgctggatatcgtcaccagccagctcacgccctggctgattgcgctgccgcttatgtttttgctactcatcgtgctgttaagccgggaactggcgccgctgaaaaagctggccaacacgctgcgcgcccgggcgccggattccgccgaaacgctgaataataaaaacgtgcccaatgaagttcgcccgctggtcgacgcgctaaatcagctgtttatccgcacgcatgatgccatgatccgcgagcgtcgcttcacatccgatgcggcccacgaactgcgcagtccactggcggcgctgaaggtgcaaactgaagtagcccagctttcgaaggacgatccgcaggggctggataaagcgctggcgcagcttcaccagggtatcgatcgcgcaacccgcctggtcgatcagcttctgactttgtcgcgcctggattcgctggcgcagctggacgatatccagcgcgtcgccctggacgacctgctgcagtcggcggtgatggagatgtaccaccccgctcagcaggccggcgttgagctgcgtctgcatctgaatgcggataacgtcgcacgcaccggccagccgctgctgttaagcctgctggtgcgcaatcttttagataacgccgtacgctatagcgccgccggaagccaggtcgatatcacgcttgaagctggtgaatttcgcgtgcgcgataacggcccgggcattagcgccgaagccctggcgcgtatcggcgagcgcttttatcgcccgccgggacaggaacaacccggcagcggtcttgggctatccatcgtcaaacgtatcgccgcgctgcacggaatgacagccagtttcggcaacgcccgggacggcggattcgaagcgcgcattcgctggtag

SEQ ID NO: 191456 - DNA, 582 bp, Klebsiella oxytoca
atgagcaacattctgattatcaacggtgcgaaaaaattcgcccactctaacggccaactgaacgacaccctgaccgaggtcgcggatggttatctgcgcgacgccgggcatgatgtcaaggtcgtccgcgccgagagcgaatacgatgtaaaagaagaggtgcagaattttctctgggctgacgtggttatctggcagatgccgggctggtggatgggcgcgccctggacggtgaaaaagtacatcgacgacgtctttaccgaaggtcacggagcgctgtacgccagcgatggccgcacccgctccgatgccagtaagaaatatggttccggcggcctgattcagggcaaaaaatatatgctgtccctgacctggaatgcgccgatggaagccttcaccgagaaagatcagtttttccacggcgtcggcgtcgacggcgtttacctgccgttccataaggctaaccagttccttgggatgagcgccctgccgaccttcatcgccaacgatgtgatcaaaatgcccgatgttccgcgttatacggcagaatatcgcaagcatctggcggaaatttttggttaa

SEQ ID NO: 191457 - DNA, 315 bp, Klebsiella oxytoca; identical to SEQ ID NO: 172850

SEQ ID NO: 191458 - DNA, 1896 bp, Klebsiella oxytoca
atgacgcaatcttcatataacgctgatgccattgaggtactcaccgggctagagccggttcgccgccgtccgggaatgtacacggataccacacgaccaaaccatcttggtcaggaagttattgataacagcgtggatgaggctctggccggtcacgcgaaacgcgtggaggtcattctccatgccgatcagtcgctggaagttatcgacgatggacgcggaatgccggtagatatccaccctgaagagggggtgccggcagttgaactgattctttgccgcctgcacgcgggagggaagttctccaataagaactaccagttctccggcggcctgcacggcgtcgggatttcagtggtcaacgccttatcgaaacgcgttgaagtgaacgtgcgccgcgacggtcaggtctatagcatcgcctttgaaaacggcgacaaagtggaagatctccacgtgaccggcacctgcggtaagcgcaataccgggaccagcgtccatttctggccggatgaaagcttttttgatagcccacgtttttccgtctcgcgcctttcgcatttgttaaaagccaaggccgttctttgcccgggcgtagagattgttttccgcgatttggtcaacgacagcgagcagcgctggtgctacgccgatggcctgaccgactatcttagcgaagcggttaacggcctgcctctgctgccggaaaaaccgttcgtcggcaccttctctggcgataccgaagcggtcgactgggcgctgctgtggctgccggaaggcggcgagctgttgaccgaaagctacgtcaacctgattcctaccatgcagggcggaacccacgttaacggcctgcgccagggcttactggacgccatgcgcgagttctgcgaataccggaacatcctgccgcgcggcgtgaagctgtcggcggaagatatctgggagcgctgcgcctacgtactctccgtgaagatgcaggatccgcagtttgccgggcaaaccaaagagcgcctctcttcacgccagtgcgccgcgtttgtttccggagtcgtcaaagatgccttcagcctgtggctaaaccagaacgtccagtcggcagagctgctggcggaaatggcgatctccagcgcccagcgtcgcctgcgcgcggcgaaaaaagtggtgcgcaaaaagctaaccagcggtccggcgctgcccggcaagctggcggactgcaccgcccaggatttgaaccgaaccgaactgttccttgtggaaggggattcggcgggcggttctgccaagcaggcgcgcgatcgcgaatatcaggcgatcatgccgctgaaaggtaaaatccttaacacctgggaagtctcttccgatgaagtactggcttcacaggaagtgcatgacatttctgtcgccatcggtatcgacccggatagcgacgacctgagccagctgcgctacggcaagatttgtattctggcggatgccgactccgacggtctgcatatcgcaaccctgctgtgcgcgctgttcgtcagacacttccgtaatctggttaaacacggccatgtttacgtggcgctgccgccgctataccgtatcgacctcggtaaagaggtgtattacgcgctgacggaagaagagaaaaccggcgtgctggaacagcttaagcggaagaagggtaagccaaacgtacagcgctttaaagggctgggcgagatgaacccgatgcagctgcgtgagacgacgctggatccgaatacccgccgtctggtgcagctgattatcaacgatgaggacgaacagcagacgactgccatgatggacatgctgttagcgaagaagcgttctgaagatcggcgtaactggctacaagagaagggcgatttggctgagctggacgggtaa

SEQ ID NO: 191459 - DNA, 576 bp, Klebsiella oxytoca
atgtctacgcttctctacctgcatggttttaacagctcaccgcggtcggcaaaagcgactgcgctgaaagagtggctggcgcggacttatccccacatctctatggtgatacctgagctcccggtttatcctgcgcaagcggcggaatatctggaggccctcgtgctggaacacggcggcgaaccgctgggcgttgtcggctcctcgctggggggatattatgcgacctggctatcgcagtgttttatgctgcccgcggtggtagtgaaccctgcggtgcgcccgttcgagctgctgaacaatttcctgggccccaatgagaatccatacacggggcagcaatatgtgctagagtcacgccatatttacgatctcaaagtcatgcaaattgacccgctggaagcgccggatttaatctggttattacagcaaacgggcgatgaagtgcttgattaccgccaggccgttgattatttcgcctcctgccgacaaacggtagaggagggcggtaatcacgcatttgttggctttgaagatcatttcactcagattatcgattttctgggcctgcgctaa

SEQ ID NO: 191460 - DNA, 828 bp, Klebsiella oxytoca
ttggaaagcctgttaaacctacctttggctggtgaggccagagtcaggatattacaaattactgatactcacctgtttgctgaaaaacacgaaacgctgttaggtatcaatacctgggaaagctatcaggctgtactggatgctatccacgcctctcagcgagaatgcgacctgattgttgccacaggcgatctggcgcaagatcactccgccgcggcctatcagcattttgctgaaggcatcgcgagttttgctgcaccctgcgtctggctaccgggcaatcatgattttcaaccggcgatgtacagcacgctgcaggaatcaggcatctcccccgctaaacgcgtattgctgggcgaccactggcagatattgctgatggacagccaggtgttcggtgtgccgcacggcgagctgagcgatttccagctggagtggcttgagcagaagctgacggaggttcctgagcgttacacgctgctgctgttacaccatcatcctctgccgtcaggctgtagctggctggatcagcatagcctgcgcaatgccggggcgcttgattgcgcgctggctgcttttcctcgcgttaagcatctgctgtgcggtcatattcaccaggagctggaccttgactggaacgggcggcgaatgatggccacgccatccacctgcgtgcagtttaagccgcactgcgctaacttcacgctcgataccgtctccccaggctggcgctggctggaactgcatcctgacggcaccttgaccactgaagtttgccgccttgaaggcgtgaaatttcacccggatatcgcttcagaaggatactga

SEQ ID NO: 191461 - DNA, 423 bp, Klebsiella oxytoca
atgaagcgttatacacctgacttccctgaaatgatgcgcctgtgtgaaaccaattttgctcagctgcgccgcctgttgccgcgaacggatgcagcgggagaaaaggtgagttaccaggtgggcaatgcgcaataccgattaacgatcgtcgaatcgacccgctacactaccttagtggcgattgaacagactctgccagcggtaagctactggagtctgccgtcaatgacggtacggctctatcacgatgcaatggtcgctgaagtgtgttcaagccagcagatctttcgcttcaaagcgcggtatgattatcctaataaaaagttgcatcaacgcgacgaaaagcatcaaattaatcagtttctggccgattggctgcgatactgtttagcacatggagcgatggcgattccggtttgttag

SEQ ID NO: 191462 - DNA, 633 bp, Klebsiella oxytoca
atgagtaatgtcaatcagcaggagattaccttctctaaaaacgatgtagaaattattgcacgcgaaacgctctatcgtggttttttttcgctcgatttatatcgtttccgccaccgcctgtttaacggtgagatgagcggcgaggtgacccgcgaaatttttgagcgcggtcacgcagcagtcttgctaccctttgacccggtgcgtgatgaagtggtgctcgtcgagcagatccgtattgcggcgtatgataccagtgagagcccgtggctgctcgaaatggtcgccggcatgattgaagaaggcgagtcgcctgaagatgtcgcccgccgtgaggcggtagaagaagccgggcttaatgtcggccgtattaagccggtcctgagttacctggccagccccggcggcaccagcgaaaggctgtctattatggtgggtgaagtcgatgcaacgacggcaaaggggattcacggactggccgatgaaaatgaggatattcgtgtccatgtggtaagccgggaacaggcttatcggtgggtagaagaggggaaaatcgacaacgcagcctctgtcattgcgctgcaatggctgcaactgcattatcacaatttacgaaacgagtggacaaaatga

SEQ ID NO: 191463 - DNA, 1449 bp, Klebsiella oxytoca
atgaagaaactctttcccatccttatcggcctgggcctgactggcttcagcgccatgagccaggcagaaaacctgctgcaggtttatcagcaggcgcgtatcagtaaccctgatctgcgtaaatcagcagccgatcgtgatgccgcattcgagaagatcaacgaagcgcgtagcccattactgccgcagctcggtctgggtgcggactatacctataccagcggcttccgtgattataaagaccagaactctaacgttaccagcggctcgctacagctcacgcaggtcctgttcgatatgtcgaagtggcgcgcgctgacgctgcaggaaaaacaagccggtattcaggacgtcacctaccagacggaccagcaaacgctgatcctcaataccgcaaccgcctattttaaagtgctggccgcgatcgatacgctctcctataccgaagcgcagaaacaggcgatttatcgtcagttagatcagaccacccagcgctttaacgttggcctggttgccatcactgacgtacaaaacgcccgctcgcagtacgatgctgtgctggcgaacgaagtgaccgcgcgcaacgatctcgataacgccgtcgaagaactgcgccaggtgaccggcaactactatccagaactggcgtcgctcaacgtggatggttttaaaaccaacaaaccgtcagccgttaacgcgctgctgaaagaagcggaaagccgtaacctgtcgctgctgcaggcgcgtctgagccaggatctggcgcgcgagcagattcgccaggcgcaggatgggcatctgccgaccctgaatttgaacgcatccagcggagtatctaataaccgctacagcggctctaagagcatttcacaggacgctgacgtagggcagaacaaaatcggccttagcttctccctgccgttgtatcagggcggaatggtgaactctcaggttaaacaggcgcagtacaactttgtcggcgccagcgaacagctggaaagcgcccaccgtagcgtggtgcagaccgttcgttcatcttttaacaacgtgaacgcgtctatcagcagcattaatgcctacaaacaggccgtggtttccgcgcaaagttccctggatgctatggaagcgggttattcggtaggtacgcgtaccatcgtcgatgtcctggacgcgaccactacgctgtataacgcaaaacagcaactgtccaacgcgcgttataactacctgattaacgagctgaacatcaaatccgcactcggtacgctgaacgagcaggatctggttgcgctgaacaatacgctgggcaagtctattccgacttcaccggatagcgtcgcgccggaaaatcctcagcaggatgccagcgccgacggctacagcaacaccgccgcggcaaaaccagcatcagcacgcagcaccagcggcagcaacccgttccgccagtag

SEQ ID NO: 191464 - DNA, 669 bp, Klebsiella oxytoca
atgaaacggacaaaaaatattaatcacgcctcctttcgcaaaagctggagcgcgcgccatttaactcccgttgcgcttgccgttacggccgtgtttatgctcgccggttgtgaacaaagcgatgaaacggtttctctttatcaaaacgccgatgactgctctgccgccaacccgagcaaagccgcagagtgcaccactgcctacaataacgcgcttaaagaagcggaacgtacagcccctaaatacgcctcccgcgaagactgcgtcgccgagttcggtgaaggtcagtgccagcaggcgccggctcaggccggtatggctccggaaaaccaggctcaggcgcaaagcagcggcagcttctggatgccgctgatggctggctacatgatgggccggatgatgggcggcggaatgggcgctcagcagccgctgttcagctcaaaaaacccggccagcccggcctatggtaaatataccgacgctggcggtaagagctacggcgcagcgcagccgggccgtaccatgaacgtgccgaaaaccgcaatggcgccaaaaccggccaccaccagcaccgtgacgcgcggcggatttggcgactcggtcgccaagcagtcaacaatgcagcgcagctcggcgagctcctcttcatcacgctcgatgggcggctaa

SEQ ID NO: 191465 - DNA, 1161 bp, Klebsiella oxytoca
atggaaagaatcagcattaccgagcgcccggactggcgtgaaaaagcgacagaatatggttttaactttcacaccatgtacggcgagccgtactggagcgaagaagcttattacaaactgacgctggcgcaggttgagaagctcgaagacgtcacggcagaactgcaccagatgtgtctgcaggcggttgaaaaagtcatcgccagcgatgatttaatgaccaaattccgcatccccaaacatacctggggattcgtgcgtcagtcgtggaaaacccatcagccctcgctgtattcgcgtctcgatctggcgtgggacggcgtcggtgagccgaaactgctggagaacaatgccgatacgccgacctcgctgtacgaagcggcattcttccagtggatctggatggaagatcagctgaacgccggtcaactgcccgcgggcagcgatcagtttaacagcctgcaggagaagctgatcgatcgcttcagcgagcttcgcgagcagttcggcttccagttgctccacatggcctgctgccgcgataccgttgaagaccgtggcaccgtgcagtatttacaggactgcgccgcagaagcgggcgtggctactgagtttctctatatcgaagacattggactgggtgaaaaaggccagtttaccgacctccaggatcaggtgattggtaatctgttcaagctctatccgtgggaatacatgctgcgcgaggtgttctccaccaagctggaagatgcaggcgtgcgctggctggagccggcctggaagagcatcatctccaacaaagcgctgctgccgctgctgtgggagatgttccccaaccatccgaacctgctgaccgcttatttcagtgaagatgcgcacccggaaatggacaagtacgttatcaagcccattttctcccgcgaaggcgctaacatttctattgttgaaaacggcaaagtgctggaggcggtagaaggtccgtacggtgaagaaggcaccatcgtgcaggagttctatccgttgccgaagtttggcgacagctacacgctcatcggcagctggctgattaacgaccagccggcgggtattggcattcgcgaagaccgggcgatgatcacccaggatctatcgcgtttttatccgcacattttcgttgagtaa

SEQ ID NO: 191466 - DNA, 792 bp, Klebsiella oxytoca
atgtcccgtatccgcatgcccgcgctatttttaggccatggcagcccgatgaacgtgctggaagataacatctatactcgcgcctggcggcatctgggcgagactttaccgcggccgaaagccatcgtggttatctccgctcactggttcactcgcggtacgggagtgacggcgatggaagcgccgaaaacgattcatgattttggcggttttccacaggcgctatacgatatgcattatccggctccgggttcacctgaactggcccagcgcctggttgagctgctggcgccggtgccggtgacgctggataaagaagcctggggctttgaccatggttcatggggcgtgttgattaaaatgtatcccgacgccgatattccgatggtgcagctaagtattgatagcacgaaacccgccgcatggcatttcgaaatggggcgtaagctggctcagctgcgcgatgaaggcattatgctggtggcaagcggcaacgtggtgcataacctgcgcaccgcacgctggcacggcgagaatacggcctatccctgggcggagtcgtttaataactacgtgaaggcgaacctggcatggaaaggccccgtggcggaacatccgctggtgaattacctgacgcatgaaggcggatcgttatctaacccaacggccgatcacttcctgccgctgctgtacgtactgggggcctgggacggcgaggagccgattacgatcccggtagaaggaatggaaatgggatccctgagcatgctgtcagtggtgattggcgcttga

SEQ ID NO: 191467 - DNA, 774 bp, Klebsiella oxytoca
atgttgtcctcacccatcattttgactctgctggcagggagcgccacctttattggggcaatattcggcgtgctcggccagaaaccctcgaaccgcttattgggtttctctctgggtttcgccgccgggatcatgctactcatttccttaatggagatgctgcccgctgcgctggcgactgaaggcatgtcgccgctgctcggctacggcatgtttatcatcggccttctcggctactttgcgcttgaccgcatgctgcctcacgcccatgcgcaagatctgatgaaccccggcatctcccgcccgcgaaatctgcgacgtacggcgatattgctgacgttaggcattagcctacataactttcctgaaggtattgccacttttgtgacggccagcaataaccttgagctgggcatgggggtcgcgttagccgtcgcgctgcataacatcccggaagggctggcagtagcagggccggtctatgccgccacgggttccaggagtaaagcggtattctgggcagggctttccgggatggcggaaatcttcggcggcgtgctggcctggctggtactgggcagcgtgatctctccggtgatgatgggcgcggtcatggccgcggttgccggtattatgattgcgctatcggttgatgagctcatgccgctggcgaaagaactcgatccgcaaagcaacccgagctatggcgtgttgtgcggaatgtcggtaatgggattaagcctggtggttttgcaaacggtagggattggctaa

SEQ ID NO: 191468 - DNA, 654 bp, Klebsiella oxytoca; identical to SEQ ID NO: 172839

SEQ ID NO: 191469 - DNA, 282 bp, Klebsiella oxytoca
atgattgacccgaaaaaaattgaacaaatcgcccgccaggttcatgaatcgatgccgaaggggctccgcgatctgggggaagacgtggagaaaaaaattcgtcaggtgctccattcgcagttaactcgcctggacctggtaagccgcgaagagttcgacgtgcagacgcaggtgctgctgcgcacgcgtgaaaagctggcgcttctggagcaacgtctgagcgagctggaaaatcgtcctctaaacgcgccggcgacgccggacgccgaagagaagctctaa

SEQ ID NO: 191470 - DNA, 210 bp, Klebsiella oxytoca; identical to SEQ ID NO: 172837

SEQ ID NO: 191471 - DNA, 1434 bp, Klebsiella oxytoca
atgaaagtaacgctgccagagtttgaacgtgcaggagtgttggtggttggcgatgtgatgctggaccgctactggtatggtcccaccagccgtatttcgccggaagcgccggtaccggtggtgaaggtggaaaatatcgaagaacgtcctggcggcgcggcaaacgtggcgatgaacattgcgtcgctcggcgcgacctcccgcctcgttggtctgaccgggattgacgatgccgcccgtgcgttaagtaaggcgctggctgacgtcaacgtgaagtgcgacttcgtatccgtcccgacgcatccgacgattaccaaactgcgcgtgctgtcgcgcaaccagcagctgattcgtctcgattttgaagaagggttctccggcgtcgatccgcagccgatgcacgaacgtattcagcaggcgctgggctctattggcgccctggtgctctctgattacgccaaaggcgcgctgaccagcgtccagaccatgatcaagctggcgcgcgatgcgggcgttccggtgcttatcgatccgaaaggcacggattttgaacgctatcgcggcgctaccctgctgacgcctaacctctcagaatttgaggcggtagcgggtaaatgtaaggatgaagaagagatcgttgaacgcggcatgaaaatcatcgccgatttcgacctctctgcgctgctggtgacccgttccgagcaggggatgacgctgctgcagccggggcgaccgccgctgcatatgcccacgcaggcccaggaagtctatgacgttaccggcgcgggcgacacggtcatcggcgtgctggcggcgacgctggcttccggcaatactctggaagaagcttgctactttgccaacgcggcggctggcgtcgtggtgggtaaactcggtacctctaccgtttcgcctatcgaactggagaacgcggtacgcgggcgctccgagaccggttttggcgtgatgagcgaagaagaactcaagctggcggtagccgcggcgcgcaagcgcggcgagaaagttgtgatgaccaacggcgtgttcgatattttacacgcgggccacgtttcctacctggcgaacgctcgcaaactgggtgacaggctgattgtcgcggtgaacagcgatgcttcaacccggcgtctgaaaggcgagtctcgtccggtcaacccgctggatcagcgaatgatcgtgctgggcgcgctggaggccgtcgactgggtggtttcttttgaagaagatactccgcagcggctgattgccggaattctgccggatctgctggtgaaaggtggggactataagccggagcagattgccggcagcgaagaggtgtgggcaaacggcggcgaggtgctggtgctcaacttcgaagatggctgctcaacgaccaatatcatcaggaagatccagaaagataacaatcagtaa

SEQ ID NO: 191472 - DNA, 2835 bp, Klebsiella oxytoca
atgccgctttcttcgcaattacagcagcactggcagacggtcgctggccggctgccagcggattttcccgtatcgacgttgagcgatcgggcgcaatcagttatggcattcagcgatttcgtcgaacagagtctgatcgcgcagccgcagtggctggcggagcttgaaagtgcgccccccgaggcgcaggagtggcatcactacgccgaatggctgcaggtgcgcctggccgaggtcaatgatgaagccgcgctgatgcgcgagctgcgccagtttcgccgtcggatcatggtgcgtatcgcctgggcccaggcgctatcgctggtcagcgaagagagcagcctgcagcagctaagcgcgctggcggagaccttaatcgtcgccgcgcgcgactggctatacgctgcctgctgtcgcgaatggggcactccatgtaatgctgaaggttcgccgcagccgctactcatcctcgggatgggcaagctcggcggcggcgagctgaacttctcctccgacatcgatctgattttcgcctggccggaacatggcgccacgcgcggcgggcgtcgcgaactggataacgcccagttttttacccgcctcgggcagcgcctgattaaggtactggatcaacccacccaggatggttttgtctaccgcgtggatatgcgcctgcgcccgtttggcgatagcggtccgctggtgttgagctttgccgcgctggaagattattaccaggagcagggacgcgattgggagcgctacgcgatggtgaaagcgcgaattatgggcgataacgatggcgtctatgccaacgagctgcgcgccatgctgcggccgtttgtcttccgccgctatatcgatttcagcgtgattcagtctttgcgcaacatgaagggcatgattgcccgggaagtgcgccgccggggattaaaagacaatatcaagctcggcgcgggcggcatccgagaagtggagtttatcgtccaggtcttccagttgattcgcggcggccgtgagccaatgctgcagcagcgggcgctgctgccgacgctggccgccatcgaagagctacatctgctgccggaaggggatgcgcagaggctgcgcgaagcctatctgtttttgcgtcgcctggaaaacctgctgcaaagcatcaacgacgagcagacgcaaaccttgccgcaggatgaacttaatcgcgcccggctggcttgggggatgggcgttgccgactgggagacactcagcgcgcggctggcggaacagatggctaacgtgcggcgcgtgtttaatgaactgatcggcgacgatgaaacgcagtcgccggatgagcagcttgaagagtactggcgcgagctgtggcaggacgcgctgcaggaagatgataccagcccggcgctggcgcatcttgtagacagcgatcgccgcagcgtgctggcgctgatcgccgattttcgcaaagagctggaccggcgcacgattggtccgcgcggtcgtcaggtgcttgaccagctcatgccgcatctgcttagcgaaatttgttcgcgcgccgatgctccggtaccgctggcgcgtattacgccgctgctcaccggaattgtcacccgcaccacttacctggagctgctgagcgaattccccggcgcgttaaagcacctgattagcctgtgcgcggcgtcgccgatggtcgccagtcagctggcccgccatccgctgctgctggacgaactgctggacccgaatacgctttatcagccaacggccaccgatgcctatcgcgatgaactgcgccagtatctgctgcgcgtaccggaagatgatgaagagcagcagctggaggcgctacgccagtttaagcaggcgcagctgctgcacatcgctgcggccgatatcgccggaacgctgccagtgatgaaagtgagcgatcacttaacatggctggcggaggcgatgattgacgcagtcgtccagcaggcatggctgcagatggtggcccgttacgggcagccgacgcacctgcacgatcgccaggggcgcggttttgcggtggtcggctacggcaagctggggggctgggagctgggctacagttccgatctcgatttggtgttcctccacgattgcccgatggaggtgatgaccgacggcgaacgcgaaatcgacggccgtcagttttatctgcgcctggcgcagcgcatcatgcatcttttcagtacccgcacctcgtcaggcattctgtacgaagtggatgctcgcttacgcccctctggcgcagcggggatgctggtcactaccgccgattcctttgctgattatcagcagaatgaggcatggacatgggaacaccaggcgctggttcgcgcccgcgtagtgtatggcgatcctgagctacaggcgcgctttgacgccattcgtcgggatattcttactaccccgcgagaaggcgaaaaactgcagaccgaagtgcgggaaatgcgcgaaaaaatgcgcgctcacctggggaataagcatcacgatcgctttgatattaaagccgatgccggtgggatcaccgatattgaatttattactcagtatctggtcctacgctatgccagtgataaaccgaagctcacgcgctggtccgataacgttcgtatcctggaactgctggcgcagaacgacattatggacgaggcagaggcgagggcgttaactcacgcttacactacgctgcgcgatgcgctacatcacctggcgctgcaggaacagccggggcacgtggcgccagatgcgtttagccaggagcgtgaacaggtcagcgccagctggcagaagtggttgatggcttaa

SEQ ID NO: 191473 - DNA, 1407 bp, Klebsiella oxytoca
atgcgcattgcatggcgattcgccgcaaaatactatttactgacaagaaatatcgttgttagttcgccgcaatttcccggcacagcatataagcggaagaattcagtcatggctcaagaaatcgaattaaagtttatcgttgatcagaatggcgttgacgcgctgcgtcagcacctcaatacgctggaggcaaagcacacgcccgcgggtcaattactgaatatttactatgaaacggcggataactggctgcgccgccacgacatggggctgcgcgttcgcggcgaccaggggcgctatgagatgacgctgaaaatcgccgggcgcgtcgtcggcggtctgcatcagcgtccggaatataacattccgctggaaagccctgagctggcgctggaaaagcttccggctgaagtctggccgcagggtgaactgccggcggagcttgctgagaacgtacagccgcttttcagcaccgattttgagcgtgagcgatgggtggtcaaagaaggcgacagcgaaattgaaatcgcactcgatcgcggcgaagtcaaagccggcgagcatcaggaacccatttgcgagctggagctggagcttctgtccggtaatacgcaggatattctgacccttgcccgcggcctgctggataccggcgtactgcgtcagggaagcctgagcaaagcggcgcgaggttatcatctggcgcagggcaacgaagaacgcccgctgaccgcgttaacgatccttcgcgtcgcgccgaaagccagcgtcgaacaggggctggaggcggcgctggaaagcgcgctggcgcactggctatatcatgatgaagtcctcaatcgcggcaatgcgaaagcgaaagcggagattttgcacgctatcgcccgcgtgcggcacgcgctggtactgtttggcggtattgtcccgcgcaaggccaccacgctgctgcgtgaacgtttgagcgaagccgaggcggcgctggcggaagccgaaacgacccaggcggcgcttttcagcgtggcgaccgtcagagcgaagctggcgctcaccgatctgctggttaaccgcggctggcgtcctttcctgaacgcagccggagagcagaaaattgccggatcgtttaaacgctttgcggatattcagctctccagggcggcggcggagctgaaaaacgcttttcgtcagccgtccgctgacggttatgccgatcagcttccgcgtctgacccgcgaaattgacaccgttcagctgttatccggcgcctatgccgatgctgccgcgccgtggctggaaaactggcaagaaacccgccgggcgattgcgcataatgacagcagcgttatcgaatattttcgtcgccaggcgctggccgcagagccgttctggctgcatagtggaaaacgataa

SEQ ID NO: 191474 - DNA, 621 bp, Klebsiella oxytoca
atgccaaaattacgccttattacattgactttgctggcgctgagcgccgccacggcggttcacgcggaagaaaaacgttacgtttcagatgaactgaatacctgggtgcgcagcggtccgggcgataactatcgccttgtgggcaccatcaacgccggcgaagaagtcgcagtgctgcaaactaacgacagcactaactatgctcaggtgcgcgacagcagcggccgtaccgcctggatccccttgaaagagctgagcaacgagcccagcctgcgcactcgcgtgccggatctggaaaaccaggtaaaaaccctgaccgataaactgaataacattgataccacctggaaccagcgcacggcggacatgcagaagaaagtcgccggtagcgatgccgtcatcaacggcctgaaagaagagaatcaaaagctgaaaaatgagctggttgtcgcgcagaagaaggtgaacgccgcaaatctgcagcttgatgacaaacagcgcaccattatcatgcagtggtttatgtacggcggcggcgtgctgggcgtcggcctgattctgggactggtgttgccgcacctggtaccgagccgcaagcgcaaagaccgttggatgaactaa

SEQ ID NO: 191475 - DNA, 1242 bp, Klebsiella oxytoca
gtgaaggtttatctggtcggtggtgcagtacgagatgcgttattaaggctaccggttaaagacaaagattgggtcgtggttggcgccacgcctcagcaactcctcgacgcgggctaccagcaggtaggccgtgattttcccgtgttccttcatccgcaaagccgtgaagagtatgccctggcgcgcaccgagcgcaagtccggttccggttacaccggttttacctgctatgccgccgctgacgttacccttgagcaagacctgctgcgccgcgatctgacgatcaatgcgctggcccaggacgccgacggtcagattatcgatccctacggcggccagtctgatttacgccagcgcctgctgcgccacgtctcgcccgcctttagcgaggatccgctacgcgttctgcgcgtggcgcgttttgccgcccgctacgcgcatctggggtttcgtatcgccgatgaaaccatggcgctgatgcgcgcaatggccgatgccggtgagcttgcacatctcacgccggagcgggtatggaaagagacggaaagcgcccttaccacccgcaacccgcaggtcttcttccagaccttacgcgactgccgcgcgctcaaggtgctgttcccggaagtcgacgccctttacggcgtaccggctccggctaaatggcacccggaaatcgacaccggcctgcacaccctgatgaccgtcaccatggcggcgatgctgtcacccgaagtcgacgtgcgtttcgctaccctgtgccacgacctcgggaaaggactgacgccaaaagagctctggccgcgtcatcatggtcacggcccggctggcgtaaagctggtcgaacagctctgcgcccgtctgcgggtacccaacgagctgcgcgatctggcaaagctggtcgccgaatttcacgatctgattcacaccctgcccatgctgcagccaaaaacgctggtcaagctgttcgataatattgatgcctggcgcaagccgcagcgggtcaggcaaatcgccttgaccagtgaagccgacgtgcgcgggcgcaccggttttgaggcctgcgattaccctcagggtcgcctgctgctggaagcctgggacgttgcccgagcggtctcaacaaaagaggtcgttgcggaagggtttcagggaattgagattcgtgaagagctgacgcgtcggcggattcaggccgtcgcccgctggaaagaaaagcgttgcccccagccgcaggactga

SEQ ID NO: 191476 - DNA, 822 bp, Klebsiella oxytoca
atgagcgatatacactcgctgctggtggcggcaatattgggtgtggttgaaggtttgaccgagtttttacctgtttccagtactggtcatatgattattgtcggtcatctgctgggttttgaaggcgataccgcaaatacgtttgaagtagtgattcagcttggttccattcttgccgttgttgtgatgttctggcgtcgtctgttcggccttatcggtattcatttcggcaaaaagcccgagcatgaaggccagggcagcggtcgcctgtcgcttatccatattctcttggggatgatcccggcggtagtgctggggctgattttccacgataccatcaagtctctgtttaacccgataaacgtgatgtacgcgctgattgtcggcggcgtgctgctgatcgcagcggaagtgctgaagccaaaacagccccgcgcggtgggcattgatgatatgacctatcgtcaggcgttcgtgatcggctgtttccagtgtctggcgctgtggccgggcttctcgcgttccggggcgacaatttccggcgggatgctgatgggcgtaagccgctatgcggcctctgagttctcattcctgctggcggtgccgatgatgatgggcgcgaccgtactggatatgtacaaaagtattggtttcctcaacgccagcgatattccgatgtttgccgtcggttttatcacggcgtttatcgtcgcgctgattgcgattaaaaccttcctgcagctgattaaacgtatttcgtttatcccgttcgccatctatcgctttatcgtcgcggcagcggtgtacgtggtcttcttctaa

SEQ ID NO: 191477 - DNA, 384 bp, Klebsiella oxytoca
atggatattgtatttatagagcaactttcggtaatcaccactattggtgtttatgactgggaacaaaccattgaacagaagctggtgttcgatatcgaaatggcgtgggataaccgcaaagcggcggccagcgatgatgtcagcgattgtctcagctatgctgatatcagcgaggcggtcatcaaccacgttgaaggcgggcgctttgcgctggtcgagcgcgtggcggaagagattgctgacctgctgctggaaaagtttcaatctccatgggtgcgtattaaagtcagcaagcctggcgcggtagcccgggcggccaacgttggcgtcgtgattgaacgtggccttaatctgaaacaaaacttttcaggtcatactcgttaa

SEQ ID NO: 191478 - DNA, 621 bp, Klebsiella oxytoca; identical to SEQ ID NO: 172829

SEQ ID NO: 191479 - DNA, 825 bp, Klebsiella oxytoca
ttgcacggcacggtgttaccacagaataaaaaaggctggcaggccacgctggacctccgctttcagcttctcggcgggaaaacaacgctcgcctcccgtcgtcatgtcggtccactcaccgttcagcgtccgttttatcccgaagaagagacctgccacctctatctgcttcatccgcccggcggtatcgtcggcggcgatgaactcaccatcagcgccacgattgagtccgattgccatacgctgatcaccatgcccggcgccagcaagttttatcgcagcagcggcgcgcaggcgcggcttctgcaaaccctgacgctgggcgataacgcaacgctcgagtggttgccgcaggatgccattttctttcccggcgctcacgccgctttgcatactgtgtttcacctctcctcctccagcacgctgctggcctgggacctgctatgtcttggccgtccggtcatcggcgaaacctttagccacggcgcgctcgccaaccgactggaggtgtgggtcgacggctctccgctgctgattgagcgcctgaacctggccgatggagagctggcctgtatcgcgcagcagccatgggtgggaacaatgctgttctacccggcgaacgagacgctgctggaaggcgtacgcgaaaaacttacgccgctggcaaactatgccggcgcgacgctcaccgacggcctgctgacggtacgctttttaagtgacgataatctgcgttgccagcgggcgatgcgcgatatctggcagtttatgcgcccgcacctgaccggcaaatctccggtactcccccgaatctggctgacttaa

SEQ ID NO: 191480 - DNA, 303 bp, Klebsiella oxytoca
atggaactgacacccagagaaaaagacaaactgttgctgtttaccgctgcgctggtggcggagcgtcgcctggcccgcggcctgaagctcaactatcccgaatccgtggccctgattagcgcctttattatggagggcgcgcgcgacggcagaagcgtcgcagagctaatggaagaagggcgccacgtcctgagccgcgagcaggtcatggaaggcgtaccggaaatgatccccgatatccaggtcgaagccacctttacggacggctcgaagctggttaccgtccataacccgataatctga

SEQ ID NO: 191481 - DNA, 321 bp, Klebsiella oxytoca
atgatcccaggagaatatcaggttaaaccgggccagatagcgcttaacgtcggccgggctacctgctgcattatcgttgaaaatcacggcgaccggccgattcaggtcggctcccattatcacttcgccgaggtcaacccggcgctgaagttcgatcgccagcaggcaacgggctaccgtctcaatatcgcggccggaaccgcagtgcgcttcgagccgggccaaaagcgcgaggtggagctggtagcgctggccggagcccgcgtcgtgcacggttttcgcggcgaaataatgggtgagctggaggcaaatgatgagtga

SEQ ID NO: 191482 - DNA, 1704 bp, Klebsiella oxytoca
atgagtgagatttcacgtcaggcctatgccgacatgttcggccccaccaccggcgataaagttcgcctggcggacaccgagctgtggatcgaggttgaagatgatttgaccacctacggcgaagaggtcaaattcggcggcggtaaagtgatccgcgacggtatgggacaggggcagatgctttccgccgggtgcgcggatctggtgctgaccaatgccctgatcgtcgattactgggggatcgttaaagccgatatcggcgtcaaagatggaaggatcttcgccatcggcaaagccggcaacccggatattcaacccaacgtcacgatcccgatcggcgcggccacggaaattattgccgcagaaggcaagatcgtcaccgccggcggcgtcgatacgcatattcactggatctgcccgcagcaggcggaagaagcgctggtctccggcgtcaccaccatgatcggcggcgggaccggcccggcggcgggtacccacgccacgacctgcaccccgggtccgtggtacatctcgcggatgctgcaggctgcggacagcctgccggtcaatgtcggcctgctgggtaaaggcaatggctcgaatccggatgcgctgcgtgagcaggtcgcggccggggttatcggcctgaaaattcacgaagactggggcgcgacgccagcggcaatcaactgcgcgctgaccgtagccgacgaaatggacgttcaggttgcgctgcacagcgatacccttaacgagtcgggattcgttgaggataccctggcggccatcggcgggcgcactatccatactttccataccgaaggcgcgggcggcggccatgcgccagatattattaccgcctgcgcacaccctaatattctgccctcgtcgactaatccgacgctgccctacaccgtcaacaccattgacgagcatctggacatgctgatggtttgccatcatctcgacccggatatcgccgaggacgtggcgtttgccgaatcgcgcattcggcgggaaaccatcgccgcggaagacgtcctgcacgacctgggcgccttctcccttacctcgtccgattcgcaggccatgggtcgcgtcggcgaagtggtgttacgtacctggcaggtggcgcaccggatgaaagttcagcgcggcccgctggcggaagagagcggcgataacgataacttccgcgtgaagcgctatatcgccaaatacaccattaatccggcgttaacccacggtatcgcccatgaagtcggttcgattgaagtggggaaactggcggatctggtgctgtggtccccggcattcttcggcgtaaaaccggcgacgatcgtcaaaggcggcatgatcgccatggcgccgatgggcgacatcaacgcatctatcccgacgccgcagccggtgcactatcgcccgatgttcggcgcgctgggcagcgctcgtcaccgctgccgtttgaccttcctgtcgcaggcggcggcggaaaacggcgtcgctgaacggctgaacctgcacagcgcgacggcggtggttaaaggctgccgcacggtacaaaaagccgatatgcaccacaacggcctgttgcccaatattaccgtggattcacaaacctacgaggtgcgcatcgacggcgaactgataaccagcgaaccggcggacgtgttacccatggcgcaacgttatttcctgttttaa

SEQ ID NO: 191483 - DNA, 471 bp, Klebsiella oxytoca; identical to SEQ ID NO: 172824

SEQ ID NO: 191484 - DNA, 675 bp, Klebsiella oxytoca; identical to SEQ ID NO: 172823

SEQ ID NO: 191485 - DNA, 618 bp, Klebsiella oxytoca
atgaacatgattaagcaaccgctgcgcgtcggcgtcggcggcccggtcggctccggaaaaaccgcgctgctggaagccctctgcaaagccatgcgcgacacctggcagctggcggtggtgaccaacgatatctacaccaaagaagatcagcgcattctcaccgaagccggcgccctggagccagagcgaattgtcggcgtcgaaaccggcggctgcccgcataccgccattcgcgaagacgcatcgatgaacctggccgcagtggaagcgctaagcgagaaattcggcaatctcgatctgatctttgtagaaagcggcggcgataacttgagcgcgacctttagcccggagctggcggatctcaccatctacgtcatcgacgtggcggaaggggaaaagatcccgcgcaaaggcgggccggggatcaccaaatccgacttcctggtgatcaacaaaaccgatcttgcaccgtacgtgggcgcgtctctggaagtgatggagcgcgataccctgcgcatgcgcggcgaacgtccgtggagcttcaccaacctgaaaagcggcgacggcctgcaaaatatcatcgcctttatcgaagacaaaggcatgcttggcaaataa

SEQ ID NO: 191486 - DNA, 1608 bp, Klebsiella oxytoca
atgtcatcactggatataaaaactgatttacctgcgcaaaccagtgcctccggctccaaagaaacgctggaagactatacgcttcgctatgccccgctgagctttcgccgctggggaccaggggttgtcgcggtgacggcattaggcggtatcgcctacctggccgacttttctatcggcgccagcatcggcatggcctggggtaccaccaatgcgatttacgcgatcctgctggcggcactggttatttttcttaccggtattccgctggcgattaccgccgcgcgctataacatcgacctcgacttaatcacccgcagcgccggtttcggctactttggctcggtgatcaccagcattatctttgccggatttacctttatctttttcgccctcgaaggctcgattatggcgcaggggctgctggtgggcttagggatcccgctgtggatgggctacctcatcgccaccatgatggtattgccgctggtggtctacggcatgaaggcgctgactcgccttcaggtctggacgacgccgctgtggctggtcctgatggtggttccggtggcgtggcttatcgccaaagacccggatctggtggacggctttatgaacttcgccggtaaaaaccacgccgcaacggtagatttaaccgccattatgctcggcgcgggggtgtgcctgtcgctgatcatgcagattggcgagcagatcgactatctgcgctttatgccgccgaagaccgcagaaaacagcaaaagctggtggctggcggtgttctccgccggtccgggctgggtcgtgttaggtgcgattaaacagattatcggcgcttttctcgggttctatctgctgacccgcttcccggcggtgcacaacaccgaaccggtacagcagttcgtcagcgtcttcgataacctggttcccggctggctggcgctcaccctcgcggtggtgctggtggttatctcgcagataaaaataaacgtcactaacgcctattccggctcgctggcgtggaccagcgcctggacgcgcaccaccaaacgttatccggggcgaattattttcgtcatcgtcaacctgacgattgctctcgccctgatggagggcgacatgtttagcgctctggcatggatcctcggcttctactctaactttgccatcgcctgggtggtggtggtcgccaccgatatcaccgtcaataaaggggtgctgaagctggcgccggcgcagccggagtatcgccgcgggatgatctacaacgtcaacccggtaggcgtagtctcttttgccctcgcggcaggcctttcgattagcgccttcttcggcctgttaggcgacaccctggcgccgttctcgccgctgatcgcgctggcggtagcgttcgtgatgacgccggtcatgggaatcgccacccgcgggcgctattacattaaacagcacgatgacggtatcgccgagccgcgctacgatgcgcagggtaatgcgtcgatcaccgtttaccgctgcctgagctgccgggaagagtacgaacgtcctgacgtgatgcattcgcataaacatcagggggcgatttgctcgctgtgtaagagtatggaataa

SEQ ID NO: 191487 - DNA, 1014 bp, Klebsiella oxytoca
atgcgtgtactgggaattgaaacatcctgcgatgaaaccggcatcgccatttatgacgacgaaaaaggtctgttagccaaccagctgtatagtcaggtgaaattgcacgctgactacggcggcgtggtgcccgagctggcctcgcgcgaccacgtacgtaaaaccgtccccctgattctggcggcgctcaaggaagccgggctgacggcaaaggatatcgatgccgttgcgtatacggcgggccccggcctggtgggcgcgctgctggtcggcgcaacggttggccgttcgctggcattcgcctggaacgtgccggcgatcccggtacaccatatggaagggcacctgctggcgccgatgctggaagataatccgccgcagtatccttttgtcgcgctgctggtttccggcggccatacccagctgatcagcgtcaccggcattggccagtatgaactgctgggcgaatcgattgacgacgcggcgggagaagccttcgataagacagcgaaactgctggggctggattatcccggcggcccgatgctgtcgaagatggcctcccagggcaccgaagggcgctttgtcttcccgcgcccgatgaccgaccgccccgggctggattttagcttttctggcctcaagacctttgccgcgaacaccattcgcagcaacggcgatgacgatcaaacccgcgccgatatcgcccgcgctttcgaagatgcggtcgtggatacgctgatgattaagtgccgccgcgcgctggatcaaaccggttttaaacggctggtgatggctggcggcgtcagcgctaaccgtacgctgcgcgcgaagctggcggaaatgatgaaaaagcgcggcggggaagtcttctatgcccgtcctgaattctgtaccgataacggtgcgatgattgcctatgccggtatggttcgtctgcgttccggggcaaaagcggagctgggcgtcaccgttcgtccgcgctggccgctggctgaacttccggcggcataa

SEQ ID NO: 191488 - DNA, 216 bp, Klebsiella oxytoca; identical to SEQ ID NO: 172819

SEQ ID NO: 191489 - DNA, 1743 bp, Klebsiella oxytoca
atggctggacgaattccacgagtatttatcaatgacctgctggcgcgcaccgatatcgtcgatctgatcgacgcgcgggtgaagctgaaaaagcagggcaagaattatcacgcgtgctgtccgttccataacgaaaaaaccccctctttcaccgtcaacggtgaaaaacagttttaccactgctttggctgcggtgcgcacggcaacgctatcgacttcctgatgaactacgacaagctcgagttcgtggaaaccgtcgaagagctggctgctatgcataatcttgaagtgccgtatgaagccggaacgggcctgagtcagatagagcgccatcagcggcaaaatctctatcagctaatggaagggttaaatgacttttatcagcaatccttcacccaacctaatgccgaacctgcgcgccagtacctggagcaacgcggcctgagtgccgaagttgtccagcagtttgctattggttttgcgccgccaggctgggataacgcattaaaacgtttcggcggtaatgtcgacaacaggaaactgctgctcgatgccggaatgctggtcaataatgaccagggaagaacttacgaccgtttccgcaatcgcgtgatgtttccgattcgcgacaaacgaggccgggtgattggatttggtggtcgcgtactgggtaacgatacgccgaaatacctcaactccccggagaccgatattttccataagggccgccagctttacggcctttatgaagcgcagcagcaccaggcagaaccaccgcggttgctggttgtcgaagggtatatggatgtcgtcgctctggcgcagtacggtattaactatgccgttgcatcgctgggtacatcgaccacggccgaccacatgcatatattattccgtgcgacgaacaacgtaatttgctgttacgacggcgaccgcgccggtcgagatgccgcatggcgtgcgctggaaacggcaatgccgtacatgaccgatggtcgtcagctacgctttatgttcctgcccgatggtgaagatccggatacgctggtacgtaaagagggtaaagaggcttttgaagcacggatggagcaggctcagccgctctccatgtttttatttaacagtctcttaccgcaggtcgatctgagttcgccggatggcagtacgcagctggccgcactagcgctgccgctcattagccaggtgcctggcgatgcgcatcgtattcagctgcgccagatgctgggcctgaagctgggcatttttgatgatacccagcttgatcgtttaatgccgaaacaggcagaaagtggcgtcgtacgcccggctcagcagataaaacagacgcctatgcgtatacttataggactgctggtgcagaatcccaatctggcgccgctggtgccccctttgcaggggctggcgcagagcaaattaccgggactcagcctcttctccgagctggtgaacctctgtgttgcgcagccgggcctgaccacggggcagctattagagaactatcgcgggactagtgaatactcaacacttgaaaaactctcagcctggaacgatataagggatgagaatgttgaaaaaatgttcaccgacacgctaaaccgaatttttgatgcaatgcttgaacagcggcaagaagagttgatagctcgcgaccgcactcacggtttaagcagtgaagaacgccgggagttctgggaaatcagacaagccctggaaaaaaaatga

SEQ ID NO: 191490 - DNA, 1845 bp, Klebsiella oxytoca
atggagcaaaacccgcagtcacagctgaagcttcttgtccaacgtggtaaggagcaaggctatctgacctatgccgaggtcaatgaccatctgccggaagatatcgtcgactccgatcagatcgaagacatcatccaaatgatcaacgacatgggcattcaggtgatggaagaagcaccggatgccgatgatcttttgcttgctgaaactaacaacaatactgacgaagatgcggaagaagctgcggcgcaggttctctccagcgttgagtctgaaatcggacgcacaaccgacccggtgcgcatgtacatgcgtgaaatgggtaccgtcgagctgctgacgcgcgaaggcgaaatcgacatcgctaaacgtatcgaagacggtattaaccaggtgcagtgctcggttgctgaatacccggaagccatcacctatctgctggagcagtacgatcgcgttgaggcggaagaggcgcgtctgtccgatctgatcaccggttttgttgacccgaacgccgaagaagacatggcgccaacggcgacgcacgtcggttctgaactctctcaggaagagatggatgacgacgaagacgaagatgaagaagaagacgacgacagcagcgatgatgacaacagcatcgatcctgagctggcgcgcgagaaattcgccgagctgcgcacgcagtacgaactgacccgcgataccatcaaagcgaaaggtcgtagccacgccgcagcgcaggaagagattctcaagctgtctgaagtgttcaaacagttccgcctggtgccgaagcagttcgattacctggttaacagcatgcgcatcatgatggatcgcgttcgtactcaagaacgtatcatcatgaagctgtgcgttgagcagtgcaaaatgccgaagaaaaacttcatcactctgtttaccggcaacgaaaccagcgaaacctggttcaatgcggccatcgcgatgaataagccgtggtcagaaaagctgcttgacgtgaaagaagacgttcagcgcggcctgatgaaactgcagcagattgaacaagagaccggcctgaccattgagcaggtaaaagatatcaaccgtcgcatgtccatcggtgaagcgaaagcgcgccgcgcgaagaaagagatggttgaagcgaacctgcgtctggttatctcgatcgccaagaaatacaccaaccgcggtctgcagttcctcgatctgatccaggaaggtaacatcggtctgatgaaagcggtagataagtttgaataccgtcgcggctacaagttctccacctacgcaacctggtggatccgtcaggcgatcacccgctctatcgcagaccaggcgcgcaccatccgtattccggtgcatatgattgagactatcaacaagctcaaccgtatttcccgccagatgctgcaggagatgggccgcgaaccgacgccggaagagctggccgagcgtatgctgatgccggaagataaaatccgtaaggtgctgaaaatcgccaaagagccgatctccatggaaacgccgattggcgacgatgaagattcgcatctgggagatttcatcgaggataacaccctcgagctgccgctggactctgccaccactgagagcctgcgcgccgccacccatgacgttctggctggcctgaccgcccgtgaagcaaaagtcctgcgtatgcgctttggtattgacatgaataccgatcacacgctggaagaagtgggtaaacagttcgacgtaacccgcgaacgtatccgtcagatcgaagcgaaggcgctgcgtaaactgcgccatccgagccgttctgaagtgctgcgtagcttcctcgacgattaa

SEQ ID NO: 191491 - DNA, 645 bp, Klebsiella oxytoca
atgaatagcaaacgaaagattcagctggctgattttaatagaacggttattctggccaccgccaatacgttatttcttaaccgtggtatagaaggaacgaccatggatgagattgcgcacgaagccggattcagtaaaaccacgctttatacctactttgacagtaaacaggatattgtcgatcaccttattctcgatggaatggagcgctttcaccaggaggtggtgaaaatagtcagccggcaggcccccttccgcgagttttatcatgagctttgccagtcgttggttgctatccacgactccggcatcgtctatttccccggcattaccgggaaaataggttgctctgaaaaagagatgaaaaataataaagtactgactaatatctatatgctcggcgaggagattaatcatattatcgccggagaaatttcccgcgcggcagcaaacaaagagcttcagttaaatgctccaatggcagacgtcatgatgctgttctggctctgcctgaccgggctggtagaaaaatcagcaagcaaagaagcctatattttgcggcttcttgagaaggaccgaaaatcctttcttaacttcgcttttgacgctttattattaatgatagaaaaaggcgcgagtcgatga

SEQ ID NO: 191492 - DNA, 1128 bp, Klebsiella oxytoca
atgataaagaaaatatttctgtccttactaataggtatgatagtggtttgcgcctgtgcctatcataaagcgaagcccctgcgcctgaccaaagatctttcactaccatttgcgctgccaaccgaacagcgccatatagtgtattacgcctcgctggcgccaaatgcgcataatactcagccctggcagattcgctataacccggacgcacggcgattcaccctggcgtttgaccgcagtaaagccctcccgcatatcgacccggcggggcgagaagccagtatttctctgggcgcgttcctggagaacttccgccaggcagccgccgcatttggcatgcgggcggaaatagacattttaccggcgatggcgcgcaatggtgatgttgcccgcatgacgttaagccccctccaccgcgcctcttctctcaaacagcccgccgtgctgaagttaattgagcgccggcacaccgacaaacgtccgtttcaggatattgcccttgcgccccgcgatctcgctgccctgctcaaacagcaccagccgtatttaaattattatccacgcggcagcgccgggtttaataagcttgagagttttgccatccaggcagcaaaggctcaggcgctcgatgcggccaaaagagcggagttcgctcactggctgcgcttttccaacgaagaggcccgccggttgaaagacggcctgcccgcagaacagttaggcatcaccgggataaaaaaactgctctattactcatttttcgatcggcaaaaagcccagggagaagccttcgccgcggaaagcatcagtaaaacggccagcagcgtagcgcaaagcgccggattttttatcatcggcggagaagaaacctttccgctgatgatgcgcagcggcatgaatctgcaggccttctggctggatgccgtccgctacggcatctctgttcagccggtgagccagatgctggaggataaagcgttccgtaaacagctggcggaaaccttaggcttaagccagccgccgcaaatgatccttcgcgcaggctacgttgacgactatggcgaaaataatagaattcgccgtcctatcggcgaatttacccgcctggaaccgcccggggcgaattaa

SEQ ID NO: 191493 - DNA, 507 bp, Klebsiella oxytoca; identical to SEQ ID NO: 172814

SEQ ID NO: 191494 - DNA, 300 bp, Klebsiella oxytoca
atgccaacagcaatcgataaagccctggattttattggtggtatgaacacatcgttaccggtgccgaatactatggatgaaagtaccgctaaggggatcctgaagtatttgcatgaactaggcgtaccggccagcgctgcgcaggtcacggcccgtggtgagaaggaggggtggagtgccgggttcacgcaaaaagtagccggatgggcggacaaaattgcctctggcaaccgcattattatcaaaaacccagaatactttactgcttatatgcgcgaacagctgcaggcgctggcgtaa

SEQ ID NO: 191495 - DNA, 426 bp, Klebsiella oxytoca; identical to SEQ ID NO: 172811

SEQ ID NO: 191496 - DNA, 1164 bp, Klebsiella oxytoca
atgagctatcgtatatttgattatctggtgccaaacgtgaacttttttggtcccaatgctgtttctgtcgtcggcgagcgctgtaagctgctgggcggtaaaaaagcgctgctggtcaccgataaaggtctgcgggccatcaaagacggcgcggtggataaaactctcggctatctgcaggaagccggtattgaggtggtggtttttgatggcgtcgagccaaatccaaaagacgccaacgtgcgcgatggcctggcggtctttcgtcaagaacagtgcgatattatcgtcaccgtcggcggcggtagccctcatgactgcggtaaagggattggtatcgcggctacccacgaaggggagctttaccgctatgccggcatagacaccctgactaacccactgccgccgatcgtcgcggtgaataccaccgccggtaccgccagcgaagtgacccgccactgcgtactgaccaacacccaaacaaaagtgaagttcgttatcgtcagctggcgtaacctgccctcggtctccatcaatgacccgctgctcatgcttggcaaaccggccccgctgaccgccgcaaccggcatggatgcgttaacccacgccgtggaggcctatatttccaaagatgccaacccggtcaccgatgccgccgcgatccaggccatccgcctgatcgcccggaacttgcgccaggccgtcgcgctgggcagcaacctgcaagcccgcgaaaacatggcctacgcttccctgctggcgggaatggctttcaataacgccaacctcggttacgttcacgccatggcccatcagcttggcggcctgtacgatatgccgcacggcgtggcgaacgcggtgctgttgccgcacgttgcgcgctacaacctgatcgccaatccggaaaagtttgccgacatcgccgaatttatgggagaaaacatccacggactttcaaccatggacgccgccgagtcggccatttgcgccatcacccgcctctcttccgatatcggcattccgcagcatctgagcgagctgggagttaaagaggctgacttcccctatatggcggagatggccttgaaagacggcaacgccttctcaaatccgcgcaagggtaacgagaaagagattgtcgctatcttccgccaggctttctga

SEQ ID NO: 191497 - DNA, 1914 bp, Klebsiella oxytoca
atgactgcgcagactcagagctttcccctggtgataacccagtcgtggcatcgttgcagtaagtttatgcagcgggaaacctggcagacgccgcatcaggcgcaggggctgaccttcgaatcgatttgtcggcgtaagaccgcgctgctgacgattggccaggcggcgctggaagatgcctgggagtatatggataaccgcccctgcgcattgtttatccttgatgagtccgcctgtattctcagccgctgcggcgatccgcagacccttgaccagctggcggcgctggggtttcgtgacggtagctattgcgcggaaagcatcatcggcagctgcgcgctctcgctggcctccatgctcgggcagccggtcaaaacgacgggcgagcagcattttaaacatgcgctgcacggatggtcgtttagctctacgccggtgtttgataaccacgggcgcctgttcggttccatttctttgtgctgcctgacggaagaacaggcttcgccggacctctccctgaccctggctatcgcccgggaagtgggcaactcgctgctcaccgatagcctgctggccgagtcgaatcgccaccttaaccagatgtacggtctgctggagagcatggatgacggggtgatggcgtggaacgagcagggcattttgcagtttctgaacgtgcaggccgcgacgctgctgcaccttgatgcccaggccagccaggggaaaaacatcaatgaactggtgacgctgccggctctgttgcgccgggcgatcaagcacgcgcgcgggctgaaccatgtggaagtcaccttcgagagccagcatcagttcgttgatgccgtcatcacgctcaagccgatcgtcgaagagcagggcaacagtttcatcttgctgctgcatccggtcgagcagatgcgtcagctgatgaccagccagcttggcaaagtgagccatacctttgagcagatgtcggctgacgatcctgaaacccggcggttaattcactttggccgtcaggcggcgcgcggcgcttttccagtgctgctgtgcggcgaggaaggggtgggtaaagagctgctcagccaggcgattcacaatgagagcgagcggggtggcggaccgtatatcgcggttaactgccagctgtatgccgacagcgtccttgggcaggattttatgggcagcgcgccgacggacgaggaaaacgggcgtcttagccgtctcgagctggccaacggcgggacgctgtttctggaaaaaatcgaatatctggcgccggagctgcagtccgcgctgttgcaggtgatcaagcagggggtattaacccgtctggatgcccggcgtttgatcccggtggacgttaaagtcatcgccaccactaccgtcgatcttgccaacctggtggaacaaaaccgatttagtcgccagctttactacgcgctgcactcttttgaaatcgttattccgccgctgcgggcgcggcgtaacagtattccttcgctggtccaaaatcgtcttaagagtctggagaagcgtttttcctcgcggttgaagatggatgacgatgcgctggcgcagctggtggcctactcctggccgggtaatgattttgagctgaacagcgtgattgaaaatatcgccattagcagcgagaacggccatatccgtttgagtaatctgccggaatatctctttgccgagcggccaggcgccgacgcgggttcctcgctgctgcccgccagcctgaccttcagcgccattgaaaaagaggccatcatccatgccgcccgcgtgaccagcgggcgggtacaagagatggcgcagctgctgaatattggccgcaccacgctgtggcgaaaaatgaaacagtacgatatcgatgccggccagtttaagcataaaaatcaggagtaa

SEQ ID NO: 191498 - DNA, 1098 bp, Klebsiella oxytoca
atgctaaaagttattcaatctccagccaaatatctccagggaccggatgcatccacgctgtttggcgagtacgctaaaaacctggcggacagctttttcgtgattgccgatgacttcgtgatgaagctggcgggtgagaaagtgttgaacggtttgcatagccacaatatcagctgccatgcggagcgcttcaacggcgagtgcagccacgttgagatcaatcgcctgatcgccattctgaagcagcacggctgccgcggcgtggtgggcatcggcggcggcaagacgctcgatacggcgaaagcgataggctattaccagaagctgccggtggtggtgatcccgacgattgcctccaccgatgcgccaaccagcgcgttgtcggttatttataccgaagccggtgaatttgaagagtatcttatttacccgaaaaatccggacatggtggtgatggatacgacgattatcgctaaagccccggtacgcctgctggtggccgggatgggcgatgcgctttcaacctggtttgaagccagggcctgctatgacgccagagccaccagcatggccggcggccagtcgacggcggcggcgctgagcctggcgcgcctgtgctatgatacgctgctggcggaaggcgaaaaggcccgcctcgccgctcaggccggagtggtgaccgatgcgctggaacgcatcgttgaagcgaatacctaccttagcggaatcggctttgaaagcagcggcctggccgccgcgcacgccattcacaatggtttcaccatcctcgaagagtgccaccacctgtaccatggcgagaaagtcgcgtttggtaccctggcgcagctggtgctgcaaaatagcccgatggaagagatcgaaacggtgctgaacttctgccataccgtcggcctgccggtcacgctggcgcaaatgggcgttaaagagggcatcgacgagaaaattcaggcggtagcaaaagcgacctgtgcggaaggcgaaaccatccataacatgccgttcccggtcagcgcgcagagcgtgcatgcggcaattctgaccgccgacctgcttggacagcagtggctggcgcgttaa

SEQ ID NO: 191499 - DNA, 1071 bp, Klebsiella oxytoca
atgaaaaaactgattaaccgtgtcgaagatgtcctgagtgaacaactggcgggcctggcaaaagcgcaccctgaactaacgctgcatcatgatccggtctacgtcacccgcgccgatgcaccggtggccgggaaagtagcgctgctttccggcggcggcagcggtcatgagccgatgcactgcggatatattggcctgggcatgctttccggggcctgtccgggggaaattttcacctccccaacgccggataaaatgtttgagtgcgccatgaacatcgacggcggcgaaggcgtgctgctgattattaaaaactacactggcgatattcttaactttgaaaccgccaccgagctgctacacgaaagcggcatcaaggtcaccaccgtggtagtcgatgacgatgtggcggtaaaagacagcctctataccgccggacggcgcggcgtggccaataccgtgctgattgaaaaactggtgggcgcggccgccgaacgcggcgactcgctggcagcatgcgctgaactggggcgcaagcttaacaacctcggccactctatcggcatcgccctgggcgcctgcaccgttccggccgccggccagccctcattcgaactgcaggacgatgagatggagttcggcgtcggcattcacggcgaaccgggcatcgaccgccgccgcttcacctccctcgatcgcaccgttgacgaaatgttcgatactctgctggaaaacggcgcctatagccgcacgctgcgccactgggacaacatgaaaggcgcgtggcaggaggtaacgcagaccaagcaggcgctgcaaaaaggcgatcgggttatcgcgctggtcaacaacctcggcgccacgccgctgtccgaactctacggcgtctataaccgtctgacgcagcgctgcgaggaaaccggcatcgcgatcgagcgcaatcttatcggcagctactgtacctctctggatatggtcggtttttccatcaccctgttaaaagccgatgacgagacgctggcattatgggacgccccggttcacaccccggcgctgaactggggaaaataa

SEQ ID NO: 191500 - DNA, 633 bp, Klebsiella oxytoca
atgtcattaagcagaacgcaaatcgtagactggctctatcgctgcggcgatatctttaccaaagagagcgattttttgaccggtctggaccgggagatcggcgatgccgaccacggcctgaatatgcatcgtggttttagcaaggtggtggaaaagctgccttcgattgccgataaagacattggtttcattcttaaaaataccggcatgacgctgctgtccaacgtcggtggggccagcggcccgctgttcggcaccttctttatccgcgccgctcaggtgacccaggcccatcagagtctgaccctggacgagctttatcaagccatccgcgaaggcgcggaaggcgtggtgaatcgcggcaaagccgagccgggcgataaaaccatgtgcgacgtctggctgccggtagtggaatcgctgcgtcagtccagcgaacagcacctgtcaatccaaagcgcccttgatgctgccagcgaacaggcgcaagccgccgtccaggccaccatcgccatgcaggcacacaaaggacgggccagctacctcggcgaacgcagcatcgggcaccaggatccgggcgcgacctcggtaatgttgatggttcagatgctggccgcagcggccaaagagtaa

SEQ ID NO: 191501 - DNA, 1422 bp, Klebsiella oxytoca
atggtaaacctggtgattgtttcgcatagcgctcgtctgggcgaaggtgtcggagaactggcccggcagatgttaatgaacgatggctgtaagctggcgatcgccgccggaattgacgatcccaccagcccgatcggcaccgatcccattaaggttatggaagccatcgagtccgtagccgacgccgatcatatcctggtgatgatggatattggcagcgccctgctgagcgccgaaaccgcgctggatctcctcgatccggccactgcggcgaaggttcgcctgtgcgcggcgccgctggtggaaggaacgctggcggcgacggtgagcgccgccgccggggccggcatcgacaaggtcatcgaagatgccatgaacgcgctggaggcaaaacgcgtacagctgggattgccatcgcaaccgcaacacgcggcgttgaccgccgcgccgatcgacgaccgcgatgcgcgctcggtttccgtggtgattcaaaaccacaacggcctgcatgttcgcccggcgtcaaagctggtcgccgcgctggcgggattcaacgccgacctggtgctggagaaaggaggtaagtgcgtcacgcccgacagcctcaaccaaatcgccctgcttcaggtgcgccgtaacgataccttaaggctgcttgcccgcgggccggatgccgatgccgcgctggcagcgttccaggcgctggcggcggagaatttcggcgagcaaacggaggcggcgcctgcgactcagcccgcctgcgccgatcgcgtacagggtaaggtcgtactctattcccagccgcaggagaaggtctcacgggaaaaaggcgtcgccatcggtcagcagcaactgcggctaaaacgggccatcgatcggacgctggaagagcttagcgcgctgacgaccctggcggaggcgaagttttccgccgacatcgcggccatcttctccgggcatcataccctgctcgatgaccctgatttatacgccgccgcctgcgatagggtgcgcgacgagcaatgcagcgcggagtgggcgtggcatcaggtgctgaacgatttaagccaacaatatcgtcatctcgacgatccttacctacaggcgcgctatattgatattgaagatattttgcaccgcacgctgcgtcaccttaacgggagcaacgaagtactaccgcagtttgacggcccctcgatcctcgtggccgacgatatttttccttctaccgtcctgcagctcgatgcggatcgggtgaaggggatctgtctgcaggccggcagtaaactctctcacggcgccattatcgcccgtcaggcgggtatcgcgatgctttgccagcagagcgatgtcctgaccacgctacaaaagggggagaccgtcatccttgatattcccggcaagcgcgtgattcgcgcctag

SEQ ID NO: 191502 - DNA, 774 bp, Klebsiella oxytoca
atgacaacgagcaggcatcctaaatacccgcagcgcgtgcgtaatgagctgcgtttccgtgagttaaccgtattgcgcgtcgagcgtatcggcagcgcattccagcgtatcgtgctgggcggagaggcgctggaaggctttgtctcccagggtttcgacgaccataccaagctttttttccccactgcgggtgctgcgtttacgccgccggaggtgacggatgaaggcattaactggggcgaaggcgtacgtccggcgacccgcgattatacgccgctttacgacgccgaccgtcatgagctggcgtacgacttctttattcacgatggcggtatagccagcagctgggcgctggcggcgaaaccgggcgataagctggtcatcggcggcccgcgcggttcgctggtggtgccggaagattacgcctggcagctgtatgtgactgatgagtcaggtatgcccgcgctgcgccgccgactgctgggattgcggcagcttccgacgcgcccgcaggtcacggcgatcgtcaccattggcgatgagtcttatcaagattacctggccgatctcgatggttttcatatcgagtgggtggtgggacatcactcctctgccgtggccgagcgtctggcgcaggttgtggttccaaccgaagattattttatctgggtgaccggggaaggcgcggtggtgaaatcactgctggcgcgttttgaaggtccggagattgacccgcagctggtgcgttcgcaggcctactggcacagcaagtaa

SEQ ID NO: 191503 - DNA, 546 bp, Klebsiella oxytoca
atgagagatcatcacgaagaaggccgtgggtcacgcggacgccacggcgaacatggtgaacacggtcgcagaggcggcggacgccggcagcgcttctttggccatggcgagctgcgcctggtcattctggacatcctcacccgtaatgccagccacggttacgaactgattaaagagatcgaaaccatgacccagggcaactacagtcccagccccggcgtcatctacccgacgctcgatttactccaggatcagggattaatcagcgtggctgacgaaaacggtcgcaaaaaaatcgccatcaccgccgaaggcagccagctgcacgcggaaaaccagcagccgctggagcagattcaggccagactgcaggcgcgaatggtgggttgtgagctacgtaaaaacccgcagatgaagcgcgcgctggagaattttaaggcggtactggatttaaaagttaaccagcaggaaataaccgaagcgcagctaaagcagattgtcggcgtgattgaccgcgcggcgatggagatctcccagctcgactaa

SEQ ID NO: 191504 - DNA, 1380 bp, Klebsiella oxytoca
ttgaacaggttaccttcaagcgcatcggctctggcctgcagcgcacacgcactgaatcttattgagaagcgaacgctcgatcatgaagagatgaaatcacttaaccaggaggtcagggaatactttaaagagcatgtgagtccggggtttttagcgtatcgaaaatcggtcactgctggcggggattacggagccgtagagtggcaagcgggaggattaaatacgcttgtcgacactcagggacaggagtttattgactgcctgggtgggtttgggatttttaatgtagggcaccgtaatccagttgtcgtttccgccgtcgaaaatcagctcgctaaacaaccccttcatagtcaggaactgctggacccgctgcgggccatgctggctaaaaccctggcggccttaacgccgggcaaactgaaatacagcttctttagcaacagcggtaccgagtcggtcgaagcggcgttaaagctggcgaaggcctaccagtctccgcgcggcaagtttaccttcgtcgccaccagcggcgcgtttcacggtaagtcgctgggcgcgctttcagccactgcgaaatccactttccgtaagccctttatgcccctgctgccgggattccgtcatgtaccttttggcgatatcaatgcgatgcgcacgctgctgagcgagtgccaaaagaccggcgatgacgtcgcggcggtgatccttgagcctattcagggcgaaggcggggtgattctgccgccgccgggctatctgcccgcggtacgcaagctgtgcgacgagtttggcgcgctgctgatcctcgatgaagtccaaaccggcatggggcgcaccggcaagatgttcgcctgcgagcacgaaaacgttcagccggatattctgtgccttgccaaagcgctgggtggcggcgtcatgccaattggcgccacggtcgccaccgaagaggtgttctcggtactgttcgataacccgttcctgcataccaccacgtttggcggcaacccgctggcctgcgcggcggcgctggcgaccattaacgtactgctgacgcaaaacctgcccgcgcaggcggagcagaaaggcgatatgctgctggacggcttccgtcagctggcccgcgaatatccggatctggtgaatgacgtgcgcggcaaaggtatgctgatggcgattgagtttattgataacgaaatcggctatgactttgccagcgaaatgtttcgccagcgcgtgctggtggccggaacgctcaacaacgcaagaacgattcgcgttgagccgccgctgacgctgacccctgagcagtgtgaacaggtgctaaaagcggcccgcctggcgctggcggcgctgcgggtttcggtggaagaggcgtaa

SEQ ID NO: 191505 - DNA, 333 bp, Klebsiella oxytoca; identical to SEQ ID NO: 172800

SEQ ID NO: 191506 - DNA, 984 bp, Klebsiella oxytoca
atggccacactaaaagatatcgcgaccgaagcaggcgtttcactggcgacggtttcccgggtattaaacgacgaccccactctgaacgtgaaagaagagacaaagcaccgcattcttgaggtagcggaaaagctggaatataaaagcactagctcgcgtaagactcaggttcataccgtcggccaccatcatattctggctatctacagctaccagcaggatctggaaatcaacgatccttactatctggcgatccgccacggtatcgaaacgcagtgtgaaaagctcggtattgagctgaccaactgctactttaacaacgcgctacccgagctgaaaaaagtgaccggcgttctgattgtcggccagccttcgcgggcgattcgcgacgcagccacggcgttaaccgacaacgtctgctttattgatttccatgagccaggcagcagctacgacgccgtcgatatcgatctggtgcgtatcgccaaagaagttatcgacttttttatcgcccagggcgcgcggcgcatcggctttattggtggccaggatgagccgggtaaagccgacattcgcgaagtggccttcgtcgaatatggccgcctgaagggggtggtttcggaagaagatatctggcgcggcgggttttccagctcctccggctatgagctggcaaaaacgatgctggccagggcggatttccccaccgcgctgttcgtcgcgtcagactctatcgccatcggcgtgctgcgggctattcatgaacgcggcctcgcgatcccggaagatatctcgctcattagcgttaacgatatccccaccgcgcgttttacttttccgccgctctccacggtgcgcattcattcagaaatgatgggcagccagggcgttaatctgctggttgaaaaagcccgcgatggccgtgcgctgccgctaaacgtctttgtccccagcgtgctgaagctgcgcggcaccacccgctaa

SEQ ID NO: 191507 - DNA, 3093 bp, Klebsiella oxytoca
atgaatcgctgggaaaatcttcaactcactcatgaaaaccggctgcctccgcgcgcctatttcttctcttacgattcgcgggcccaggcgcaaaccttcgcccgtgaaaccagcagccgctttttgtcccttagcggacagtggaaattctgcttctttaacaacccgctgcgggtgccggaagcgttcacctcgcaatacatgagcgactgggggccgattaccgtaccgggaatgtggcagatggaaggacacggccagctacagtacaccgacgaaggctttcccttcccgattgacgttccctacgtgccgaccgacaaccctaccggcgcctatcagcgcatctttaccctcagcgagggctggcaggaccagcagaccctgattaaatttgatggcgtcgagacctattttgaaatttacgttaacggtcagtacatcggtttcagcaaaggcagccgcctgacggcggagtttgatattagtcacgcggtaaaaaacggcgacaacctgctttgcgtgcgcgtcatgcagtgggcggactccacctatatagaagatcaggatatgtggtggtcggcgggtatcttccgtgacgtgtatctggtgggcaaaaacccgcttcacgtccaggacttcactctgcgcaccgattttaacgatgactacgtcgacgccaccctctcctgccagctggtgctggaaaatctcgccgcgcagccgggcgcagccacactggaatacgcgctgttcgacggcgaaaaggcgctatatgaaggcgtaacgccgcgcctgagcatcagccagcagctgaacgtcaactttgcgatcgacgtgaaggcgccgcagcagtggtcggcggaaaatccttatctctatcacctggtgatgacgctgaaaaacgccgccggagagattatcgaagttatcccgcagcgcgtcggttttcgcgatatcaaagtgcgcaacggcctgttctacatcaataaccgctacgtgatgctgcacggcgttaaccgccacgacaacgaccatctgaagggtcgcgccgtagggatggaccgcgttgagaaagatctgctgctgatgaagcagcacaatatcaactcggtacgcaccgcccactaccccaatgacccgcgtttctatgagatgtgcgacatttacggtctgttcgtgatggcggaaaccgatgtcgaatcccacggcttcgccaacgtcggcaatctgagcgccatcaccgatgatccggcatgggagcatatatacgtcgaacgaatcgtgcgccacattcacgcgcagaaaaaccatccgtcgatcattatctggtcgctgggtaacgagtccggctacggctgcaacattcgggcgatgtatcacgccgctaaagcgatcgacgatacccgtctggtgcattacgaagaggatcgcgacgcggaggtggtggatatcatctccaccatgtatacccgcgtgccgctgatgaatgaattcggggaatatccgcatgccaagccgcgaattatctgcgaatacgcccatgcgatgggcaacggtcccggcgggctgagcgaataccagaacgtgttctatcaacacgacagtattcagggccactacgtctgggagtggtgcgatcacgggattcaggccaccgatgacagcggcgcggtttggtacaaattcggcggcgactacggggactatcctaataactacaacttctgtcttgacggtctgattttctccgaccagacgcctgggcccggcctcagagagtacaaacaggttatcgccccggtaaaagttcaggcaaccgacatcgcccgcggcgaactgcgcatcgataataagctctggttctcgacgctggatgactacaccctgcgcgtggaagttcgcgccgaaggggctacgcttgccagccagcagcttaaggtgcgcgatcttgcgccaaacagcggccgcgatatcaccattgacctgccagaactggacgatcgcgaaaccttcctcaacatcctggtgaccaaagactcgcgcacgccgtatagcgaggccaaccatccgatcgccgtttaccagttccagctaaaagaacagacggcaacgaaatcgccgctgatgaatgccagcgcaaccccgctacagatagttgatgaacgactgagctacagcatcaccgggcataacttccgcgtggtcttctctaaagtcaacggcaaactgagcgaatggcaggtgaacggcgtagaccaggtgacccgtgagccgaagattaacttcttcaagccgatgattgataaccacaagcaggaatatgaggggctgtggcagcccagtcacctgcaaattatgcaggagcatctgcgtgaattcagcgccgaacagcgtggagacacggtgattatcaccacccgcagcattatcgctccgccggttttcgattttggcatgcgttgtacctatcgctggcagattaccccgcagggccatattaacgttgagcttgcgggggaacgttatggggactatccgcatatcgtgccgtgcatcggttttatgctgggcattaacggtcagtttgaacaggtgaattactacggtcgcggtcccggtgaaaactacgccgacagccagcagagcaacatcattgatgtctggcgcaccaccgtggacgacatgttcgtgaactacccgttcccgcagaacaacggcaaccgccagcacgtccgctgggccgcgtttaccgaccgtcacggcagcggcctgatggtggtcccgcgcgatccgctcaacatcagcgcctggcactatacggcggagaatctgcacgccgcgcagcactgtaacgaactgcgtcgcagcgatgacatcaccctgaatatcgacgcccaactgctcggcctgggctctaactcctgggggagcgaggtgctggatagctggcgggtgtggctcaaaccgttcaactatggctttacgctgctgccgctggaaggcgggagcgcttcctcgcagacgctggcgaatcatagctttggcgccggtttcttttcctccgattcacacagcgaggctgaaaaatga

SEQ ID NO: 191508 - DNA, 450 bp, Klebsiella oxytoca; identical to SEQ ID NO: 172797

SEQ ID NO: 191509 - DNA, 1434 bp, Klebsiella oxytoca
atgtccgaatcagttcgtgccaaaatagggaagttcgccctactgtcgatggcgtttgccgccgtatttaacgtacgaaatatcgttaataataacatcgagttagggctcagttccgcccctatctttctgtttgccacggtggtctattttattccgtttgtctttatcatcgccgaattcgtgtcagcgaataaaaattccgaatcaggtatgtacgcctggctgaagcagcctttaggtacccgcgcggcctatctcggctcgttcctgtactggtttgtgaacctgttctttttcctgtcgctgctgccgaacgtggtggcctacgcctcgtacgccattatgggttacgccattcccttctcgccgatggtcacttcgctgatctctatcgttctgttcgccatggccacccacatttccaccaaaggcgcgacctggctggggaaaatctccgaatgcgtggcttatggcgtcttcgcgctctttgcgatttacgtggtcggtgctattaccgcgctgggcgcgggccatgtccctgcgcagccgattacgctgcacgccatggcgcctaccatcaactgggcgacgctggggattatgtgctggatcttccaggcggctggcggggctgaaaccgttgccgcatatctgaacgatactaaaggcgggcagaaatcgtttattaaagtcatcatcaccgccgggatcctgattggcggcatgtatgcgctgggttctctgctggtcaacgtctttgtggcacgggaagacctgacctatgcagccggtatggtggaaattttcaccggtctcggcgcttatttccatatttccgaagcgctgatgggccgcttcgtcggcatcattctgtttatcgccattttcggcagcatgatgatgtggaccgctgcaccggtaaaaattcacttctcggaaattcctgccggcatctatggcaaaaaaaccaccgagctgaacgtccacggcgtgccggtgcgcgccgcctggtggcaatttgtcttcgtctttctgatgctcatcgtgaatggtttcggctccgccagcgttcagcaaatgatgaacaccgccatcaacctgaccgccgggaccgcaatgctaccgccgctgtttatcatggccgcctactttgttttccgctggaaacatgacgacacgccgcgcgacttccgcatgggttcaagaaaagttgggatggccgtggtgtcgatgcttatcgttattttcctggtcagcatgaccgcctccgctttcccgccaggagtcgacctggtgaacgccttcttcattaacgtctttatgaccgcagtcttctccggactcgcatggtggtggataacccgctttgagaaaaaacagcgcaagaaccaacaaccaggcctgaaatcagcggcaaatacggtgaaataa

SEQ ID NO: 191510 - DNA, 1434 bp, Klebsiella oxytoca
atgtctgatatcaaacgtaataccatcggcaagtttggcctgctgtcgctaactttcgccgccgtcttcagttttaataacgtgatcaataacaatattgagctgggactggcgtcggcgccgatgttcttccttgcaaccctgctctactttgttcctttctgtctgatcatcgcggaattcgtttcgctgaataaaaactccgaagcgggcgtttatgcctgggtaaaaagctcgctaggggggcgctgggcctttattaccgcctatacctactggttcgtgaatctgttcttttttacctcgctgctgccgagggtaatcgcttatgcctcctacgctttcctcggatacgagtacattctgacgcccgtggccaccacgatgttgagcatggcgctgttcgccctgtcgacctgggtttccaccaacggcgcaaaaatgctgggtccaatcacctcggtcacttcatcgttaatgctgctgctgacgctctcctacattctgctttccggcggcgcgctggtgggcggtattcaaccagcggatccgattaccgtggatgcaatgatcccgaactttaactgggcgttcctcggcatcaccacctggatctttatggcggccggcggggccgagtccgtcgcggtgtacgtcaatgacgtgaaaggcggatcgaaatcatttgttaaggtcattatcctcgccgggatcgtgattggcgtgctgtactccatttcctcggtactgataaacgtgtttatcagcagtaaagagctgaaatttaccggcggatcggtacaggtcttccacggcatggcggtatggtttggcctgcccgaaatcgtggtcaaccgttttgtcggcctggtctcctttaccgccatgtttggttcgttattaatgtggaccgcgacgccggtcaaaatctttttctccgaaatcccgcccggaatatttggtaaaaaaaccgttgagctcaatcaaaacggcgtaccggcgcgcgcggcgtggatccagttcctgattgtgattccgctaatgataattccgatgatgggctcaagtaccgtgcaggatttaatgaataccatcatcaatatgaccgccgccgcctcgatgctgccgccgctgtttatcatgctggcgtaccttaatctgcgccgcaagctcgatcatctgccgcgcgattttaaaatgggttcacgcaccaccggtattacggtggtctccatgctgattgttattttcgctatcggcttcgtcgcctcaacctttcccaccggcggcaatattctgacgattattttctataacgtcggcggaatcgttatcttcctcggatttgcatggtggaaatacagcaaatacgtgaaaggtttaactcgggaagaaaaaagaattgaagcagcgccagcctctgacgcgtcttaa

SEQ ID NO: 191511 - DNA, 1062 bp, Klebsiella oxytoca
atgatgaaaaagaacaggcctatttactgggcgcttgccgccctggctttttgcacaccggctattgccgtcgatgtggcgcatccggcggaacatgatgacatgaaaacgcctgaacttaatgtcacctcataccgtttttacggtgaattgggggttggcggatatatggatctagaaggcgaggacaagcataaatatagtgatggcacctatattgaaggcggactggaaataaagcacggcagctggtttggtttaatttatggcgaaggctggacggttcaggccgatcgtcagggaaatgcctgggtagcggaccacggctggggcggatttgaaggtggaataaaccgcttctacggcggatataaaaccgagagcagcaccgagattatgctcagcctgcgccaggattcatcgctcgacgatctgcagtggtggggcgatttcacgcccgacctcggctacgtgatccccaatacgcgcgatatcatgtacgcgctcaaggtgcagaacctggcgggagattttcgctacagcgtgaccgccacgcccgccgggcaccacgatgaaagcaaagcgtggctccatttcggcaaatacgaccgctacgacgataaatatacctacccggcgatggtcaacggctacatccagtacgatctcgcgaacgaggtgacctggatgaatgggcttgaggtgacggatgggaccggccagctatttttgaccggtattctcacccccaaccttgccgcccgcgcctggcatcataccgggcgcgccaggggaaaagacgtgccgggaacggagaccggctttatggccagcgctatgtatgaagcgctcaagggcgtgtatctctctaccgcctatagctacgccaaacaccgcccggatcgcgccgccgaggaaaccacctcgtttatgcagttcggcatctggtacgaatacggcggcggacgttttgccaccgctgcggacagccgcttctacatgaaaaatgcctccggcaacccgagcgatcaggttttcctgatgcaatatttctattggtaa

SEQ ID NO: 191512 - DNA, 2352 bp, Klebsiella oxytoca; identical to SEQ ID NO: 172793

SEQ ID NO: 191513 - DNA, 297 bp, Klebsiella oxytoca; identical to SEQ ID NO: 172792

SEQ ID NO: 191514 - DNA, 888 bp, Klebsiella oxytoca; identical to SEQ ID NO: 172791

SEQ ID NO: 191515 - DNA, 1014 bp, Klebsiella oxytoca
atgaaaaccaaacgaatcctgcaaacgagcgccctggcgctggcgttaagcgtggcaaccgctcaggcggcggaccgcatcgcctttattcctaagctggtcggcgtcggcttctttaccagcggcggtaacggcgcgaaagaggcgggcaaagcgctcggcgtggacgtcacctatgacggcccgaccgaaccgagtgtctccggccaggtgcagctgatcaacaacttcgtcaaccagggctacaacgcgattatcgtctccgccgtatcaccggacggcctgtgcccggcgctgaagcgggcgatgcagcgcggggtcaaggttctgacctgggactccgataccaaaccagagtgccgcagcatctatatcaaccaggggacgccgcagcagcttggcggcctgctggtggagatggcggaaaaacaggtgacgaaacccaccgccaaggtggcgtttttctactccagcccaacggtgaccgatcagaaccagtgggtaaaagaggcgaaagccaaaattgaaaaagcgcatccgcagtgggaagtggtgaccacgcagtttggctataacgacgccaccaaatcgctgcaaactgccgaggggatcttaaaagcgtacccggatctcgacgccattatcgccccggacgccaacgcgcttccggccgccgcccaggcggcagagaaccttaagcgccagggcgtggcgattgtcggcttcagtaccccgaacgtgatgcgcccctatgtagagcgcggcacggtaaaagccttcggcctgtgggacgtggtacagcaaggcaagatcgcggttaacgtcgccgatcgtctgctgaaaaagggcgatcttaacgtcggcgacagcgttgatgtgaaagatctcggcaccctgaaagtcgagcccaacagcgtgcagggttatcagtatgaagcgaaaggcaacggcatcgtgctgctgccggagcgggtggtgttcaccaaagagaatatcaataactacgatttctga

SEQ ID NO: 191516 - DNA, 978 bp, Klebsiella oxytoca
atgaagctcaactgggaaagcgcgctgctgggattactggtggtggagatcctgctgtttggcaccctgaatccgcgcatgctcgatctcaatatgctgctgttcagcaccagcgactttatctgcatcggcatcgtggcgctgccgctgacgctggtgatcatcagcggcgggattgatatttcgctcggttccaccatcggcctgtgcgccatcgcgctgggggtgatgatgcaggcgggctggccgatgagcctcgcgatccccctgacgctgctgctcggcctgctgtgcgggctgctgaacgcggcgctgattcactacaccggcattagcccgctggtgattacccttggcaccctgtacctctacggcggcggcgcgctgctgctttcgggcatggccggggcgaccggctacgaaggcatcggcggattcccggatagctttaccgccttcgccaatctgaccctgttcggcctgccgataccgctggtgctgttcgccgttatcaccttttttttctggctgctggcccaccgcgggcgctttgggcggcacctttttctgctcgggcagaacccgcgcgccgcgcgctacgccgcgctttccgttaacgggatgccctacgcgctgtatggcctggtgggcgtggcgtcggcggtggcggcgctggtgatggtctcctatttcggctcggcgcgctcggacttaggccgcgacctgctgatgccggcgctgaccgccgcggtgctcggcggggccaatatctacggcggttccggctcgatcgtcggcacggcgcttgccgcgctgctggtgggctatttacaacaaggtttgcaaatggtcggcatccccaaccaggtgtcgagcgcgctgtcaggggcgctgttggttgtggtggtgatggggcgttcgctgagtctgcaccgtgagtgggtgcggatgacctggcggcgtctttctcgcgcataa

SEQ ID NO: 191517 - DNA, 1035 bp, Klebsiella oxytoca
atgaaaacgttattaaagaatcgcgaactgagcgccttcctcgccatcgtggtgctgtttgccgggctggtggcgctcaacccggcttatttcagcttacaaaccctgggcatgattttcgccagctcgcaaatcctttgcctgctggcgctgggggcgacgctggtgatgctcacccgcaatattgacgtttcggtgggctccaccgttggcctgagcgctatcgcgacaggcgtggcgctaaatagcgggtatgggctgatgaccgccatcgcctttgcgctggcgatcggcgcgctggctggcgcctttaacggcctgctggtggtggggctgcgcatcccggcgattgtcgccactctcggcaccctcggcctttatcgcggggtgatgctgctgtggaccggcggtaagtggattgaaggtttgccgaacagcctgaaagcgctgtcggaaccggcattcatcggcatttctccgctgggctggctggtgctggcgctactgctggcgggcggcgggatactatcgcgtactgcctttggccgtgatttttacgccgtcggcgataaccttgccgctgcccgccagcttggggtggcggtgaaccgcacgcggatgctggcattcacccttaacggcatgctggcggcctgcgccgggattgtgttcgccgcgcagattggatttgtgcccaatcagaccggcagcggcctggagatgaaagccatcgccgcctgcgtgctcggcgggatctcgctgctgggcggtaccggcacgctgctcggcgcttttctcggcgccttcttcctcacccaaatcgataccgtgctggtgctgtttcgtctcccggcgtggtggaacgacttcattgccggcctggtgctgctcggcgtactggtgctcgacgggcggctgcgtcaggcgctgacccgccatcagcgggcgctgaaatacagtcgctttcagcccggcaataaagggggcaagcgcgtggccccgtttcctgaacgtaaaaataaagaggtggcgtaa

SEQ ID NO: 191518 - DNA, 1488 bp, Klebsiella oxytoca
atgaagccactgcttgaagctcgccaaatctgcaaacagttctccggcgtgaccgtgctgaagcatattgatttcacgctgctttccggccaggtgcacgcgctgatgggcggcaacggcgccggaaaatcgacgctgatgaagattattgccggggtagagacccctgacagcggtgagctcatcctcggcgaacgtacatttgcgcgccttactcccgcccaggcccatcagcagggcgtgtatctggtgccgcaggaaccgatgttattccccaatctgacggtgcgggaaaatattctttttcgtctgccgaagcgggcggataacgagaaccatctgcaggaaaagcttcagcagcttaattgccagcttaaccttgaggcggcggccagcacgctggaagtggccgatcagcaaatggtggagatcctgcgcgggctgatgcgcgacgcgcagatcctgatcctcgatgagcccaccgcctcattgacgccgggagaaaccgatcgcctgtttcgccagatccgctctttgcaggcgctcggtgtcgggatcgtgtttatctcgcacaagctgccggagatccgccaggtcgccagccacgtttcggtgatgcgcgatggcgcggtggtgctgagcggggaaaccgcgcactacggcgacaaccagctgattggcgcaatgacgccggtcagtcgcgatcgagccctgagcgacacgcaaaagttgtggctggcgctgccgggcaatcgtcgcactcaggcgcaggattttccggtgctgcgggtcgaagatctgaccggagagggctttatcgatctcaatctggagatccgcgccggggagatcgtcggcctcgccgggctggtcggatccgggcgtaccgaatttgctgaaacgctctatggtctgcggccggctcgcgcagggcgggtgtggctggaaaaccgcgatatcagccgcgacagcacgcgcgccaggctggccagcgggctggtctatctgccggaggacagacaggtttccggtctgtttctcgatgcgccggtgcgctggaacacggtgatgtttaaccagccgtcgctgtggcagcagaaccggcgcgaagcggcggtggtggagcgctatcaccgggcgctggggatcaaaatggccgatggcgatcgcccggtgcgcacgctctccggcggtaaccagcagaaggtactgttggcgcgctgcctggaggctaacccgctgctgctgatcgtcgatgaaccgacccgcggcgtggacgtttccgcccgagccgacatctatcagctgctgaaaagcgtcgccgcgcagaacgtggcggtattgatgatctccagcgatctcgacgagttcgttggcctggccgatcgggtggttgtaatgcatcagggcaggcagagcggcgagctggcgcagcaggcggtcagcgttgaccggatgatgaccctggccttcggagggcaggcatga

SEQ ID NO: 191519 - DNA, 972 bp, Klebsiella oxytoca; identical to SEQ ID NO: 172786

SEQ ID NO: 191520 - DNA, 1593 bp, Klebsiella oxytoca
atgagttacctgttagcgttagatgccgggaccggcagcgttcgggcggtcgttttcgatctccagggccgtcagattgcggtcggtcaggccgaatggaagcacctgagcgttgagaatgtccccggctcaatggagttcgatctcagcgtcaactggcagctggcctgtcagtgtatccgccaggcgctggccgccgcccatctctctgcggcggatattcagtccgtggcctgctgctcgatgcgtgaaggcatcgtgctttacgaccgcaacggcgaggccatctgggcctgcgccaacgttgacgctcgcgccagccgcgaggtggcggagctcaaagagatccacgacgaccgttttgaatccgaagtgtacagcgtgtcggggcagaccctggcgctgagcgccatgccacgcctgctttggctggcccaccatcgcccggatatctaccgcaaagcggcgaccatcaccatgatcagcgactggctggcggcgaagctctccggcgagctggcggtcgacccttctaacgccggaaccaccggcatgctcgacctgttcagccgcgactggcgcccggcgctgctggatatggccggactgcgggccgatattctctcgccggtcaaggagaccggcagcgtactgggggcggtgaccgacgcggcggcggcgcaaagcgggctgcgcgcaggcacgccggtggtgatgggcggcggcgacgtccagctcggctgcctgggtctcggcgtggtgcgcgccgggcagacggcggtgctcggcggcactttctggcagcaggtggttaacctgccggaagtccgtactgacccggagatgaatattcgcgttaacccgcacgtcatactcggcatggcgcaggcggagtccatcagcttttttaccggcctgaccatgcgctggttccgtgatgctttctgcgcagaagagaagctcattgccgagcgcctcggcgttgacgcctacagcctgctcgaagagatggccagccgcgtaccggcgggttcccacggggtgatgccgattttctctgacgccatgcactttaagcagtggtaccacgctgcgccatcgtttattaacctctccatcgacccggaaaaatgcaataaggccacgcttttccgtgcgctggaagagaacgcggcaattgtctccgcctgcaacctggcgcagatttcgcagttttccggcgtgcagtttgatagcctggtctttgccggcggcggtgcaaaaggggcgctgtggagccagatcctcagcgatgtcaccggtctgccggtgcgggtgccggaggtccgcgaagcgacggcgctcggctgcgcgatcgccgccggcaccggcgccgggctatacgccgatatggcgacaacgggtgagaaactggtgagctggtaccgggaatttacgcctaatcccgcgcatcgggagctgtatcaggagatgatgaccaaatggcagtcggtgtacgccgagcagctcggtctggtggacagcggattgacgacctccatgtggcaggcgccgggtctggcgcgccgcacgcgcgttgccccctcaccctaa

SEQ ID NO: 191521 - DNA, 2022 bp, Klebsiella oxytoca
atgagccgctacccgtcgcttttcgccccgcttgagctggggttcactacgctcaaaaaccgcgtgttgatgggctcaatgcatactggcctggaggagctcccggatggcgcgcagcggctggcggctttttacgccgagcgcgcccgccacggggtagcgctgatcgtcaccggcggaattgcccccgccccttccggcgtcaccatggcgggcggggcggtgcttaacgacgccagccacctctcccatcatcgctatattaccgacgcggtacacgaggagggcggcaaaatcgccctgcagatcctgcataccgggcgctacagctaccaaccgaagctggtggccccttccgctctgcaggcgccaatcaacccctttacgcctcacgaactgagccacgaagagatcttacagctgatcgatgattttgcccgctgcgcccagctggggcgagaagccgggtacgacggcgtcgaagtgatgggctcggaaggctatctgattaacgaatttcttgccgcgcgcaccaaccttcgcgacgaccagtggggcggcgactacgcccgacgcatgcgttttgccatagaggtggtcagagccgtgcgggagcgcgcaggcaacgactttattattatctatcgtctgtcaatgcttgaccttgtcagcggcggcagcaccctggcggaagtcaccgatctggcaaaagccattgaggccgcaggggcaacgattatcaataccggcatcggctggcacgagacgcgtattcccaccatcgccacaccggtaccgcgcggcgcctttagctgggtcacccgtaagctgaaaggcgcggtgtcgatcccgctggtcaccaccaaccggattaacgatcccgatgtggcggaagcgatcctggctcgcggagacgccgatatggtatcgatggcccgccctttcctcgccgacagcgaatttctctccaaagcacaaagcggacgggcggaagagatcaatacctgcatcggctgcaaccaggcctgcctcgatcggatcttcgccggcgaggtcacctcgtgcctggtcaacccgcgcgcctgccatgaaaccctgatgccgatagcgcccgcgaccacgccgaagcggctggcggtggtcggcgctggtcctgccgggctggcctttgcggttaacgccgcctcgcgcggacatcaggttaccctttttgatggtcattgcgagattggcggccagtttaatatcgccaagcagatccccggcaaagaggagttctacgaaaccctgcgctactatcgccagatgctcgatcttcacgctgtcgatctgcgattgaatacccacgtcacggccggggatctgcgggcatttgatgaaatcgtcctcgccaccgggatcgccccgcggatgccggatatcgccgggatcgagcatcccaaagtgctgagctacctcgatgtcctgcgcgataaagcgccggtaggcgagaaggtggcgattatcggctgcggcgggatcggctttgatacggccatgtacctcagccagtccggcattgccaccagccagaatatcggcgagttctgtgcagaatgggggatcgataccagcctgcagaacgccggcggactgcgcccggaggggatgcagctggctaaaagcccgcgccagatcgtgatgctgcagcgcaaaaccagcaagcccggcgacgggctggggaaaactaccggctggatccatcgcgctaccctgctggcccgcggcgtcaaaatgatccccggcgtcagctatcaacggatcgatgatgccggcttacatgtgacgatcggcggcgaatctcaggtgcttaacgttgatcatgtgattatctgcgccggtcaggatccccgccgcgagctggccgatccgctgcgggcggcgggtaaaacggtacatttgatcggcggctgcgacgtggcgatggagctggacgcccggcgggctatcgctcagggcacccggctggcgctgtcgatttaa

SEQ ID NO: 191522 - DNA, 828 bp, Klebsiella oxytoca
atgaatcatcaggaagatgaatacagtaatggagccgccactccgcgcaaaattgtcttaggcaggcatcctgccgtatttgtttgcgttatacaatgcatagtttatatatacatcactggttctggctggctcgggtttagtgataataccggtggagggtataatctgctattcgctgtcctgtgggcagcaatggccttcggaatctataaatatagccgcgcctgcgctgtcatggcgctggttctttattttatcgatcaactggcggtggagttatttccgcccggacgcagctttaatgtggcttggctggctgggaccacgatctggttactctgtttttgccacggaattattgcctgctggatgcggcgtaaacataaagtcatcgggattgatgacagtacatatattaataagcgaacgcgaacgctgtatatcgttgtgctcgtgcttttccattcatcctgtctgggcctgaaacaggcgcagaagcacacccgcaatatcctctggcaggcgttttatcaatcggtcatggaagataagagtaagatcccgctgccgataaaaatcgataataatacttcccttaccgacatctattttgatcagcacaccttgattgttgaacaccatgttcgccagacaaagctggccgaattaccgatggcgctctactacgcgcacgctaaaaaactttactcgcgttattgcgccaacgatgtggcgagctcgcttgatttaaaaatgatagtccgctttgcgcaggggtatgagacgcgtgacctgtcgtttacgccaaaagactgtcaattttaa

SEQ ID NO: 191523 - DNA, 1131 bp, Klebsiella oxytoca
atgagccaggtagagttaaacggtgagttattcacattagagcggttcccgccgaatgctgaagaggaagcgcttcaggcgtgggaagcggcggatgaatatctgctgcaacaggtgaatgatgtcgacggcctgacgctcattttcaatgacagcttcggcgcgctgggttgcgcgctggcggaacgcaatccggtcagcatcaacgattcctacgtctctgagctggcgacccgctacaacctgcggatgaacggcattgatgaagagagcgtacgttttcaggatcccttgagcgaactgcccgcagctccggcactggtgctcattaaagtaccaaaacagctggcgctgctggagcagcagctgcgcgctctgcgcgcggttgtcacgccagaaacccgcatcattgccgctgcgaaagctcgcgacgtccacaattccaccctggcgctgtttgagaaaatccttggcaccaccaccacatcgctggcctggaaaaaggcgcggctgattttctgtacctttaccgcgcctgaggtagccgatgcgccgcaaacttacagctggcagctggacggtacaccgtggacgattcacaaccacgccaatgtgtttgcccgcagcggcctggatattggcgcgcgcttcttcctggaacacttgccagtaaatattgaaggcgagatcgccgatctcggctgcggcaatggcgtgattggcctgaaagcgctggctttaaaccccgacgcccgggtgatgtttaccgatgagtcctatatggcggtcgcttccagccgactgaatgtcgaaaccaatctgccggatgacctcgagcgctgcgagtttatggtgaataacgcgctgtccgatattgaaccggaccgcttcgccgccatcctctgcaacccgccgttccatcagcagcatgcgatcaccgatcatattgcctggcagatgtttaacgatgcccgtcgtagcctgaagtacggcggcgagctgtatgtcgtcggtaaccgccacctcgattatttccgcaagctgaagcgcgcgttcggtaactgcacgacgatcgccactaataataaatttgtggttttaaaagcggtgaaattgcgtaaggcgcgttaa

SEQ ID NO: 191524 - DNA, 504 bp, Klebsiella oxytoca
atgagcactttaacctatctccagggctaccctgaatccctgctggcgcaggtcaccgcgttaatcgaacagaaccgtctcggcgaggtgctgaaaaagcgctatccgcagggccacgatatcaacaacgataaagcgctgtatcagtacacccaggatctgaagtcccgctatctgcgcggcgcggcgcctattaacaaagtaatgtacgacaacaagatccacgtgcttaacaacgcgctcggcctgcataccgccatctcccgcgttcagggcggcaagctgaaggccaaagccgaaattcgcgtcgccaccgtttttcgcgatgcgccggaggattttctgcggatgatcgtggtgcacgagctggcgcacctgaaggaaaaagagcacaacaaagcgttctatcagctgtgctgccatatggagccgcagtaccatcagctggagtttgatacccgcctgtggctgacccagctttcgttagagcgttctgcgccatag

SEQ ID NO: 191525 - DNA, 990 bp, Klebsiella oxytoca
atgatacgtttcgcagttgttggcacaaactggataaccaagcagtttgtcgatgccgcccatgaaaccggcaaatataaactcaccgccatctactcccgcagccttgagcaagcccaggctttcgccagcgactatcccgtcgaacatctcttcacttcgctggaagatttagcgcaaagtcctgacgttgacgcggtctatatcgccagcccaaactcgctgcactttccgcaaacccgcctgtttctgcgccataaaaagcacgtcatttgcgaaaaaccgctggcctcgaatctgcaggaagtggaagccgccattaagacggcgcgggaaaataacgtggtgctcttcgaagcgttcaaaaccgccagcctgccaaacttcctgctgcttaaacaagcattcgacaagatcggcaagctgcgcaaagcctttattaactactgccagtactcttcccgctatcagcgctatctcgacggtgaaaatcccaacaccttcaatccggccttctctaacggctcgattatggacatcggcttttactgcctggcctcggcggtcgcgctgtggggcgagcctcgcgcggtgcacgcaaccgccagcctgctggagagcggcgtcgatggccagggcacggtcgttctcagctacggggattttgatgtcactttgcaccactcaaaggtcagcgactcggcgatccccagcgaaattcagggcgaagctggcgcgctggtgatcgaaaaaatctccgaatgccagaaagtgtgtttcgtgccgcgcggcggcaagtctcaggatctcacccagccgcagcatatcaatacgatgctgtatgaagcggaggagttcgcgcgtctggtcgaagccaacgaggtggttcatccgggtctggaagtgagccgcatcacggcgaagctgctgagcgaaattcgtcgccagaccggggtcgtgttcccggcggatagtcaaccggtggcgtaa

SEQ ID NO: 191526 - DNA, 969 bp, Klebsiella oxytoca
atgaatactgtcggcacaccgttgttatggggcggattcgcagtggtcgtggtcattatgctggctatcgatctgctgctgcagggacggcgtggtgcacatagcatgaccatgaagcaggccgctggctggtcaattctctgggttaccctctcgctgctgtttaacgccgctttctggtggtatctggtgcagaccgaaggtcgcgccgtggccgacccgcaagcgctggcgttcctcaccggctatctgattgaaaaagcgctggccgtggataacgtcttcgtctggctgatgctgttcagctactttgccgttccgcctgcgctacagcgcagagtgctggtttacggcgtactgggcgcgatcgtgctgcgtacgatcatgatcttcgccggtagctggctgatctctcagtttgagtggctgctctacgtcttcggcgccttcctgctgtttaccggcgtgaagatggcgctggcgaaagaagatgattccgggatcggcgataaaccgctggtgcgctggatccgcaatcatctgcgcatgacggataaaatcgagggtgagcgcttctttacccgcaaaaacggcgttatctacgccacgccgctgctgctggtgctgatcctggtcgagctgagcgacgtaatctttgccgttgacagtattccggccatcttcgccgtgaccaccgatccgtttatcgtgctgacctccaacctgttcgcgatacttggcctgcgcgcgatgtatttcctgctggcgggcgtcgcggagcgcttctcgatgctgaaatatggcctgtcggtgattctggtgtttatcggcattaagatgctgattgtcgatttcttccatattcctatcagcatttctctgggcgtggtcggcggtattctggtgctgaccctgcttatcaacgcctgggtcaacaagcagaacgataagaaaaaacagctgcaataa

SEQ ID NO: 191527 - DNA, 1248 bp, Klebsiella oxytoca
atggcaaccccatcaccccgatcgaccctgctacggcggctggctcagggcagtctggtcaaacaaattttaatcggtctggtactcggcgtactgctggcgacggtctcaaaaccggccgccgtcgcggttggactactgggtacgctgttcgtcggcgcgctgaaagcggtagcgccggtgctggtattgatgctggttatggcctccatcgccaatcatcagcaggggcaaaaaaccagcatccgcccgattctgttcctctatctgctggggacttttgccgccgcgttaaccgcggtgctgtttagcttcctctttccgtcaacgctgcacctgaacgcagcggcagagagcattactccgccgtcgggcatcgttgaagtcctgcgcgggctgctgatgagcatggtttctaacccgattgacgccctgttgaacgctaactacatcgggattctggtctgggccgtcggtttagggttcgcgctgcgccacggcaataaaaccaccaaaaatctgatcaacgatatgtcccacgcggtgacctttatcgttaaggtggtgattcgctttgcgccgctgggtatctttgggctggtcgcgtcaacgctggcgacgaccgggtttgaaaccctgtggggctacgcccagctgctgctggtgctggttggctgtatgctgctggtggcgctggtgattaacccgctgctggtgttctggaaaatccgccgcaatccctatccgctggtgatgacctgcctgcgcgaaagcggcgtatacgccttctttacccgcagctccgccgccaacattccggtgaatatggcgctgtgcgaaaagcttaatctggatcgcgatacctattcggtctctattccgctgggcgcgaccatcaacatggccggcgcggcgattaccattacggtactgaccctggcggcagtgcacacgctgaacgttccggtcgatctgccgaccgcgctgctgctcagcgtcgttgcttcgctgtgcgcctgcggcgcttccggcgtggcgggcgggtcgctgctgctgatcccgctggcctgtaatatgtttggtatcccgaacgatatcgccatgcaggtggtcgccgtcggctttattatcggcgtcctgcaggactcctgcgaaaccgcgctgaactcctcaaccgatgcgctgttcaccgctgccgcctgtatcgctgaagacgaacagctggcgaagaacgccctgcgcagttaa

SEQ ID NO: 191528 - DNA, 555 bp, Klebsiella oxytoca
atgaccgcatactggcttgcccagagcgttggcgttatcgcctttctgatcggtattacgacatttttcaatcgcgatgagcgccgctttaagctccagctagccgtttatagcgccaccattggcgtgcatttctttttgatgggcgcctggccggcgggtatgagcgccgagctgaataccgttcgtaccctcgtctccatgcgcacccgcaggctgtgggtgatgaccctgtttattgtgctcacgctggtactggggctggcgaagctgcagcacgctatggagctgctgccgattattggcaccctggccagtacctgggcgctctttcgctgctccgggctcaccgtccgctgcgtgatgtggtgtgcaaccgcctgctgggtgatccacaacttctggctgggttcgatcggcggcactctgattgaaggcagcttcctgctgatgaacggcctgaatatcattcgtttccggcggatgcagaagcgcggtatcgatccgtttaaagtggaaaaggcggtacagaaggaaaccccctccgcgcgttag

SEQ ID NO: 191529 - DNA, 1488 bp, Klebsiella oxytoca
atgcaatacattaaaatccattcgcaagataacgtcgcggtagcgttggcggatatggcggcaggcacggtagtcaccattgacggcgatacggtcacgttggctcaggatattgcgcgcgggcataagtttacgctgcgcggcattgcgaagggagacaacgtcattaagtacggtctgccgatagggcatgcgctggcggatatcgcgccgggggaacatatccactcccataatacgcgtactaacttaagcgatctcgacgcgtacagctatcaaccggatcttatcgaacccgccgcgcagccggcggatcgcgatatccagatttatcgtcgcgccaacggcgaagtcggcgtgcgcaacgagttgtggatcctgccgaccgtcggctgcgtcaacgccatggcgcgtcaaatgcagaatcgattcctgaaagagacgaatgacgcggaagatattgacggcgtacatcttttcagtcacacctacggctgctcacagctcggtgacgatcacatcaacacccgtaccatgctgcaaaacatggtgcgccatccgaacgcgggggcggtgctggtggtcggcctgggctgcgaaaacaatcaggttgatgcatttcgcgaaacgctgggcgagttcgaccctgaccgcgtccactttatgatctgccagcatcaggatgatgaagtggaagccgggctggagcatctgcgtcagctatatgacgtgatgcgccacgataagcgcgagccgggtaagctgagcgaactgaagtttggtctcgagtgcggcggttcagacggtctgtccggcatcaccgctaacccgatgctgggccgtttctcggactacctgattgctaacggcggtaccaccgtgctgaccgaagtaccggaaatgttcggcgccgaacagctgctgatgagccactgtcgcgatgaagagacgtttggcaagctggtgacgatggttaatgatttcaaacagtactttatcgctcatgaccagccgatttatgagaacccatcgccgggcaacaaagcgggcggcatcactacgcttgaggataagtcgctgggctgtacgcagaaagcgggctccagccaggtggttgacgttctgcgctacggcgagcggctgaaagtgcacggccttaacctgctgagcgcgccgggcaacgatgcggtagcgaccagcgccctggccggcgcgggctgccatatggtgctcttcagcaccggacgcggcacgccatacggcggtttcgttccgacggtgaaaattgccaccaacagcgaactggcggcgaagaaaaaacactggatcgacttcgatgccggtcagctgattcacggtaaagcgatgccgcagctgctggaagagtttgtcgataccattgtggcctttgccaacggtaagcaaacctgcaacgagcgtaatgatttccgcgaactggcgatattcaaaagcggcgtcaccctttaa

SEQ ID NO: 191530 - DNA, 1413 bp, Klebsiella oxytoca
atgacaccgtttatgaccgaagatttcctgcttgataccgagtttgcccgccgtctgtaccacgattacgcgaaagaccagccgattttcgactaccattgccacctgccgccgcagcagattgcggaaaattaccgctttaaaaatctgtatgacatctggctaaaaggcgatcactataaatggcgtgcgatgcgtaccaacggcgtagccgagcgtctgtgcaccggtgatgcttccgatcgcgagaaatttgacgcctgggcggccaccgtaccgcataccatcggtaacccgttataccactggacgcatcttgagctgcgtcgtccttttggtattacaggtaaagtcctctctccggctacggcggacgaaatctggaatcagtgcaacgatctgttggcgcaggagagcttctccgctcgcggcatcatgcagcagatgaatgtgaaaatggtcggcaccaccgacgatccggtcgattctctcgagcatcacgcttccgtcgctaaagacagctccttcaccgtgaaagtgctgccaagctggcgtccggacaaagccttcaatatcgaacaggcgaccttcaacgactacatggcgaagctgagcgaagtgtctgacaccgatatccgccgctttgccgatctccagtccgcgctgactaaacgtctggatcacttcgccgctcacggttgtaaagtttctgaccatgcgctggacgtggtgctgtttgccgaagccaacgaaagcgaactggatagcatcctggcgcgtcgtctggcgggcgaggcccttagcgagcatgaggttgcgcagttcaagacggcggttctggttttcctcggcgcggaatacgcccgtcgcggctgggtacagcagtatcacatcggcgcgctgcgcaacaacaaccttcgccagttcaaactgttagggcctgatgtgggttttgactccatcaacgaccgtccgatggcggaagagctgtccaaactgctcagcaaacagaacgaagaaaacctgctgccgaaaactatcctctactgcctgaacccgcgcgacaacgaagtgttgggcaccatgatcggcaacttccagggggaaggtatgccgggcaagatgcagttcggttccggctggtggtttaacgatcagaaagacggtatggaacgtcagatgacccagctggcgcagcttggcctgctgagccgctttgtcgggatgctgaccgatagccgcagcttcctctcctacacccgtcatgaatatttccgtcgcatcctgtgccagatgattggtcgctgggttgaagcgggagaagccccggcggacattcagctgctgggcgagatggtgaaaaatatttgctttaacaatgcgcgtgactacttcgccattgaactgaactaa

SEQ ID NO: 191531 - DNA, 1302 bp, Klebsiella oxytoca
atgcgtaaaattaaagggttacgttggtacatgatcgcactggtgaccttaggcaccgtgctggggtacctgacgcgtaacactgtggcggcagctgcgccgactctgatggaagagttacacatctccacccaacagtattcctatatcatcgcggcctattccgctgcctataccgtcatgcagcctgtcgccggctacgtgctggatattttaggtaccaaaatcggctatgccttctttgctatcgcctgggccgtgttctgcggctctaccgcgctggcgggaagctggggcggtctggcgctggcgcgcggcgcggtgggtgccgccgaagcggcaatgatcccggcgggtctgaaagccagttccgaatggttcccggcgaaagagcgttctatcgccgtcggctacttcaacgtcggctcctctatcggcgctatgattgctccaccgctggtggtttgggctatcgttatgcacagttggcagatggcctttatcatctccggcgtactgagctttgcctgggcaatggcgtggctggtgttctataaacacccgcgcgatcagaaaaaattaactgacgaagaacgcgactacatcatcggtggccaggagtctcatcaccagactaacaacggcaagaaaatgtctccgtggcagattctgcgtaaccgtcagttctggggtatcgccctgccgcgtttccttgccgaaccggcatgggggacctttaacgcctggatccctctgttcatgtttaaagtctacggctttaacctgaaagaaatcgccatgttcgcctggatgccgatgctgtttgccgacctcggctgtattatcggtggatacctgccgccgctgttccagcgctggtttggcgtgaacctgattgtttcccgtaaaatggtcgtgacgatgggcgcgctgctgatgattggcccagggatgatcggtctgttcaccagcccgttcgtcgctatctccctgctgtgcgtcggcggttttgctcaccaggcgctgtccggtgcgctgatcacgctctcttccgacgtatttggtcgtaacgaagtggcaaccgcgaacggtatgaccggcatggccgcatggctggccagcaccatgtttgccctggtggttggcgcgctggcggatactatcggctttagcccgctgttcgccgtactggccatcttcgatgtgctgggcgcggtggtcatctggaccgtactgaaaaataaatctgcggatgacgacagcactccgctggaaaccagtaagcctgccacgcaaagctag

SEQ ID NO: 191532 - DNA, 777 bp, Klebsiella oxytoca
atggaaatcactgaatcgcgtcgtttgtatcagcagcttgccgctgagcttaagacgcgtattgaacaaggtgtctaccttgtaggcgataagctacccgcagagcggtttatcgctgacgaaaaaagcgtaagtcgtaccgtcgttcgcgaagccatcattatgctggaagtggaaggctacgttgaagtccgcaaaggttccggtatccacgttatctccaatcatccgaaacatcagcaaattgccgatgaatcgctggaattcgccaattatggtccttttgagctgttgcaggcccgccagctgatcgaaagcaacattgccgaattcgccgccactcaggtgaccaagcaggacatcatgaagttgatggaaatccaggaaaaagcgcgtaaagagaagtgttttcgcgattccgaatgggatcttcagtttcatgtgcaggtggcgctggcaacgcaaaacaccgccctcgccgctatcgtggaaaagatgtggacccagcgcgtacataacccgtactggaaaaagctgcatgaccatatcgactcgcgtaccgtcgataactggtgcgacgatcacgatcaaattctgaaagcgctgattcgcaaagatcctcatgcggctaagctggccatgtggcagcatctggaaaataccaagctgatgttattcaatgaaaccagcgatgactttgaattcaatgccgatcgctacctgtttgccgataatccggtagttcatctcgatacggccgccaacggcgcaaaatag

SEQ ID NO: 191533 - DNA, 663 bp, Klebsiella oxytoca
atggaactattaacccaattattgaatgccttgtgggctcaggattacgaaactctcgctaatccctccatgattggcatgctgtactttgtcttatttatgattttattccttgagaacggtctgctgcccgccgccttcttaccaggcgatagcctgcttgttctggtgggcgtactgattgccaaaggcgcgatgggttttccacaaacgctgctgctacttaccgcggcggcaagcctgggctgctggctaagttatattcagggccgctggctgggcaatacgcgtatcgtacaaaactggctgtcgcatctcccttcgcactaccaccagcgcgcgcatcatctgttccataagcacgggctttccgccctgctgattggccgttttatcgctttcgtgcgcacgctgctgccgaccattgccggcctgtcgggcctgagcagcgcgcgtttccagttttttaactggatgagcgggctgctgtgggtgctgattctgacttcgctgggatatctgttggggaaaacgccggtattcctgaaatatgaagatcagctgatgtcctgcctgatgctgctgcccgtcgcgctgctggtattcggcctgattggctcgctgatcgtcctgtggaagaaaaaatacaggagccggggctga

SEQ ID NO: 191534 - DNA, 384 bp, Klebsiella oxytoca
atggcgataaagcgcgcctctctacgtcagataagctggatgctgggcggttcgttactcctgtgcggcctgttctggctctggctcaccgtgcagcagcaggaatcaaccctggctattcgtcccgttagccagggtattagcatgccggacggtttttccgtctggcaccatctcgatgccaacggcatccgttttaagagcattacgccacagaatgacggtctgctcatcaagtttgactccagcgctcagggagccgccgccaaagaagttttgggtcgcgctctgccgcatggttatattatcgctttagtggaagacgatgattcgccgacggcctggatttcccgcctgcgcgatacgccacacagattcgggtaa

SEQ ID NO: 191535 - DNA, 369 bp, Klebsiella oxytoca
atgaaacaccgcatcgctttgctcctggttctgtcatcacttagcgccagcgcctttgccatctccccttgccaggaaaaagagcaggatatccagcgggagatcagctatgcagaaaagcataataaccagcatcgtattgacggtctgaaaaaggcgctgagcgaagtgaaggctcactgcagcgacagccagctcaaagccgatcaccagaaaaaaatcgccaaacagcaggaagaaattgccgaacgccgcaacgacctgcgcgaagccgaacagaaaggcgatgctgataaaatcagcaagcgccagcgtaaacttgaagaagcgcagcaagaactgaaagagctgcaatctcgcgagtactaa

SEQ ID NO: 191536 - DNA, 306 bp, Klebsiella oxytoca
atggctaaagataacgttgcagaagacctgcgtgcggaactgaagacgctggctgataccctggaagaagtgctgaactcctccacggataagtcgaaagaagagatcggtaagctacgtagtaaagctgaaagcgcgctgaaggaaagccgtgtacgcctgggtgaaaccagcgacgctctcatgaagcagacgcgagaaaccgctgcgcgtgcagatgaatacgtccgtgaaaacccgtggaccggcgtggggattggtgctgccgtcgggctggtgctgggtgtcctgctgacgcgtcgttaa

SEQ ID NO: 191537 - DNA, 399 bp, Klebsiella oxytoca; identical to SEQ ID NO: 172765

SEQ ID NO: 191538 - DNA, 300 bp, Klebsiella oxytoca
atgagccgcgaacagcaggaacgcgaacgacaaaaagcgcttttgctgcgcctgatccaacagcagcggctggaccttagcgccagccaccgccattggcttgaggcaactgcgcccattgatcggggctggaataccctgctgaatctgcgttcatgggcaatggtcggcagcggcctcgtggcaatatggtcagttcgtcatccgcgctttttgatgcgctgggcaaaacgcagcctcggtatctggagcacctggcggatggcccgcaatctgctgcgccagtcgtcatcacgctga

SEQ ID NO: 191539 - DNA, 393 bp, Klebsiella oxytoca
atgaaaaaattagaagatgttggtgtactggtagcgcgcattctgatgcccattctgttcattaccgcaggttggggaaaaattaccgggtatgcgggtacacaacaatatatggaagccatgggcgtccctgggtttatgctgccgctggtgatcctgcttgaattcggcggcggtctggcaatcctgttcggtttcctgacccgcactaccgcgctgttcaccgccggcttcaccgtgctgaccgcgttcctgttccacagcaactttgctgaaggcgtgaactcgctgatgttcatgaaaaacctgaccatcgcgggcggcttcctgctgctggctatcaccggtccaggcgcctttagtatcgaccgcgtactgaataaaaagtggtaa

SEQ ID NO: 191540 - DNA, 987 bp, Klebsiella oxytoca
atgggacaattagttgacggcgtctggcacgacacctggtatgacaccaaatccaccggagggcgatttaagcgttctgtttccgcctttcgcaactggttaaccgccgacggcgcgccgggcccaagcggcgaagccggattcgctgcggagaaagatcgctatcatctgtacgtttctcttgcctgcccatgggcgcatcgcaccttaattctgcgtagcctgaaaggactggagccgtttatctccgtctccgtggttaatcccttgatgttcgagaacggctggactttcgacgatagcttcccggcagccaccggcgatacgctctaccagcacgaatatctttatcagctttatctgcatgccgatccccactacagcgggcgcgttacggtgccggtgctgtgggacaaaaagcagcacaccatcgtcagcaatgagtcggcggaaatcatccgcatgtttaataccgccttcgacgggctgggcgcccgcgcaggagattactacccgcctgagctgcgcgatcagattgatgagctgaacggctggatctacgataatgtgaataacggcgtctataaagccgggttcgccaccagccagcaggcctatgatgaagcggttgatgcagtgtttaccgctctggagcgtctggagcaaatccttggccagcatcgtttcctgacgggtaaccaactgacggaagctgatattcgcctgtggaccaccctggttcgtttcgatccggtgtacgtgacccactttaaatgcgacaaacgccgcatcagcgattacctcaacctgtatggcttcctgcgcgatatctaccagatgccgggcattgcggaaacggtggacttcgcccatatccgcaaccattactaccgtagccataaaaccatcaacccgaccgggattatctccgttggtccgcagcaggatcttaacgaacctcacggccgcgatcttcgtttccgctag

SEQ ID NO: 191541 - DNA, 369 bp, Klebsiella oxytoca
atggactggtatcttaaagtattaaaaaactacattggatttggcggccgcgcccggcgcaaagagtactggatgtttattctggtcaacatcatcctcaccggcgtactcagcatcattgataagatgctgggatggcagcgcgccggaggagaagggatcctgaccactatctatggcgtgctgatattcttaccgtggtgggccgtgcagttccgtcgattgcacgataccgaccgctcggcatggtggctgttattgctgctgattcccgttatcggctggctggtgatcctggtattcaattgccagaacggcaccccaggaaataatcgcttcgggccggatcctaaaccgacttcttactaa

SEQ ID NO: 191542 - DNA, 897 bp, Klebsiella oxytoca
atggctaaagagagagcattaacgctggaagcattgcgcgttatggatgcaattgaccgacgcggaagctttgcggcggcggccgatgagctgggtcgggtgccttcagcgctgagctataccatgcaaaagctggaagaggagctggacgtcgtgctgtttgaccgttcaggtcatcgaacaaaattcactaacgtgggccgaatgttgctggagcgcgggcgcgtactgctggaggcggccgataagctgacgacggatgccgaagcgctatcgcgcggttgggaaacgcacctcactatcgtcaccgaggcgctggtgcccaccaccgacctttttcctttaattgaaaagctggcgaccaaatcgaatactcaactgtcgattattaccgaagtactggccggggcatgggaacgccttgagcaggggcgggcggatattgtcgttgcgccggatatgcattttcgctcctcttcggaaatcaactcccgcaagctctattcggtgatgagcgtctatgtagccgcgccggatcaccctattcaccaggagccggagccgctttctgaagttacgcgcgttaagtaccgcggcgtggcggtcgcggataccgcccgcgagcgcccggtgttgaccgtgcagctgctcgataaacagccgcgcttaaccgtgagcaccatcgaagataagcgtcaggcgctgctggcaggattgggcgttgcgacgatgccgtatccgctcgtagagcaggatattgccgaagggcgtctgcgggtggtcagtccggaatacagcaacgagatcgacattattatggcctggcgtcgcgacagcatgggtgaggcgaagtcatggtgtctgcgggaaatcccgaagctgtttatgggaagataa

SEQ ID NO: 191543 - DNA, 702 bp, Klebsiella oxytoca
atgattacaacccgaacagccaaacagtgcggtcaagcagacttcggctggctgcaggcccgctacaccttttcctttggccactacttcgaccccaaattgctgggctacgcatcgttgcgcgtgctcaatcaggaagttctggcgcccggcgcgtcgtttcagccgcggacctacccgaaagtcgacattctgaacctgattctggaaggtgaagcggaataccgcgacagcgatggcaaccatattcaggcaaaagccggcgaagcgctgctgatatcaactcagcctggcgtaagctacagcgagcataacctgagtaaagatcgctcgctgacgcgaatgcagctgtggctggatgcctgtccacagcacgaaaacccgctggtgcaaaaaatcgctatcgccgctggatcgcagcagctgctggcttcgccggacggcagccagcatagcctccagctgcgccagcaggtatggatccaccatatcgacctggcgaaaggcgagcagcttaacgtgcagcttcacggcccccgcgcctacctgcagtcgattcacggtacggtgcatgcgcgggtgcaggaagaagagaagcaggctctgacctgcggcgatggcgcttttattcgtgacgaagctaacattaccctcgttgctgatacgccgctgcgcgctttgctgatagatttaccagtgtaa

SEQ ID NO: 191544 - DNA, 162 bp, Klebsiella oxytoca; identical to SEQ ID NO: 172758

SEQ ID NO: 191545 - DNA, 411 bp, Klebsiella oxytoca
atgaaattaatgacccgcattgcattaacagccgctctcggcactgggttctccatggcggctcaggctgcggatgttaaggctgcacccgctccggcgcaggacccgattgtccagcacttaaaactgactaacgatcagataacgaaaattaaaagcctgcatcagcagctggaaaaaaacgttcagcagatttcccagaaagatattaaagacggcgtgttatttgaggttattgattctggaaaatggaacgaaaaggcggtcaaagatcagctggcggcatttagccaggtagagcagcaggctcgctattatcgcgtgaagtactattttgatgtgaaccaggtgctgacgccagaacagcgtaagcaggtacaaaaagacttagctcaagagctgagtgagtaa

SEQ ID NO: 191546 - DNA, 933 bp, Klebsiella oxytoca
atgtcattgaagccaaaaaacttatataaataccttacatttaatgaaaatacattaaaactattgtgtacgttacaagtatattattctgatcctgccttttttaatgacccattggattgccaaccgatagtacgtaatgatttaactttgcacgaactcaaagagattttcatacagataatgttaaagaaatctgaaaaacagttctcgcagagtttgaaaaacttaagattttcaggtgaaaaaacaaatgagagagcgtttaaactcgcagagagtgaggttaaagggattattaactctttagaatatgaatctactgatccaatgattaaaaatcagaatggttatcttgagttaaattacgtatcggcgattcagaaagaaatagtaaattcctttaaaaccggagtgttgtgcctgagttcaaaatttgacagtcctttaatgtggtcacattacgcttcccaacatcgtggaatatgtattgagtatgatatgacggatgtcaaagatgataaggtccataaagttgtttacgggggttcaagattaatagttacaagtgaaataaatgaatggttatataagccttcagattctagcagattaaagcaggtatgcttgttaacaaagtctgaagaatggcgctatgagtcagagtggaggatttttagccgagttggattaggcgattcaatacctccagtaaaatcgataatatttggtttgaaatgtgatgatgtaaccatttatacagttatgaaagcgatgatgatcgaaggccgagatttgaaattttggaaaattgttaaccgcggtgataagttttccctcaaaagagaaagaatttaccctgacgactattatgcgactttgccttgtatactttcatcaagtcaaatagattctatgcttgatgatgaataa

SEQ ID NO: 191547 - DNA, 552 bp, Klebsiella oxytoca
atgctgattggttacgccagggtgtcaaccggggatcaaaacctcgatttacagaaaaatgcgctgatccgcgcagaatgtgagctggttttcgaagatacggccagcggaaagaatgccagacgaccagggttaaagcgtgcgctgcggcggctgcgaccaggtgatgtgctggtggtctggaaactggatcggctggggcgaagcgtgcgtgatttgatcactctggtatcagagctgcaggcgcgcggggtgaatttccgaagcctgactgacagcatcgataccagtacgccagcaggacgttttttcttccacgtcatgagtgcactggcggaaatggaaagagagctgatcgtcgagcgtacccgcgccggtttagcagcggcaagggagcaggggcgcatcggtggccgccgccgggttatgaccgaagaagttgtggaacgaggccgccggatgctggagaacggagctacacgccagcagatagccgatgtgataggtgtaggagtgaagactatctataaatatctgccagtaacgggatga

SEQ ID NO: 191548 - DNA, 366 bp, Klebsiella oxytoca; identical to SEQ ID NO: 25794

SEQ ID NO: 191549 - DNA, 237 bp, Klebsiella oxytoca; identical to SEQ ID NO: 77389

SEQ ID NO: 191550 - DNA, 285 bp, Klebsiella oxytoca; identical to SEQ ID NO: 70433

SEQ ID NO: 191551 - DNA, 798 bp, Klebsiella oxytoca
atgagtgaaaaagtgcccgccgagatttcggtgcaactatcacaagcactcaacgtcatcgggcgccacttggagtcgacgttgctggccgtgcatttgtacggctccgcactggatggcggattgaaaccgtacagtgatattgatttgctggtgactgtagctgcaccgctcaatgatgccgtgcggcaagccctgctcgtcgatctcttggaggtttcagcttcccctggccaaaacaaggcactccgcgccttggaagtgaccatcgtcgtgcacagtgacatcgtaccttggcgttatccggccaggcgggaactgcagttcggagagtggcagcgcaaagacatccttgcgggcatcttcgagcccgccacaaccgattctgacttggcgattctgctaacaaaggcaaagcaacatagcgtcgtcttggcaggttcagcagcgaaggatctcttcagctcagtcccagaaagcgatctattcaaggcactggccgatactctgaagctatggaactcgccgccagattgggcgggcgatgagcggaatgtagtgcttactttgtctcgtatctggtacaccgcagcaaccggcaagatcgcgccaaaggatgttgctgccacttgggcaatggcacgcttgccagctcaacatcagcccatcctgttgaatgccaagcgggcttatcttgggcaagaagaagattatttgcccgctcgtgcggatcaggtggcggcgctcattaaattcgtgaagtatgaagcagttaaactgcttggtgccagccaatga

SEQ ID NO: 191552 - DNA, 861 bp, Klebsiella oxytoca; identical to SEQ ID NO: 164706

SEQ ID NO: 191553 - DNA, 1014 bp, Klebsiella oxytoca; identical to SEQ ID NO: 49376

SEQ ID NO: 191554 - DNA, 465 bp, Klebsiella oxytoca
ttgaaaaatgtatcactcagcatcctggtactcgctggcagtctgctaccggttatggcgcaggcatctggcagtcaggatacctggacccgaggttggggacagggagtatcagagtttgtcatcaaagggaaaggtcagtcacaactgtcactgagctgtgaagattatggctcgcaaccggccacggtcatatttactgacgccagcgggcatcaggtcagtatggatgaagataaaagccttcaggtcagtatcgacggtggagcacttattgatatcagcgaatctggcagtcgagtgggcggtaataacctggcgctggcctgggctcagttacgtaagggcaaacaggtctcagtaaccggagacggtgttaagcctgccacattcacgctgtccggggcgactaaggttttaccggcattcgggacacacggctgcgtgggtaaagatgcactctag

SEQ ID NO: 191555 - DNA, 678 bp, Klebsiella oxytoca
atgtctgaacaggaacaacgctatgaccgcctggcaagccgtctcgccatactggtcagccgcctttttatgggagaaacgctcagtgtcaggcaacttgctcaggagtttaatgtctctgagcgtaccgttcagcgtgacctgcgtgaacgacttcgctatatcgacacggaatatatcaatggtcacgtcagtctccgagatgctcggggcccctttcgtaccaacagcgacattatccgttttgcccaaataaccagggtggcacattactttccggcacttgaccctaagttgttgtctgtccagctcgacaacggtcaggactccccctgcattatctggaatgtgccaccccgtcaggctccggcgttgtttggcggttttcaggtcattatccaggccatcatcagcaatcgccgcattcattttctgcatcacggacaccatcagtccgccgttgccccttaccggcttatctgtctggaaggcgagtggtacctgacggcagtaactggcgagcggattcaagtatttaccctttcagccatcaccgatgtggtcatgaccatcgggggcttcaccagaagcagtcatatccggcggatttttgaagacccgcgatttattcaggccctgccgcattttcagtacatcagcaggctcatccgggaatga

SEQ ID NO: 191556 - DNA, 729 bp, Klebsiella oxytoca
atggctgtctaccgtaacgaccctgatttaaatctgctgggcaagtgcagcaatgaagagctgcacttgctggtttccatcttgaccactgacccacgcgatggtgacactcgctggacagagagtctgaccagtaccccggagtaccgcctgttagcaccagaccaccgccgctactggcaactgatagccgctgagtttcagcgttacggcgcgaataccctggcgagtctggtccgactggggcaaggcgtgacctatcgggaaattctggtcgatgtctgtgacaagcttaatgtgaattacaaccagaaaagcactaccgaaaccattgagcttgctctgttgatgaaggtactggaaaaaagcctggatcagatgtcaccggaagagctggctgctttctcccacaatatgcatctggatctgacaaaccccacgccacaactcattcttattgccgttcaggctgctatccggacttcctcgctggctgcgctcgagctggcaacgatgttgtctgccagtgtcatcacctccctgggcggtattgccacctggggaactgttgtggtcgcttcacgtgctctttccgttctggctggtcctcttgccatcgcactgagttcagcgtggatgatttccggcatcactggtccggcttatcgggtcacgatacccgcctgcatcattgtgtcctggctgagacagcagcacctttcccgctaa

SEQ ID NO: 191557 - DNA, 960 bp, Klebsiella oxytoca
gtgacagtgttcaacatgtctgatgattttcattttatattcccgaaaaaggcagacaggtataagaacgtgatggccacatctgttgattttcgtcggctggaaaaggaatattgcatttgtttttataaaaaagctgataatggtcgcatcgaagaggttattaatcttattactttcttaaggtttgagtatgcagggttacagcatggaaaattgatttttaattcagaaagtaaaaaaaattgtgagcgagttaaaaagtttgtgctggaggtgattaaaaaagatatagatagaaaaatgagaatgttcactactgccagacagtttcataacgatatgaaaaacagatataaaaactctggcacactctgtttctctttattcgccgaaggtgtctccggggagcccattccagagcacatgaaaacactaaaagcgctaagttctcgcttttttaataatatccgatctagaactacatttaagcaccatgttctgggctatttctgggttgtgttaaagaacagatatgataatcggccttacttacatgttaatttttatgtagatactcgggattttaataatgttattggtgaggaaataaatgcttgctggtttaatgctctcaaagccatggaggacaaagaaggaggagtactacaccttactgtggcaaaagaatttcagaatgggttgctcttaagaagtaccagtggttacagtgagcagtctggagagaatcacgctatttttactcggttcaattctgatgcaagtgtgattactaaagatttgaatgctgctaattcagaaatatacaagcagtttaccaacaataaagataaacagtatttcatacattatctttatgcactcgctaaggagtcttactttattgctgagaacactcatttctttggttcttcctcagtggtaaaacgattgaaataa

SEQ ID NO: 191558 - DNA, 570 bp, Klebsiella oxytoca
atgaattacatctttaacgatttctggcagcaacgtattgccgcaacctttcagaatgccttggatgcctatccacgagtattaatgctgagggttgatctacgcctgcctgatacccctgccgccactgacgccgctgtaatatcccgttttacagaatcccttaaagccaaaattaccgcctgtcaattgcgtaaaaagcaggagggcaagcgggtacaccccacaacgttgcggtatgtctgggccagagagttcggggagcgcagcggtaaaaagcactatcacgctgttttactgctgaaccgagagagttggtgtggagctggtgattacaagtcaccgcacacgctggccgggatgattaaacaggcctggtgtagcgcgttgcaggtggacgtgctgcagcatgccacactggcgaatttccctgagaatccagtgctatggattgacagggggaacagtgcccaacttcaacaggccctagctcgggctgattacctcgctaaagaccacacaaaagtcacaggtgatggcgggcgtaactttggctgcagtcagggctga

SEQ ID NO: 191559 - DNA, 3726 bp, Klebsiella oxytoca
atgaaaaagtacggagagctgattcaatttgagcccgtcacaactatcatcaaactcaaggagtctgctgaacagcacaaagctcagcagttggtggcgtcttatgttatctcggacaagatgtcactaaagctagcggacattataattccacagctgcagtttgaagaatcagttgataacaaatccctctgggttgtcggtaactacggttcaggtaaatcacacctgatgtcagtgatctcggcagttgctgagtttccagaacttgcacaatttattacaaacgacaaagttcgtcacgctgcgggcaaaattgccggaaaatttaaagtcattcgctttgaggtcggggctagcaaaaaagcctttgctgatatcgtcacagacaacctgacttccagcttggcggaaatagggattgattatcaattcccctcaatggatgaaatctcatccaatcacaaaccctactttgaagagatgatggcgctatttcatcaacgctatccagaacaaggtttgcttttgatttgtgatgaaatcctcgactacctccgctcgcggaaccagcaacagctaccattggatatggcgatgatgcgcgtcatgggagaggtgattgatggcacacgcttccgatttatttgtggcgttcaggaagcaattttcgatagtactcagctcgcttttgcgacgcaggaagtcaaacgcatccgagatcgcgcagagcaggtgctgatcactcgtgacgatatcaaatatgtggtcgctgaacgtctgctcaaaaaaaatgcccagcaattgcactggatccgtgaatatctacaacaattcaccccttgttttgatcgcatgaatgaacggcttgatgaatttgttcgaatgttccctgtacatcctgactacatcaatactttcgagcgagtaaatggggcaggcatcgaacaacgacaggtattacgtagcctctcgcggcagatgcaggctttaatggagcagcaagtcccccttgatacgccgggcatattctcttatgacacatactgggatgagctcagaagtgatcccagcgccaaaaccaatcctgatgtaggtcaggtcattgatgtcggcgaaaccctgtttactcgtattgaccaagcctatccaaccgcaactgaaacagactttgccaaacgccttgtagccggtttggcaatccatcgtttgactgttggtgatgtttataacgagatgggagcaactgctgccgagctgcgtgattcactctgcctctatcttccaggtatcgataaactgccaggagaaaagagtaaaaatctcgaaactcagattgttgctgtactgactaagattcgaaaaactgtcaatggtcagttcttttcaaagaacaaggcaaacgatcagttctttttggatttaaaaaagactgaagactttgatgcttacatcgaaaacaaggttcccttgcttacggatgatagtcgtaacggtgcctatcgtgaagctatgctgcagatcctggaagaaactgatatgcagcaacccaatattcagatgtggcggcacgaactgaaatggttggatcgcaatgttaatcgtccaggatggatgttcttaggctcacctaatgagcgagaaacagccaaaccgccgctcgactattacatgtactttatacagccatacaatccgccaaaacagaaaaaagagtacatccgcagcgatgaagtgctatttatactgcaaaatgctgacggtgaatttgatcgcagcctgaactactatgcagctgctatcgatttacatgcttctgctacaggtaacgccaagaatgtgtacaaacttaaggcggaaggttatctgagagagatgcagacttggctaaagagtcatttcaaagatgcctatattgcccaatacaatgggcaaagcaagccgatgatggactggcttaaaggtacctctgtccgcaacatttctgggctcggcgatagccaaattggcagtctcaaggatatttttgaatctgttgccagtcatatcttggctaaccattttgtttcattagcacccgagtatcctacttttagtcagtggatcacctatgaaaacatagaaagcgcagccaaagatgcgttaagtgttgtctcgggtggagctgctaccaagcgagctaatgcagtccttgacgcacttgaattactggatggcgataaaatttccccgctacaatcacgctatgctcaggcggttttagctgttttgcaaagcaagccacagggccaagtggtcaatcaggcagaactgctggaggcaatcaattcccgactctattttaagccagaaagcttccgactagaaccggaatggctattagtcctgatcgcctgtttggtttatagcggcgaaattgaattagtagtggtcggccataccctgactgccagtgatgccgtcaaattcaaatccatttcatttgatgtactgaaagactttaaacatatccaatcgcccaaggattttaatgtcaccgcattaaaagccctactcactctgttgggcatgaatgacggtttagcaaccacgatccagcaaggtgacgaaagcatcgtacgtgaaatgttaaagcgcacagaattgctgattaacgaactagtcaaggggcagcagagtgtcaaagaacgtttgccgttatggggacaattagttctagaagaaagtgaagagcaaacgctgtcaacacaactagctgagcttaaagactttttggaaacaatccagcgctatgacaaaccaggtaagctgaaaaacctcaaggtgacggcttcagaaattgcctgtttccagcaaatactttacgcatggcgaaattatgtgcaactcaaggcggcagttaacgatctgaccccattatgcacttatctcaaagaggctcaattggtactgccagagcagcacatatggcaagaacaagtgaaattggctcgagatgggctaagacaaggttttgccgatccatcattacgatgtgatgagaatttcaaagcaacgcagatcgctattctgtctgggctaaaaacggattatgcgaagtactatattgaactctatattcgggctcgtctcgatagtagtgaagagaaaactaaatccaaactgttaagcgacgatcgccttgcagaattggatatattgagtggcatcaccttgctccctgcccaacagttagttgattggcgtaaagaggccgcacaattacaagcggctaagcccattgatcccaaacaactggcgatgaatgccaatccggtggaattcaatgctcgtcaagaaagcagcaaggctccagccagtgagcaattaaaaaatctggagcagcgactcgatagtttacaaagtgattggcttagtaacctgaatagtttgctagatgacccgttcattaaccttagtctgcttaaaccagagcaggcacagttaattcgagattttattcagaattgtcagctccctgagccacttgatacaaacttcgtacaagccgtaaaccaagtgctggcagggttggaagagttaagaataaactcagctgagtttattaatgcgctcgggaaaggccttccccagagccgtgacgaagtagccgaacgttttaatcggctgctcgacaaactttgtcagggtaaagatatcaacaaagttcgaatcattatcgattaa

SEQ ID NO: 191560 - DNA, 2832 bp, Klebsiella oxytoca
atgatgcaaaacggtttattctcaaatgatgatacgccacaggggcaaacagttggtccagtaacctgtttgggaaaaactttcgctaatgaccatgagcgtcgtcaatattttttgaaattgctggctgaaaaactcaaagatccagaatttcgcaaaatcgaaggttttcctatcggtaatgatgatgatattttgaatctaagtgacccaccttattatactgcctgccctaacccgtggattgccgaatttgttatggaatgggaatctcagaaaattgagagtgaggaagagtatcaccgcgaaccttttgctgcagacatcagcgaagggaaaaatgatcctatttataatgctcactcttatcatacaaaagtaccccataaagcaatcatgcgttatatattgcattatacaaaccctggtgacattgtgttcgatggattctgtggaactggtatgaccggggttgcagcacaaatgtgtggtgaccgaaatgttatattgtcacttggatatcaagttctccctgatgggactattttgaaagaagaagttgatgaggaaaatcattccatatggcaacctttttcaagggttggttcaagaaaagcaattttaaatgatttatctcctgctgcttcatttatctcacacaattacaacacgcctgtagacccggttgcttttgaaaaggaggccaccagaatccttaaagctatcgaatctgaatgtggatggatgtatgaaacaacgcacactgatggacgtataggaagaataaattacactgtctggtcagatgtctttgcatgtcctgaatgtactacagatattgtattttgggatgaagctgtagatcaagaaaatggctgtgttcgtgatactttcccatgccctaattgtggtgctacattatccaagcgtctaatgaaaagagcatgggttacgaattttgatccaattattggtcaaccaacaactcaagcacgtcatgcgcctgttcttattaattattctgttgatggccttccgggtcgattcgaaaaaagacctgaccaagatgatttagaattaataaataaaatcaattctgagccagtcctagactgggtccccagcaatgaattaccagatggttttaatactgagcagcccaaaaaatcacatggttttactagcgtacatcatttttacacaaaaagaaatttgaaagtgttggctgctctacgtcgacttctaaaatcctcaaatatggaaaagcaattgctttgtctagtcggagatcagcttcctcgggcaagcaaaatgcataaaatagcaattagccgccttaatacaaatttatcgaaaactgcaggagtacttgcaggtacattatatgttccttcaaatcaaatagaatactgcttaatttccatgattggcttcaggattgcggatataatatcttatcaaaaaaaacgggatggttatactcgacagattgtatctaccgcctcaacacatgtgatggaaataaaagataactctattgattatatgtttttcgatccacctttcggctccaacataaattattcagaattaaacttcctatgggaagcttggctaaaagtattcactaacaatgggcctgaggcaattgagaataagattcaaaataaaagcataaatgaatacaggattttgatgacaaaatgctttcgtgaatcttatcgtatcttaaaagaaggtcgatggctaacagttgagttttccaatactaaggctagtgtttggaataatatacaatcagctttaactgaagccgggtttattgtagctaacgtctcggcccttgataagaaacagcatacaattaaggctcttacaacacccagtgctgttaaacaggatcttgttatatcggcctacaaaccaaataagaatttcgaagaacgattttcaagtgaagctaaaacagaagagggtgtttgggacttcgttcaaactcatcttcaatatttacccgtaactaagttacagggccaaagtttgctttcaatccccgaaagagaccctaggattttatttgaccaattggttgcttattatgtaagaaaaggctatcaagtccctctcgatagcagggagtttcagcttggcctttctaaacgcttttcggagcgagatggtatgtacttcttacatgaacaagcagcagaatatgataaaaagaaaatgacatctaaatcattcatgcagccttctctttttgttaaagatgaagcatctgctattgattggcttcgtcaatgtttaaaggataaacctcaagcattttctgatattaaccctcaattcatgcaacagcttagtggttggagcaagaacgaagtagtgctcgatctccgcgaacttttaattcaaaatttcctatgctacgacagccaagatgatgttcctgaacagatccatagctatctctccagcaactggaaagagctacgcaatttaccaaaaaatgattccagtttaattgctaaagctaaggatcgttggtatgtacctgatcctaataaatctggagacttggaaaagttacgtgaaagatctctacttaaagagtttgaagaatacaaggcagccaagaaaaaactaaaactgttccgtatcgaagcagtacgtgttggctttaagaaactatgggagcaacaggattttgcaaccctgataaacgtatctgataaattgccaagcaacgtattggaagaagatccaatattattgatgtattatgaccaagcactaaccttaagccaaaccgataccgatgacggatggtaa

SEQ ID NO: 191561 - DNA, 828 bp, Klebsiella oxytoca
atgtctcagttagacagcggtacttttcagcaggttaaagatctggtgctttccggttatcacctgaacgatatccacggcctggcctgtccgaccgccctgctaccgcagaataccagcgttgaaagcctggagcgttttgctcttgagcgtttccgtttccgcggtgccatggacacgaccagcattgatgatttcgttcgctattctgtcgcttatgcccaagaagaagaaaaagcacgttgctttattgatgccgataacatgctggctcgttctatcttcaatatcggcacgttggacaacccaggccacgctgataacgtcgcctcgatcaagcttaagaagacagcgcccttccgcgcgttactggctatcaacggcgatcaccttaatcagaagcaaatcgccgaatggctcgaagactggagtgactatctcactgcgttcgatgctgacggacagacaatgaaaattgcacaggcagcgcaggcggttcgccgtgtcactatccagcaaactaatgccgccgatcatgaagacggtgatttcagcggcaaaaaatcgctgatgcaaagtatcgaagccagcagtaaagatgttatgccggtcgcttttgagtttaagtgtgtaccctatgaaggcctgggcgaacgtcgtttcagtctgcgcaacagtctgctgaaaagtagcgacccggtgttcgttctgcgaattgtccaactggaggcccaggaagaagcgatcgctaatgagttccgtgatcttctggttggcaagttcgacggcaagccggtagaaacctttatcggcaacttcaaagcctga

SEQ ID NO: 191562 - DNA, 399 bp, Klebsiella oxytoca
atgaacatctcaacagtaaacgagctcattcagtcgcttgagagtgcgggcgagctgtcgatcaaagagcggaagtatcttgagctggcgaaagagtttaagcagctggctgcggagaatgtggggctaaaggctttaatcccagaaaactggcagatgcatgatgttctgcaccagttaatcgtggctcgccctggcggggtttatttcaacaaatgggagaagcttatcgctgaggttctgaacgcaacccccgccaccgatcgcatcgtagccaggataaaggctgatggggtggaggagtttgcgaaaaagcttgaatcacgtgggcggcaccaggactacgttaaagttgcctacggattcgcccagcagctgcgcgagggggccgacaaatga

SEQ ID NO: 191563 - DNA, 390 bp, Klebsiella oxytoca
atgactgatatcaccgaactggtgcagagagagaaattcgaagcttgggcacgtagccagaaacttagcctttcttatggcgactgtggttatgtttattcctcaacggaaatggcctggcgtgcagttaaagcgcttagcgctgagctggtagatgcgctggagaaggcgcagcagcgtatagccgagctggagcgcgaacaggagcatcttcgcccggtcggcgtaatgagtgaggaagcgtatcaccgccttgaaaacagagaatctcgctttattgcgttgtggccgcgccctggtatctttttgccgcgcaagcgccccgaggatggcgtgatcgtctacgcacgaacgtcttttgtggctgccaataaagcggaggcagagtag

SEQ ID NO: 191564 - DNA, 474 bp, Klebsiella oxytoca
atggataaccctactctgggcggacgggaacttcgggacaaaattttttccggactcaaagtctatgaaggtaaagcctttatcgagcggtttgggctgtttatgggcaaggcgcagttgcttgagtttgggctgaaaaaaatcttagcttcactaccgggctataatctttccgaagagaaactagagaggctggctttaggccaaactcgagttgagcttgagaaactggggctacgcacggactataatgaatacctaaagtcatttaaggataagcgaaattcgatggcgcatgaattcctagctaattacgcgatcactcagcaactacttgacggacctgtacttattggtccgtttgagcgtgagttaactcatgcgagctatgaattggaacaactaatcattgttttcgactttatcaatagtgccggtgacgttactgcttggctggaaccgaaagccctttga

SEQ ID NO: 191565 - DNA, 1059 bp, Klebsiella oxytoca
atgcgcttgaaccgccttcctggatacgggctcccagatcttgccttctggccacaaccttggtacgaaacagaccgatggcaaatgtacagcttgaaacttcgaaccgatggaacacttcattggttcaagcatcacttagaacgtggtatacctccccatgcttatgcccacacctatgaaaattacgaagatgccagaaattgggcaattgagatgaataaaaatattgatattgatattgataaactcactttatccctacccgaaaaagagtcattgcgtttaaaagtggataaggccctcaccgccaaaatacggttgatggatgaagagcaaatgatgctcaatgaggccacaatgaaacacactaacgatccgcgtatttgtcccgaggagttaattcttaagcccgagttagagagcttacgggagcctctgctcgacgctctcaatgagaggccatatctgcgtttcatttatctaccgaggtaccaaatttgccttcaactcgttgaaaataacacttgggatcgatccaatcttattagttcaagagcggcaaaaatctgctatcaagagcgcattgctagaggatttggattgtctggaggagcacattgggggaaaacaaaatcagctatacgctctatgctccttccacgtgccaaccaactgctacagctagccagtgtaaaacggatgttggatgaagccatcagaaacggaaaaagagtcctcgttttcagcaattacgttttctggtacgaggacaaaaaccaagttgggtggagcgttaaggagctcagcgagagcgaggttacctcaaggggtaatactatctggacgaaagggacaattatttccaaaaatcatgggcggattgttgtacttccgtacactaaggaaaacggcgaacacgttaaaggctataccaagaacgctccgaatgacggtaaagcgctgcctagacataaagacgaatatgttgagcttcccttcgaaattctggatggtgatttgatgttcagtttattcggtgagcttaaatatgagtaa

SEQ ID NO: 191566 - DNA, 795 bp, Klebsiella oxytoca
ttgcaaaacaaaatcaaagaacttcgttcccagctatcaatcactcaacgtgagttggcagatatggttggtaccagccaacagcagattcagcgtatcgaaacagggaaagttgcggccaagttggggctggcgcaagcgatcagcgcggtcttaaaaaagccattgagcgctgtttttccagatagcgataaattgctgaagaaattgcgcaatcaaggtagccgtaatgacgatgagctggaaaatatcgccgctaatggcattgaaatggatggctgcacttggacggtgaaaatctggctacgagggcaacaagattatttgttgttacctatttcctcggctgataagcgtcgtttttactcacactttcaggaaagtgtagtgccagaccgtgagcttttttttgtctttgactctgagcagcatcgttatgccttaaatgctcgagaggtgatttttcaccaattcttgtttgatggttttacacctgttcctgatgatgaggacagtaatggaagtgaaggaagctatgggaatgtccatatcaccatggtgaatggtggcccagttattggtctgtactgtgagcccgaggtttcggacgacgaaatcgatgatattggtcaattgaatgcattttttgacattcttgaattagagccggaatcaacagagcgatatcagttaaccgacatagacggagaagatgcttttatccgtattggctctcttgcgatggttcgaatagatcttgatgctttggtgtctgtcgaggaagatgatgtgtaa

SEQ ID NO: 191567 - DNA, 1428 bp, Klebsiella oxytoca
atgagatacccaatatccctttcaaaaagaatcgatgaagttaagaacatagttgaaagctggcctgttgagaaagatattaatcaggttcttaattggctaatgcagtttgataatgatgacattgatttggctatcaggataataaagaaccttaacgttatcggttttgaagatttaaatacagcactcatcattgcatatagtaagctagaacggatgtccatcgagaaaggaacaagaataacgagtaaaaatacattgtttgcgggaattggagatggtgcaaaaagtggtgccatgattggatacaacttcagaattattaatgaattacctgaaggtaatttcatgggtgaatattcattagattaccttgaaaaaggtcttatagataatattgttttagttgatgatattgttggaacaggccgacaagcgactgaggaaattaaagagctaacccaaaaggtcacccctcttggagtgaaaaatatttttttacttacggcgattggcatgcgagatggtattaaggaaatatccataaatactaaagcccatgtttttagtgcttacgagtatacagagttagatacagttacatgtttagattcacccttttatgacggaatcccacacgaagagagggcagacgccaaatctcgccttgagtattacggcggaatgattaataaatctcctttaggttatggtggtataggggcattgatttctttttattacaatacgccaaacatttcgctaccgatgatatgggggagtaaaaattcatggcttccacttttcaaaagagctgtgaaaataaatggaataaactcctactataagcaaattgaatcaagcattaataaaaagaagaaagatggcactgtattaacttctaaagaaaatcagctaactattttggtgaaagggtcattcgacgaaatgttctttgattacataatttcattaatcaaagataaactaccttttgaaaaaatatctgtaatagctcttggtggctttagttctaagaagttaatagataacatcgtaaagttgaatagccactgtttatttattgttgaggatgatgaacaaagcccaagaggatttatggagcgacttttgaataacatcggagataatccgtatatgttagtcaagcctttcactttttatctcaaccttgattcaatgatccagagtgacaaatggtcacgtgttttccctaaatctgaaactattgaggaacaaagcaatttgaacagaatgaatactgtagagcaaagaattaaaatgagaacacatcgaaacgaagcccgatttaaagagctattagaaaattacctagatgaacccaagattcagttattgatcgatgatttattatcaaaaatattaaatagcacagttcaatga

SEQ ID NO: 191568 - DNA, 513 bp, Klebsiella oxytoca
atgagcacaaacaaagggaaagatggtgaaatgagagtgctcagactgctctctcatattgtggaagccgaagaaaactgtgatgttactcgtcatacaaatactaatactgctgacggtggtgctgatctaatattggagcaccctcaggggcttttacctcatctgggagctgttgctagtggagaagataatattcaactgccagacttgtccgatgctcaaaaagtaaaaacaagaattgatgttaaaacaactgaaaacaaactggggcctgacgtagtgaagaaatttgctggtgatataaggcgcaacccagattgtgacggtcatgttctgatggggggatccgacctttcaaaccaagcaaaatctgatttcaaagaaattcaagatgcacaggctgaggttgggaagacggtcgtgtatattcctaattcaggggttgaaaacctcgagcgacattacacagctctgcctaaaagttctagtggggatgaagatctaacctaa

SEQ ID NO: 191569 - DNA, 459 bp, Klebsiella oxytoca
atgtctcaaagcattaatctcgttgcatatgagtctgcaagcgatggcagaatttacgaaacaaaaaccgaactaattgaaactgcatttatttcgacggccttacttaaagagttaaaaaaagaatttcctcttgttgaaagaaaaatctatgaagtacttggcgcagatgaacactattcgatagagtgtttcaatgatgctgatattgagaggattctcgttaagttggaggaaatgtttttatcagtactgaaatcagatagcgaaagattgctagggaaaacagattttcaagatgacaaaaatctgccgtcagctcagtctacttatataaaatcaagtgatatttccgaatctatcagccgattcagaaccctttctaatatcatttatatatttagcttaaaaaatagcaagtatagtggtgataactctgttgtgttgaaattgggctag

SEQ ID NO: 191570 - DNA, 2142 bp, Klebsiella oxytoca; identical to SEQ ID NO: 112241

SEQ ID NO: 191571 - DNA, 441 bp, Klebsiella oxytoca
atgtcaccaaagagaagtagaagcctaaaaagctcgtcaagaaaggaagaaactaaagactccaagcctaaatccgagtcaacggataggtttatttctgtgagtttcaagtacttctgtaatgttgatgatgttggtcaatctatagattcctggcgcgatgatggatgccttggtgagttagtggaaaaactaatttatttgactgccaatggtattactaaagtaatgtctgatgagatctttactaattacaatcgctatccagattcttctgttaacgacttcaagtgccccgatggattatcaaaagatgaatcttggggggttataaaaaacattggcgggcagaaaagaagggttgctggattccttcgggataatgttttttatattgttttctttgatagggaccatcggttttggaagtcaaataagtaa

SEQ ID NO: 191572 - DNA, 1299 bp, Klebsiella oxytoca
atgattgttaacttcagcttgtctaatgcattctcgttcaaagatgctcaaaatttgagcatgttggcggtgtcatcgccaaaggatgacatcaatcaggctaatgtcatgtctatcaaaggtgaaaggatattaaagtccgccttgatttttggtgcgaatgcgagtgggaaatcaaattttataaagacaatatctattatgaaagatattgttttgcattccgttcaggctatagaatcaagtgtcacaaaaaacataataccttttctgcttgatgaggatggcccaaaaagtccaactgaaatggaagttatctttttaaaggataacattaaatacaggtatgggttatccttacttcaaggtaaaattaaagaggaatggctttactatacaccatcatctagagaaacaatgttgtttgagagagatggtttagatattgatgtaaacagagcttcctttggggagtcggctttgtttattaaagataagattattcagaaaaccagggatgatgttccatttatatctgttattgctgggtttaacggtgaacactctaaaagagtcgtggattggtttaggaatattgttgttatctctggctcaaatgaaggtgcatttacagggattacattacatcttattaatgagtctcctgactttaaattgtggctaaaaaaaatactcccgtcatttcagattagtgatatttatttagatgaggtcgccccagacattccttttaatgacataaaaacggacgacgataatttaaaaagtctatttagctccatacaaaatttagcaaaaacgcaaaaaatgttttctattcgtgtgattaagaaaacagcgaatggtgaaatatccgtccctattgattttgaatcagagggaaccaagaaaatagtatatatgcttggccctatttataatgccattaacaatggtaacttattgttagttgatgagtttgactctaaattccatactttgctttctaagtttatatttagaatgtttcatgagcaaagcgaacatggtagccagattatagctgctgttcaggacgttaacctgatgtctatagattgcttcaggagagatcaaatttggtttgttgataaaaactatgagactggtggaagtaacttgtattcacttgttgaatataaggaaaggcaaagatctttgaagccatcctatggggctgattacttaaatggtgactttgatgcaataccgttgtttgaaaatccacaagatattgaaaccttaatgtctaaggaatga

SEQ ID NO: 191573 - DNA, 153 bp, Klebsiella oxytoca
atgaggttatttctatatcagatggtgccattcgctgcggtcattagctcagcagttttggcatttcattcaatcgatgggtggggatggtttctgtttatcgcgtttatgctcagcggtgcagacactgtgaaaaagcacattgcgaattaa

SEQ ID NO: 191574 - DNA, 234 bp, Klebsiella oxytoca
atggcattctatgaaaacaagcgttcagttcttgaaactgacaagcctgatcaataccgagtcctacgtgaaatcggcgatgtacctcccagtcccggcatttatgagtgccagacttgtaaatacgaagacgtcgtgaaccgggaatgcatcaagcttccaccctgctctaactgtaagaaaaaagggcatagcaataagtggaagctattggttaaagccactgataagtaa

SEQ ID NO: 191575 - DNA, 213 bp, Klebsiella oxytoca
atgacctttctgaaaatgctggtgacggccctgagccaggcactgacctggtgcggcggacatcaggcccgacagtttattgaaattcgcctgcgtcaggcaggctacgatgacagcagtattgatacagcccgggaagcggtcacgttgctggtcactgcacttatcaccgccctgatggcgcagatactgaagattctggatacgctgtag

SEQ ID NO: 191576 - DNA, 306 bp, Klebsiella oxytoca; identical to SEQ ID NO: 181807

SEQ ID NO: 191577 - DNA, 759 bp, Klebsiella oxytoca
atgaaaattcgctcagctcttcttgcctttgggatcgcagcaacgcttaccggatgtcagaacatggactccaatggtctgcttagctccggcgcagaagctttccaggcttattcactcagcgatgagcaggtcaaggccctaagcgacaaagcctgtcaggagatggatgcgaaagcgactatcgcgcctgccagcagtgaatacagcaaacgtctgagtaaaatcgccgccgcgctgggggacaacatcaacggccagccggtgaactataaagtgtaccagaccaaggacgttaacgccttcgccatggctaacggctgtatccgcgtttacagcggactgatggatttgatgaatgataatgaagtcgaagcggttatcggccacgaaatgggtcacgtcgcgctgggccatgtgaagaaaggcatgcaggtggcattaggcaccaacgcggtacgcgcggcggcggcctccgctggcggtatcgtcggcagcctgtcgcagtcgcagctgggcgatcttggcgagaagctggtgaactcacagttctcccagcgtcaggagtccgaggcggatgactactcgtacgatctgctgcgcaaacgcggaattaatcctgcgggcctcgcgaccagcttcgaaaaactggcgaagctggaagccggacgccaaagctcaatgtttgatgaccacccggcatcggaagaacgcgctcagcatatccgcgatcgcatgaaggccgacgggattaagtaa

SEQ ID NO: 191578 - DNA, 1641 bp, Klebsiella oxytoca; identical to SEQ ID NO: 191368

SEQ ID NO: 191579 - DNA, 1470 bp, Klebsiella oxytoca; identical to SEQ ID NO: 191369

SEQ ID NO: 191580 - DNA, 765 bp, Klebsiella oxytoca; identical to SEQ ID NO: 191370

SEQ ID NO: 191581 - DNA, 795 bp, Klebsiella oxytoca; identical to SEQ ID NO: 191371

SEQ ID NO: 191582 - DNA, 771 bp, Klebsiella oxytoca; identical to SEQ ID NO: 191372

SEQ ID NO: 191583 - DNA, 531 bp, Klebsiella oxytoca; identical to SEQ ID NO: 191373

SEQ ID NO: 191584 - DNA, 1257 bp, Klebsiella oxytoca
atgaccacattagagactaacgccgcgcctgctgaggcgagcggcgagggcgtccgcacgcctgaaaaagcggttcgctgggccattccgctgtcgctgctggcctacgtactgctggcgttcttcgacaaaatcagcatcgccgcgctgttttccgatagccacttccagcaggcgatggggatcgatttcgacaccacccgtctgggcatactgatgagcgctttcctgctgagctatggattctcttcggtgctgctaagcggcctgggcgaccgtattgcgccgctgcgcctgcttaccggaatgatggcggtgtggtgcgttttgatgctggtgatgggctttacccataactatacgctgatggtgacgctgcgaattttgctgggtatcgccgaagggccgctgttcccgctggcgttcgctatcgtccgccatacctttccccagcatttgcaggcgcgcgccaccatgctctggctgctcgggacgccggtcggcgcggcgattggcttcccgctatcgatttggctgcttaacaccttcggctggcagagcaccttctttgtaatggcgatgctgacggtaccggtactgatttttgtgcgcatcgggctgcgcggcatcacgctggaggcaaaagccagcggcgggcaaacgtcgcaggaggcacgccgcagcgcgcgccgcgagctgtttgtcagcccgcacttctggatgatctgcatcttcaacatcgcctttctcgcctatctgtggggcatcaacggctggctgcccggctacctgattaagggtaaaggcattcatctcgaacacgccggctggctgtcgtcgatgccgtttatcgccatgctgctcggcgaaattatcggcgcctggctgtctgaccgcgtcgataagcgcgccgccgcctgctttatttccctggcgggcgcaggcattggcctggcggcggtgatgcatttcaccaccccgctgccggtgattgcggcgatgagctttagcacctttatgtgggggaccggcgcgccgaatatctttgcgctgctggccaaggcaacccatccgcgagtcagcgccacggcgggtgggattttcaacgggctgggaaactttgccggggcgctatcgccggcggtgatgggcgcgctgatcgccttcacccacagcatggattccgggctgatttttctggcggtgatggcggcggtgggctgcgtcctgttactgccgctgctaagacgttactga

SEQ ID NO: 191585 - DNA, 1188 bp, Klebsiella oxytoca; identical to SEQ ID NO: 191375

SEQ ID NO: 191586 - DNA, 927 bp, Klebsiella oxytoca; identical to SEQ ID NO: 191376

SEQ ID NO: 191587 - DNA, 789 bp, Klebsiella oxytoca; identical to SEQ ID NO: 191377

SEQ ID NO: 191588 - DNA, 750 bp, Klebsiella oxytoca
atgaacggtctgttgaacggaaaacgtatcgtcgtcaccggcgcggcgcgcggcctgggctatcacttcgccgaagcctgtgccgggcagcgcgcggcggtagtgatgtgcgacattcttcggggcgaactggcggaaagcgctcatcgtctgcaggaaaagggctactgcattgaatcccatgagatcgatctcgccgatagcgagtcgatcgaccgggtattcagcgctatcggcgagcggggggcgatcgacgggttagtgaataatgcggcgatggccaccggcgtcggcgggaaaaacatgctcgattacgatccggatctgtgggatcgggtgatgacggttaacgtcaaaggcacctggctggtgacccgcgcggcggtgccgctgctgcgtgaaggggccgggatcgtcaatgtcgcttcggataccgctctgtggggagcgccgcggctgatggcctacgtggccagtaaaggtgcggtgatcgcgatgacccgctcgatggcccgcgaactgggggagaaacggatccgcataaacgccatcgcgccggggctgacccgcgttgaggcgacggaatacgtgcccgcggaacgccatcagctgtatgaaaacggtcgcgcgctcagcggcgcgcagcagccggaagacgtcaccggcagcgtagtctggctgctcagcgatctgtcgcggtttatcaccggccagctgatcccggtcaacggcggttttgtttttaactaa

SEQ ID NO: 191589 - DNA, 1023 bp, Klebsiella oxytoca
atgacaacaacggtacaaaactatcttgataaaggattacgcggcctgtggtatccggtgctggcgagctgggaagtgcagtcggcgccggtggggattacccgcctcggcgaacagattgtggtctggcgcaataaagatggccaggtgcaggcgctggaagaccgctgcccgcatcgcggcgcgcgcctgtcgatgggctggaacctgggcgatcgcattgcctgctggtatcacggcgtggaagtggccggtaacggcgaagtgaaagacgtcccggcggttgaccgctgcccgctggtgggtcagcagtgcgttcgcagctacagcgttcaggaagcgcatggcgccattttcctgtggtttggcgtcaccgccgaccagcagcctgatgagctgagctttccggaagagctggccaatagcgacaaatttagccacttcctgtgtaccgcagcgtggaaatgcaactaccagtacgcgctggaaaacgtgatggacccgatgcacggcacctatcttcactcctcctcgcactcgatggcggaaggcgatcgcaaagccgacatggtgctgcagccgacgaaaaccgggtttatttttgagaagaaagggcaggttggcgttaacttcgactgggtcgaactgggcagcagcggggcctactggatgcgcctctctattccgtacaaaaagcgcttcgggccgggcggccacttctggattgtcggcatggtggtgccggaagataacgacaactgccgcgtcttcttctggcgcatccgcggcgtacagggctggcagcgcgatctatggcgatttatgtaccgcaaccgcctggaaaaactgcactgggaagtgctcgaacaggatcgcgtggtgctggaaagcctggcgccgaatgcccgcgatcgcgaatatctttatcagcacgacgtctgcctttcccgcctgcgccgcatgatgcagaaagcggcaaaagagcagttggcggccctggaagagcagcagggagccgcctga

SEQ ID NO: 191590 - DNA, 309 bp, Klebsiella oxytoca; identical to SEQ ID NO: 191380

SEQ ID NO: 191591 - DNA, 324 bp, Klebsiella oxytoca; identical to SEQ ID NO: 191381

SEQ ID NO: 191592 - DNA, 1212 bp, Klebsiella oxytoca; identical to SEQ ID NO: 191382

SEQ ID NO: 191593 - DNA, 921 bp, Klebsiella oxytoca; identical to SEQ ID NO: 191383

SEQ ID NO: 191594 - DNA, 1977 bp, Klebsiella oxytoca; identical to SEQ ID NO: 191384

SEQ ID NO: 191595 - DNA, 1155 bp, Klebsiella oxytoca; identical to SEQ ID NO: 172923

SEQ ID NO: 191596 - DNA, 1395 bp, Klebsiella oxytoca; identical to SEQ ID NO: 191386

SEQ ID NO: 191597 - DNA, 459 bp, Klebsiella oxytoca; identical to SEQ ID NO: 191387

SEQ ID NO: 191598 - DNA, 708 bp, Klebsiella oxytoca; identical to SEQ ID NO: 191388

SEQ ID NO: 191599 - DNA, 732 bp, Klebsiella oxytoca; identical to SEQ ID NO: 191389

SEQ ID NO: 191600 - DNA, 948 bp, Klebsiella oxytoca; identical to SEQ ID NO: 191390

SEQ ID NO: 191601 - DNA, 564 bp, Klebsiella oxytoca
atgaatttacagcatcactttctgattgccatgcctgctctccaggacccgatgttccgtcgctccgtagtctatatctgcgagtataacgatgacggcgccatgggcatcatcatcaataagccgatggaaaatctgcaggttgaagggatcctggagaagttaaaaatcacgcctgagccgcgcaatcccgagatccgcctggataaaccggtgatggttggcggcccgctggccgaggaccggggttttatactgcactcgccgccctctgacttttcttccagcattcgtatttccgataatacggtgatcaccacctcccgcgacgtgctcgaaacgctgggcacggataaacagccggacaacgtgctggttgcgctgggctatgcctcctgggagaaaggtcagttggagcaagagatactggataacgcctggctcaccgcaccggcggatcggaacattttgttcaatacgccaatagccgaccgctggcgcgaggctgcgaagctgatcggcatcgatatcgtcaccatgccggccgcagcggggcatgcctga

SEQ ID NO: 191602 - DNA, 417 bp, Klebsiella oxytoca; identical to SEQ ID NO: 172916

SEQ ID NO: 191603 - DNA, 654 bp, Klebsiella oxytoca; identical to SEQ ID NO: 172915

SEQ ID NO: 191604 - DNA, 981 bp, Klebsiella oxytoca; identical to SEQ ID NO: 191394

SEQ ID NO: 191605 - DNA, 705 bp, Klebsiella oxytoca; identical to SEQ ID NO: 191395

SEQ ID NO: 191606 - DNA, 567 bp, Klebsiella oxytoca; identical to SEQ ID NO: 191396

SEQ ID NO: 191607 - DNA, 291 bp, Klebsiella oxytoca; identical to SEQ ID NO: 191397

SEQ ID NO: 191608 - DNA, 594 bp, Klebsiella oxytoca; identical to SEQ ID NO: 191398

SEQ ID NO: 191609 - DNA, 1137 bp, Klebsiella oxytoca; identical to SEQ ID NO: 191399

SEQ ID NO: 191610 - DNA, 987 bp, Klebsiella oxytoca; identical to SEQ ID NO: 191400

SEQ ID NO: 191611 - DNA, 504 bp, Klebsiella oxytoca; identical to SEQ ID NO: 172907

SEQ ID NO: 191612 - DNA, 1302 bp, Klebsiella oxytoca; identical to SEQ ID NO: 191402

SEQ ID NO: 191613 - DNA, 1008 bp, Klebsiella oxytoca; identical to SEQ ID NO: 191403

SEQ ID NO: 191614 - DNA, 717 bp, Klebsiella oxytoca; identical to SEQ ID NO: 191404

SEQ ID NO: 191615 - DNA, 327 bp, Klebsiella oxytoca; identical to SEQ ID NO: 191405

SEQ ID NO: 191616 - DNA, 720 bp, Klebsiella oxytoca; identical to SEQ ID NO: 191406

SEQ ID NO: 191617 - DNA, 1059 bp, Klebsiella oxytoca; identical to SEQ ID NO: 191407

SEQ ID NO: 191618 - DNA, 276 bp, Klebsiella oxytoca; identical to SEQ ID NO: 191408

SEQ ID NO: 191619 - DNA, 1086 bp, Klebsiella oxytoca; identical to SEQ ID NO: 191409

SEQ ID NO: 191620 - DNA, 1257 bp, Klebsiella oxytoca; identical to SEQ ID NO: 191410

SEQ ID NO: 191621 - DNA, 2187 bp, Klebsiella oxytoca; identical to SEQ ID NO: 191411

SEQ ID NO: 191622 - DNA, 717 bp, Klebsiella oxytoca; identical to SEQ ID NO: 191412

SEQ ID NO: 191623 - DNA, 912 bp, Klebsiella oxytoca; identical to SEQ ID NO: 191413

SEQ ID NO: 191624 - DNA, 894 bp, Klebsiella oxytoca
atgaaattaatcgacttgcacatgcattcggcatatagcaacgatgccgatttcccggtcagcgatctgcttaccatggctaaagcggcgaatcttgcggccctggcgataaccgatcacaactcggcgcgatccgttgaggagtctattcgctatggcagagcaaatagcgtaagcgtgatgaccgggattgaaatcgactgcgcgtttgcgggcaataattatcatctgctgggctacggttttcgtcgagacagccgggattttgatgtcgtcgaacacaacttccatcgtctggaaactgccgcgacgccgctaaagctggagaaactgcgggcgctggggttccagcttgatgaagagcgcctgtatgctatggccggcgatcgggtcccgcaggaagaggagatggcagaacttattttagaggatgcgcgcaacctgaatcatgatctgctgctgccttaccgcgcggggaatgcgcgcagcgatatgccgttaattaactttttttgggacttttttggccgaggcaaaccctgccaggtgacggtggaattgccgccgatggcggagatggcggcgctgataatcgacaacggcggcattccggtcattgcgcatatcggcgctaacgtgaaggaaaagccgctggcggtgattgaccagatgttgccgcttggcgtacgcggcgtggaagtgttctccagctatcatgatgaggagctatgtcgcgaactttatcactacacgctggataaatcgctgctggcgacctgcggcagtgactttcatggtaaaaacaaacccaacattaagcctggcgactgtagaccatggcgtgacgcgctaccgaaaaccctggaaatcctcgagcaggctgatctttattga

SEQ ID NO: 191625 - DNA, 879 bp, Klebsiella oxytoca; identical to SEQ ID NO: 191414

SEQ ID NO: 191626 - DNA, 549 bp, Klebsiella oxytoca; identical to SEQ ID NO: 172892

SEQ ID NO: 191627 - DNA, 474 bp, Klebsiella oxytoca; identical to SEQ ID NO: 191416

SEQ ID NO: 191628 - DNA, 825 bp, Klebsiella oxytoca; identical to SEQ ID NO: 191417

SEQ ID NO: 191629 - DNA, 405 bp, Klebsiella oxytoca; identical to SEQ ID NO: 191418

SEQ ID NO: 191630 - DNA, 363 bp, Klebsiella oxytoca; identical to SEQ ID NO: 191419

SEQ ID NO: 191631 - DNA, 519 bp, Klebsiella oxytoca; identical to SEQ ID NO: 191420

SEQ ID NO: 191632 - DNA, 699 bp, Klebsiella oxytoca; identical to SEQ ID NO: 191421

SEQ ID NO: 191633 - DNA, 2523 bp, Klebsiella oxytoca; identical to SEQ ID NO: 191422

SEQ ID NO: 191634 - DNA, 1173 bp, Klebsiella oxytoca; identical to SEQ ID NO: 191423

SEQ ID NO: 191635 - DNA, 1389 bp, Klebsiella oxytoca; identical to SEQ ID NO: 191424

SEQ ID NO: 191636 - DNA, 279 bp, Klebsiella oxytoca; identical to SEQ ID NO: 191425

SEQ ID NO: 191637 - DNA, 1371 bp, Klebsiella oxytoca; identical to SEQ ID NO: 191426

SEQ ID NO: 191638 - DNA, 1146 bp, Klebsiella oxytoca; identical to SEQ ID NO: 191427

SEQ ID NO: 191639 - DNA, 900 bp, Klebsiella oxytoca; identical to SEQ ID NO: 191428

SEQ ID NO: 191640 - DNA, 603 bp, Klebsiella oxytoca; identical to SEQ ID NO: 172878

SEQ ID NO: 191641 - DNA, 339 bp, Klebsiella oxytoca; identical to SEQ ID NO: 172877

SEQ ID NO: 191642 - DNA, 189 bp, Klebsiella oxytoca; identical to SEQ ID NO: 172876

SEQ ID NO: 191643 - DNA, 1182 bp, Klebsiella oxytoca; identical to SEQ ID NO: 191432

SEQ ID NO: 191644 - DNA, 1872 bp, Klebsiella oxytoca; identical to SEQ ID NO: 191433

SEQ ID NO: 191645 - DNA, 561 bp, Klebsiella oxytoca; identical to SEQ ID NO: 191434

SEQ ID NO: 191646 - DNA, 867 bp, Klebsiella oxytoca; identical to SEQ ID NO: 191435

SEQ ID NO: 191647 - DNA, 288 bp, Klebsiella oxytoca; identical to SEQ ID NO: 191436

SEQ ID NO: 191648 - DNA, 888 bp, Klebsiella oxytoca; identical to SEQ ID NO: 191437

SEQ ID NO: 191649 - DNA, 495 bp, Klebsiella oxytoca; identical to SEQ ID NO: 172869

SEQ ID NO: 191650 - DNA, 1527 bp, Klebsiella oxytoca; identical to SEQ ID NO: 191439

SEQ ID NO: 191651 - DNA, 1419 bp, Klebsiella oxytoca; identical to SEQ ID NO: 191440

SEQ ID NO: 191652 - DNA, 426 bp, Klebsiella oxytoca; identical to SEQ ID NO: 191441

SEQ ID NO: 191653 - DNA, 732 bp, Klebsiella oxytoca
gtgggtaataatttgatacaggcggatctctccgtttggggtatgtatcatcatgccgatattgtcgttaaggtagtgatgatcggcctgattctggcgtcggtcgttacatgggctatctttttcggcaaaggcgcagaaatcctggccagcaagcgccgcctcaagcgcgaacagcagctggttgctgaagcacgctctctcgaccaggccagcgatatcgctaacggtttcgatgcgaaaagcttgacctcgcagctgatcaacgaagcgcaaaatgagcttgagctttctgcgggttctgaagataacgaaggcattaaagagcgtaccggtttccgactggagcgtcgcgtcgcggcggtaggtcgttacatgggacgcggcaacggttatctggcgaccatcggcgcgatttccccgttcgtcggcctgtttggtaccgtctggggcatcatgaacagctttatcgggattgcccagacccagaccactaacctggcggttgttgctccgggcatcgcggaagcgctgctggccacggcaatcggcctgttcgctgcgattccggcggtcgtcatctataacattttcgcccgaatgattgccagctacaaagcgtcccttggcgatgtcgccgcccaggttctgctgctgcaaagccgcgatctggacctgagcgccagcggcgttaagccggtacgtaccgcccagaaattacgcgtaggttga

SEQ ID NO: 191654 - DNA, 1188 bp, Klebsiella oxytoca; identical to SEQ ID NO: 191443

SEQ ID NO: 191655 - DNA, 660 bp, Klebsiella oxytoca; identical to SEQ ID NO: 191444

SEQ ID NO: 191656 - DNA, 900 bp, Klebsiella oxytoca; identical to SEQ ID NO: 191445

SEQ ID NO: 191657 - DNA, 1164 bp, Klebsiella oxytoca; identical to SEQ ID NO: 191446

SEQ ID NO: 191658 - DNA, 828 bp, Klebsiella oxytoca; identical to SEQ ID NO: 191447

SEQ ID NO: 191659 - DNA, 456 bp, Klebsiella oxytoca; identical to SEQ ID NO: 191448

SEQ ID NO: 191660 - DNA, 2184 bp, Klebsiella oxytoca; identical to SEQ ID NO: 191449

SEQ ID NO: 191661 - DNA, 1413 bp, Klebsiella oxytoca; identical to SEQ ID NO: 191450

SEQ ID NO: 191662 - DNA, 738 bp, Klebsiella oxytoca; identical to SEQ ID NO: 191451

SEQ ID NO: 191663 - DNA, 2259 bp, Klebsiella oxytoca; identical to SEQ ID NO: 191452

SEQ ID NO: 191664 - DNA, 408 bp, Klebsiella oxytoca; identical to SEQ ID NO: 191453

SEQ ID NO: 191665 - DNA, 660 bp, Klebsiella oxytoca; identical to SEQ ID NO: 191454

SEQ ID NO: 191666 - DNA, 1350 bp, Klebsiella oxytoca; identical to SEQ ID NO: 191455

SEQ ID NO: 191667 - DNA, 582 bp, Klebsiella oxytoca; identical to SEQ ID NO: 191456

SEQ ID NO: 191668 - DNA, 315 bp, Klebsiella oxytoca; identical to SEQ ID NO: 172850

SEQ ID NO: 191669 - DNA, 1896 bp, Klebsiella oxytoca; identical to SEQ ID NO: 191458

SEQ ID NO: 191670 - DNA, 576 bp, Klebsiella oxytoca; identical to SEQ ID NO: 191459

SEQ ID NO: 191671 - DNA, 828 bp, Klebsiella oxytoca; identical to SEQ ID NO: 191460

SEQ ID NO: 191672 - DNA, 423 bp, Klebsiella oxytoca; identical to SEQ ID NO: 191461

SEQ ID NO: 191673 - DNA, 633 bp, Klebsiella oxytoca; identical to SEQ ID NO: 191462

SEQ ID NO: 191674 - DNA, 1449 bp, Klebsiella oxytoca; identical to SEQ ID NO: 191463

SEQ ID NO: 191675 - DNA, 669 bp, Klebsiella oxytoca; identical to SEQ ID NO: 191464

SEQ ID NO: 191676 - DNA, 1161 bp, Klebsiella oxytoca; identical to SEQ ID NO: 191465

SEQ ID NO: 191677 - DNA, 792 bp, Klebsiella oxytoca; identical to SEQ ID NO: 191466

SEQ ID NO: 191678 - DNA, 774 bp, Klebsiella oxytoca; identical to SEQ ID NO: 191467

SEQ ID NO: 191679 - DNA, 654 bp, Klebsiella oxytoca; identical to SEQ ID NO: 172839

SEQ ID NO: 191680 - DNA, 288 bp, Klebsiella oxytoca
atgattgacccgaaaaaaattgaacaaatcgcccgccaggttcatgaatcgatgccgaaggggctccgcgatctgggggaagacgtggagaaaaaaattcgtcaggtgctccagtcgcagttaactcgcctggacctggtaagccgcgaagagttcgacgtgcagacgcaggtgctgctgcgcacgcgtgaaaagctggcgcttctggagcaacgtctgagcgagctggaaaatcgtcctctaaacgcgccggcgacgccggacgccgaagagaagctcaaaaaataa

SEQ ID NO: 191681 - DNA, 210 bp, Klebsiella oxytoca; identical to SEQ ID NO: 172837

SEQ ID NO: 191682 - DNA, 1434 bp, Klebsiella oxytoca; identical to SEQ ID NO: 191471

SEQ ID NO: 191683 - DNA, 2835 bp, Klebsiella oxytoca; identical to SEQ ID NO: 191472

SEQ ID NO: 191684 - DNA, 1407 bp, Klebsiella oxytoca; identical to SEQ ID NO: 191473

SEQ ID NO: 191685 - DNA, 621 bp, Klebsiella oxytoca; identical to SEQ ID NO: 191474

SEQ ID NO: 191686 - DNA, 1242 bp, Klebsiella oxytoca; identical to SEQ ID NO: 191475

SEQ ID NO: 191687 - DNA, 822 bp, Klebsiella oxytoca; identical to SEQ ID NO: 191476

SEQ ID NO: 191688 - DNA, 384 bp, Klebsiella oxytoca; identical to SEQ ID NO: 191477

SEQ ID NO: 191689 - DNA, 621 bp, Klebsiella oxytoca; identical to SEQ ID NO: 172829

SEQ ID NO: 191690 - DNA, 825 bp, Klebsiella oxytoca; identical to SEQ ID NO: 191479

SEQ ID NO: 191691 - DNA, 303 bp, Klebsiella oxytoca; identical to SEQ ID NO: 191480

SEQ ID NO: 191692 - DNA, 321 bp, Klebsiella oxytoca; identical to SEQ ID NO: 191481

SEQ ID NO: 191693 - DNA, 1704 bp, Klebsiella oxytoca; identical to SEQ ID NO: 191482

SEQ ID NO: 191694 - DNA, 471 bp, Klebsiella oxytoca; identical to SEQ ID NO: 172824

SEQ ID NO: 191695 - DNA, 675 bp, Klebsiella oxytoca; identical to SEQ ID NO: 172823

SEQ ID NO: 191696 - DNA, 618 bp, Klebsiella oxytoca; identical to SEQ ID NO: 191485

SEQ ID NO: 191697 - DNA, 1608 bp, Klebsiella oxytoca; identical to SEQ ID NO: 191486

SEQ ID NO: 191698 - DNA, 1014 bp, Klebsiella oxytoca
atgcgtgtactgggaattgaaacatcctgcgatgaaaccggcatcgccatttatgacgacgaaaaaggtctgttagccaaccagctgtatagtcaggtgaaattgcacgctgactacggcggcgtggtgcccgagctggcctcgcgcgaccacgtacgtaaaaccgtccccctgattcaggcggcgctcaaggaagccgggctgacggcaaaggatatcgatgccgttgcgtatacggcgggccccggcctggtgggcgcgctgctggtcggcgcaacggttggccgttcgctggcattcgcctggaacgtgccggcgatcccggtacaccatatggaagggcacctgctggcgccgatgctggaagataatccgccgcagtatccttttgtcgcgctgctggtttccggcggccatacccagctgatcagcgtcaccggcattggccagtatgaactgctgggcgaatcgattgacgacgcggcgggagaagccttcgataagacagcgaaactgctggggctggattatcccggcggcccgatgctgtcgaagatggcctcccagggcaccgaagggcgctttgtcttcccgcgcccgatgaccgaccgccccgggctggattttagcttttctggcctcaagacctttgccgcgaacaccattcgcagcaacggcgatgacgatcaaacccgcgccgatatcgcccgcgctttcgaagatgcggtcgtggatacgctgatgattaagtgccgccgcgcgctggatcaaaccggttttaaacggctggtgatggctggcggcgtcagcgctaaccgtacgctgcgcgcgaagctggcggaaatgatgaaaaagcgcggcggggaagtcttctatgcccgtcctgaattctgtaccgataacggtgcgatgattgcctatgccggtatggttcgtctgcgttccggggcaaaagcggagctgggcgtcaccgttcgtccgcgctggccgctggctgaacttccggcggcataa

SEQ ID NO: 191699 - DNA, 216 bp, Klebsiella oxytoca; identical to SEQ ID NO: 172819

SEQ ID NO: 191700 - DNA, 1743 bp, Klebsiella oxytoca; identical to SEQ ID NO: 191489

SEQ ID NO: 191701 - DNA, 1845 bp, Klebsiella oxytoca; identical to SEQ ID NO: 191490

SEQ ID NO: 191702 - DNA, 645 bp, Klebsiella oxytoca; identical to SEQ ID NO: 191491

SEQ ID NO: 191703 - DNA, 1128 bp, Klebsiella oxytoca; identical to SEQ ID NO: 191492

SEQ ID NO: 191704 - DNA, 507 bp, Klebsiella oxytoca; identical to SEQ ID NO: 172814

SEQ ID NO: 191705 - DNA, 300 bp, Klebsiella oxytoca; identical to SEQ ID NO: 191494

SEQ ID NO: 191706 - DNA, 426 bp, Klebsiella oxytoca; identical to SEQ ID NO: 172811

SEQ ID NO: 191707 - DNA, 1164 bp, Klebsiella oxytoca; identical to SEQ ID NO: 191496

SEQ ID NO: 191708 - DNA, 1914 bp, Klebsiella oxytoca; identical to SEQ ID NO: 191497

SEQ ID NO: 191709 - DNA, 1098 bp, Klebsiella oxytoca; identical to SEQ ID NO: 191498

SEQ ID NO: 191710 - DNA, 1071 bp, Klebsiella oxytoca; identical to SEQ ID NO: 191499

SEQ ID NO: 191711 - DNA, 633 bp, Klebsiella oxytoca; identical to SEQ ID NO: 191500

SEQ ID NO: 191712 - DNA, 1422 bp, Klebsiella oxytoca; identical to SEQ ID NO: 191501

SEQ ID NO: 191713 - DNA, 1650 bp, Klebsiella oxytoca
atgtctcaattcttttttaatcagcgcgccaacctcgtcaatgaagtgattgaaggaaccattatcgccagcccgtggaataacctggcgcggctggaaagcgatcccgccattcgcgtggtggtgcgtcgcgatctcgacaaaaacaacgtggcggtgatctccggcggcggttccggtcacgaaccggcccacgcgggctttgtcggtaaaggcatgctgaccgccgccgtctgcggcgatctttttgcctcgccgagcgtcgatgcggtgctgaccgccatccaggccgtgaccggcgatgccggatgcctgctgatcgtcaagaactacaccggcgatcgtctgaacttcggcctcgccgcggagaaagcgcgtcgcatgggctataacgtcgaaatgctgatcgtcggcgatgatatttcgctgccggataacaaacacccgcgcggtattgccgggacgattctggtgcataaagtggccggctacttcgccgaacgcggccacaatctggcgaccgtgctgcgcgaagcgcagtatgccgccagacacaccttcagcctcggtctggccctttccagctgtcacctgccgcaggatgcggaaacgactccgcgccatcatccggatcaggccgaactggggatggggatccacggcgaaccgggcgcttcggttatcgccacgcagaacagtgcggaaatcgttacgctgatggtagagaagctcagcgccgccctgccggaaaccggccgcctggcggtgatgatcaataatctcggcggcgtatcgattgccgaaatggcaattttgacccgcgagctggccaataccccgctgcatcagcgaattgactggctgataggcccggcgtcgctggtcaccgcgctggatatgaaaggcttttccctcaccgccatcgtgctggaagagagcattgagaaagcgctgctctccgcggtcgaaaccgccggctggcagacgccagtgcagccgcgcgcaatcagcgtgatgccctcgtcgctgcgcagtacgcgggtggagtttacgccctcggagaatagcgaggttgcaggctacgtagagcgggtgaccggtacgctatccgatctggaagcggacctcaatgcgctggatgcgaaggttggcgacggcgatactggctccacctttgccgctggcgcacgcgatatcgccgacttacttcagcgccgtcagctgccgctggctaacctcgccacgctgttcgccctgattggcgagcgtctgacggttgtgatgggcggttccagcggcgtgctgatgtcgattttctttaccgccgccgggcagaagctggaacagggggcaagcgtcgccgaagcgctaaacgccggtctggcacagatgaagttttacggcggtgccgacgaaggcgaccgaaccatgattgacgccctgcaaccggcgctggcggcgctgctggccgaaccggaaaatctgcaggccgctttcgcggcggcgcaggcgggcgcggatcgtacgcttcacgccagcaaagcaggtgcaggacgcgcatcgtacctgaacagcgatagtctgcgcggcaatatggaccccggagcccacgcggtggccatggtgtttaaagcgctggcgcagaaatag

SEQ ID NO: 191714 - DNA, 774 bp, Klebsiella oxytoca; identical to SEQ ID NO: 191502

SEQ ID NO: 191715 - DNA, 546 bp, Klebsiella oxytoca; identical to SEQ ID NO: 191503

SEQ ID NO: 191716 - DNA, 1380 bp, Klebsiella oxytoca; identical to SEQ ID NO: 191504

SEQ ID NO: 191717 - DNA, 333 bp, Klebsiella oxytoca; identical to SEQ ID NO: 172800

SEQ ID NO: 191718 - DNA, 984 bp, Klebsiella oxytoca; identical to SEQ ID NO: 191506

SEQ ID NO: 191719 - DNA, 3093 bp, Klebsiella oxytoca
atgaatcgctgggaaaatcttcaactcactcatgaaaaccggctgcctccgcgcgcctatttcttctcttacgattcgcgggcccaggcgcaaaccttcgcccgtgaaaccagcagccgctttttgtcccttagcggacagtggaaattctgcttctttaacaacccgctgcgggtgccggaagcgttcacctcgcaatacatgagcgactgggggccgattaccgtaccgggaatgtggcagatggaaggacacggccagctacagtacaccgacgaaggctttcccttcccgattgacgttccctacgtgccgaccgacaaccctaccggcgcctatcagcgcatctttaccctcagcgagggctggcaggaccagcagaccctgattaaatttgatggcgtcgagacctattttgaaatttacgttaacggtcagtacatcggtttcagcaaaggcagccgcctgacggcggagtttgatattagtcacgcggtaaaaaacggcgacaacctgctttgcgtgcgcgtcatgcagtgggcggactccacctatatagaagatcaggatatgtggtggtcggcgggtatcttccgtgacgtgtatctggtgggcaaaaacccgcttcacgtccaggacttcactctgcgcaccgattttaacgatgactacgtcgacgccaccctctcctgccagctggtgctggaaaatctcgccgcgcagccgggcgcagccacactggaatacgcgctgttcgacggcgaaaaggcgctatatgaaggcgtaacgccgcgcctgagcatcagccagcagctgaacgtcaactttgcgatcgacgtgaaggcgccgcagcagtggtcggcggaaaatccttatctctatcacctggtgatgacgctgaaaaacgccgccggagagattatcgaagttatcccgcagcgcgtcggttttcgcgatatcaaagtgcgcaacggcctgttctacatcaataaccgctacgtgatgctgcacggcgttaaccgccacgacaacgaccatctgaagggtcgcgccgtagggatggaccgcgttgagaaagatctgctgctgatgaagcagcacaatatcaactcggtacgcaccgcccactaccccaatgacccgcgtttctatgagatgtgcgacatttacggtctgttcgtgatggcggaaaccgatgtcgaatcccacggcttcgccaacgtcggcaatctgagcgccatcaccgatgatccggcatgggagcatatatacgtcgaacgaatcgtgcgccacattcacgcgcagaaaaaccatccgtcgatcattatctggtcgctgggtaacgagtccggctacggctgcaacattcgggcgatgtatcacgccgctaaagcgatcgacgatacccgtctggtgcattacgaagaggatcgcgacgcggaggtggtggatatcatctccaccatgtatacccgcgtgccgctgatgaatgaattcggggaatatccgcatgccaagccgcgaattatctgcgaatacgcccatgcgatgggcaacggtcccggcgggctgagcgaataccagaacgtgttctatcaacacgacagtattcagggccactacgtctgggagtggtgcgatcacgggattcaggccaccgatgacagcggcgcggtttggtacaaattcggcggcgactacggggactatcctaataactacaacttctgtcttgacggtctgattttctccgaccagacgcctgggcccggcctcagagagtacaaacaggttatcgccccggtaaaagttcaggcaaccgacatcgcccgcggcgaactgcgcatcgataataagctctggttctcgacgctggatgactacaccctgcgcgtggaagttcgcgccgaaggggctacgcttgccagccagcagcttaaggtgcgcgatcttgcgccaaacagcggccgcgatatcaccattgacctgccagaactggacgatcgcgaaaccttcctcaacatcctggtgaccaaagactcgcgcacgccgtatagcgaggccaaccatccgatcgccgtttaccagttccagctaaaagaacagacggcaacgaaatcgccgctgatgaatgccagcgcaaccccgctacagatagttgatgaacgactgagctacagcatcaccggacataacttccgcgtggtcttctctaaagtcaacggcaaactgagcgaatggcaggtgaacggcgtagaccaggtgacccgtgagccgaagattaacttcttcaagccgatgattgataaccacaagcaggaatatgaggggctgtggcagcccagtcacctgcaaattatgcaggagcatctgcgtgaattcagcgccgaacagcgtggagacacggtgattatcaccacccgcagcattatcgctccgccggttttcgattttggcatgcgttgtacctatcgctggcagattaccccgcagggccatattaacgttgagcttgcgggggaacgttatggggactatccgcatatcgtgccgtgcatcggttttatgctgggcattaacggtcagtttgaacaggtgaattactacggtcgcggtcccggtgaaaactacgccgacagccagcagagcaacatcattgatgtctggcgcaccaccgtggacgacatgttcgtgaactacccgttcccgcagaacaacggcaaccgccagcacgtccgctgggccgcgtttaccgaccgtcacggcagcggcctgatggtggtcccgcgcgatccgctcaacatcagcgcctggcactatacggcggagaatctgcacgccgcgcagcactgtaacgaactgcgtcgcagcgatgacatcaccctgaatatcgacgcccaactgctcggcctgggctctaactcctgggggagcgaggtgctggatagctggcgggtgtggctcaaaccgttcaactatggctttacgctgctgccgctggaaggcgggagcgcttcctcgcagacgctggcgaatcatagctttggcgccggtttcttttcctccgattcacacagcgaggctgaaaaatga

SEQ ID NO: 191720 - DNA, 450 bp, Klebsiella oxytoca; identical to SEQ ID NO: 172797

SEQ ID NO: 191721 - DNA, 1434 bp, Klebsiella oxytoca; identical to SEQ ID NO: 191509

SEQ ID NO: 191722 - DNA, 1434 bp, Klebsiella oxytoca; identical to SEQ ID NO: 191510

SEQ ID NO: 191723 - DNA, 1062 bp, Klebsiella oxytoca; identical to SEQ ID NO: 191511

SEQ ID NO: 191724 - DNA, 2352 bp, Klebsiella oxytoca; identical to SEQ ID NO: 172793

SEQ ID NO: 191725 - DNA, 297 bp, Klebsiella oxytoca; identical to SEQ ID NO: 172792

SEQ ID NO: 191726 - DNA, 888 bp, Klebsiella oxytoca; identical to SEQ ID NO: 172791

SEQ ID NO: 191727 - DNA, 1014 bp, Klebsiella oxytoca; identical to SEQ ID NO: 191515

SEQ ID NO: 191728 - DNA, 978 bp, Klebsiella oxytoca; identical to SEQ ID NO: 191516

SEQ ID NO: 191729 - DNA, 1035 bp, Klebsiella oxytoca; identical to SEQ ID NO: 191517

SEQ ID NO: 191730 - DNA, 1488 bp, Klebsiella oxytoca; identical to SEQ ID NO: 191518

SEQ ID NO: 191731 - DNA, 972 bp, Klebsiella oxytoca; identical to SEQ ID NO: 172786

SEQ ID NO: 191732 - DNA, 1593 bp, Klebsiella oxytoca
atgagttacctgttagcgttagatgccgggaccggcagcgttcgggcggtcgtattcgatctccagggccgtcagattgcggtcggtcaggccgaatggaagcacctgagcgttgagaatgtccccggctcaatggagttcgatctcagcgtcaactggcagctggcctgtcagtgtatccgccaggcgctggccgccgcccatctctctgcggcggatattcagtccgtggcctgctgctcgatgcgtgaaggcatcgtgctttacgaccgcaacggcgaggccatctgggcctgcgccaacgttgacgctcgcgccagccgcgaggtggcggagctcaaagagatccacgacgaccgttttgaatccgaagtgtacagcgtgtcggggcagaccctggcgctgagcgccatgccacgcctgctttggctggcccaccatcgcccggatatctaccgcaaagcggcgaccatcaccatgatcagcgactggctggcggcgaagctctccggcgagctggcggtcgacccttctaacgccggaaccaccggcatgctcgacctgttcagccgcgactggcgcccggcgctgctggatatggccggactgcgggccgatattctctcgccggtcaaggagaccggcagcgtactgggggcggtgaccgacgcggcggcggcgcaaagcgggctgcgcgcaggcacgccggtggtgatgggcggcggcgacgtccagctcggctgcctgggtctcggcgtggtgcgcgccgggcagacggcggtgctcggcggcactttctggcagcaggtggttaacctgccggaagtccgtactgacccggagatgaatattcgcgttaacccgcacgtcatactcggcatggcgcaggcggagtccatcagcttttttaccggcctgaccatgcgctggttccgtgatgctttctgcgcagaagagaagctcattgccgagcgcctcggcgttgacgcctacagcctgctcgaagagatggccagccgcgtaccggcgggttcccacggggtgatgccgattttctctgacgccatgcactttaagcagtggtaccacgctgcgccatcgtttattaacctctccatcgacccggaaaaatgcaataaggccacgcttttccgtgcgctggaagagaacgcggcaattgtctccgcctgcaacctggcgcagatttcgcagttttccggcgtgcagtttgatagcctggtctttgccggcggcggtgcaaaaggggcgctgtggagccagatcctcagcgatgtcaccggtctgccggtgcgggtgccggaggtccgcgaagcgacggcgctcggctgcgcgatcgccgccggcaccggcgccgggctatacgccgatatggcgacaacgggtgagaaactggtgagctggtaccgggaatttacgcctaatcccgcgcatcgggagctgtatcaggagatgatgaccaaatggcagtcggtgtacgccgagcagctcggtctggtggacagcggattgacgacctccatgtggcaggcgccgggtctggcgcgccgcacgcgcgttgccccctcaccctaa

SEQ ID NO: 191733 - DNA, 2022 bp, Klebsiella oxytoca; identical to SEQ ID NO: 191521

SEQ ID NO: 191734 - DNA, 828 bp, Klebsiella oxytoca; identical to SEQ ID NO: 191522

SEQ ID NO: 191735 - DNA, 1131 bp, Klebsiella oxytoca; identical to SEQ ID NO: 191523

SEQ ID NO: 191736 - DNA, 867 bp, Klebsiella oxytoca
atgagtgacgaatctcccgttttcgaaaagatccccgtgggcgccggcgagctatttaccttacgggtagataacataaatgatttcaatggcataaacgtagtcccccattttcatatgatggacgaactgatgtggttcagagagtcggcaggcagctattcgattggtgatgagaaatttacgataaaaaacaataccctggttttcgtccctgccttattgatccatgaaatgacgctgccggccgctgccagccacaagcgttatcttatgcaattcgaaaaagagtggcttgagggatatgacctgtcgctacccgccgcgcactgcggcgcagtcgcttacctttccggcgaggaagccgagcgtctggagctgctcctgagctggtgcggcgagttcagcgactttgccgattcgctgttccgttccctgatgcagagcgtgctgctgcatgcctttaacagcctgaaagattccgtccccattaccgaacggaccaaccaccgctacctcagcgagctgattgaacttctgcaatccattgatgaaaatgaaaattttgagatgacgaccgaagaagccgcccgccgctgccggtggtcgaaatcctggttttcccgcacctttaaatccgccttcggtatcagcttcaaaaaatttatgctgctgcgaaaactcaatatcgctatcaacctgctgaccaataccgacctgaagatcagcgatatctcgcaaagcgccggcttcaccgacagcgcctacttctgcctcaagtttaaggagatgatgaacgacaccccgctggccttccgtcataaagtcagaagcaccgatgccgtaggcagccgggcggagaaataa

SEQ ID NO: 191737 - DNA, 1644 bp, Klebsiella oxytoca
atgattcagaatcctgtttttaaaggttttaatccggaccccagtatctgtcggcgcggcgatgattattatgtagctgtctcttcctttgaatggtttcccggcttgccgatttaccattcgagagatctcaaacattggcaattactcacccacgttctcaccgatgatacgaatccggatttaaaaaagctgccctccgccaaaggtatttgggcgccaagcctgacctggtgtgaagaggaaaagctgttctacgttatttatggcgtaatgaattccatgaattcgcgttattttgatgtagataactatcttattaccgccagtgaaatcagcggcccgtggagtgagccggtttatcttcactcggccgggttcgatgcttctatcctgcacgacagcgacggtaaaaaatggatcgtttcactggagtgggaaacccgcgaaggttacgaaaaaccgggcgccatttgcctggtggagtattcaccgcaaaggcaaagcgttgtcggctatccgcagcggatctggcgcggcgggaccgatcgcggttgtatagaagcaccgcatttgacgcgccgcggcgactattactatctgatggtcgctgaaggcggcaccggttacggccatgcggtcactatggcgcgcgcaacgcaggtcgctggcccctatgaaggcgatccgcaaaatcctatcgtcaccgcctggccggagaattttaacgagcgccacgatgcaggtcatctcaaaccacactacttcaatccgcaaacctatctgcaaaaggccgggcacggcagctacgtcgagaccccgacgggggaagtctggttaacccacctttgcagcagacccttccgccaggagttgcgctgcccgctaggccgcgagacggcgatacaaaagatggtatggagcgacgatggctggctgcgcatggcggccggggggaacctcgctcagcaccaggtggaagagtctaatctgccttctcagccgtttccggctaaaccagacagggatgattttgatgggcagacgctggataacgccttctatgcgccgcggatccgctttcagcgctttaccagccttgagcgtaaagcgggttaccttgccttacgcggtcaggagtcgctgagctcgctgaataaagtcagcctgctggcgaaaaagctcacctcggtatacgccaccatcaccacgaaaatggatttcagcccggagatttatcagcatagcgcgggcctggcgctttactacgacaatatgaactatctgtttttgcataaaaccagggatgaagcctccggcgcagcgcagctggccatcatttatatggacaacggtgagcgtcacgacgacccgcagaaaatctgccttacggagggggaaatctatctggcgatggcgattaatggccgggagatacagtgctcgtggtccgtggatggcgaaaaatacctcaacatcggcgcggtctacgacacctcgcttttttccgatgaatacagccgctatggcgagtttaccggcgcgtttgtcggcatggcctgcgtggatagcatgctgcatcgtaaagaggcgctgtttgacttctttagctaccgggcggtcgaagacgcgataatcgagtaa

SEQ ID NO: 191738 - DNA, 504 bp, Klebsiella oxytoca; identical to SEQ ID NO: 191524

SEQ ID NO: 191739 - DNA, 990 bp, Klebsiella oxytoca; identical to SEQ ID NO: 191525

SEQ ID NO: 191740 - DNA, 969 bp, Klebsiella oxytoca; identical to SEQ ID NO: 191526

SEQ ID NO: 191741 - DNA, 1248 bp, Klebsiella oxytoca; identical to SEQ ID NO: 191527

SEQ ID NO: 191742 - DNA, 555 bp, Klebsiella oxytoca; identical to SEQ ID NO: 191528

SEQ ID NO: 191743 - DNA, 1488 bp, Klebsiella oxytoca; identical to SEQ ID NO: 191529

SEQ ID NO: 191744 - DNA, 1413 bp, Klebsiella oxytoca; identical to SEQ ID NO: 191530

SEQ ID NO: 191745 - DNA, 1302 bp, Klebsiella oxytoca; identical to SEQ ID NO: 191531

SEQ ID NO: 191746 - DNA, 777 bp, Klebsiella oxytoca; identical to SEQ ID NO: 191532

SEQ ID NO: 191747 - DNA, 663 bp, Klebsiella oxytoca; identical to SEQ ID NO: 191533

SEQ ID NO: 191748 - DNA, 384 bp, Klebsiella oxytoca; identical to SEQ ID NO: 191534

SEQ ID NO: 191749 - DNA, 369 bp, Klebsiella oxytoca; identical to SEQ ID NO: 191535

SEQ ID NO: 191750 - DNA, 399 bp, Klebsiella oxytoca; identical to SEQ ID NO: 172765

SEQ ID NO: 191751 - DNA, 300 bp, Klebsiella oxytoca; identical to SEQ ID NO: 191538

SEQ ID NO: 191752 - DNA, 393 bp, Klebsiella oxytoca; identical to SEQ ID NO: 191539

SEQ ID NO: 191753 - DNA, 987 bp, Klebsiella oxytoca; identical to SEQ ID NO: 191540

SEQ ID NO: 191754 - DNA, 378 bp, Klebsiella oxytoca; identical to SEQ ID NO: 184901

SEQ ID NO: 191755 - DNA, 483 bp, Klebsiella oxytoca
atgacaggtcgattttgttatattggtgatttttcatatattaattgcttaagtaaacaaggtgtaaaacttggagaaagagtaacaattagagaatttgcatggttacaaataactagtgataccaataacctaggagaaggcattattatcggtaacgatacctacatcggaccaagatgcaatttaggggccgcagctctattaatcataggtgaaaaatgccagataggggctggtgtaagttttatagctgaaaaccatagttttagtggtagttcatctatatatgagcaaggtgtaacaagaaagggcatcagtgtagggaacgattgttggatcggaaataatgtcattattctggacggtgttaatattggtgatggtgtggtcgttggcgctggcgctgtagttacaaaagatattccggcgaattcagtagttgtaggtaatcctgccagaatattaaaagagaggcattga

SEQ ID NO: 191756 - DNA, 294 bp, Klebsiella oxytoca
atgacggtgaaagtggaatgggaaacgggtgtcggttattcaatggattttccaggatatggagatgacgctaaatatttagaatgggaaaaaaaaataaaagctcagaaccaggaacatagccggatagtcccagttcccgattataccgggcaaaaaacctgcggaataaaggttcactttttaccctgcgatcaaataaaagtcaccaccagctgctatgactacggcaacccaaattatccgattaaagatccgatcaaaatggaggaacccaaagtatgtccacaataa

SEQ ID NO: 191757 - DNA, 132 bp, Klebsiella oxytoca
atgctgtcagagaggaacagcggcgtacagctctcgacctgcggcgagcagagacgccgctgcgtgagggtgaacccggaagcgggacagttcggagaggactcgagctggatgatactggcggggaaatag

SEQ ID NO: 191758 - DNA, 459 bp, Klebsiella oxytoca
atgacaacatccaatcctgatatccagcccgccgtacagcacagcgcgcaggtcgcgattgccggcgccggcccggttggcctgacgatcgccaactacctcgggcagatgggcgtcagcgtggtgctgatcgagaagctcgagtcgctgatcgattatccccgcgccatcggtatcgacgatgaggcgctgcgggcgatgcaggccgtggggctggtagataatgtgctgccgcataccacgccgtggcacgcgatgcgctttctcacccccaaagggcgctgctttgccgatattcagccgatgaccgacgagtttggctggtcgcgccgtaacgcgtttattcaaccgcaggtcgatgccgtgctgtacgacggactcgccgctttccccacgtgcgctgcctgttttcccgcgaagttgaagcctttagccagaatagtgacggtgtcacgttaa

SEQ ID NO: 191759 - DNA, 1248 bp, Klebsiella oxytoca
atggcagcaaaactttttacatgccaattattcgaaagtaaagggctaaataaagcgatatatttttctggattaagttatgacctcatcattcatccatatgtttatggcgaacctctgacatccattcaacccatatactaccttgatgaactagaggctattgcaagattaagaattgaaccgccaaaaccaatctctgaaaaagaaattgagtatttaatagataactatttattcgaatactcactcttagatagcgattccagaatgtgctcaaaaataacaaagcctgctttttggcctttcgagtcaaacgacctctatcaatatcatgacaataaaaacactagagcactaacacttgatccacttaatgatgaaagtattgttagtttacaagatgcttcaggagaggaatggaatttcactgatttttgctttgcaaaaccattaattttcaatcatttagaaaattgcgccataaacatcaagaaactatataatgagaaaataaatgccatcattgctcctgactctcaccgagatggatatatgggaagattgagactaatagaaagtgaaaatgaagttttagactatactcaggctcttgatttagaatacaaaatatcattccatagaataaagagcattgatacatttgagatcgagtctgaaattatatcaggagatattatagacattcctgtccaaaaaataaccacaaataaaacttattcacctttattgctttcatattatttctctggactacgagaaagaaatccgttactgagcttcactgggtattataatgtcttagagtattatttggaagatgctgcaccattaataggactaacaactgctcgcacagaaaaagaaaatttaagacatgtcatgaatctaataactaatcataatgaactttatcaattcataatgaacttttcgcggcacctagttactaacataggacaagatatcatttcatcttcaggtgttaaaatcactggcgttagcgttcaagacgaaccaatattagtgactaacattagcgactggctctataaaatacgttgcgcagtagtacactcaaagaaaagtaggagaggacaaaccgaagctatctttgaaccatattcagatgaagccgataatatacaagcagccttgtgtgtaatcaaatggttatctcaaaaatgtattttaaaagataatgagttaacgaactctgtaccatag

SEQ ID NO: 191760 - DNA, 228 bp, Klebsiella oxytoca; identical to SEQ ID NO: 34889

SEQ ID NO: 191761 - DNA, 282 bp, Klebsiella oxytoca
atgggtattcgcatcgaagtcggcgacaaatgggttattaccagcgaccaatatcaattcatcctgaatgaaaagaaagtcgttaagtccggtaaaaaagctggtgaagaatggctcgacactatcggctattatccgaagattaaccagcttatttccggcctgatacacaatcagattcatggctcggatattactgccattgacgctatggcagtagaaattgagcgggtagggcaactatgcatagcagccattcaaggggctagcgttgatgcatag

SEQ ID NO: 191762 - DNA, 441 bp, Klebsiella oxytoca
gtggatagagagttaagcgagcacgttatgattgagcgggtcgagatgattgcgcgtctgacggctgaaggcgcttgtcaggaaagagaccgtgaaatcgcattaaatttaattgcggaaatagcaagaggcaacctaatgaaaaacaataatttttctgttgttttttccgcgccgcctgttgatgaaacatttgcaaaggagggcaaagttaaagtaaatatcacgttggataaataccaaaaaataggccagccggtaattgatgcttttcaatgcgaattgaccaggcgaatacagtctgttttcccgtcaacgcgcgttactgttaaaaagggatccatgaccggtgtcgagctgatggggtttgataaagattcagaccgcgaagcgctggatagcatccttcaggaagtgtgggaagatgagagctggcgttaa

SEQ ID NO: 191763 - DNA, 795 bp, Klebsiella oxytoca
atgcaaaatcgtaaaaatattaaaagatgtattttttgcgatgctagtgcaagtgacgtacgcattacacgtgaacatgtattaccaaaatggatgaaaaagcatatcccacacgtaaaagcatataactatatgtcaacttttaataaagaagagcctatagtaagaaataggccagggatgtcaccatttgacttaaccatatctgccgtttgtgaaaaatgcaataacggctggatgagtgaaaaaatagaagcacccactgcagatatattgaaaaaaataattttttcccatcagtttaatctagacaaagaagccctcagactcctttcattgtgggccgtaaaaacagcattcattcgtgctttggtagatagcggtgataaagttcttccaaagtcacattatcaaagcatttataaacttgaaatcccttcagatacaaaagttttattaggatttagaaatactccttacaaagagattattacaagggttcatcgcgcgacagatatgtatggtcattttttgatttgtggaatagaaatatattcaatggctttagttataacatcttgcaactcacagcaatttaaaggtgtatatgacgacatggttttaaataaggttttacctgattccacacgttgtatttggcctatttctggcggtgagatagaatggccgctgaatgcctcaatgcctctatctataaatgatacacttcaagcaatagtcgatgtatttcttccaatatttaatgagaataaaatccgccctactcctgtatag

SEQ ID NO: 191764 - DNA, 1077 bp, Klebsiella oxytoca
atggcaaattacttcacgttactgacagataaaggcaaagaattatttgcagcgtcggcaatatctggcgagccagtcggtattacctttatggcggtgggtgatggcgggggaatatctccgacacccagcgccgggcaaaccggactgatcaatgaacgttaccgggcaccattaaacaggctggttattgccgatcagtcagcaaatgttatccgggcagaaatgataatgctgccgcaggtaggcggattctggctacgtgaagctgccctctataacaacgagggacagtgtatagcgatagcctgcatcccgacatcatataagccgctgctgacggaaggcagcggacggctccaggcggtgaatatctggatcgccgtcaacgataccgcaaacgttgagctgaaagccgacccgtccgtgattctggcgactgaggaagaggtcattcgcgcaaaagatgaggcaaaggattatgccgataagattgctggcgagcttgatacggatcttcagcaggttatcgccgacgctattacagcggcaaagcgtgatttctgggaagacgataaccccgtcggtacaactcgattttttaatcagaacctgaacccgaatgagcgctggccgtggtcagaatgggtgtacaccggcgaaaataaaacgatccgggtagcaaaagccgatggctcaaacgtaggcgcaaccggcggcagcgataccgttacgctccagcaggctaacctgcccgccgtgcagattagcgtcagtggcgaaaccagcgagttagcgggccaagagctgacaaccaggcaggcaggacggcataaacacaaaggcggaatgctcgccccgggtgaggtctgggatgataattatgttgtcggttcggataacgacagccgccgcacccgaaattatacggatgaagcggaagaccacgaccatattgtcgattttcctccgcacaaacacacgaccagcggcaaaacagataacctcggtgaaggtaaatcgttcagcgttgttgaagcccacaccctgctgatgtgctggagccgcgtcgcctga

SEQ ID NO: 191765 - DNA, 468 bp, Klebsiella oxytoca
atgaagagttcaggacagttgttatcgctagctggcgtagttctcgcagtatattcattgttctttatggatgtgagtgttgatattggtgatggttcaagagttaataaccttggactaatggcgcaacagcaaaattatctattaattgcgattgtgctttttcttgccggtatttttatttccttctcaggtaaaaaacggtcattaccagaagttgacttcacaaaaatagaatcgtgctctgcaaatgattatatttctttgaaggatggtgaaccatgcctaaatatattggctgtagataatctcgctctaatgcttttgaaaaaacatggttcaagtagcgttaatgatatccttttgatgaacatgcctttaatcgataggttggaacgagatctccctgaatcattaaggaaagatttttcatccacccttaaaaggaggttaaaggataattgttaa

SEQ ID NO: 191766 - DNA, 366 bp, Klebsiella oxytoca
atgattgcgccaatattctctgtatgctcggcaagccaggctgtaaaggatttattgggtaccaaccccgtcaggctctatcccttcgggatgcaggacgacaatatcgtctatccctatgccgtgtggcaaaacattgatggctcccctgaaaattaccttaatcagcggcctgatgctgaccgttactctcttcagattgatatatatggcaatactgaagttgacgtgatggcggtggcccgtgcgctgcgtgatgccatcgagggaaaagcctatatcacccggtggggagagcaaagccgtaatgattccacgttgaaatatcactattcctttgatgttgacatgatcgcattaaggtaa

SEQ ID NO: 191767 - DNA, 1059 bp, Klebsiella oxytoca
atgaatgaacgtgaactttcccttatcagggctcttggggaagaattttccctggcgcttggcgaacttcgtcagtctttcgaaagaagcctcagtgactatcagcgggcaacgaacgaacaactgacccggctctctcttgaagttgcgaccctcaaggactctccggcgcctgactttacagcactgctggcggacgcagtggcatcattaccggctcccgatattccccagttgccggatatcggcgctatggtcagcgaggcagtggccgccatgcctgtaccgcaggacggtaaaagcgtgacgccggaagacgtgcggccgctgctgcaggagctagttaccgcggcagtgggcgaaatcccggccccgcgggacggcaaagactacgatcctgcggcgctgaaacaggcggtggacgatgccgtcagtgaagctgtagcggaaatccccctgccgcaggacggtaaaaacgtgacgccggaggacgtgcgtccgctgctgcaagagttagtcacggcggcagtgggggaaatcccggccccgcgggacggcaaagattacgatccggcggtgctgaaacaggcggtggacgatgcagtcgccgcgttgccgccggcgcaggacggacgtgatgctttgcaactggaaatacagcctttcattgatgaaggtaaaagttatccgcgcggatcttatgccactcacaacggaggcctctggcgtgcttacgagaaaacccatggtatgcgtggctgggaatgcatcgttgatggtgtatcagatgttgatatcagcatgaatggtcaacgcaatttcactgttacggtcaaccgagcaagtggaacgagcgataaaaaagctttcgatataccggctatggtgtaccgcggcgtattcaaatcgggcgatgagtacctgcctggcgatacggttacatggggtggttcactctggcactgtgacgaacagacgcaggataagccaggtgaaacaggctctaaaggctggactctggccgccaagcgcggacgggacgggagggataaagcgtga

SEQ ID NO: 191768 - DNA, 513 bp, Klebsiella oxytoca
atgttaacagcgcagaagcggaaattcgctgtcgcgctgatgtccggtatgtctcaaaaagatgcggcaataaaggcggggtattcggagaaatccgcacggtccaaggggtcgcagcttgcaaaagacccggaagtcatcgcgtttataagtcgaaaaaaacaggaagtcatcgagacagacgccgtacctacctacggtaaaaaggtttacaccccaccagtaaactcgccccaaaaaaaagaggggggagtagcgtcaccagtggtccctgcggttgtcggcaagtttgacgatcctcttcattttctaatggcagtgatgaatgactccactgaagacatcgacacccggaaggatgcggccaaagccatgctgccttacgttcaccccaaaaaaggggagacgggcaaaaaagaagcgcgcaacgctgcggcaaaagcagccgcaggcgtgagcaagttcggatccatggcaccgccaaagcttgtggtaaacaacaaaaaggggtaa

SEQ ID NO: 191769 - DNA, 294 bp, Klebsiella oxytoca
atgaaattccaggtcgcaaaggtctatcgctatggtcggtttatgggttacggaattgcagtagacggtaatcttattgatgggcaggtatcaacgacagttgataccgatgcgaaaggcattcccttaataactgcagtttttaatatgaataacgagcatgccgaaaaccaaatcaccatccgcttagacgacgaagtagattcacaaaaggttgatttgatcaaaaaggctgtagctgaagccgccgcttgcaactaccgaacggtggttaactcagttatcaaggggtga

SEQ ID NO: 191770 - DNA, 201 bp, Klebsiella oxytoca
atgacaagcagagaaattgatttggagcaggctcttattgcagtaattggagcctatcgaaatgaaggtggtaatgtcgagaagctaaaacttgatgcccaaggtttgatcctcgggcacagtgagtatcgtatagtagaacatccaaacgtcacccaggcctgcactgaaatagaaaacgcagtgaactttaaaaagtaa

SEQ ID NO: 191771 - DNA, 231 bp, Klebsiella oxytoca
gtgaacgctgagaatcttagtgcagcttgttatctctataacgagataaaagaactacagcgcctcaaaagtattatcgaaagcggtgccgggcttggtgtaacaatccaatcagcctaccaagataatgcttttttggatgctgtacgtccacatgcggtggctgagcttgatcgtcgtatcgatgaaaagagagccacactgattaaattaggcgtttctttttcttag

SEQ ID NO: 191772 - DNA, 252 bp, Klebsiella oxytoca
atgagcagaaattacttcaggcgaccgatagctgagcacatctcaaacattcgctcagagctggcaaaagtaccagcagaaaagcgtcttcacgtcgtagctgaggcgctgtacgacatgaacccgacaggagtcgatgaggttcttagagcttcctgtggctgctatgagtgggatatcagcatcgactaccgaaacgccgacgtccgttacgcaaagaaaaacgaccaggaggcacagcatgacaactga

SEQ ID NO: 191773 - DNA, 906 bp, Klebsiella oxytoca
gtggccattaacgcctggtatgctccgttctacgatcttatccaggccgcgctggcaacgccgcacaaggtcagcattaaccagttctatcatgaaattggcatcttcctcggcattgcgctaatcgcggtggtgatcggcgtgatgaacaacttcttcgtcagccactacgtcttccgctggcgtaccgcgatgaacgaacactatatggcgcactggcagcatttgcgccatatcgaaggcgccgcgcagcgcgtgcaggaagataccatgcgctttgcttccacgctggagagcatgggcgtcagcttccttaacgcggtgatgacccttatcgccttcctgccggtgctggtaacgctctccgcgcacgtcccggatttaccgattgtcggtcatctgccttatggcctggtgattgccgccatcgtctggtcgttaatgggtaccggcctgctggcggtcgttgggatcaagctgcccggcctggagttcaaaaaccagcgcgttgaggccgcctatcgtaaagagctggtttacggcgaagatgacgctaaccgcgcgacgccgccgacggtgcgtgaactctttggcgccgtgcgccgcaactatttccgcctctatttccactatatgtatttcaatatcgcccgtattctttatctgcaggtggataacgttttcggtttgttcctgctgtttccgtcgattgttgccggtacgattacgctgggcctgatgactcagataaccaacgtctttggccaggttcgcggttcgttccagtacctgatcagctcatggactacactggttgagctgatgtctatctacaaacgtctgcgcagcttcgagcgcgagctggatggcaaagagctgcagaccgtgacgcaaacattaagttaa

SEQ ID NO: 191774 - DNA, 1389 bp, Klebsiella oxytoca
atgaaaatatctctctacgtccttattcccttttttactttagtctctaccctggttcagggacactgtctgtccgcaagtgtgttgcaagataatatggatgttactttggcagcgcagatttcatatgtaaataaagaaccgtcaatctggaaaattgatggtcgcaatccgtacgtggccgacaatgtttataatgatattgcgttaggcataaaaggtcagtgcgatctagtggataataatctcaatatggatttttcattttattctttaggttattatccgattcgcagtcccggagtctttgaaaaagataaaaatcgtgcaaggataatgatagatcgactgcgttttacctatgctttatctgatacaacacgcctggaaggagggaagctgagaccttcaaaaggggcctttttcttaagatcccccgctacattgctgacaaattattattccggttttaaaacaaaccgaatatatgggccagcaatggaatcagcttatagcgaatcattttgggggggcacattatctaaagagtatcaggattataattttttacttacgctagctcccagattgagcagtatcgataagtactatgaatcatcaggcaactggtctgcagcacaacgctcaaatagtgaagagcgttacctattaacttataatgattaccgactagctagtcatcgcctgtccgctaatttactattaggcgataatccggcgttttcattatcagaactatataattatacatcacagtttttaattaatgctgagttttcctggcataaaggccagcagtggcgtcacttctcaaatgataaaaaagaggccgtactggctggctcatttccatcctcactctattctgtggaggataaacaaggcgttgagtttgcgcttggcgggcagtatacaactgatagctttagcgtattcggcttagaatactattttcagagtgagggatattcgaaaaaggcctggcaggagcagattgatttcattcgcttgatgggatacaggactggctacgattttttagaccgggcgtttgatagctataagtatcttatggcctcagagattggtaacacttcaaataaaggcatgctgttatccaaacattactttaatacctattttagtctgcgtaataatgaccagtccaccctgcaaccctatgcaatgataaatatagcggatggcagcgtattatttggggcccattttattaaacccttgcaaggtaagtgggcgccgtttgagttatatgccggcgcatacagctccctgggaggttctgaatcagagtttgcgctatttggtgaaacactaagcatttatgtcggttttaaatactatttataa

SEQ ID NO: 191775 - DNA, 345 bp, Klebsiella oxytoca
atgatccctgactatttaacatttactcgttatcaggataaacgagtgattatttatctttatcttttaactatgtttttacttttccttttctggaaaaacaatggttataacttactgccaagtaatgtattgagcctgagcgttatcctggcattaattgtcttttcttttatttacgagctgaaaaactattggggttataaatgtgtcatgaagcatatagatttttcctgttttcaggggaaagctatatcctcgtatgaggcgtttttgtggcatccggcagtggttaccttctcatactttgcgatcttttatcttctcattggctttgttgaataa

SEQ ID NO: 191776 - DNA, 537 bp, Klebsiella oxytoca
atgagcaacaaagctaagctcagcgctgcgatgctggcgctcattgcagcaggtgcatcagcgccggtaataatggaccagtttctgacggagaaagaagggagcagcctcaccgcctataaagacggttctggaatctggaccatttgccgcggcgccacgcgcgtggacggtaagcctgtaattcagggtatgcggctgacgcaggccaaatgcggccaggtaaacgctatcgagcgcgataaggcgctggcgtgggtacaaaagaacgttcatgttcctcttaccccgccgcaggccgtaggcattgcctcgttctgcccgtacaacatcgggccgggtaagtgcttcccctcgacgttctaccgcaagctgaacgccggcgaccgcaaaggggcatgcgcggagatccgccggtgggtattcgacggcggccgggattgccggttaaccaaaggacagaaaaacggctgttacgggcaggttgaccgccgcgatcaggaaagtgcgctgacgtgctgggggctgtacgaatga

SEQ ID NO: 191777 - DNA, 225 bp, Klebsiella oxytoca
atgaacaacctttcagacgtagcggcgggggcctcctacgtcacttcaataggcagcggcggttactggctgctgcaactcctcgataaagtcagcccgagccagtgggcggcgatcggcgttcttgccagtatcgttttcgggctgctgacctacctcaccaacctttatttcaaaatcaaagaagaccggcggaaggcgcgcgactatgagcaacaaagctaa

SEQ ID NO: 191778 - DNA, 906 bp, Klebsiella oxytoca
atggaattatatcactatacgacgctcgatggttttttaggaatcataaacgaaaatgccctctgggcaacaaacattaaacatttaaatgacagcagcgaactatctcatggaatacacatcttagagcaatcgattgatcatgtaaaaaataattcaaatataaaccacgagtggatagaggaaataaaaaaacaaataaaagtattagatggcacttccgcacatgatatttatgtcacttgttttctatcatcagtaaaacctaatggtgagatagtggatgggtctgatttactaagccaatggcgaggatacagtaaaagccaacaagggatatgcattgtttttgaacatgaccgcttaattaactttttatcctcacaacaaaaccaatatattaaagaaggtgagttctataatcgtcagtttgacatatattacggcccagtccaatacatcaatcatgattccgcaattaatgcagcagagtatttagttagagagaaagagtcatacctatccaatattgatatatttttaagaaacgatctggcaaggcaagggataaccagaacggaattatataatataacaccattaattaaggatgaaggttttaaagaagaaaatgaatacagagtaatttaccacaccataacaaatagaacactggtaagatacagaagcaatggggactacttaattccatacatttcaattggtaacaaaccagaactaaatgataacacaatgattacaaacatactcataccgataaagagaatagtaatcggaccgcaccaatactctactttgaacgcgcacaccataaaaagcatgatagaagaaagatgtataatgcacacacccatcgaaatatcaaaaataccatacagaggttaa

SEQ ID NO: 191779 - DNA, 276 bp, Klebsiella oxytoca
atgtcatttactaaaaatattgaattaacctttaataaaacagccgcgaacgggatggcgctgccttctgagacacagacaatcgaaactcattttgtggtgcgaaatgtcattatctctgatgcggagggtatttcacaggcagacctgttcagcagttttgatggggtatcctggcagttttacggctcgtatgagtttgcacccgattacacgtccggtatcggtatgttggaacaggcagaaacacagatccagacactgatggacgcatag

SEQ ID NO: 191780 - DNA, 681 bp, Klebsiella oxytoca
atgacacctgaaatcatccttgcacgcaccggcattgacgttacccgcgttgaacagggcgatgaagcctggcaccgcttgcgccttggcgtcataaccgcctcagaagttcacaacgtcatttcaaaaccgagatctggcacaaagtggactgacatgaaaatgtcctatttccactcgctactcgcagaggtttgcaccggcgcagcgccggaagttaacgccaaggctctggcgtgggggaaacagtacgaggacgacgctcgcaccctgtttgagttcaccactgacgtgcaggtcgccgagtcgccgattctgttccgtgacgaaggtatgcgcactgcctgctcaccagacggcctgtgcagtgatggtcgcggccttgagctgaaatgccctttcacctctcgcgacttcatgaagttccggcttggcggcttcgaggctatcaaatccgcctacatggcccaggtgcaattcagcatgtgggtaaccgggaaggacgcctggtatttcgcgaattatgaccctcgcatgaagcgagaaggcattcatcacgtggttgttgagcgcgacgacaaatacatgtccgacttcaacgaaatggtgccggagttcatcagcaagatggacgaatcgctggcggagatcggctttaccttcggggagcagtggaaatga

SEQ ID NO: 191781 - DNA, 969 bp, Klebsiella oxytoca
atgacagacaagaaaagcagtgaaggtaaggctaaaggcggtttggcccgcgccaaatcattaacaaaagagcagcgcgccgatatagcaaagaaggccgctgctgcaaggtggaaatggaagccattcaaagccactcataaaggtaactttttggatgagtttggcattgatacggaatgctatgtcctggatgatgaggcaaaaacagtagttgtaaccaagaagggtctggctcaattacttggcattggggaggcgggaaaaacgattgatgagcttttaaagacccaatacatgagcgaattcagtgatcgtgaattgcgggcaaaaatagataatccacttatatttcaatatagtgggcagtcgaaaaacataaataatgcccatggatttgacattacagtaatagttgatattgggagggcccttattgatgcaagaaacgctggcgcgctcccctcctccagattgccggctgccgatgccgcgcaaaggcttattaacgcctcagcgaaatcaggaataaaaggagttgcctacgctctggctggctacaggcctgaggtgcaggaggtaattgatgccttcaaggcgtttgtgcgagaagaggcaaggcaatacgaaaaagagtttcctgatgaattgtatgaagaatggtacagactctacggattgaaccgcccagaaaaagggagacccattaggtttgggcagttaactaatatgcaaatctatgtacctctagcaaaaagcaaaggcagaatacttgagcagattcgagccagtcgcgacgagaacgggaaacaatctgataagttgcacttatttctctccgaaataggggttaaggccctcaggcaacatattggtaagctgcttggcgtcgcggcgatgagtgacaacaaagaagaatacgaggctggaatagaaaaggtcttcggaaaaatgaaacctgaactatga

SEQ ID NO: 191782 - DNA, 162 bp, Klebsiella oxytoca
atgtgggaaaggcttaatctcttcagccttaatttttccatcaggcagggtgttaacgaaaatcttccgtcccacccggatagctttactaattgcggtctggtgaacgccgatggcatcagcagctttcgcctgtccaacttcgtcaacgtattcagctaa

SEQ ID NO: 191783 - DNA, 333 bp, Klebsiella oxytoca
atggctgagaacgctggcggtatttattacgacattgaaatggatgtgcgcgggctacttaccgctcagcagcgcgttaaccagcgccttgatctgatggaacggggatttgataaaacatcacgctctattgacaccactgagcgctctatgtcgagcttgtcccgtgttgcggttgcactgacagcagctctttctgtccagcaggtggctgaatatgctgacgcatgggccacggttaataacaaattatccaactctcttcggccatcagagcagttagcagacgtaacccagcgagtttttgatgttactcaggctaccagaatttga

SEQ ID NO: 191784 - DNA, 240 bp, Klebsiella oxytoca
atgctcagacagtcagacatcaacaacgcgtttcgtgaatcgattcttcgcaactcgaagggctaccagtacctgcacaccagggatttcgtatcttcgctgcagcggcgtggcatccacttctcagagcccgaggcaaatcgctggatagatcgctatcaaaattgctttgctgacaagactcctgaccatagcgaaaacaggctttggatactacgaaacatggggagggtcatgtaa

SEQ ID NO: 191785 - DNA, 318 bp, Klebsiella oxytoca
atgggctttccatcgccagctacagattatgtagagagcaccctgacagtgagctcactatgcaatatcggagctaactcgcgagtcatcagcactgacagcggctttgctgttcttgatttgtctctgaaagctaagcaggggagtacagttctcattcgtcacgcagggttcatggagtttgcgaaaatattaggcagggcatttatcacgatggagggagaagccattgaaggggaagcgctggatgacgtggaagtgatcggagtcgtcacgcatacgattcacaatgtgatgcaggatagcagtcctgtgtga

SEQ ID NO: 191786 - DNA, 168 bp, Klebsiella oxytoca
atgccctggcccccgctgaaatcggcgaaccggaggaccgaagacaagggctggccgccagggatggcggccagaggcgaatcgagacaggacaaaattgcctggagcaattttgaacagcgcttgcgctggccccgtaggggcgagtcccagggatgggacgagtaa

SEQ ID NO: 191787 - DNA, 852 bp, Klebsiella oxytoca
atggaaaactcaaacaacagtgaaccgttagtttctgtgtacattcccacgcacaatcgagctaccttgttaaaaaaagcagtatcaagcatattttttcagtcttatagaaatatcgaaatattaatttgcgatgacggatcaacagataatacaaaaagcactgttgatgatcttaaagcatcatcaccattccccattatttacatcaaaaatgaatcgcccatgggtgcttgtaacgccagaaacagatgtatttcagccgccagtggcgaatatataacaggcctagatgatgacgatcagttttctaaagatagaatttctatttttattcatgaggcttgtattaacggccgagatataatatctgcaaatcacgaattttcagatggaaaaaccttaaagaaaggtccagcctactcaggcgaaataacttttgatgacatgaaatataaaaaccacattggtaatcaaattttcaccaaaacaaagtatatcagagagattggaggttttgatgaagatcttcctgcatggcaggattacgacgcatggttccggttactaaaaaaacatggtaattcatttagggtttctgcttcaacatatattgttaatgtagatcatggaggaaatagaatatctaccagcagtaaggcatataaggggcatcttatgtttctggaaaaacatgctttagaactatctgaaaatcaggttaaaagcctgaggctaatggatttaataaatagagggcagaaagttcccttttcattcattgtaaaaaacatctcgaaaaaaaacattatttccatgataaaattatcactttcgagaattgtaccataa

SEQ ID NO: 191788 - DNA, 492 bp, Klebsiella oxytoca
atgaggaatatcactaaatttataggtgcatgtctatgtgccttatatctttctggttgcgcgtctacaaaatcggttgatgtggtttcaacagaaaaaatagatgcaccaaaagtaattgcgatctctggtagcaaaggtttgtgggttaaagaaattcaaaaacgattgcgtaataaaggatttacaattaaacgctctgttagccaacagaccattatagaaaaggagtcggttgataggacggctgtctatagggatgcttcagcgagatatgttttagttcttgatggctatgcccctagcgattcttttcagcgttgcgtaggcggtggtggttataaattcgattatataaatgctgagttagttgatttggcaaaaaatgagacaattttctcttattcaaactccggttattcagagggctgtccgttaggtgggacaatatttacagatattgaaaacctaatggttaactcttggcgataa

SEQ ID NO: 191789 - DNA, 2895 bp, Klebsiella oxytoca
atgcctatctacccgcaatccgatgttccgccgagtgtaatggacaatgctcttcaggcgccaactggttttgatgtatctctgcctgaaggaactaacccggagccacagcagcaacaaccgtctgtatgggatgccgcttttcgtcagaataacctgctcgccgggatgttccgcccggctaaacaatttgagccggcggaggggtataacccttattctgataaaaacgaactaaaggggtacgaacaatggggatccgcctttgcggattcacaatccccagaggaaacagcctggattaaaaaccggatagacgatgaaaacgaagaccgccgggtgctgtctgaagcaggtgccgaaggaactttagccagtatagccgccggggttatcgaccccgtcacagtcgcatcgatgtttatccccggtgcgcagggaagcctggctgctcgtattggttctcaggttgctattggcgccgccggtaccgcgcttagcgaggttgcgctcaataacgagcagtataccagaacagcaagggagagcgccgcacacatcacagccggcgcacttctcagcggtgtatttgctaccgctggcgcgatgatcaccccgtcggtaagaaacgcggccacccgtgaagtggcggaggcgctcgataatatgaacgcctcgccaacgattaacaacgcagccgatgccctggaggatactttaccgaacggtggcagcgtcggtgctatgcgtattcgcgaagctacactggaagatcttacgccagtgtctggcggcccgctcggaaagctggctaaaaaagccggtagctatctgacgccgatcacccgcctgatggaatccccatcaaaagaagcgcgccggacagcgctggagctggcagagaataacttcacgctggaaggcaacctgcgcggtattgaaacgccggttgcagctgagacgcgcgtacgtggctggcgccgcgaagaggcggccgtcgttactgcgaataagcaggcatacacccagtacaaagccgaaggcggtgatctgggttatacggccttccgtgaacaggttggcgaggcgctgcgcaacggcgacgtgcacgtcaatgcgaaagtgcaggaagcggcgcaggcaatgcgtacagtcattaaccgcgtgaagacagcacagcaggaactgggcttacttccgccggatgccgaactgaaagcgatgggacagaccagctatttcccacgcgtgtacaaggtagggaaaatcgttagcgagcgcgataaattccgcaacatgctggttgactggtggtcacgcggtgagaaaaccatgtcccgcgaagatgccgaaatcgccgccgataccactatcaaccgtatcgttggggccaaaattccgcaggagtttgccaacgtctttatggtgaaagcgccgggcagcactaaatcgcgtacgttgagcgttcccgatcgcctgatgaaagattatctggagagcgacgctaactacgtcctgcagcgtcatatccgcgaagcctcggcagaaatcgaattaacccgcacctttggcaacaagtcgctggattcgcagctcgccgccatccaggacgagtacgacgcgctaatgcgtttacgcccggcggaacaggaaaagctggcgaaagcacgtgaagccgacctgcgcgatattctggcgcttcgcgatcgcctcgtcggtacctacggtatgccggatgacccatcatcatttttcgtccgcgccggtgctttcctgcgtagcgccaactttgtaacgaaactcggcggcatgacggtatccgctatcccggatctggcgcgcggcatgatggttaacggcttcagcaacaccatgcgtggatatggcgcactgatcacccgctcgccggcttacctcgccaaccgggcggagcagaagaaaatggccgtggggcttgaaaccatactgcatacccgcgcgcgtacgatgggggatctggtcgatagctcttcacgtacgacagctgcagaagctggcatggagcgtattaccgatgtgttcggaaagctgaccatgatgggccactttgacgatatgaacaaatcggtgaatggcatgatcacgtccgacggtattctgtccggcgcgttccctgcgaagcgcctggcaaaactcggcatcaatgagaagatggccgaacgcatccagcgagaatttcagaagcacggcgaagttattcagggctggcatatcggcaatttcgaaaaatgggatgaccagtacgccgctggcctgctgcaatctgctgtgctgaaggatgtaaacaataccgttatcacgccggggattggtgatacgccgctatgggccagtaccccgttggggaaaaccgtattccagtttaagtcttttgccacggcgtcatataaccgcgcgacgctcggcggcctgcaggaaggtaccgcgcagttctattacggtaccgccttccagattggtctgggctctttgacctatgcgcttaagcaggcggctaacggtcgggaagttgatttgacgccgcagaagatggttctcgagggcatagaccgttctggtatcctcggcccgctgatggaatataacaacatggcggaaaaggcatccggagggatgatagggttagggccattactcggcaccggtacgcagtcccggtacgccagccgcggctttatcggttcggcactggggccaaccttcggcctactggatacggttaccgatgtgaccgccggcgtgctgaatggtgacgctggcgaccgtgtgctgcatagcgtgcgtacgttgttaccaggtaataatctgttctggatcgcaccactaattaaccaggtagacccagggatgcgttaa

SEQ ID NO: 191790 - DNA, 1989 bp, Klebsiella oxytoca
atgcgcgccaatctgattaaaaccaatttcaccgctggcgaaatttccccgcgtcttatggggcgcgttgatatcgatcgctatgcgaacggcgcgaagacgctggaaaatagcgtggtcgtagtgcagggcggggtaatgcgtcgtcccggttcgcagtatgtagcggccacaaagtacggtgataaaaaatcccgcctcattccgtacgtttttaaccgcacgcaggcgtacattctggaatttggcgacggctatctgcgaatttaccaggacggtaagcagctggtgaacgacgataacacgccgtatgaaatcgccagcccgtacacctctgacatgctgccatcggtaaattacgttcagggcgccgataccatgtttctggtgcatcaggccgttaaaccgtatcgcctgcagcgacgcgggcaaaccgattgggttctggaaccggcgccgtttatcgttgaacccttcgacgaagtacgcgacacaccgcaaaagtggtgcaagccatcagtgaaagaattcgtcggctcggaaatcacgctgacactgagcgatgatgaaccgccagaaagcggagacggaacgctcaccggtgatggctgggtgcctgaagatgtgggctcgtacgtaaggattaacagcggtctggtgctgatcaagagcgtaaccagtgcacaggttgctgtcggtaccattcgcaccgatttaagcgcaacgcaggcagcatcgccgggcgcctggactcgcgaggattctgtctggacggatgaatttggatacccgggtgcggtaacgctttaccagcagcggttggttctggctggttcgccgcagtatccgcaaactatctggtggagcgaatcgggcgtatacctctctttcgagctgggaaccgatgacgacgacgcgatcagctttacgctctcttctgaccagcttaacccgattgttcacctcgcgcagatgaatacgctaattgcgctgacgtacggcggcgagttcaccatcaccgccggcaatgatgcggcgattacgcctaccaatatttcggtaaaaaatcccagcccgtacggatgcaacgggatccgccctgtgcgcgtcggtaccgaaattatgttcgtccagcgttctggccgtaagctctacgctgtcgcctatgaccccgacagctatgtagcttactcggccaacgatatgactgtactggcggaacacatcacagaaggcggtgtgatcgatatggcgtatcagcagcaacctgatgcgtttacctggctggttcgcaatgatggcgtaatggtgacaatggctatcgaccgggtgcagaacgttgtcgcgtggtcacgacagatcaccagtggtgcgtttgagtccgtagcgactattccctcagcgactgacgatgtggtgtacgccattgtgcgccgtacggtcaacggccagaccgttcgctatgtcgaaatgttcagtaacgccctgtacaccgatgcagccgtgacgggctccagtgatactggcgcaacgacatggggcggactgtcgcacctcgaaggcgagaccgtcgatattgtcgctgatggctcagtgatgccgcaggcggtcgtttcatccggccaaatcacgctatcgcgcaaagcctacaaagtcgaaatcggcctgcactttgaaacaaccattaccacgctgacacctgaagtcgccacgtctgaaggcaccacgcagaacacccgtaagcgcacaagtgaagtcactatgcgtttcctcgaaaccactggcgcagagtgcaacggccaggtgatcccgttccgcacgttcgggccaaaaatcctcaaccagccggcgccgttgttcaccggcgatcactactggggaaaacttggctgggagcgcggagaagacacgctgactattcagcagcgccagccgctgccatttcatcttctcgccattgtcatcgtatttaccagcaacgggggctaa

SEQ ID NO: 191791 - DNA, 564 bp, Klebsiella oxytoca
atggctgacagtatttctatctgctctaacgcactgctggcgctcggtgctcacccgattaacagtttcgacgaaaacaccgatcacgcccgcctgtgctcaaacctttatcccaccgtacgcaataagctactgcgcgcgcatccgtggaactgcgttgtaaaacgtgtggttctctctcctgtcagtacggcaccggtattcggtttccgctttcagttcgcactacccggtgatcttcttcgcgttctgtccgttggggaaccttacgacgatatcccgtaccgcgtcgaaggaaaccggctgctggcgaacgtgcaggtactgaagctgcgttatgtgttccgcaacgaagacgaatccacctgggatgccgcgctcgttgatgtggcagaaatgatgatgcaggcaaagctggcctatgccgtcaccggctctaccagtctgcgcgacagtctcgcccaggaatcgctggtactgctgaagcaggcgaaggcggtggatggtcaggaagacccaccggaagagcttggcggctatccaacctacgaatcgaggttctga

SEQ ID NO: 191792 - DNA, 885 bp, Klebsiella oxytoca
atggacgaattagctgatgcggtaaagaaaactttaattcaaagaataaacactcctcttttcgggttcatagtcctctcatggctggggtttaactgggatagtttattgatagttttaatgggtagtggagaactacaagatagaatcattaaagtgaaaagtgaaccatgtattttttggtattctgtagttgctcctatccttttgggttttattattgccgttctttttccttatgctagtcatgctgtgagtttttttcaaagatgcgcgcaaaaaatcgctgatggtaacgatatcaaaagggcaaaatctgagagtgaggctcgtgaaatcattgctgaatacacagctaaagcagatagcgcactagcttatcaaacatctctgtttgcaaaaaggaatgcagaagaagaactcaaggttactaaagttacacatgatatcgagagcattaagaagtcatatgaagaagctgaagaacaatttaatattttaagttcgaagcttgagttggcggaagggaaacttaatgaaattgaaggtgaaataaattctaagtcggatgctcttaaagatttagtagatgagctaggcccttatgagaaaataaaaaataaaattgaggaggataaaaatagattaatggacactatggcaactattgataggtcagttagttccattttcagagaaatatcaaaatttggctatcgagtacattttgacgatgaccaaactcctgattatgacccgactaaagcgactaaaattaccgatgaagaagcacgctcagcgtttcgagttataggtcacgcggcaagagttattgatgaattcatgcctggcacaggttataggataaaagaacccagagggtaa

SEQ ID NO: 191793 - DNA, 849 bp, Klebsiella oxytoca
atgtggaagattaaacacttattcatgaacgccgagcagggcgccgaagcgccagcaggcagcacagggggtaatgatggtggcaatggcggtggtactgaaaatcagggcgctgataattctgctggcaatacacttctcagcaccggagcgggcgaaccgggcgcgaatgactggatacctgaaaaataccgcgttatgggcgaaggtggaaaactcgacattgaaggctctgcccgcaaactggcgcatgcttactcgcaccttgaaaagcgcatgggcagcggcgacgcgccgccgaaaacggcagatgattatgcacctgaggtgaaggccgagggcttcaactgggacgagttcaaggccgatccccgcatgcaatcattcatgaagtcggcgcacgccaagggcatcactaacgatcagatgggatttattatcagcgaatacgcgcagattgcgcctgaactggtcaacggcgccgcggcgctggattcggaggcggccaccacgcagctgcgcgaagtctggaagactgacgcggaatttaacaagaatatcggtctggctttccgcgcgttcaattccctgaccgatgaaggtgatcgcggccgcattgatgaaatcggcaataacccgatggtgatccgcatgctggcgaaaatcggtgcggaaatgcaggaagacgcgccagcgggcgcagacagcaacccggcagagcagcaatcaatccgcgacctgatgaagtccgaagcgtacatgaatccgaagcataccgaccatgaacgcgtatctgcacaggttaaagcgtactaccagaagcgttacggcgagcaaaccgtagtgtga

SEQ ID NO: 191794 - DNA, 234 bp, Klebsiella oxytoca
atggctactaaacaagtatcaccggcggactacaaacgcattttcgaggaaatgccgggcggcacgcaggtactggatgatttaacgcgccgattcgggcgtgcggcatacgttcccggcggcgccgagggcgaccgcgaaacctgttaccgggccggacaacgtgccgtgctcgatttcattctgatgcaaatcaaccgtgtagatggagtaaacgacgatgtggaagattaa

SEQ ID NO: 191795 - DNA, 1623 bp, Klebsiella oxytoca
atggatgaactcgccgtaaagctggttaagcgtgccgatacgctgaaagccaaccgacaggtgcacgaaagtgtctggcgggaatgctacgactacacctatccgctgcgcggcgcggggctatccgatgaggtgctggacgcacagagcgcgaaatcgaaggtggcacggctgcttgacggcacggccaccgacagcgcccgcatgctggcgtctgctctcatgtccggcatgaccccggcaaacgcgcagtggctgaacctcgacagcgaatcgctgccggatgatgccgccgcgtggttgtccacctgcgcaacgctggtatgggaaaacatccacgccgccaatttcgacgccgaaggctacgaggtgaatctcgatgtggtgtgtgctggctggtttgcgctgtacatcgacgaagaccgcgaagagggcggattctcgttccagcagtggccgctggcgcagtgctttgtcacttccacccgtcgcgacggcatcgtggacacgatttatcgccgctaccagctcaccgcagagcaggcgattaaagaattcggcgcggataaggtcagcaagaagattcgcgacgcagccgccaaaaagccggatgacaaattcgacttcctgcactgcattttcccgcgtgaaaactacgtggtgaatgcgcgcctggctaaaaacctgcgctttgcatcgtacaacgtggaggtgagcggcaagctcatcgtgcgcgaatccggctatcacgaattcccctgctgcgtaccgcgctggatgaaaatccccggcacgccgtacggtatcggcccggtatacgacgcgctgccggactgcaaagagctgaacgaaacgaagcgcatggagaaagccgcgcaggatctggctatcgccgggatgtggattgccgaagatgacggcgtactcaatccgcgcacggtcaaggtcggcccgcgccgcatcatcgtggcgaacagcgtagacagcatgaaaccgttgctcaccggcgccgatttcaacgtggcgtttactgcagaagaacgcctgcaggcgtcgatccgcaaaatcatgatggccgaccagctgcaaccgcaggacggcccggcaatgaccgctaccgaagtgcatgtgcgtgtcgcgctgatccgccagctgctcggcccggtctatggccgattccaggctgaatacctgcaaccactggtagaacgctgtttcggtctggcattccgcgccggtgtattcccgccagcgccggatagcctgcaaaacgccaatttcaacgtgcgctatatctcgccgcttgcccgcgcgcagcagctggaaaacgtcaccgctattgaacgccttggcgcgaacgtggccaatctggcgcaggtatcaccagaagtcaccgacctaatcgacaccgacgaagcgacccgcgtgatagcggatgcgctgggcgtaccggcgaaagtcattcgctcgtctgatgccgtcgagcaacttcgccagcagcgccagcaggcgcagcagcaacaggcagggcaagcgctaatgatgcaggcaggtagcgaagcggcaaccgccgcagggcagcaggcaggcgcagcactgggccaacgagtagcggggggttaa

SEQ ID NO: 191796 - DNA, 441 bp, Klebsiella oxytoca
atggctcgaccgaaaaaaatcgttgagacgccggggcaggaaaaaacggcgccggaagaaaaaacgctcgttacagaggggcaattaattactgctgaacagaacggcgcgcagcagcagggtaacggtagcgacgaacagaccgtgcagcagaacgttgcgacgttgctgggcgcgaccgcactggccgagcgcaacgccattcttggcacactcaatgcgcagggcgccaccatcgttgcccgcttcgaagagctgggctttaccgatctgaacgaccagagtcttaccgacaatctcgaattcctcaccctcgtacgtaaagccactgaggctaccaccggcggtacgggcgcaatggtgacgaacgaagagggcaagccgcagccggtacgcggcgcacccgtattaaccgaacacggctggcacgttccgggctaa

SEQ ID NO: 191797 - DNA, 183 bp, Klebsiella oxytoca
atggcagattttagcgcaaccaaaagaaccgcgtcgctcgaagattggggcgacgcgctggaattaatcgtcgaattaaatggtaaatcattcgatatcacagaaatggagattgaagccgcttacgaggcatataagcgagttgatgattttttttatgacgaatggggtgatgatcaatga

SEQ ID NO: 191798 - DNA, 234 bp, Klebsiella oxytoca
atgaaactgaaagactatttaaaaacatctggtgttcggcagcatgaattcgccgcactggttgggaaaactcaaggctacgtaagccgaattgctgcgggagaatgtttcctgtccgccgcgacagcgttggaatggtctgctgctactaagtatcaggttacgccgcacgatcttctcccaaatatttatcgaaaaccaactgacggactgccggaacagaatgcagcttaa

SEQ ID NO: 191799 - DNA, 456 bp, Klebsiella oxytoca
atgagaaagaaaaccattgacgccgtagagcgcgaagctgccaaacgccttcgtgatatctggaacgagaaaaaagtaactttacgtctgactcaggagaaggcagcggaggtgcttggctttagcacacaggcgtcagtaagccattacttaaatggcacaactccgctaaacacagatgccacattaaaattcgcctctctacttggggtaaaaccagaagagatcagacccgacctagccgagatgatgaattacgttaggaaatcaggggagtatctcgaagatagatcaggaccaggctggaaacttcttaacccagaacatgcagaacttatagatttgtatgagaggcttccgcagagcgaaaaagaacgccatttatctgatttaaaagagaaagtagaaggtttcgaccgcttatttagagagctattggcaacacgtaagcaataa

SEQ ID NO: 191800 - DNA, 285 bp, Klebsiella oxytoca
atggatattagaaaattgcttgaaagaattcgcgaaattaaagaccgcttagatcgcgcaaacagaattatcaatatttgcagtaacgaatgccgctcctccgggattttagcggaaggtagaaacggcgagagctatctcaaagtcgattcatcagaaattaaagaactggcagaaagccaaaaggttcatctcgaacgcgaactagagcagttggaagaagcaaaaaaaacggcagaacgcgtgatcgctggactgctccctgaaattaaacaagacgcctaa

SEQ ID NO: 191801 - DNA, 474 bp, Klebsiella oxytoca
atggctgacatttcctacccccacgactatctccctatgccattacaggaaggatacggatttcagcctgtgagcccgttaaaacgaacccagttaaccaccggtcgtgcgaggcaaaggcgagcttttacgtccacgccgacgcaggccagcatcacctggtttatggaaaccgatgcgcagggcctggcgtttgagtcctggttccgtgatgcgttatctgacggggcagcgtggttcatgatgaagctgcagacgccggcgggcattaagttttacaaatgccgcttcacagatatttatcaggggccggagctggttgcgccaatttactggaaatattcagcgactctggagttatgggaacgtccgcttattccggcgccgtggggaaattatccggaatggattgtcggtagttcgttactggatatcgcgctgaataaggagtggcctaaacatgacgattcttaa

SEQ ID NO: 191802 - DNA, 228 bp, Klebsiella oxytoca
atggatttcaggacaaagcacgatggaagcgagtcagcaactggcttttggctccaaatctttgaagaccttggtgaagataaaggcgttaacatggccaacctggaaatctgggttgatagatttatcgactcgcgcgcagagttgaacgctgaaataaagaaaaatgctctcgaatttcttaagagagccgtaatttcccttgaggcagagctaaaagacaactga

SEQ ID NO: 191803 - DNA, 3153 bp, Klebsiella oxytoca
atgactgaacaaacatcccgccttgcgattattctcgacagctccggggctgaaaaacaggctgatagccttgcggtgtcactcgataaaatgacccaatctggggataaggctgttgtcagcatcactaaggtatcccgagctactgatgaagaaaaggaagcccttaataagctgcgtgccgctattgatcctgtcggcgctgcaatcaataccgttggtcgtcgcttcagtgagctaaaaaaatacttcgataaaggactgatcgacgaagaagagtttcgcactctctccaaaatgctgaatgctacaaccgatgagttgagcggtgtcgcccaggctcagcgcgaggcggaaaaagcgggtaaattagcaaccgcgcagcaggaggcccagacgcaggcattccagaggatgattgaccggattgacccactgtcagcggctctgaaaaatttggatcaacagcaagcggagctatcctctgcactatcgtcagggaaaataaataccgcgcaattcgacacctacagcaaaaaactgcaggagactcgccgggaggttactggagctgctcaggcagaacgcgaggcagcaaaggcccacgacgagcaggttgccgcattgcgtcggcttgaggctcagattgacccagtaggggaagctttccgtcgcctgaacgaacaacagcggcagttggacggcgctaaagcgactgggatgctgtcaccgctggcgtacgatcgcttgaacagcaaacttgctgattcgcgcgatgcattggagaaaacccaaactcaactgggtaaaaccggacactccgcagctcaaactgccaatgctatgcgcatgatccccgctcagatgacggatatcgttgtcggcctttctactgggcagtctccattcatggtgcttatgcagcaaggcggccagctgaaagatatgttcggcggtattgggcctgcgattaaaggcgttggcacctacgttatagggctggttaacccctatagcgtagccgccgccgcagttgggcttctcacctatgccgtctaccagaaccgacaggaaatcgatgctgcgacaaaaatcgcaacaacgtccctcggtgctaacggcgatgcagccgaacgactggctctcaacatggttgccatctccgacaagaccggtcaggcgattgatgaagtcggcaacatgttcatcaccaccaatgacggagctgcggaggcaattaataaaataatcgacgttggttacagttacgacgaagcacgacagaaagtcgctcaatataagggtgcagccaattttacggcgctaaacgctgatattgaccagcatcgccgggagatcctgaaaatcgttgactcatggacggcggcggcgattaaggtcaaaaattattacaccgcagccgataagggcaagcaaaacgtagcattgggcggtgctattgacccttcaatgagattcattgggcaggccattgacctgcaaaacacaatgaatgcactgaccgttcagggaaataaagctgttgccgagtctgttgattggattaataaagaatatctggctgcagacagagttgccggtgcagaagctcgattaaaggaggctagggcacagtccagaaaaattgccttctcagggaacaaagaggcaatagaccaggcaaacgcgctgattgctgtacgtgaaaaagagcttgagcaggctaaaaagggtcagcaaccaaaagcgccaaaaggaaaagcatacaccgaggacgccgccacgcggctactcgaccaaatcaatcagcagactgctgccatgcagtctcaactggatgccagtgacaagcttaacagcgcgacacaggcgcggattaagttcgaacagcagattgctgacctcaagtctaaaacgcagctcaccgccgaccagaagtcgatcctttcccgttcagatgaaatactccaggcatataagcagcaggaggcactgcaaaattccgtaaaaaccctggacgattatcggaaaatgcaggaacaaattgcaccaaaggaattgcgccaaaatgagacgttgcaaaaacgcctagaaattcttcaaaagatggttgagctgaagaaactgactcctgaggctgctgggaagcaggcgagcgacctgattagtaaatcagtgctaccggattcagttatttctggggtgaataaggctggtggtactctgacgtctggagcaactaatagcgacctgtcagggcagggcatgaacatgatagggctgcaaatcgatccgcagcttgaaatcattgataaattgaaacaggcccagaccgattatgcagcatggctgaatcagcaacagcaggcgataacacagagcacagtcctgaatgagcagcagaaacagcagcagctactggccttacagcaacagggccagcagaaccaggaggcgttaagtacagctgtctacgttgcgcagatgcaatccgcccaaaactccttctccagcatcaccgattcgatggggatgatgtttggtgagcaatcagcgatgtataaagccgcttttgttacgcagaaagcattcgctattgcacaggcttcgctgcaactcccaatggcaatggggcaggcattagccggattacctttcccggctaacctcgcagctatcgcgcaagttattggactcatggcttcgattacttccagcataaccagtgctgccgccgttggcttcgcctccggcggttacaccggccccggtggtaagtatcagcccgcgggtattgttcacaaaggtgagtacgtcttcgaccaggcgtcaacgaaccggatcggcgtgtctcagcttgaggcacttcgaaatggccaaccgctagatgcaactctggggcgtacagggtttggtactggtgttcagaacgttagtaacagtaaccagagcagcacgacacagcacgtttccataagccagaacatcaacgcgcaaggaatgacacctgagcaacttaacgtcgtgctagcgcaaaacaaccggcaacttacacggcaaattaaaggggatctagcaaacgacgtggttaagccgcagggggtttttggaaatgctctcaaagggaattatgcgcgacaggggccaacgtga

SEQ ID NO: 191804 - DNA, 168 bp, Klebsiella oxytoca
atggctggcgtaccgctcccgttgtccctgagtgatatcgagcgctatctggcctcacgttccatactgattgaccgaaccgaatttgacaccgccatacttgccctcgacgatgcctggcgggatgcgtgggctgaagagcagaaaagacaggcaaaagtgaagtag

SEQ ID NO: 191805 - DNA, 246 bp, Klebsiella oxytoca
atggctggactgaccaaagagcagcgcgctcaacgtgcagctgaaaaccttgctgctgggaaagctgcaccaaacaatcctgagcagcaggagcagcaggagcagcaggagcagcaggagcagcaggctgttctggtggcgatggttaccgattccccggcattccccggcgcgccgacgaccgccgacgttcaccctgaagaagtggaaaactggaaggctcacggctggaaagaaatggagtaa

SEQ ID NO: 191806 - DNA, 1137 bp, Klebsiella oxytoca
atgagtaacacactcaccgggttgatcccgactatctacaccgctctggacgttgtttcccgtgagcaggtaggctttattcctgcagtcgcccgcaataccaaagcggatgccgcagcaaaagaccagacggttaccgcgccggttgccccggtggcagtaactgaagacatcgtgccgggtccttctgcgcctaatactggtgaccagaatatcggtaccgtcgatgttaaaatcacaaaatccaaaatggccccggtcaaatggaatggtgaagagcaactagctatcggcccggctggtacttacaacactatccttgcggaccaattcaagcaggctttccgcgcgctggcgaacgaagtcgatgcggatctgggggcgctgtacttcaatgcatcccgtcaggtcggcacgccgggaacgacgccgttcggtatcaaggaagacctcagtgatgctgctctggcgcgtaaagtgctggaagataacggctcaccgactaccgatctccagatggttctcggctcggcggctatcgcgaatctgcgtggtaaacagtctgtactgttcaaggtgaacgaagcaggaacggaacagttactgcgtgaaggtactctgggtcggctggaaggcttcaatatccataactctgcaggtgttaaaactcatacggcctctgctgccgctgactacctggtgaacggtgcgaaagtcgaaggtgaccgtatcatcgccattgataccggtaccggagcgtttgtcgctggtgatgtggtgagcttcgcgggtgacgaaaataaatacgtagtcgccgcggcaaccgccagcactatcactctggctcagcctgggttgcgcaaagcgctggcggataatgccgctattacccgtggtacagggtatgtggcgaatatggcgtttgaccgtaatgcgctgctgttggcatctcgtaccccggctatgccgcaaggcggggatactgcggatgacgtgatgaacgttaccgacccggtatcaggcattaccttccaggtggcgctgtaccgtcagtatcgccagatccgttatgaagttggtctggcgtggggtgtcgctgcgccggttccgcgtcacagcgtcatcatcgctggctaa

SEQ ID NO: 191807 - DNA, 1005 bp, Klebsiella oxytoca
atggcaaaaccggactggggcgagcttcagcaacggttcctgtccgatcatgccgcaaccggcgtatcaccgaaggattggtgtgaagcgcagggactgaattacgctaccgcccgtcgatacattaaaaaaccttctacgcaaactgcgcaaaaacctgcgcagaagaaattgcgcactgcgcaaaaggaaaagtgcgcagaagagctggtggacgatgacggtcttactgcccagcagcgtttatttgtcgcggaatacctgaaggataacaacgccacgcaggccgctatccgtgccgggtacagcaagaaaacagcgaatgagcagggagcaaggctgttagcaaaagttagtattgcgcaggccattgcgcagcagcagaaagcatccattgtgcgcacgcttggaagtgccgatgaagtgcttgagcagatgtggcgcctggccaccttcgatgccaaccagctatcacagcatcgccgcgggagctgtcgttattgctggggctttggtcatcagtatcaatggcgtgatgccattgagttcgatgaggctggtgaggaagccaaagcgaagaaaagagccgccccgcgagatgatggcggctacggctataaccatacccgcgatcctaaccctgaatgcccgcgctgtaatggggaagggttgagccgcgtcgtgcttcaggattcgacaaaattagaggatgtggccgcgctggcttattccggtgtgaagattggtaaggccggtatcgagatcaccgccatcagccgcgaacggatgtttgaggctgtcgccaagcgtcttggcctggccgatagcgagttcgcccagcgcctgcagcagattgaaattgagcggcgtcagctggaggtcgaaaaattacgcaaagagctggctgctgacccggaggatgacgaaccaacgccagttgcaatcaatatcaacgtagtcgatgcgcgagtgagggaagaggatggcgatatcaccgacgcttaa

SEQ ID NO: 191808 - DNA, 189 bp, Klebsiella oxytoca
atgccggtatgcaccatttcagtagaggtaaaaagccgttggtggctaccgttctacgtcaagacactgactttattctgtctgatgttccagcgcgaacctgattacgaaaagacatctgctcttatcactaaacacggtatcagccagaaagtgaaggtggaaccagtgcgaaagaatacggagtaa

SEQ ID NO: 191809 - DNA, 417 bp, Klebsiella oxytoca
atgaaaatcgatcaggagtatttaaaggggctgcttatagcgtttgaagattcgaacgagcctcatacgagtattactaggcttttggcgctggggtttgatcatcgaactaacgaatttcgtttccatatccgattattgcatgatcgtggtttgattggtcgcgtcgatggtgattatgggattgggtatttcagccctggaagtgatgatcaaaatgacgaaggtttttttgatgaagtaccgctgcgcctaactgcctctggacatgatttcctggaagccattagaaacaaagaagtgtgggcaactcttaaaagcggatttaaggatgccagcataggaacgcttgtgacggtatcgaaagaattatttaaccgtgcgctaactaagcaactcgataaatattttgattag

SEQ ID NO: 191810 - DNA, 264 bp, Klebsiella oxytoca
atgtcaattgagcaaaaggtactccagccaattattgatgaactggaatccatcaaggccaagaatgaggttatgtcgatagctattgcgtgtcttttcagtgagataaacgaaggtgatggacaaagtctgagcaacaaacttaccaacgcttttaatgacctgaataaattgaatccaccaagctcacgaatggctaaagtgtcacgtctagacgcctattcacaagctctatcaatgatgcgtaagtctcagcaatcttag

SEQ ID NO: 191811 - DNA, 555 bp, Klebsiella oxytoca
atgcttttctatgtggataaagagtatccgaacgaaacctgtgtaatggaaagagtgttgatgcgtcactcatcagaagatggcctttatcatctcgaactggttgagcttgctgacgaccgccggacgctgggttttgaggttaacaatactgataaaggcggctcgcgtggacttacttctataaccgctggctttaacagctttgttgaagcgcgcgaatactttctgacttgcacaaaactggaacggcttcctgaccaccctgaagtcaaaggagcagtagatattgagaaaaggaacacgccgattgaaattgataacggcaccattgattcagtcatcgaaaaagtgcgtctgctgaaagagagtttagtcgagattgagccactgatgaatttttcagagacggtctctactggattgcagtctggagcaataaagagtatgcagccagatgacagcatactcttgtggtatctggacgctaagattgctgagacttacgcatcattgatagagcttgtgaataggcgtctagacgtgacactttag

SEQ ID NO: 191812 - DNA, 258 bp, Klebsiella oxytoca
atggacgcttcactggaatatgcctgcaaacgcattcaggaattggaaagccttctactggtggatgtggctgaaactgtatggcccgctgaagtcgctatggtcctgtcagaagtagaaaacgccggggaactcccggtgcagcaccggcgccgactgcagcaccatatcaaccgtatgtggctggaaaaaatgccggtaccgtcaattatcgccgcggctcgttcgctggccagcgccatggagaaatacgcgtga

SEQ ID NO: 191813 - DNA, 468 bp, Klebsiella oxytoca
atgactgatatcaccgaactggcgcaggactggaaagcagcggcacacaaagcgaagcaggctaatgacctctatcttgaaggcaaaataacgctgtctgaatgcgtcgtagagacaaaggactatctcgactactcagacaacccgaataacttcctcgcgctgttagaggcactggagaaggcgcagacggaaaacaccgcaggcgcagccgggatggcagaaagctacgagaccaccatttctatgctgagttcgcgcatcgcctcgctggaagaaagccacgctcaggtaatacagtctcgcgaccattacgaacgcatgctagaggaaggattggagcaactggctgagccccgcaccgtcaccgtgaagctgccgcaggctgttagcgccggtggccaaggttatcaggagcaagtcgagcggatactcaccgccgctggcatcaagtgggaggctgagtga

SEQ ID NO: 191814 - DNA, 483 bp, Klebsiella oxytoca
atgaataacgaattaacagcagcacaggcgactatcgagaaatgccgggagataacaggttgtccggatggtgtggatttgcaggactgggttaagcagctggctgcggagaatgtggggctgaaagattgcattgttaagcattatcccgcagtagaacactggaactcatgggcagacgcagaagacaaaatacagagtgcgctcgacacccccgccacagatcgcatcgtagccgggattaaggctgatggtcgtgcagaaggtatcaactttgctgcaagccgacttgctgctgctttcaatcacggacacgttgataaaccaatggctgaggttggcgacgtggtacgcatgatcctcaccgcaaaagaggatttggcaaacgatccagcgcttccagaagatggcctgtcgggggaatacgcagagaaatccctggctgaatgggaagctgaactgcgcgagggggccgacaaatga

SEQ ID NO: 191815 - DNA, 786 bp, Klebsiella oxytoca
atggctaaaaattcaatcgacgtatacggcgccagcggcaaaacaaacgtgctcaactttgagcctgaaaacctgcacctggtcaccgataagacccacccgctttacgatgagcgcattcacttacctctcagcgaggccatggtgctgaacatcatggatcagggtgttctggagccgattattgtctggaaagacccagagacgggattgtcctgtgtggtcgatggtcgccagcgtgtgcgccataccctcgaagctaacaagcgccttgcgaaagagggcaagactccgctgctggttccggcggtcactaaacgcggttcagccagtcgtatggctcaggcaatggttagcaccaatgaacttcgccaggaggactcaccattagggaaagccaaaaagatggccgcagctctggagcgtgggcatgacgaggatgatttagcgctgatgtttggtgtgagtgtccagaccgtccgtgcaacgctatccctactggatgccactcaggcagtcaaagacgcagtagagtccggcacggttacagttactcaggcacgtcaactggcatcactgaaaccccaggagcagcgcgaaaaagttgcagaaatcgaagcggcgaccgctggcactaccggccatgaaaaagcgcgtcgtcagcgtcaggttctcggcgataaaaaaccgcgcattaaaactcgcaaagaaatcacgaaagcccttgaaggtgccagcggtgaatacgctgatgctctgcgctgggtgctcggggaggctgtatga

SEQ ID NO: 191816 - DNA, 336 bp, Klebsiella oxytoca
atggctagagcattatcagtagcagagcgccgggagtatgtcagcgcattgattcgtatcactaagcatcaggggcgcctgacgaccaccgaagcaatgaaaaaactgggcctgagccgcgataccgtcctgaagtatttccgcgaagcggcggccagcggcgaggttgttcgtcacgggcgatcaggtttgttccgcgaccaacgcgccattatagactttgacatgaaacgatttggtctgatgccgaaagctgctgttgggatgaattacagcttgttgggtagtcccgtttttcagcgttttatggatattcaggaggctatgcatggctaa

SEQ ID NO: 191817 - DNA, 354 bp, Klebsiella oxytoca
atgagcaaatcactgaatgcacgatgcatacgtcgctgggaagtggaattcaaacctttctgcgattcaaaagttaacccctactggcgcaagcgtgacctccgcgggtatatccgcgaagcggcgctaactaccgctgatagcatggttgagaacatggcctacaacaacgcaatgcatgattttttcgctgatgtaggtgataggcatgactggtcgccagagttctcagcatggtacgacgggcgccgggagcattatctcaaagaagctcgcgactacctgaatgaagaaaccaccatcgacgagatcgacgaagagattgagaacgagctggaggcctggaatgactga

SEQ ID NO: 191818 - DNA, 486 bp, Klebsiella oxytoca
atgactgagcgcggaatgaaattctccaaattcactgagctggtagcccgcatctggtcaaacccaactacgcagcgtcgcgacccggagattactatctccatactctcacctggcagcatcggcgcgtcgccatccgttgaagtagagtcaattcaggctggattcgactgggacgccgggcaggtgctgatttaccctgcgcagccactgaccacgctgacgcctgaacaggtagcggacattaccaccagcgtgcgcaaaggccagtcctggcacgcatatgaagcttacaagaagcacaaggcccagctggaaaacgcagcgcttgagcatgcgaaagtcgccgggcagcgcgacgagcttctggcggcgctggtttccctggctgctgtcgctcgccgctatcttccggattatgacgagcatccggaagtgcagaaggctgataacgccatctcccgcgtcaaaggcggtgcagcatga

SEQ ID NO: 191819 - DNA, 498 bp, Klebsiella oxytoca
ttgagtgataaaaaagcccgctgctgcgggcttttttattgcttgccattcagcacattcgttaacaatggagtatatttcatgcctgatattgcttctataaatgctggtctgtctgcagtaaagcttgcctttggtatggccaaagatcttaaagatgcgtctgctgctttcaatgatgctgaagtgcgtttaaaaattagtgatttatataatgcgcttagtgaagcgagaatcagtctcgcggaagcacaagtagaaatagtagagcttcaaactgaggtccgcagattagaaggaaagcttaaggaagctgatgaattagtgttccgtgatggtttttattatcgtgcagttcctgttgatggtaaatctaacgggcctttttgtcctaagtgctacgaggatcagaaaaaaatatcatccgtcagcgcggctactgggattcactcccactttgggaaaaaacactgtcatggctgtggaagccacttctga

SEQ ID NO: 191820 - DNA, 282 bp, Klebsiella oxytoca
atggctccctcgtgcgctctcctgttcctgcctttcggtttaccggtgtcattccgctgttatggccgcgtttatctcattccacgcctgacactcagttccgggaaggcagttcgctccaagctggactgtatgcacgaaccccccgttcagtccgactgctgcgccttatccggtaactatcgtcttgagtccaacccggaagacacgcaaaagcgccactggcagcagccactggtaactgatttagaggagttagtcttgaagttatgcgccggttaa

SEQ ID NO: 191821 - DNA, 261 bp, Klebsiella oxytoca
atgagtacagtaacccgtgttctgactaaccccgtaggcatggccagacttgtcactaattattctcggatcaaagaaatggagtctaacggtcttagcgtcgaaaaaattgctaaaatttttgacgaaaacgccgtcgaactccagaatttcgtaaccgtcgctgatggttttgtttccggtgaaaagtctctttctctggatgtaacaaacaagagtaaagatgcttttaacgctgtggccggtgccttagtaaaataa

SEQ ID NO: 191822 - DNA, 294 bp, Klebsiella oxytoca
atgacaattgtaataagtaaagaaatcgaagaaaaactaagaactaaacatcaagtaacgaataaagaagtgtatgaatgcctcgctaattgtaagggtaacttgttaatagataacagggaacaacatcgaacgaacccaccaactaactggatcatcgctgagaccaaccggcgtagagagctaaaagtgtgtttcatgattatcgatggcgatattcatatcaagtcagccttcgaaccgaatgaaaaagaacaaaaaatctatgctcagcatggaaaaaagaccacatag

SEQ ID NO: 191823 - DNA, 369 bp, Klebsiella oxytoca
atgaaaactaccagtgaattcgcacgtgacgcacagaaatgggatgatcgagaactcggcgcctcagaggaccacgtagaagttgcatccatggctgaaatggcagcttttaatgatgcattatcactgcaagctatctcaattagattacaaaaaaatcttgtaagtgatttaaaatcaatagccgaaagctatggaataggttatcaaccaatggttagagaccttctgcaacgttttgttattgcagaaaaaaaacaggcattacgcagacaattagataggttaaatgaacaagaacagatccatcaacaagaggacacagtgcctgtagatgagttcattgaaagtattagaaaacaagcgtaa

SEQ ID NO: 191824 - DNA, 129 bp, Klebsiella oxytoca
atgagccttaagccaggaccgaaacgaattgccgaatcaacaggggaacctgataaacgccagcgcgacaataaaaaaacaccggggaacactgataaactgaaacccagtaaatcctcagggaaataa

SEQ ID NO: 191825 - DNA, 516 bp, Klebsiella oxytoca
atgcaaaaagtgaccgatctttatccccctgaaattgctggccataaactccaggatcacttcgccggcaataccgtaatgctggagttaatccagaaactaaataaaaccagcctgtgtacttttgcagcgctctgtgacggtaatgtggtgaccacttctggctataacattacggctgatctgtgtgttaaccgtgcgtcagccgtggctcattcgcttaagaaaaaatatctgccggttacggccagaacgatttcgactaaggctgatgtaggtggtgcggtaaagcaggccgctttctgtattgatgaaagcgatcttgcaagacttaaatcagagccggaaaagatgatgaaagagtgtgagcgtaacttggacagccagaagcgtaccaatgctcagaaagaaattagtaggttgtataaagagtttggtgaagacggcatactggcgctgttaagcaatgttgcccgatcgaacggtacgccgccaggcgcacaacctgcaagctaa

SEQ ID NO: 191826 - DNA, 528 bp, Klebsiella oxytoca
atggcaagtactaactgtattactgttcttacagctcggggtattcaagagatattgaaaacaggaggaagtcaggcttggaggcttgatgccagccatgcagcaaagcatcagtatttggtttgtgttcaaaactcgaaaaaggattggggttctcaggaagcaaagcatcaccatgcgtttatggtcggtcaaatatcaggagtaagcagagccccagaacactccaagcgttggattataaatatcgattcttatgctgaaattgatatcccagatcaatgggatggtaaccgaaatccagtttcttatcgaaacctcgaaagtatggggattgacatcactagactggactttaagcctgtttcaaaagtaacttcatctgttttgaatgacgtaaagaccgttgatgaaagagaagagaataaagttttttctaatccattgaatattaaggatgcaaaggcgggtttggctctatattttggcgtcagtgaggatgacattcagatcacgattaacgggtga

SEQ ID NO: 191827 - DNA, 192 bp, Klebsiella oxytoca
atgacgaaacaacagaaaacagcgctgaacatggctaaattcatccagaatcagtctctgctcctgctggagaagcttaacgagcttgatcttgatgtcgaggccgacctttgtgagaaactccacgatgatgcggagcatcttttccgtacactgtcctcgagactggatgcattacaggatggtaactga

SEQ ID NO: 191828 - DNA, 726 bp, Klebsiella oxytoca
atggtgacgagaaggtacttactaggtggtgaatatccctccgaggaatttgttcaagcttctttagaaaaatatttttttcgacaagggttcgatatagatacgggttcttatattgaccttatttgtcgtgataaagaatctagggatgttgtgtggcatattgaagtaaaaggaaaaacatcacagccggggttggattttcgaacttgtcttggacaattagtgcagagaatgacaaaagataatattaattatgctattgctgttccaagaataaaacagtatgaaagattaatagaagaaacgagcattcttgctgttagtaaattgaatttacactggatatttgttgggcctgatggcagtgtgacaattaaggaacctgatagctctacgatgaaaaatggtaatggtaatggtaatggtaatggaagagaagtttctcttgtgaatggggggtttaaaagatttattacgggggattttatgccaacttgctcatatgggaaagctcctgttgtatttaaatcatctcggcgagaaatgtgggattggttggacgattttgttatttcaaatggggtgatcccaagtattgctgatattaaaaaagaggctgaatcgcggagtgggaaatggacgctttctaatgttaaaatagagtatcagttttggaaaatatatcacttgtataaggggcattttttctatcaatctgagtag

SEQ ID NO: 191829 - DNA, 171 bp, Klebsiella oxytoca; identical to SEQ ID NO: 111110

SEQ ID NO: 191830 - DNA, 2625 bp, Klebsiella oxytoca
gtgcagcccgttacccggttcgatgctgccgatcccacgaaaatgcgcgtacagatgctgctgtgccttggtgtcggagctctggattataccaatggcgatatccgggttggcagcacgcctgcatcgaccctgccgggattcagcagcacgcattatccccctggtgcggacgtatcaggtgatgagcgcagtgaaaactggttcaacagtacggaggtgggcgggacgtcatccggtaccgggctggacatggcccagacgtcgccggatgcggacgacattatcgcagacagcatgaccgttgccggagcagatgtaacgtttaccgggctggacacggatgatggcaatgatgacgacgagaacgacaattctctgccggatagttgggtagaaggcgcgattgttgagataaaggctcccgccaactaccagatatcaacggcggccgggtacagcgttatcgcgagtccgctgctgacggagatcgcgccggtggttggtatgccggtgacgctggggtttaactcagtcgattacgatttgtttatcgcgtcatatacaccgggtcaggccgccgtccccggcgtcggtggcagcgctgccaaaattcaggccagcgcagcacctaccacctacgacttttcgaccagctccagcacgttcacgatcacatggcaggggatcgcttacgcggtgtcgctggtggcgaactatgtgtcgatgtctggacttctggcggccatcaccgaggggctcactggttccggtctggtcgcgcaggataacggcggcactgtagtgataactgaggcggccagcccgttcgcgggaggggcgatcacatcctcttcgctgccagctgccgttttcggtgatgccccggtttacacctccggcacagcatcaaccggcggcagcccggcggtaacggcgaatgtgacgcttgcctataacagcgccacgggaaccgcattttccggcatgccggagggggtacaacggctttcgcttgctcaccgcgggaatgagtaccggattgcgtcagcagacggcacgacggcgacggtggcgcgtctggttaacggtgctgttgatgagtcatggccgggattcaccgccaggacgatgatcgactatgaggccactggccttaacgacacgctgagctggctggggccgttcctggtatgccctgaaaatgaagtggtggatatgttcgaagtgaatttttcctttccgaacggcatctgcggttttgacagcaagggcaagaaacgactccggcatgttgagtgggaaattcagtaccggatttacggctccggctcagggtgggtcagtaaacagggcgagtacgcgctgaagaacgtaaacgggttgggctttactgagcggatcacactcggttcaccggggctggtggaggttcgctgccgacggcgcaacgaacagggctccaataatgccagggattcgatgtactggcaggcactgcgcggacgactgctgactcgcccagcatcctatcccggagtgtcgctgatggcggcgaccgtcgagacgggcggtaaactggcggcgcagtctgaccgccgcgtaaacgttgtggggacgcgtgcctatgaaaccggaacggccagaaccatttcgggggcgctgctgcacgtcgggaactcgctggggctggaaatggatgtcgacaccatcaatgcgctggagtccgcgtactggaccccgcggggagagtattttgatttcgctactggcgacagtatctcggcactggaaatgctgcaaaagatcgccaacgccgggaggtcccgttttctgctgagtgatggcctggcgacagtaaacagggaagggattaagccctggacaggtgtgatcaccccgcatgagatggtcgaagagctgcagagtggtttcactgctccatctgacgatgattacgatggagttgatgtgacctacgtcaacgggaccacctgggcggaagagacggttaaatgccgcactcccgataaccctacaccggtgaaaatcgaggattacaaactcgacggggtattgagtcaggatcacgcttatcaaatcggtatgcggcgcctgatgaaatacctgcagcagcgggtaacgttccagacgacgaccgaactggacgcgctctgctacaacgttggcgatcgtattgcgctgaccgacgatataccggggaataacacgatttcctgtctggttgaggagatgacaacggctggcggttcaacgaccttcaccgttacggagccgctggactggtcttttgaaaaccctcgagcgctgatccgttaccaggatggctcagcctccggtctgatggtggccaccagagcaggggattatcaactttcggtcccgcatctgagtgagtttgatgacctgctgaaaatcaatttatcgtctgcaaccatcgagccgatccggcttgtgttctgcggctcaacacggcatgtctatgatgcgctggtggcagaaattgccccacagtctgacggcacctgccagctgaccgccaacgaatatcttgaatcgttctacgcctacgacgacgccacataccccggcgacgtcgcgtaa

SEQ ID NO: 191831 - DNA, 2187 bp, Klebsiella oxytoca
atgccaacgggatatcagtctgctaccgcggttagcagcagcgcggctaatactatcgctatcaccattcctggactgttgattgaaggtagcctggtctattttctttccccaattctaaacaccgctgcggtcaatgtgaccgtgacagatgcgaagggaaacagcgtcacgcgcgcaatacagaagcaaaacaacgggacgttaaccggaggtgaattacttctgggccagcccgttttgatgcaattcagaaccgggactgctaataattttgttatggtggcatccggtccggtagcggccgagttggctggcagaatttcagcgctggaattaaacagcatcgcgttactttcgggagttgttaatactggcgacgcatattccggcaccgcatctacaatccctggtattgttgcttctgatcgtgtgttcctctttactccgaacgctactaacacgaccagaacgccaacgctttcagtcaatggcggtaccgctcgccagataaagcagaataacggttcgaacgtcgcggctggtgatttggtagcgggttatacgtatctcgttaaattcaattttgcatcagcagattttcggctgctgacctaccctagtgacagggctcgggttctcaatgcgtataccaaagggacggtaacaagcgactcctcaagccctaatgctgtgtccgtaatcattcccggtctgcttggtgacggtactcagataacgtttgagccggttgctgcaaataccggtgcaacaacgctggttattacagacctctacgggaactcagtcacacgtagtttgtttaaaggagccaataccgcactaactggcggagagttgcgggcagctatgcctgttaccgtgcaataccgaggctcaccacagaataactttaaattgctgtatgccggggacccgactaccgacattctgaacctcataagcgatgtcaccactctgcagggtgcaatcactgacccctacgttaaactgagcaaaaagcttatcggtgacggaacccaggccaatacctcgccattcggtaaaatttcgttcagcaatggcgtcagaactgtaaccaagaagcgcataattataaccacgcccggctcctccataggcctgggggctgggtccactggcgggggtgtggtgggcgcgccgttctctcctagcgcattgtttattgaagcgatgaaagagcacctttctggctatggcgaatttgagtttatcgacgacaaccagagtatcggtggccaggcgatacaccagtttgccgcgcaactacaaaactcgccctattttacaagcagtgaccccgacgactggccggatatcgtgctgattgtcggcgggatgaatgatgccacaccgaccgggaactttaaccggggcaggacatacccactgcagcaggcagtgctggaaaatctgattgaccagtgcacggcaaaaggcgctgtggttattgtctgcaccacgccgcaccacaatgttgagtccgccaccgtcaaaaacatcacgctgggtgacctgaatgtcctctggccggtcagaactttcaacgtccctacgggttttacatttgattcagcgaacaaaactatcaacagcacggcgtttgcctatgacacgggaaacgcagcgaccagctggggcgggcaaatccttagacctgggcacattcttcgggttggcggggtgaatgccggtgattacaccatcagtgcaatatccgaagaccgtcaaaccatcaccgttgctgaaaatattccggtttctggcctgattaataccaccattcagcacatcaacctcgacagcattatcgaagaggtactcgatccaccgccgtcaaaatcgtttgtggaggccaactggtcggggagcggcgttaaagttgttggggatgcgcgtttcggcctctacaacagcatggtgcgtgcagtggcgcgtgggaaatcagcgtttgtactggaggctgaaatcccctcgttcaggctgggtgttgaggttcacggatggtcggcgcttttcaactttcctaattacaaccacccgaatgacctcggctataccgttagttacaaggctggcgcggatactgcggcattcagtctgtgcaagctgatttatggcgaaaaatattatttaccttcgtga

SEQ ID NO: 191832 - DNA, 1251 bp, Klebsiella oxytoca
gtggctgccttcatccagtgcatcaggggtgtagctccagcgtccgtcctccccggcaaccaccgtacccagtaccgtgtcgccgtcatagatcgtgaccgtggcccccgcctcggcggtaccgctcagggtcggtgtggcgtcgttggtcagatcgccgctggtcagcgggccggtatgcccggccacgtcgtcggtcacctccggcgcactggcagacggcgcggtggtatcaatcgtcagctcaaacgccggggaacgctcgctgacgttcccggccttgtcggttacggtggtgctcaggctgtggctgccttcgtcaagtgcatcaggggtgtaactccagcgtccgtcctccccggcaaccaccgtacccagtacggtctcaccgtcatagatggtcaccgtggcacccgcctctgccgtgccgctcagggccggcgtggcatcgttggtcagatcgccgctggtcagcgggccggtatgcccggccacgtcgtcggtcacctgcagatcgctgaccggagtcacgactgtgtccaccgtcagctcaaacgccggggaacgatcgctgatgttcccggccttgtcggtcacggtggtgctcaggctgtggctgccttcgtccagcgcatcaggggtgtagctccagcgtccgtcctcgccggcaaccatggtacccagcaccgtgtcgccgtcgtagatcgtgaccgtggcccccgcctccgccgtgccgctcagggttggtgtggcgtcgttggtcagatcgccgctggtcagcgggccggtgtgtccggccacgtcgtcggtcacctccggcgcactggcagacggcgcggtggtatcaattgtcagctcaaacgccggggagcgctcgctgacgttccccgccttatccgtcaccgtggtgctcaggctgtggctgccttcatccagtgcatcaggggtgtagctccagcgtccgtcctcgccggcaaccacggtacccagcaccgtgtcaccgtcatagatcgtgaccgtggcccccgcctcggcggtaccgctcagggttggtgtggcgtcgttggtcagatcgccgctggccagcgggccggtgtgtccggccacgtcgtcggtcacctccggcgcactggcagacggcgcggtggtatcaattgtcagctcaaacaccggagagcgctcgctgacgttcccggccttgtcggtcaccgtagcgctcaggctatgaggaccttcgctaagctccggtaa

SEQ ID NO: 191833 - DNA, 768 bp, Klebsiella oxytoca
atgcccggccacgtcgtcggtcacctgcagatcgctgaccggagtcacgactgtgtccaccgtcagctcaaacgccggggaacgatcgctgatgttcccggccttgtcggtcacggtggtgctcaggctgtggctgccttcgtccagcgcatcaggggtgtagctccagcgtccgtcctccccggcaaccaccgtacccagtaccgtgtcgccgtcatagatcgtgaccgtggcccccgcctccgccgtgccgctcagggttggtgtggcgtcgttggtcagatcgccgctggtcagcgggccggtgtgtccggccacgtcgtcggtcacctccggcgcactggcagacggcgcggtggtatcaattgtcagctcaaacgccggggagcgctcgctgacgttccccgccttatccgtcaccgtggtgctcaggctgtggctgccttcatccagtgcatcaggggtgtagctccagcgtccgtcctcgccggcaaccacggtacccagcaccgtgtcaccgtcatagatcgtgaccgtggcccccgcctcggcggtaccgctcagggttggtgtggcgtcgttggtcagatcgccgctggccagcgggccggtgtgtccggccacgtcgtcggtcacctccggcgcactggcagacggcgcggtggtatcaattgtcagctcaaacaccggagagcgctcgctgacgttcccggccttgtcggtcaccgtagcgctcaggctatgaggaccttcgctaagctccggtaa

SEQ ID NO: 191834 - DNA, 312 bp, Klebsiella oxytoca
gtgactcggactctgacagcgattctgactccgacagcgattctgactccgacagtgactcggattccgacagcgattcggattccgacagcgattctgactctgacagcgactcggattcagacagtgactcggattccgacagcgattctgactctgacagcgactcggattcagatagtgactcggattccgacagtgactcggattccgacagcgattctgatactgaagcacccactgcagcacagaacatcacggttaatgacaatgttggttccatcactggtgtgcttcattccggtgatgtga

SEQ ID NO: 191835 - DNA, 1743 bp, Klebsiella oxytoca
atgggatattataatagtaatcttattgtaaaaatgatacatactctttcaaatagaagagatgggttaattttgcttgatggaaattgggggactggaaaaacttattttataaaaaataggtttcctaattactaccacaaaaatgccttctattatatttccttactcggtatgaaatccttatcagatttcaaagctaaaattattgattgttactacctccaagatatacacacacttcaatcggggcttgaaagtatttctgggatcggtagtattacctccggttcacctgcaagtgctaatattattaacaacatgtttaattccattggggcaagtgttagagagaatattctctctaagttagaaggcattttcattttggatgacattgagcgaatatccgagacatcattagctaatgaaatcttaacatattgccataccctttatatggcaggaacaaattcaaatttagacttcattattgttggcaattcatcatctgagtctggattgaaagttgaacacaaagaaaaattaattgcagagactctccattatactccatatccacgggagatattggaaatggatataataaaagaaaagctttctcatttccctcaacacgataaaaaactatttgaggaagtagtaataaataacaacatagttaacattcgagttttaatacgtatgttaaataccatcaccccaatttatgagcatattgaatcgcatcctgaattgacttggagcataccatcttcaacactcttaaattcaatgtgttcgttcttcatactattatttttacataataaacctctagatgaacttctaacaaagcaaaactcaatcctttcgtcaaatactgataaatctaacgactcggagagaaaattatggtcatcgttgaatagttacataataacctccgagattaaaaaatattttagcggtcataactcattgcatgatgtattagatattttattccatgaggctaaaccacttacattgagatatattgcaacgtccactcgcccagaattacatgagataaatgaaaaagaattctccaaaactctcatatctttaatttgtcgcgatttagattgtgatttttatgagtggtttagagcattccagaattacgaatatttaaccaggcataaatatctttccaaatcaccaattataactttgaaatttgtcacttcaattctgaataatttcactaacagtgagatcttagaatctttccagcaataccagcttgatgaaagaagcagtttaaacagtggatttgaagatagcagcttactgttctccatttcattcacgcgctatcaaaaaacaatcaataaagataagcttgacataatcaaaaagcaaatagaatctaatggctgggcctcgttcgatgtcgatttattaacaaccttagatccattcgggaattacaagccacttggggtacttggcgctccatttatagctaaatgcattttgaagcattggaaagttaaagacatagaacatttccgttctttcttgcgaagcaactatcaaattagcaatataaaacagtttgctataaatgaaagagacaagcttatttacctcagtcaaatacttgaaatattttgcctttcaaataaagaggggtttaaatttggggctatttatgatcttaataaagtagttaaaaatgccattgctatgttatga

SEQ ID NO: 191836 - DNA, 711 bp, Klebsiella oxytoca
atgtcagcactatttgaacgcgcccaaaaaacggtagtaatgattacatcagtgccggtcactgcggaagagctggcatcggcgacctggctcaacctgagttgcaccattaaacaggccagctttaccgctggtcagaaaaacgatattgacgttacaacgctatgctccgaagaaacggagaatatcaacgggctcccggcaccgtctgagatgtctctctccggtaacttctaccgcaacccggcgcaggatacgctgcgtactgcttacgataatgacggcgtatacggctttaaggttgtgttcccttccgggaatggcttcctgttccgcgccgaagttcgtcagcatacctgggattcacagaccaacggtgttgttgctgcaacgttctctctgcgtctgaaaggtaagcccagcaatattgattcgacaggtattctgtcattcatcaacgatctttcaccttcgctatcagtagcggcaggaagcgccctgacaatgggtgtggtcatccagggtggcactgcgccttatacctacgtctggaaaaaaggttcgtcaaccgtcagcgggcagaccagcgcaacgtttaataaggccagtgcagtatcaggtgatgccggtgtttactcctgcgtagtcactgactctgccactccggcgaacgttatcacctcatctgactgcaccgtcaccatcagttaa

SEQ ID NO: 191837 - DNA, 129 bp, Klebsiella oxytoca
atgcccgcactgatcctctgtgcctgccgtaagcgtggatgcgtagatacaaccaccgggcgctcaggctactgcgagatgcatcgtaatgaaggctggcaacagcatcagcagggcaagagcaggtaa

SEQ ID NO: 191838 - DNA, 1500 bp, Klebsiella oxytoca
atgatatcggaatctattataacacctcagcagtttggcgccaaagcggattacaatttcacaactaagcaaggaactgatgattcacaagcattcattgatgcaattgcagcagctatttcggctggatatcaggaggtttatgttcctgctggtaactatcttgtgaccaaagaaatcaatctcggtggtgaaggtagaacaacgagagagggggttcgtttaagaggggctaactggaataaatcgcaaataatcttcaaagcaactaatgatgatgatgtttgtatctcctttcgcggttccccgggcacacatacatcaaaagcattaagtaacatatgcgtaaatgcgcatgccgatacaatgtataaaggtatcggccttctaatgaataacgtctgctttggccatgttgatgagttcctgattgttaatatgatggttggaattcgcattcagaattcagggtcctcaggacattttacagaatttaactattttaaaaatggtcgattgttcaggaatgcaatcaatatccaattttatcgtaatggcggcgatccaagttttcatggcaacaattttgagaacatccaaaatcaagttatgccaaatggtggtattggggttcaggtcaacggtgaggctggtgtctgttatttgtacaaccagtactggcaaatgcaatttttcggtgggacaggttgtattgcgattgatctcatcaattgcaatacggattacaatggtggaaagttgactggggaagcaaatctaatttttagatctgatggttcaagtcggtgggattttcacggtaaattccattcgattagtccttttacttttgattgtccttctgagtcaactaaaacaggaggtcgtttcgttttcgaaaatttgacttcattgcttaatactccgattgcaaataatgcgaacagactaccggaaaattctaggtttttgccgtttgtgccaaacttcgcagacaaaaatggaaatggtattttccctacaatttttcacataaaatcttctgatatcgaatcgctgggtttggcaacatacaatcaaccaggcaactctttttatttcgggcatattgcctataactcaggcataactgattttattccaacattttggtttgatcatgatggttccagagtcactactgtggctaaatcatataatcttaacctggattcatctccttcaaatgcaggggctggttatgtattcagtgatactgcactgagacccaaacaggataattccgtagatctaggtagcagcactagacactttaaggacggctttttttcaggccaagttagtgtgggcaataatcctgtcgctacgatggggcttggggcagttaaacgagatgatgtgggagaggttgggcaaatgaaaatagacgttgcttctcaaacattgtttgtatgtgtagctaaaaacacctggaaaaaggttgctttgacagacatatga

SEQ ID NO: 191839 - DNA, 297 bp, Klebsiella oxytoca
atggcgaacctacgtaaagaggcgcgcggccgcgaatgtacagtcaggatcccaggttactgcaacggcaacccggaaaccagcgtactggcgcattaccggctggcgggtacgtgtggtaccggatgcaaacctgatgatacccaggcggctattgcctgcaacgggtgccatgacgtaatcgacggcagaaccaaaaccaccgatttcacctatgacgaactgcgcctgatgcacgcggagggggtaatgcgcaccctggaaatctggcggaaagggggattcatcaaatcatga

SEQ ID NO: 191840 - DNA, 360 bp, Klebsiella oxytoca
atggaccttggtttattgacatggctatttgacaaaatagctgagtttgcgggctatcagaaagctaaaagacttgcagcaattgaaggtttaactccggctgtagctgcgacaatcgcatataacgagagaataaactccggatatgcaaggaacgacgctgaagagaggcgcttgcacgaactatggtacacggcctcctctgctgtgagccgttatgacagagaattggctagagtatgtaaagaaaaggcccagtactggcttagatatgatgagtataatgatggtcatgtagaagaattgaacatcaagctaaaaagcgtcgctcaaagactagaagacctaaaatacccataa

SEQ ID NO: 191841 - DNA, 570 bp, Klebsiella oxytoca
gtggatagaaagaacatatcaaaagaaatcaataaattaaatacgcaaacagctctgtctgcgtcttttgccttaatcgtgcttgtagggttatctgtcaaattgcatctgatgggcgctgacttctatgcgtttttcgtttttgccgcaacagcactatatgtgtttttttctgcaaagcagattataacctccaacagcatgttaactgagttagcaagaaaatatgatatctctgaggtttattcggggaatacatggctattcccaacgcgaccgcaagagcagctcaaggttgttctaagtgcgagagccatcaatgagatttcaagtgaagcagatatcgaaggtgcactatctgaaagtacatataaatccctaaaacaatcagaagatattaagttttatggtattgataatatacctttgttatcacatgcctctcagtctttaggcattccacttagcaatgaggtacagatcgtttctgcgatggtcactaaaagcgaagagattggaaagcactttgatatttatcgtgactatatgtccaatggctatcgtcgttag

SEQ ID NO: 191842 - DNA, 132 bp, Klebsiella oxytoca
atgtggagaaggctagtcgattttttcttcgtaaaaaaattatgccactccaaagacgcgtttaaagggattaataaatggctaggtaaaaaggtgatagagttcacgatttatgaattatctagcgactaa

SEQ ID NO: 191843 - DNA, 627 bp, Klebsiella oxytoca
atgaaaaaggaaaaagcattagaattttacgaaaaactttatttctctgagattgagaataaagataaaatacatactcgtgctcaagctgaattcggcttaatagttatcactgcaactatactcacgtatctcgcaaaaaacacatcttatgaagttcatccatttcttgcttgcgtcgtttttttattcacagcgttttctttttttttgattcttgcttcatcttttttattaaaaaaagtcatttggggcaatgaatttaaatattgccctgctcctcaagcgctgcatgattatcacactcagttaattaactatgaagtaacatataaaaaatattgtgaagataatggaattgcatatgataataatcataccccagatgataagctatgggatgttattcagcaagaaattagagaatgtgcaagttggaatagtaatatcaacgaagtgcgttccagcaaactatttgagtcaacaaaatatcttttttggtcttggattccaattctcatagcagtaaccatatttattttggctgatttagatgcagcaacaccacgaaaggaaaatgcccctacctatttgataattcctcttgaaaacgtcaggagaacttga

SEQ ID NO: 191844 - DNA, 357 bp, Klebsiella oxytoca
gtgcatatttctgcgggggaagaaaacagcgtaaggtttgcggatatcgataacgcaatggcctccgccctcgaacaggcgccggtcggcgataaatacgcgcaggtcagctatgaaacgctggtcaaaatgcgtcgtgagctgaaggctatttttggcccctgcaacgaacggctgatgctaaaagccatgcgcctttacggcgccttcgccacgctcaacgtacgattcagcaacgacaagctgctcagcatgggtatgccaaaaccgccgcgctttaccgattacattgaccgctgcgtacagaccacgcgcgggctttctatcccgcagcaaatggcggtagattttaagtag

SEQ ID NO: 191845 - DNA, 180 bp, Klebsiella oxytoca
atgacggcgatcgtccgcaacacgcctaaggaaaacaggcgcgtcctggcgcatattccggccggccgctggggtgaggcgcaggatctgatgggcgcagtcgtcttcctggccagccgggcctcggattacgtgaatggccatatcctggcggtagatggcggttatctggtgcgctag

SEQ ID NO: 191846 - DNA, 1296 bp, Klebsiella oxytoca
atggaaccaacattgtcattaaccgtgatgttctgtgctgcagtgggtgcttcagtatcagaatcgctgtcagaatccgagtcactgtcggaatccgagtcactgtcagaatccgaatcgctgtccgaatccgagtcactgtcagagtccgagtcactgtcggaatccgagtcgctgtcagagtccgaatcgctgtctgaatccgagtcgctgtcggagtccgagtcgctgtcagagtccgaatcgctgtcagagtccgagtcactgtcggaatccgaatcgctgtctgaatcggagtcgctgtctgaatcggagtcgctgtcagagtccgagtcgctgtcggagtcagagtcagagtcactgtcagagtcagaatcggaatcgctgtcgctatccgagtcactgtctgaatccgagtcactgtccgaatccgaatcgctgtctgaatcggagtcgctgtcagagtccgaatcgctgtctgaatcggagtcgctgtcagagtccgagtcgctgtcggagtcagagtcagagtcactgtcagagtcagaatcggaatcgctgtcgctatccgagtcactgtctgaatccgagtcactgtccgaatccgaatcgctgtctgaatcggagtcgctgtcagagtccgaatcgctgtctgaatcggagtcgctgtcagagtccgagtcgctgtcggagtcagagtcactgtcagagtcagaatcggagtcgctgtcgctgtcgctatccgagtcgctgtccgaatccgagtcgctgtcggagtctgaatcactgtccgaatccgagtcgctgtccgaatccgagtcgctgtcggagtcggaatcgctgtcggaatccgagtcgctgtcagaatcggaatcgctgtcggagtccgaatcgctgtcggagtccgagtcgctgtcagagtcagaatcgctgtcggaatccgagtcactgtcagagtccgagtcgctgtctgaatcggagtcgctgtcgctatccgaatcgctgtccgaatccgaatcgctgtcgctatccgagtcactatcagaatcggaatcgctgtcagagtcagaatcactgtcagaatctgaatcgctgtcggagtccgcatcgctgtctgaatcggaatcgctgtcggagtcagaatcgctgtcgctatccgagtcgctgtcagcgtcagaatcgctgtccgcatccgaatcgctgtccgcatccgaatcgccgtcagcatccgagtcactatcggagtccgaatcactgtccgcatctgagtcagtttctgaaatcgaagagtggtga

SEQ ID NO: 191847 - DNA, 2007 bp, Klebsiella oxytoca
atgactgaattaaaaaatatctatccagggaaacatttctctgtgagagaagaacattttagccaagaagaaaaagacatcattaatgttttatcaaaagagttttacgtaacaaatggtgggggggtaataacgcttacatcaaacagtaagtataaatacatattactacgacccactgatatatatatagagatgtttaacctcgatagagagataatagttcttttcagtgattatacaaattttcaatcgcgtacattggatgctatagagcaggcggcaaaacaactttcatctttaagagtcgataaaacatgttgtattttgataagtaaagatcaagatatagaagaaaatatcagtgacctgattaaaaaagaacctgaaactgcaaatataataccgtttacctataatgaaacgcaaaaaggaaactctgatggttatttttttagaaacagagttcaaaaatatttgtataatagagatttgttttcatttgaagctccgttgaaaagtgattggcttttctttggaaggaatgaaatcatattgtcgactattaatcggatgaagggtggcaataatgcaggggtttttggtctgcgaaaaactggcaaaacttctcttattaatgccatatcgagaaatttacaaaagaatggcgaagttgttacaactattgattgccagagcccatcaattaataaaagaaaatggaatgaggcaatttattatgtatgtaagaaaacaaaagaagataattatcttcaatccttccttccagaagaggcatatttcaccgagaaggatgctgctgaactcttggcaaaatttgttagagatgtaaacaaagaaaaagataaaaaattattcttgattttcgatgagattgaaaatatttcaagagttacatccccaacagaacattggaggtcaggtgctgattttctttatttttggcagtcaatgagaaccgttttccaaacggtagggataaatttagcatatcttattgttggcacaaatccgtcatgcattgaaactccaagaatagatagttcagataaccctctgttcaatcattttacacctacttatcttcctggtttcgatattcgctctacacgtgacatgattagaagaatcggaaaaagaatgggggtgaattttgaagaggcaatttatactaatattaatgaagaatatggtgggcatccatttctaatccgccaagtatgtagcataattgcaagaaactcttttagtcaaactaaacctgttagcatagggaaaatttcttataaggaggcagttaaatcatttggggaaaatagttttaattatttagaaatgataataggtgtattgaaagaacattataatgaagagtatgagcttctaattactttggcgcatgaagataacgaaacgtttaaggaagcctccagaagaaaacagaattcattagcgcatctattgggttatggaatattaggaaaggacaatggcggttattattttatcatcgattctatgagaagctatcttctggagataaataaatacaggaaaatggaaacaagtattgagcaacggtgggctgaaatatctgaacgacgcaatattgcggagaaaaaattaagaacaataataaaaacaaccttgaaatccatgtatggagaggaattggcaaaaagtgcaattcttgacatattgggggggaaaagaaaagctgaatatacatctaagaattttaatgatattttcgatcctaatctatctacaatttttttcgaagatattagaaaaatcatttcaaaagaatgggggtcttttgagaatatatttgaaaaatcaaagaaagaaactttcgattcccttggttttataaacaaatatagatctgatgcgcatgctaaagatataacgcctgacgagtttgctttgtttagaataagcatgctaaaaattgaaggggatatatctcaatacttctcgtga

SEQ ID NO: 191848 - DNA, 519 bp, Klebsiella oxytoca
atgccgtttgaatgtcccagatgtgttatcgacacgaatgtgctatctgacttttacgaaggtggatgcttagggcttatctggcaagtttatccgggaggagtgtggatagatccctatgtatgcgaggaactaaaagttaaatacaatcttgatgtccaggaggaacttgcaaggctaaatcttccatataatttcactaatgactatgaacctgagcattatgttgaaatggctgagattaaaattcgcagacgagcgctgaagtatgctgacataagttgtgttgttaatgcgagaatacatgaagcaacatgcctttcggcggataatgcggtttacaaaacatgtggcgaacggggtgtaaaagcggcgagacatggcgggcttcttcaagaagcagttcgtcgagggcttctcaataagcaacaagccttaacgcattttcaatttttccttgatcgtgggctgactatgaggccttctattcgagaacagatcctagcaagttttgcataa

SEQ ID NO: 191849 - DNA, 1146 bp, Klebsiella oxytoca
atgaacattcaacagcgtatagctgaacgcttagtacaagcgagaaacgacgcgggaatgagtgcaatagctgtcgcagatgcgattggtgttgtacgtcaaacttacagtaagtttgagcaggcgcagggcgttccaagcgttactcaactcatcatgctctgcaaggtttttgataagcctatcgggtatttttatgatcaagatgatggcgagtttcgttttgcaatgcgagcagatagccctgatttattggacgctaaactccgcaatgaattgattgaaaagttgaaaaatatcaacgctattgaggaggctgctgatgcgaatttaccggaagatcttcctaactcaatgcctattttctctgccagagaagaggacttacaaagggtagaagataaggctatggaagagcgtttccgtcttggtatcgggaacgctacctgtgttggtgacattgtagccattctggaagcgtctgatatccgtgttattcctttcaatcgcgaagaaaatgataaaggaatggtgttcgggttttctgcgttttcaaataaatacggtaccgcaatttacgtaaatgttcatgacagtatctcagtagagcggcaaattttcagcatttgccatgaatatgcgcaccttatctttcatcgtgaagagtataacggccctgccaaaagttataaaaccaaaggcagatcaacttcaccagaagagaaggttgcgaaccattttgccgcttgtttcttagtgccagaaagtgcattgaggaaacagtttgtcatgcaaggtgggggatgggcttatgaagaaaccgttcttaggctgaaaagcatatttagagtttcggctacttgcattattgatcgccttagtaaatgcaagttaatcaatcaacaaaacactagatacctatgggcaaccgctaaccgtaaaggttggatgaggtatgaaccgaatcccataagagaagcactaaattacaaaggccgtttaaccgtattgtcgcgtaaagcgtgggaagccggttccgcgtcggaaaccttcatatctgaacttttagaactggatagaaaatctctcagtagtcttctggatgaatggtacgacgaacaggaggctggagaggatgccgtttga

SEQ ID NO: 191850 - DNA, 2115 bp, Klebsiella oxytoca
atgaaagaaaatgagttacgtgatttagtctgcgagagaatagacattctgggcgaggatttaattcttctcgataaagagaaatatctgccaaataaacttggtactaaaggctttattgatatatacgccaaagataaacaaaacaatcatgtattgatagaattgaaacgaagtaatcaagcggcaaggcaagctttgcatgaggttatgaaatacgccgaaggtgttaaattatactttggagctaatgacgatgaaattagaattatcattgcttcaactgaatggagtgagttactcgtccctttttcaagcttagctcatagcattcagtttccattaaaagggattgatattaaactggatggtcgtgatatttcagtggaaaccattcaacctctgaaatataacaaggggagatttatttcccctgcatatgatgtattttggtatagagatgaactaaatttaaatgatgggattttatctataataaaaacattaactggatcaggtgtctatgattttttaattacaatattgaaggcaggcaaaccaattgcttcttcttctaaggagaggcgcgtaggtgttataaaagatatcatgcgaatgaataaatcaaaggtgattgattcaaacacagaattattttcttatatagtattcctttccgctcaagctatgtccgctagcgaacatttggatataataaaaaaaacaaaaccaaacgaagtaattgaggaggtgaaggagactattgtaggccttgaggaagaagaacaaattgattatctccgcaattattcttttgatcttgaaaatatagaaagtgattattatgagattggaaatcctgcgaagttcatactttattttaatactcctggaataaaccttcataagctgattaggaaaggtttctttgagctaaatgaaaatttaagtgacgacgtcatccttgctgaattgaagggaagtaaaggtaactcagcacaaaatcttcaggcaaaccttagtattaactgcaaacaaaagctaagtaatttgaaagaggcagtccaggatttattggaaacaaatctagtgtggcagaatcaaatactgcaaattttagccgaaattgaaaaaaaacatcctgactcaactattgaattgaatatctaccaccctagaattggactattctcactttattatactttcaaagaatatgataataaagaaagttatcttccatattattcaatctatgtaaagaatacgaatgctaaggttttaaagatatatttcgggtgtttgcagggaagtaccaaaagcttgtcttttaatgaggtgattgataaatattatagtggtaatatccaagagttagtgcttacaatgacttggggcggtggagaatatcgagatgatgaaatattagatgatctggggatgtcctatatgagcttttgttgggatattgaaaaagataaaaagtattctttaataaataacaaatggcgcgaagatgatgttaaatctgtttatggctattttaacgattttattgagaaaaatgaagatttaatgttcgatattctaaacgagatatccttttatgatcagggagataaattttgcacgcctattattgatacccatataataattgaaagagaagaggttgaaaatcttgatacgtctaagcttcatgttttctttgaatatctaacatcttcacgttcagcaatgaaatactttcaaggcaaaatagatatttcaataaatggatatgatactgatgatgaattgtacaatatcgtggatgtcagaaaatatttaaggaaagtaagtgaagagataaggtttctattcttcttcattaatccaaatgggtatagtcaaattctaaaacagttttttttagcctatacagaaatcaaatctgagaccattactgctgtggggaatattcaaatcgagctagatacatcaaatgctcgctcattttttgaacatcaattttcaggtttgaatgaactaacagaactttgtgatatgactatagatgaaaataaagctatcacctatgctgttatgaattgtataaatgttcattatgcatga

SEQ ID NO: 191851 - DNA, 168 bp, Klebsiella oxytoca
atgcatttaggaatggatatcggtgggaccaaagttgagactgtcgtgctggatgacaagggaaaactggtctggcagcagcgcattgcgacaccgaaagccagtattgagcagttcttacagggtatcattggagaagtccatgccgcgcaggattgggcaggctaa

SEQ ID NO: 191852 - DNA, 282 bp, Klebsiella oxytoca
ttgacgattatccacgaagcccaacgcgcccgcggcgtaccgctggacgagaatggatatcagcggctgcgcgcaatgcctgcgctcattatccctctgacccataacgcgcttaacgatctggcgatacgcggggcggcgctggatatgcgggcatttcgtttacatcgtcggcgcactacgctttgggcgccgaaagacagcaccttacaacgtctggcgcgttgcggcatgctgctggcgatggtcgctgaagcgggagcctggctatggttacgttag

SEQ ID NO: 191853 - DNA, 1338 bp, Klebsiella oxytoca
atggcattgcaggacaaattgatcgactcactggggagtttcgccacgaaattcaacagctaccgctacatcatggcgataaaatccgcctttattaccctgatgccggtgatcatcgttggcgccttttcggtgctgatctccaatatggtgctggatccaaaaaacggcctcgccagctttcaggcgctctcttttctggcggcgctcaaacctattaccagcgcgatcaactacgccacccttaactttctcaatattggcgcggtgttccttattggcattgagctggggcggattaacggcattaagagcctgttccccggactgctggcggtgatctgctttatctgcgtcacgccgaccaccgtcgagatgatggtcgacgggcaaatgcatgaagtgaaggatgtcctgctgcgccagttctccgatacccgcagcctgttccttggcatgtttatcgctattctgtcggtggagatctactgctggctggagggccgtaaggggctgaagattaagatgccggataccgtgccgcccaacgtatcggcatcattttccgcgctgatcccggccattatcaccaccacggtgattgccacctttggctttatttttcatcaggcgaccggcatgtatctgtatgacgcggtctatcaggtggtgcagcagccgctggagcgggtggtgcaaagcctgccggggatcctgctgctgatgtttgtcgcgcagctgttctgggttatcggcattcacggtaatcagatgatcaaaccgatccgcgaaccgctgctgctgggagccattaccgtcaatatgagcgcctttgagcagggcaaagaagtgccgaatatcatcaccatgccgttctgggatgtctatatgagcattggcggatcgggactgacgattggtctgctgattgcggtgatgatcgccactaaacgcaaagagatgaaagagatcgccaagctgtcgattggaccgggcctgttcaatatcaacgaaccggtcattttcgggatgccgatcatgctcaatccgatcctcgcgatcccctttattattacgccgctggtaaccggcagcatcggctacttcgcgactgccgccggttttgccggtaaagcggtggtgatggtgccctggaccacgccgccgctgatcaacgcctggctgtcaacggcgggctcgatgggcgcggtggtgacgcagcttatctgcatcctgaccgcggtacttatctacctgccgtttgtcaaaattgcttcccgtcgcgcggaaaacgcccagcgtcaggcggacaacgcgcaagccagcgaaaatgcatga

SEQ ID NO: 191854 - DNA, 1761 bp, Klebsiella oxytoca
atggcagtggaaaaactgattgtcgaccatatcgacacctggaccacggcgctgcaaacccgctccaccgccgggcgcggtagttcgggtaagattgacctgtacggcattaagaagctgcgagagctgattctggagctggcggtgcgcggcaagctggtaccgcaggatccgaacgacgaaccggcgtctgaactgctgaaacgcattgcggcggaaaaggccgagctggtgaagcaggggaaaattaaaaagcccaagccgctgccggagattagcgaggaagagaaaccgtttgagctgccgctggggtgggagtgggtgcggctaggggatctcacaagcaaaataactgatggggtacatcatacacctaaatacctcgatgaaggtgttgcttttatttccgttaaagacattgatggaaaagaaatatcttttgaaaattgtaaatatatatctcaagaacaacatgaagaaattaatcaacgatgtaatcctgaaagagatgatttacttatttgtcgcattggaacgctaggtcgtgtcacaatcgttgataccgatagaccatttagtctatttgtgagcgttggtttaattaaactattatcaaaaaaaataaactttaattttttgcataaggctttttatagcccgctattgctatctcaaatggatgctataaaagttggtggaagccatactaacaaattaaatttaggtgatattcctaatttacttttcccatttccaccaagaaacgaacaagaggaaattttaaataaaattgatgatcttttgtctctttgcgaccaactggaacagcaatccctgaccagtctggacgcccatcaacaactggttgaaaccctgctaaccacgctaaccgacagccagaacgccgatgaactgaccgaaaactgggcgcgtatcagcgagcatttcgacacgctgtttaccaccgaagccagcatagacgccttaaagcagaccattctacagctggcagtgatgggcaaactggtgccgcaggatccgagcgacgaaccggcctctgaactgctcaaacgtattacgcaggaaaaggcgcagttggtaaaagacgggaaaatgaaaaagcaaaaaccgttgccaccgattagtgatgaggaaaaaccgtttgttaccccaaataattgggaatgggtaagattcggagagattggtgaaataaagggtggtggaacaccaagcaagaataactctgcattttgggaaggtgatataccttgggtttcaccaaaagatatgaaagtagattacatatcaaaaagtgaactctctatatctcaagacgcagtacaaaacagttcagtaactctcatctctgaagagagccttttgtttgttgtccggggtatgatccttgcgcatacattccctattgctattgctaaaaaagaagtaaccataaatcaagatatgaaagctatatcaacagatttatatcatcctgattttttaattaaaatgatgcaagcctgttcaatccgggtgttatctttagtagatcgctcctctcatggaacatgtaaacttgtttctgataagctttttagcttagctctacctctaccgccattgaaagaacagctacgtatttcatctgaagtggatagctttattaataattgtgaaaaattgaagaaaattattaaagcaacaaaacaaacccaactccacctggctgacgctctcaccgacgccgccatcaattaa

SEQ ID NO: 191855 - DNA, 1650 bp, Klebsiella oxytoca
atgagcgcgatcacattacgtaaagcgttaggtgtacttgcgaagtcatcttcgttttccgtaaccaccgtaacacaccgtcagaaggatgagttcgatcagttaaaggaacaactctttgttaaacaagagattgaaactgaattacaacgctatctggatattgctaaacccggtgaaatcatttttttgtgcggtagtagcggggacggaaagtccgaaattttaacccgctgtcagtcagatccgcgttatcagcggcgatttagtttccacttggatgccacgcatagctttgcccctcgacaatcagctattgatgctttgaatgatttatttgctaatcatcaccaacaatcatctccgttgctcattggcatcaacaccggaatgctcgctaactttgcccgagaaggcgctgaatgccacagggtgatccggtctgcaattgactcatttttatcagggcagcaggatgcaagccgtccttaccgtaacgagaattgttctttttttgattttgaacattaccctaaattccagtttgacgaaaataaacaatattcatcatttattaagacattattagataatttaactcgggatgatgataataatttatttcagtttatttttcggcgcgatgagtcaattaatccggatctaaaagaggtcgcaaactttaaattgctttgcatgccaggcgtgcagaatgtattaattacgcagctttttaaagcgcgactaattaaagatcaatttgtaacgacccgaacgctgctggattttttgcatcatctgctgatggggcctggctacttgtttgataacctcttcaccggtgcagaaaatgatctgattaaaaaagtttccgattttgatcccgccagattgcacacttatgaacttgatcagttcgttttgcgctatgaactgagactggttgatgctgaactcgatgattttttagccgcacttgagccgttacacattaagtttgatcgccagtgcgttaagcctggtgacgcaacctcgttgatccggcttttttggctattgcagcacgagtcgttgggtaatgattatcatcggagattttccgcgttttttaacgaatcgttgtttgaacattactcagaaatctggcatttacatagaaattacacagcagatctggagcaaaaaagatcattgaatcgcttttacacctctgaacttatcgctggtatccagcgctatgcaaaccgtaaagcgccggagttgagtaagcataaagaagaattttttttgggagagtttagcggggttaaaataactgcgccagtagcgctgaagcctgactgggacgctatccgtagtaaacatactgctcatcctactggcttcgatgttcatttaaaagtgggtgaggatccattaccccccatccgtatcggacttaacctattcgaattattgaaaaagttaaataatggttatcgtccgaataaatacgataaaaatgctattgttctattagacggaattattgatttagtttctgataagatcaagctcagtactgagataagattttatgatggtatgcgccgagtttatagtgcaagattggatgacgatatgatctctattagcggaatggaggggtaa

SEQ ID NO: 191856 - DNA, 1341 bp, Klebsiella oxytoca
atgtatcctatttcagagatcttggaagtaaggaaaaataatccacaacctagctatcttcctatacgaaataaaaataataatattaactggcaaatagtgaccggtttggtactaagttattccttgaaacataaaatcgaagagtcttacgggattgaacaattcagagatgattgcaaagcccattttgaaaaaataatcgatgaaccaggtttctgggccgtcttggaacgaatgtatttttcgaaccacgatatttttcgtgtttctcctatgtttttattgtttcaatcccagtttaacaataaaagcataaactctggttcagcagccgataagcgtcttggagctctcttcgctaatttgatgggggattttaatctcaactatccaatgccggataagctgaattttatcgaaaagcaacttttgaataagcttgatgaaaaagtatatgagttttctggtgaaagtccatttaccaaagaacaatcttatcttccctttattgcgaaatgttttcagtccgatttggcatttctagcagaatatccacaatatcttctacaggaactagccaatactttgcgattgtatgcttttagctggtgcgctcaacttgcgctcaatctagacaattggcaaaagggggagccgcaaagcaaatcactttttttcatccttgactcggaaaaagccagtgcagaacgggaaggtgtgcaaacctatggttataagctttttgctcggcatagtaaaaatcttttcccgatgctctctgcgctggaagttttacagtggaatgataaaaagcacaaagggcaacccaaacgcccgctatggcaggtttatcaagattgtctcaattactcagattcatcaaaggtactaaattcgcttaacaattacttgcaggagtttattgtcgagcgcgaacttcaggtttatgaacgagctgcaaacttggatgaggcctttaagcagctaaaatcagttgctgttggacagtttcagaataaaaggtctgatagagcaagagtgaaccgagactacattaatgagcttgagagccagatttgcactgacttcattcaggtccgtggtcgggcagggaaagtgttggtgctgaatcaggatcgtcttctgttactgaccaatctcaccataggcaaaaatgacaaactccgcctgcacgaactgctgcgtggttttgaacagcgaggtttttatctggataaccagtcggcgcaaacgttggtcgcgttttatgaacgcatgggaaatgtagagcgaatgagtgatagtggagacgccgtgtatgtccgtaaaacagtatga

SEQ ID NO: 191857 - DNA, 5088 bp, Klebsiella oxytoca
atgtccgtaaaacagtatgaaacctatctggcagaaacctttattgaatgggtaggtggcatcattcagcccggcgagcgctaccagttcaaatctcccgatcccgataatgccctaaaactctgggaagcattcgtctctctggcggacggcaatcagttggaaattgcgcaagggcaatatattgattgcctcccctgcaatggtgttcagcttattcctgtactgcacggagccgaggctccagcattcacagaaaactacatttctcatttgcgcgatgaagttgcagggcgcagcggcgtttttgcccaaacagcgctgttgattattcacaacagtatgctcgataccctgattaacagcacgaaagacgtggcggcaccggatgctatttggtacccacaaactttcagtcatcaattggaaaagctcattactactaatagtaaccgttcggaattgtcccgctgtttgctggaggatcaactggcgacggtactgtatgaaggtgcgaccgtatttggtttttcgtcgctgtatcgcttgctggatgatggcaatctggatttctccgagcttcatctgtttaaagatgatgaactactgaattttagccagaaacagctacgcacccggttgaatgaaaaccgaaaattatatcgccagatagaagactgtgttgaacgctacagtggacagctggagaatgtgctgcctgagtttagttcaaaattcattcaggagcatttttacgataaagatgactggcgtgagctcgatttctccgactacaggaaagagaaagaacagaatagtgaacaaaaactggtgctggaaaacgtctccatcgaaaacggcgaggtttggcaacgggcgaaaagcgccagtaaggcaggcaaacgtgatatcagcctgctggtgcaggtgctgccagggcaatcaaaggctgagctggagttcagttttcagggtaatgatcttcaggataaccagataaagattgcccataatcgtcagttaaagaatgcacctttctggcgcaccagccgggcgggcggcaagacttcacgcattatggcgtcggtgccttttgatgggcatccctgcttctttagtctcgaactgaccaaccgcaataattcagccgaagagtataaatttcgcctgttgttggtcgagcagggacaattctggctaaacgatattcagcactgttaccgtatcgagccaggtaaagatcaaataacccttcaactggaagataacacgctgcgtattgcagagtctggcaacttgatatgtacgttggatgacgagagcgaagacatcgactgccagcattatgctcaggtgaattttgagacgctggcaaatcaaagtgacctggttcagtttgcgctcgtttccggtgattcccgtctgtcgtttaacattgaggggccgggagcagaagaagggctaacgttaccgttgatttttgaccaaagtcgtttcaataagttgttcaaagaagagggcaatgcaacctggaaccgactaaaagggcgcatcatactcgataatacggaacacaaggttgtaggtgtacgccagcagttgttgatactggaagcctcattaattgagcaacgtctgctaggtacgggaagtgacgatagtgagtttgcgctggatgaacttcttgccagctaccccgatctccataacgcctatgagcagttatttgcctactatcatcgtcgtaacaccctaccgagtctggtgtcgtggtcagcggaatatcgcacactggtcagctacattgttactacgtttgaacagtcactccagcaaatcggcctgagcagagcgctgacagcgcaggagaaacgtcttctccatctggggatctgccgcaatgatagccatgagcgtctctcaccactgcacccattagtgctggcctaccatctacaactggcagaagctatcgttgcggagtcggaacagaacgattcggcttcatttgccacactaccgccgatcactcttgatcgcttgatggtttcggggttaatgccgtttgtttaccacagtgagcatgaatacgcacaactacagccggtggaggaaaaccgcttctggattgatgcggttcctcagcggcaggtcagccatgactacgttaaacgtctggtaaaagacaaactcaatgagttcacagacgcttacgcccggttgttccagagcgctgaaaacagtgcgttgattatcaatgccattaatcaagggaatgccaaagaactgtttctgggattagtagaatattttaagcaagaaaaagagcatgctatttcggttcatgtgaactgctacgatgaacgtttgctacccaatatgttcgatcactttgctgaaagtggtagctatgagcagcttaaaaacgatctcgatctgaacagcggcgtatggcggtcggaagcggatatgctgattgacctgctgcgtagccggttaacgttcagcaagtttgtcctgccgtcagaaagcgacaagctggcctatgcacatctggcatttttcaccaatacagcccccgtggattgccgccagatccgcattgaagatgcatccagcggggtattgtgtcatgggttgatcgctggggaaggtgccgaaacgcagggggatgcttactttaccgcctttggactgcgagatgtggatactgagtcttattgcgccctgcgtcttgccagactaatcggctgcctgtggcaacccgcacgtcaaagcaacagccagtatcatggacaagggatcggcctggccgtgagtggcaattttaaacagctgctcaattactcttacaatagtgcgctctggaccaccatcattgatcctaaagtcaccctcgactttttcaccagtcagaaagatgtggtgcttatccactattctgaccagtacaccagttgcgcaggctacgatgccgtcaccgtcacgaagcaggttgatttattcctgcggttgctccagaccggaagccagtcagggcaacctgctgttgatagtcagcatttgctggctgaatttaatgcctttaacggtgaatggctgctgaaaatgctgcgctccagtgaaagggagcgtaaagagaaacacggcattataggcgcgtataaatttgtgcaatccatgttgcaccagtccgatatttgctggattccgctatcggtggccgaaatgatccgcgtgtccggcaatgtcgggctgaaaatgaaagaaagtgatttatcgagaaatttacaggggtatcgtaaaggtgcgatctctgatgatgtgctctttgtgggattcaaagaagaccgcctctatctgttgccgctggaagttaaaaccggggcgcgacctgactacagctatgcaggccaacaggctcgtgagctgaaacgttatttacagcaggatattctggaaccacaaacgctggcatcacagctgtaccgagcactctttattcgtcaggtactgatgcaggtggagaaactgcgcctgtatggtgtgctggacagcgacaaactggctcccttgctggaacgacgcgaatggtggttaacgggcgactatcagttaggtgagttgaccgactatgcggacggcttcgttgtggcgcatgtggacagcgcaacctgcttcgatctctcttataaagagacagcggagaatattttacagatcgaaatcccttattcactgctgccttcgctgattgctgcgcagggggatgaaccaccgctggcggaacgttaccgggtgccggaaaaatacctgcttaagccagagtgtgatgccagtccttcacaacccgaagttgtggtaaaagtcacaacgccgaccactgcacagtccatttcggaaccagagtcgttacagcctgctgtatcggtggcggctcctgatattagcgataccccattacagatcctgtttggtcatgatgctacgcgtcagagtccgttatattgggagccaaccaacactgccaagttcatgaataccaataccggcattattggaacgatgggcaccggtaaaacccagtttactaaatcactggtcacacagttgatgcgtaatcagtcctgtaacgttgatggtaaacctattggtttgctgatcttcgactacaaatcagactatgtggatgaggctttcctggatgcaacgggtgccaaaaagtacaagttatttaagctgccttacaaccccttatctctatttggcgacacgccaatgctaccaatccatactgctggtggactatccgaaacgatggcgaaagcctatgggctgggccataagcagcagctcaaattagaaaatctgattttagaatgctacgaagcggcaggtatttcgccggaagatccgacaacatggtcaaggactgcgccgacgattgaagatgtatggcagcgcttccttgatcaggagaaggttgaagaagattcgctttacgcagcactttctaaactggcgcgttacaagatattcgaaaccatcccggagaaaatgaccagcttgtacgaattgattgacggcgtcaccgtaatcgaactggctggttacccgccagaagtgcaaaacctggtagtcgcgctcacgctggatctgttttacgctcagatgcaaaagcgcggtaaaccggtggtgcggggggattatcgtcagctcaccaaaatgattctggtggacgaagccgataactttatgcgtcaggatttttccagcctgcgtaagatccttaaagaaggccgtgaatatggcgttggtgcgatcctgtcaacgcaggaaattacccactttaagacgggggataacaactacgcttcctatattctgacttgggttattcatcgggtgtcagagattaggaatgcagatatcaaggcggtgtttaacgttgacgataaaggtgagcaggaatctttgatggggcagattcggcaacttgagaagcattttagcctgtatgttgatggggataaaaaggtgagaaaaatgcgcgataaagcattttgggagttgagtggaaatgagtga

SEQ ID NO: 191858 - DNA, 543 bp, Klebsiella oxytoca
atgagtgattcaacacctcaaaatatctgcacgctttttagcgagctttggcgtagactgaaattggtattcagtaatcattactttttgggtttttttatattaattgtggtgattataggtagtataagtatttggtttactgctgtctttaacaattcaccaggaagacttgaccgattgatagtaaacatgaatacgcttaattttctcgcgttttctgctccgctattagctactactatttttgaaaaggcagtcaatattattataaatcgtaatgaagtcgatgctagtaatattgcagttcttctttggttgctatttggtacagtgtttacaatttcagccattatcgtactgtatagtattggttccagtaatggaagttatttttcatggtgttcattattcgcatggattatatctttaatgtattgggctgttgctaacatcgagaaccctagttactcaatgaatgttgattcaaagtctgcatctggtggtgctgaagttggttcagctagttctttgaataggtga

SEQ ID NO: 191859 - DNA, 1164 bp, Klebsiella oxytoca
atgccattttatgaaggtcaaacaataaaagtcaaacagccttttggcgacttttatataatttcgattccggctaaattattagttcaagtttgttattcttttgctgctagatatggtgacgatgtcttatcgggagtgcaacgaggaattaatgaaaatagagttaaagcgatagcacaattctgtgcgacaagtgatgcaatgtttccaacgtcagtaattttatcggtcaaccttgatgagaatggagaatcaccattacatccatggtatattaatgatgattctaaattagttatcccaacttcagatgagattgcatctattgtagatggtcagcatagagttgaaggacttaaaagagcattagaaaaaaatgaattatctgctgactttgatattgtttgtgccatttacttcgaattaccagcaccgaaacaagctgaagtattcgcaacaattaattttaatcaacagaaagttgataaaagtttagcttatcagttgtttggctacgatttggattctgttgaaagcaagtattggtcccctgatacactcgctatttatttaactaggttgctagacaaagaagatgattccccatttaaagggcatgtcgattttggaatgaaaaaaatggacctggccattcaatatgaagggggggaagattcttttgataaatggtatgtatctacatcaactatggtgcagggtatttcatcgttgataactactaacccgtctaaggatagatattttttgcataaaaaaagaataataagaagaagtcgtgaagttctgagtgatatagaaatgaaaataactccaccattaagggggtattatattgaaaataaagatggtcaagtttatgatttagtaaaagattatttcacttgctgtgatgaaatgttttggagacgaagtgatatttcttttatgagaaaaacaataggtattcaagcattgtttgattttttgaaatatgttcttaattatattaataaacatggccaaaaaatttcatctgaacaggttgaattatatttgaaaagaatagatcctgataagctaattggttttaatattaactattcaggggtggggcgtacccaaattagagactttttaaaatctgaatgcggtattaattaa

SEQ ID NO: 191860 - DNA, 354 bp, Klebsiella oxytoca
atgctcccgaatcgaatggtgcttagtcgtcagactgaagaccagctcaagaagttaaaaggatatactgggattacgccaaatgtcgcggctcggctggcatttttccgctcggtggagagtgagtttcgctattcgcctgagcgggatagtaagaagctggatggctcgctagtgctggataaaattacgtggcttggggaaacactgcaagctacagaactggtgttaaagatgctttatccacaattggagcagaaggcgatgattaaggcatgggctgcgcatgtcgaagatggaattgcagcgctaaggaattatcgtaatttaaaagatttctctaatggcgtttag

SEQ ID NO: 191861 - DNA, 2010 bp, Klebsiella oxytoca
gtgctcattaagcaactggtattacataattttcgcgtattttgcggcacacacaccatcgatctggctcccagaaagcgcccgcatgaagtaaaccctcgcccgattgtgctatttggtggtttaaatggtgcagggaaaacatctattttgtcggcaattcggctggcgctgtatgggcgtttagcatttggcccggcaatgcagcagcaggagtatgttgaacaactcggtgcgctggtacacaacgggacgtatacagcagagcgcccggatgaggccgcagtagaactgacctttacctacaaccaaaacggccatgagactgaatttaccgtcacgcgtagctggaaaaaaggaaagaaagatcgtctctctttgcagcaggacgggcaaccgcgtagtgaactcagttatgaccagtgccagggatttttgaatgaattaattcctcacggtgttgccgatcttttcttttttgatggagagaagattgcagagctggcggaagatgaatccggcaatattctgcgtacagcggtgcgtcgtttgttgggactagatctgatcgccagactgcaaaatgatctgatgatttttgtcaaacgccagcaaaccgcccagttgggtggctcccagcaacagcaggttgaagcgcttgaggcaaagattaaaacgcttgccggtcaggcggagaaattgttggaagaagccgatttcgtcaactcgcggatcgaatttttatcccaggacattattcgccatgagggattgttaaatgcgcagggcggcgcatttgcccagaccaaagcacaggaaaaacagaaagttgaaacgctgttaaaagaaaaagagcgtctggaaaaagcgttacgacaggaatgcgatggatcgttgccctatgcattagcgcctaatacgttgtcgcggttgctggaaaaaattgccaatgaagcgcagatcaagcaggcgaaaatttttgagacagagttaaatcaatttttaactcaactcaaaaatgatatcgcgttccgttccagcagtgagagtagtaccagagccattgctaccgaagcgattaccaataatttggacgcatatatggcagccaaaccaaaaggtgatttgctgtttgatatttctgaacgtgaagccggtatgctccagcaatccattgagcaggacagcaaaaaagcatggcagcgttttgatatgtaccgccatcaattagcggatattgaacaacaactggagcaggccgctgccaatattgctcgcgccccggaagacgagcagttaatggatatctttgcagcattacgcgatctcgatcataagcgtgaaaaacagcggcaaaaataccgctctctactggaagaggctaaacggacgaaacagcagcaactggactgtgttcgtcaggtacaaaaagcacatgacatcacccgtagccagcatggtttgagcagcgcatttaaaaatgcacaagagaccattaacctgctcgattattacagcaatgtactaacgcaggcgcgagtgaaaaagttatctgctaactttgaaattgcctaccacaagctggcccgtaaagaggatttacagcttaatgcgcacataaatccacagacatttgatgttgaactggtggatgaaaaggggtcggtgattaatcgtaagctgctttctgcgggtgaaaagcagatttatgcgattgccattcttgaggcgctggcaaaaacctctgggcgtgatttcccggtgattattgatacaccgttagggcgtctggactctcagcaccgggataagttgattaatcattatttcccggaggccagccatcaggttgtgctgctatccaccgatactgaagtggacgagcgttatttcgtcgatcgactgcgtgatgatatttctcatgcttatgagattgtgtttaacgcacataccaaatcatctgcgctgaaacccggttatttctgggaactaactaaggaggctgtctga

SEQ ID NO: 191862 - DNA, 1635 bp, Klebsiella oxytoca
atgagtaaattagttcaggcttacgatttggccgaatacgaagattttattaatcaggagcagttcgctggacgccctctggccgaatatgttgctgaggttcaaagaatttattgtgcggataagcgtccgtgggtaattggctatagcggcgggaaagattcttccgccgtgatcacgctggtgtatctggccctgcttggcctgcccccggaaatgcgcagcaaagatgtttttgtagtgtcatccgatacgctggtggaaacaccggtggtagtagatttaattaagaaaacgatgttgcagattgaggcaggcgcaaagcgtaatggcctgccgatcactcaacatgcggtaacgcctaaaactaatgaaacattctgggtcaatttactggggaaaggttatccagccccaacccgtagttttcgctggtgtaccgagcgtatgaaaatcaatccggtgagcgactttattaaagataaggtcagccagtttgatgaagtgattgttgtcctcggctcacgtagtagcgagagtgcctcccgtgcgcaggtcatcgcaaagcataaaattgatggctcacgcctggcccggcataccacactggcaaatgcgtttatctatacccctattgatacctgggatgtagaggacgtctggaaactgctgcgcggagcgttccgctatgctccagaagatatcgacgaatgggaaagcccatggggtggaaacaaccgccctctgtggacgctgtatatggactcttccgcacagggtgagtgtcccctggtgatcgacgaaagtaccccctcttgcgggaactctcgctttggctgctggacctgtactgtagtaaccaaagataaagcgatggaaagtctgatcaaaaatggcgaagagtggatgtcgccattgctgaaatatcgtgatctgctggcgtttaccaccgatccggcgaataaagacacctatcgcaactataaacgccgcaccggtaaggtgagctatcagtacgctaaagacggtgaagatcgcagtgcagagcgtaagcatgttcctggcccctactggctcaaataccgccagcagtggttaaaagacttactggaaattgagcgtgatttaaacgcccagggccacacgattacgttaattacccagccggagctgcatgctatccgtcaggagtggttgaaagatcctaacgagccagactggcacgacacattgccgggaatttaccgcgaggtatatcagcaggatctgaattgggtggttgacgatcagtcgcgctttgatgccagcgatgctgatttgctggcgcagataacacaagggtttgacgttgtacctgaaatggtgatgaaactgattgagctggaaacctcgatggaagggttaagtcgtcgtcaggggatttttgacaagctcggcacaattttgaagcaggactggggcagcctggaagagatccagcagcaacaggcaacgctgcaaaaacgcaacgatcgggatattcatcaggacgaggtagataagctagaagctgaactccagactttacagcgcagaattatcgatgcgggcgaatcgtctgtgcttatcgatgaggaaaatgaacgtgctcattaa

SEQ ID NO: 191863 - DNA, 1086 bp, Klebsiella oxytoca
atggcgaactttgacgctgattattgctactcttttcccgccgtacgtgggattcaggctggtaggcctttctatattgccacctgcccaatgcgtatcatacccaagatttttagttttgatgagactgacgttcctcctgaactacgggcacagagaaccttaaacaaatctcgaattccagaaatggttcggtatctcttggaaaatcctaaagattatgttttttccgccttaacagcttcaattgctgtcgatgtgcaattcgacgaatactctggttcaaacaaccttggtaccctacgtgtccctatggacgctcaaatcctgataaatgatggccaacatcgtcgtaaagcaatagaagatgcccttaccgaacgaccagaactggggcaggacaacatccccgttctattcttcgttgacgaagggctacaacgtagtcaacaaatgtttgccgatttgaacaaatatgcaattcgtcccagcccctctctttcggcgctgtacgatcatcgtgatgtgagttcaaatcttgctcgttacctggcaatgtctattgaacctttcgtaggacttacagaacttgagaagtcgagtatcagcgcgctctcaaacaaactctttacattaagtagcatcaaacaagcaacacgtgccctacttggtaaagatcccaaattaggaaatattgaagaaaatacaaatatcgcttcggtttattggcagaccctttatagcgttatgcctgactggcagttggctgcgaaaaaagaagtttcaccagcgcagttaagacaggattacgtccacgcccatggtataggtctacaggcgcttggattgctcggtcgagccttactgcaagaaaagcctgaagattggcaagacaggataatagaactaaaaactttcgattggcggaaaagcaatccagagatggtaaaacgcgctatgcaacatggaaagctgagtaaaaccagtgttgccatccaactaacctgtaatgcattaaaaaatgcattatcgctccccctcactcctgaagaacaggagcttgaagctcagatggttgtctcatga

SEQ ID NO: 191864 - DNA, 360 bp, Klebsiella oxytoca
atgattatgataactacgattatcgtagttatgaatgactcaaacactcaaaatgtgattttcagtcggcggctcaaagagctccgcgttaataaaggtttatcccaaaagcagcttggaatcctggctggtatcgatgaatttgttgcaagtactcgtatcaaccgatatgaaaaaggtgttcatcaggcgagtattcggattgttcaacagcttgcggctgtgcttgatgttcctgtggcttatttttacaccgaagatgatgcgttggcgaagttagttgttgaatggaataaggtagacttaaaaaaacgagagcgaattttagatattctttatgataaaagtagtttgacatga

SEQ ID NO: 191865 - DNA, 609 bp, Klebsiella oxytoca
atggacattaacatttctgataaatttgcaaaaaaaatcatcgagtgcttattcatcggggtgatatcaagtgcttttactatttctttcggatatatatctgataaaaaaaatgccattaactcagcttatattgaaattaaccaaacaaaattaaaaaaacttgcagaagtctgggaacaggcttacctattagataaatccatagacgattatcgtgatttatatattcaaagtgatgctaagattcgagcaaaacttattgagttaaaagcaggattaacaccaaataacattaaggattttgaaaaatcagtcaatgatctagataaaagcatgagtcttgaactatcactaaaaataaatgatttagaaaacaaacaattactaaacttcaacaatattttaaagaaaaattctttttggatatcaccggaaaatatcaagccccttattgaatattctaaagccgttgtaagaatgaccaagattgcgcctttaaatagcgaagaatcccaaaaggactttgaaaaattaaataatgaaataaaggcactatcaataaccataaatgatgtgcggttgaaaatattaactgaagaattataa

SEQ ID NO: 191866 - DNA, 657 bp, Klebsiella oxytoca; identical to SEQ ID NO: 79122

SEQ ID NO: 191867 - DNA, 561 bp, Klebsiella oxytoca; identical to SEQ ID NO: 79123

SEQ ID NO: 191868 - DNA, 615 bp, Klebsiella oxytoca; identical to SEQ ID NO: 79124

SEQ ID NO: 191869 - DNA, 1098 bp, Klebsiella oxytoca; identical to SEQ ID NO: 79125

SEQ ID NO: 191870 - DNA, 1554 bp, Klebsiella oxytoca; identical to SEQ ID NO: 79126

SEQ ID NO: 191871 - DNA, 1296 bp, Klebsiella oxytoca; identical to SEQ ID NO: 79128

SEQ ID NO: 191872 - DNA, 1683 bp, Klebsiella oxytoca; identical to SEQ ID NO: 8476

SEQ ID NO: 191873 - DNA, 438 bp, Klebsiella oxytoca; identical to SEQ ID NO: 79130

SEQ ID NO: 191874 - DNA, 1068 bp, Klebsiella oxytoca; identical to SEQ ID NO: 79131

SEQ ID NO: 191875 - DNA, 591 bp, Klebsiella oxytoca; identical to SEQ ID NO: 19457

SEQ ID NO: 191876 - DNA, 453 bp, Klebsiella oxytoca
atgtcgtttttatttaaattaaccatcgcgattttgattgtctttgcaatcctttttccgattttaatttcatcagataacaaactgtccgcacttttttggaagataccaaaagatttctgggttttcctgattatcatgtacggggcaatcatcacggtggtgttcatagaaagcagtgaacaggcacgcatccgccgccaacaatatttgcaacagtacaaaatgccaaatgagatacatgaaaatgtggtgataaaaaacagtattatttcaagagaaacaacagatgacgaatctgacattaacaccctgtaccttgattcatttaaaagtaaaaacaactgcaaatcttttgaaaccaattcaaatttactggataaaaatggtaagcctgtggaaataatggtgtgtgatgttcaggaactgcattttttcgttccaaagaattaa

SEQ ID NO: 191877 - DNA, 255 bp, Klebsiella oxytoca; identical to SEQ ID NO: 79134

SEQ ID NO: 191878 - DNA, 567 bp, Klebsiella oxytoca; identical to SEQ ID NO: 19456

SEQ ID NO: 191879 - DNA, 684 bp, Klebsiella oxytoca; identical to SEQ ID NO: 79136

SEQ ID NO: 191880 - DNA, 534 bp, Klebsiella oxytoca; identical to SEQ ID NO: 79137

SEQ ID NO: 191881 - DNA, 288 bp, Klebsiella oxytoca; identical to SEQ ID NO: 79138

SEQ ID NO: 191882 - DNA, 1077 bp, Klebsiella oxytoca
gtgtataaatacacggcacaatcgctccgccataagcgacagcttgtggcaggtctgaagaatactccatataacgcagtacactggagtcagttagcacccgaagagcagatccgtttctgggaagactatgaagcgggaagggcgaccactttcctggttgaaccggaaaggaagcgcacgaagcgtcgtcgtggtgagcactccaccaaacccaaatgcgaaaatccgtcctggtatcgtcctgagcgctataaggcgctgagcgggcagctcgggcacgcctacaaccgtctggtgaaaaaggacccggtgaccggcgagcagagcctgcgcatgcacatgtctctgcatcctttttacgtgcagaaacgaacgtatgtcggtcgcaaatatgctttccgtccggaaaaacaacgcctcctcgatgccgtctggccggttctggtcagcttcagtgatgcgggcacacataccgtaggcatgagtgtttcccgtctggccagagaaatcagcccgaaagacagcaaggggaaggttattccggaactggaagtgacggtctcccgcctttcccgtttgctggccgaacaggtacgttttggtgtgctgggtgtttcagaggaaaccctgtgggaccgtgaaacccgccagcgtctgccacgttacgtctggataacaccggcaggctggcagatgctgggcgtcgacatggtaaaacttcacgaacagcagcagaaacgactgcgtgaaagtgaaatccgccagcagctcattcgggaaggtgttctgcgtgaggatgaagatatctccgtacatgcggccagaaaacgctggtatctgcagcgcagtcaggatgcgctgaaacaccgtcgtgcgaaagcagcagccagtaagcgcgccagacgcctgaagaaactgcctgccgaccagcagattcatgagatggcagagtatctcaggaagcgtctgcctccggatgaagcctatttttgttccgatgaccatctgaagcgaatggccatcagggagttgcgtcagcttgaactgacgctggctgccccgccaccgcactag

SEQ ID NO: 191883 - DNA, 270 bp, Klebsiella oxytoca
atggcacaggttaatatgagtttaagaatcgacgctgaactgaaggatgcttttatggccgctgcaaaaagcatggaccgtaatggctctcagttaatccgggattttatgcgccagaccgttgaacggcagcataatacctggttccgtgaccaggttgcggcaggacgtcagcaactcgagcacggcgatgtgcttccccatgacatggtcgaatcctctgctgcagcatggcgggatgaaatgagcaggaaggttgccggtaaatga

SEQ ID NO: 191884 - DNA, 282 bp, Klebsiella oxytoca
atgatggagatattctggaccatgctggccagccaggacaggaagcgcattcgtgagtacattgcggagcagaacctgatggctgccattgaactggacgaacggattggttattcagccagcagcctggccgggcagccgtataaaggccgcaacggtcgtgtggaaggtacccgggaactggttattcacccgcattttgttctggtttatgaggtcgacagccagtggggaaaagtgtatatcctgcgcgtgttgcatactgcacagaagtggccatag

SEQ ID NO: 191885 - DNA, 849 bp, Klebsiella oxytoca
atgaataatgatgagctggccaccagacgtgcgcaggcgattgccgaagacaggtgtttctcgaaaggacgtttgcgcgatgaattcagaatgaaaccagcccccggtgctgagccggttaagtggtataaaaacacttatggtggcaggttcgctgtataccgaattgcagactgtgttccgatgcgtgagaaacgccctctgacgagtaaacaacagctggctggccagcgactttccgttttatccagacttaacagcaccagtggccggatggcacggcaggcatatgactggctgagtctggcaccgctctttctggatactgaaacgacaggactggataataccgcggaagccctggaaatcggcctgaccgatgcggccggtcaggtggtatttgaaaccaggctgaagcccacggtcgccatcggggcgcaggccgccgctgtgcatggtatcagcgagcaggctctctgcggcgcaccatcatggacagatgtggcgcggcaactgcgtcatgcaatcggggaccgaccagtaattatctttaatgcccggttcgacatccgcattctgaaacagactgctgccgcacatagcgatccggctgactggctggaagaactgacggtatattgtgcgatggagctggctgcaggatattatggggccaccaaccgctatggcacgatttcactggcctgtgctgccagccaggccggactgacctgggaagggcaggcacactcagcgatcgccgacgcacggatgacggcaggggtggtaaacgctattgctgcatatcatctggaactgctgcaggaacaggcacggctgaaaatctga

SEQ ID NO: 191886 - DNA, 441 bp, Klebsiella oxytoca
gtgcccgccgatgcgctcaagccgtggattgcgcggcgtgaacgctggccgtcctttctgatccggcgcgatccgcgcgacatcagccgtatctgggtcctggaaccggagggacagcattacctggaaattccctaccgtaccttgtcgcatccggctgtcaccctctgggaacaacggcaggcgctggcgaaactgcggcagcaagggcgcgaacaggtggatgagtcggcgctgttccgcatgatcggccagatgcgtgagattgtgaccagcgcgcagaaggccacacgcaaggcgcggcgtgacgcggatcgccgccagcacctcaagacatcagctcggccggacaagcccgttccgccggatacggatattgccgacccgcaggcagacaacttgccacccgccaaaccgttcgaccagattgaggagtggtag

SEQ ID NO: 191887 - DNA, 780 bp, Klebsiella oxytoca; identical to SEQ ID NO: 15299

SEQ ID NO: 191888 - DNA, 498 bp, Klebsiella oxytoca; identical to SEQ ID NO: 15298

SEQ ID NO: 191889 - DNA, 351 bp, Klebsiella oxytoca; identical to SEQ ID NO: 146911

SEQ ID NO: 191890 - DNA, 297 bp, Klebsiella oxytoca
atgctgcgctttatttttgctaccattgcctacgatcccgatccagatttaaccccgctgactgtgagacgtttgtgcaaggcattgttcggcagaaccggaagccagtggctggttgttgaagtttttggggagaaggggcgtcagcaccgcagcgcggacagcaatccggagatggtggaaaaaatggctgccagatatcgtcatgccgccgaactacactggtccgcaacgctggcagaaattgaacgggtaaagcggctttatcagacgaaaattaagaaatccaaaaaataa

SEQ ID NO: 191891 - DNA, 495 bp, Klebsiella oxytoca
atgtgtgattcagaagcggagaagattttattcatcctgaataaacatgaacgggcatacagacgcctgatccccgtatatatttttttagctatagtattatggattttacctattctcctgattgtatacctgtatttctgtatagttgacaatgagtttctcagaatcggtttctgtattgcatggacagcatactactttctttcgcttttcaagtattttgtaaaatacttctttcctctcgatcgtgaagatttgcttaaactgatggagctcgccaaagattctcctgatgcgaaacaggagcttcttgagcgtcttttgtccggaaaaagaatgaccgggcgggatgaaatggatatcaagcgcattctaaaaacaaaggaagcacttgataacatcaggaattttattgataaacagcagttaacgaatagtgatactccgaagaaaagcacggtcccaaatgaagataaaaaaggcataagatga

SEQ ID NO: 191892 - DNA, 603 bp, Klebsiella oxytoca; identical to SEQ ID NO: 79142

SEQ ID NO: 191893 - DNA, 1347 bp, Klebsiella oxytoca; identical to SEQ ID NO: 80744

SEQ ID NO: 191894 - DNA, 1881 bp, Klebsiella oxytoca; identical to SEQ ID NO: 80743

SEQ ID NO: 191895 - DNA, 348 bp, Klebsiella oxytoca; identical to SEQ ID NO: 80742

SEQ ID NO: 191896 - DNA, 348 bp, Klebsiella oxytoca
gtgacctttgagcagaaaaaagcccgggccattgccctgatggacagcaaaaagatgtggcggagcaattatgcccctcctcttctgtgtattctctggcggctgggtatccggcttccgccattaccctttatgccgttctggcaggtcacgctgttgatggggagcttatggggcatttcctggggatgtgcaatgtggtttatctaccgggggccgtcaggaatggtggcaggtgaggccataattataagtatcacgggtggttttttgttcggactgctcacggcctctttccactggtggcgcaggaaagttaaccggctgccaccatggggtgatgtgtaa

SEQ ID NO: 191897 - DNA, 591 bp, Klebsiella oxytoca
atgactcagagccgccgaccgtcgccactgcagcggagagtgctgattgtgctggctgcccttgatgaaaaacggccaggacccgtgctgacgcgggacatagaacgggtgctggagcgaagcggggaagccccggtctacgggccaaacctgcgcgcctcctgccgtcgtctggaggatgccggctggctgcgtaccctgcgcgctccgaacctgcagctggcagtggagctgacggacgccggccgggccgtggcacagcctctgctgctgacagaacaggaccgcctccgggcagaacagcgtgcggcagaagtcgtcgtactgccgctggtcccggcagcaggtctgcccgcagatggcacttctgccactgatctggaggtggagctgaacggcataacgtatcaggcctgccgtggggattttgtggtgcgtctcgacggcagcacctgtctgcagttatggaataaagaaggcagagtggtacgccgggagggcgatccgctggaagtggcgcagtggctgcaggcctgtcatgatgccggaatagaagttcgtgtacaggttaatgaaagcgtcactccgtaa

SEQ ID NO: 191898 - DNA, 261 bp, Klebsiella oxytoca
atggatgaagaaagggtgttttcactcagctatgaacaactaacccggtttacggaacgacgcatccgggaatgcaatctggacagccagggcgcgatttatctctgcgagtcagccaaagccggagccgtgctgatcttctggcatgaactggccataaatggctatgcctcaatgaatgccataaagagacaggagctcattgacgccgactttcagcgcctcagaaagctcatctggccggaggatgactggaaatga

SEQ ID NO: 191899 - DNA, 414 bp, Klebsiella oxytoca; identical to SEQ ID NO: 80741

SEQ ID NO: 191900 - DNA, 393 bp, Klebsiella oxytoca; identical to SEQ ID NO: 80737

SEQ ID NO: 191901 - DNA, 180 bp, Klebsiella oxytoca; identical to SEQ ID NO: 80736

SEQ ID NO: 191902 - DNA, 927 bp, Klebsiella oxytoca
atgccaaactggtgcagtaaccgtatgcatttttctggtgaaccggcacagattgctgagattaaacgactggccagtggtgccgtcacaccgttttatcgccgcgccacaaatgaaggtattcagctgtttctggccggaagtgccggacttctgcagaccactgaagatgtgtggtttgaaccgtgccccggactgacggctgccggacgtggcgttgtatcgccggagaatatcgcgttcacccgctggctgacacacctgcagaacggtgtactgctggatgagcaaaactgcctgatgctgcatgaactctggctgcagagcggtactggccagcgtcgctgggaaggattaccggacgatgtcagggataccatcaccgcgcttttcaccgcaaaaagaggtgactggtgtggcttctggagtaacgaggatgtatcggtgtggtggaaccgtctgtgtgacaacgtactgccggaaaaaaccatgccgtttgacctgctgacggttctgcccacccgccttgatgttgaagtgaatggctttaacggtggtgttctgaacggtgttccttctgcatatcactggtataccgaacagtatggcgtgaagtggccttgtgggtatgacctgaatatcagcagtcagggagacaacttcattcaggttgatttcgacacgccgtggtgtcagccggaaagcgacgttattgcagaattaagccgccgtttcagctgcacgctggagcactggtatgccgaacagggctgtgatttctgtggctggcagttgtatgagcgcggagagctcgttgatgtgctgtggggggagctggaatggtcttccccgacagatgacgatgagctgccggaagtcaccggacctgcgtggatagtcgacaaggtggcgcattatggcggatga

SEQ ID NO: 191903 - DNA, 225 bp, Klebsiella oxytoca
atgacggagacgggcgggctaccgcccgtttcttttccggtaaaggatgtcgccgtgctcctctttttactgcgccggctgacgcggcgcggcataaacgctgcctgtggtcagtgtcccgcgtccggccgggcacgggacgggcgcttttaccgctcccggctggcgtcggtgacagtgtacgccagcctgttgcgtattaccgtgaaggagatcggtgagtaa

SEQ ID NO: 191904 - DNA, 747 bp, Klebsiella oxytoca; identical to SEQ ID NO: 107025

SEQ ID NO: 191905 - DNA, 1542 bp, Klebsiella oxytoca; identical to SEQ ID NO: 6142

SEQ ID NO: 191906 - DNA, 684 bp, Klebsiella oxytoca
atgtcccgttttgtcctcggtaactgcatcgatgttatggcccgtattcctgataacgccattgatttcatcctcaccgacccgccatatctcgtcggtttccgtgaccgttccgggcgcaccatcgccggcgataaaaccgatgagtggctgcaaccggcctgtaatgaaatgttccgcgtactgaaaaaagacgcgttaatggtgagcttctacggctggaaccgcgtcgatcgctttatggccgcctggaaaaatgcgggattcagcgttgttggtcacctggtcttcaccaaaaactacacatcgaaggccgcatatgtgggctatcgccacgaatgcgcctacatcctggcaaaaggccgtccacgtctgccacaaaacccgctgccggacgtgctgggctggaaatattcgggcaatcgccatcacccgacggaaaagcccgttaccagcctgcaaccgctgattgagaacttcacacacccgaacgcaattgtgctggacccgtttgcaggcagcggctcaacctgcgtcgccgccctccagtccggacgccggtatatcggtatcgagctgcttgagcagtatcaccgtgccgggcagcaacgccttgccgccgtgcaacgggccatgcagcagggggccgcgaatgatgactggtttatgccggaggctgcgtaa

SEQ ID NO: 191907 - DNA, 222 bp, Klebsiella oxytoca; identical to SEQ ID NO: 8585

SEQ ID NO: 191908 - DNA, 435 bp, Klebsiella oxytoca; identical to SEQ ID NO: 21500

SEQ ID NO: 191909 - DNA, 777 bp, Klebsiella oxytoca
atgaacgaaaacacaacactgaacgcactgatttgtcgtcacgcccgcaacctgctgctggcgcagggctggccggaagagacggatgttgaccagcggaacccgaaccatccgggctggatcagcatttatgttctgctggatgcgccccggctggcgacgttacttatcaaccgtcacggcggcgcactgccgccgctcctggcctccgccattcacaaactgaccggaaccggggcggaacttgtactgtccggcagtcagtggcagtcgctgccggtacttccggcagacggaacgcaggtgtctttcccgtatgccggtgagtggctggcagaggacgaaatcagggcagttcttgatgcggtacgcgatgcagtacgctgtgtcagttaccaggtggcagaagatacgcggcgtatccgggcggcgctgaccaccaccggtcagacgttactgacccgccagacgcgccgctttcgcctggtcgtgaaggagagcgatcacccctgctggctcgatgaggacgacgaaaacctgcccgtggtgctcgacgccatcctgaaccggggcgcacgtttttcggcggtggaaatgtatctggtcagcgattgtattgaacatatcctgtccagttggctggcctgggatgtgctgcgtataccggatgaaccgccccgccgctggtttgaccgtggtgttctgcgggaggtggtccgggaagcccggaacgaaatccgcagcatggcggatgccctggcaaaaatccggaaatga

SEQ ID NO: 191910 - DNA, 426 bp, Klebsiella oxytoca; identical to SEQ ID NO: 30249

SEQ ID NO: 191911 - DNA, 423 bp, Klebsiella oxytoca
atgtactgtactgttaaagaaattatccgcgatgtactggatacagacgtgccggacagtgaatgcgtttttgccgtggtgctgacccgtggggatgtgcgccacatagcccaggactggagtctgacagacgatgagctggaaaccgtcatgcagcggctggacgatgcctttgaatatggtgcggatgtcagcgttgttcacggcgttgttcgtgaactgatggaagaaaagcgcgccagccgtcaggtgacagtcccggcggtgatgctggaaaaagtgttggcgctggcaggcagtgaaatgaagcgcctgtatgccgtcgggagtgagaacgggggcgacggtgatgcgttcgtcagggaagaacgcgaagcaatggacgttgtgttacaggcgctggacggggagcacatgtcatga

SEQ ID NO: 191912 - DNA, 192 bp, Klebsiella oxytoca; identical to SEQ ID NO: 17096

SEQ ID NO: 191913 - DNA, 528 bp, Klebsiella oxytoca
atgagtgcacgtggtatcaacaaggtcatcctcgtcgggcgtctgggcaatgatccggaagtccgttacatccccaacgggggcgcagtggcaaacctgcaggtggccacatcagaaagctggcgtgacaaacagacgggggagatgcgggagcagacggaatggcaccgcgtggtgctgttcggcaagctcgcggaagtggcaggtgaatatctgcgcaagggtgcgcaggtctacatcgaaggtcagcttcgcacccgtagctgggaagataacggtatcacccgttacgtcactgaaattcttgttaagaccacgggcaccgtgcagatgctgggacgtgcaccacagcagaacgctcaggcgcaaccgaagcctcagcagaatgggcagccacagagtgctgacgcgacgaaaaaaggtggcgcgaaaacgaaaggccgtggacgtaaggccgcgcagccagagcctcagccgcaaccgccggagggggaggattacgggttttcagacgatatcccgttctga

SEQ ID NO: 191914 - DNA, 234 bp, Klebsiella oxytoca; identical to SEQ ID NO: 8563

SEQ ID NO: 191915 - DNA, 1959 bp, Klebsiella oxytoca; identical to SEQ ID NO: 17094

SEQ ID NO: 191916 - DNA, 438 bp, Klebsiella oxytoca
atgatgaataccgaactgacactgaatgccctgcagtccatgaatgcccaggaatatgaagaaatccgtgctgcgggaagcgatatgcgccgtaatctcactcacgaggtgatgcgtgaagtggacgcaccggctaactggatgatgaatggcgagtatggcagtgagttcgggggatttttccccgtccaggttcgtttcacgccagcccacgaacgtttccacctggcgttatgttcgccgggagacgtctctcagctctggatgctggttctggtgaattgtggtggacagcctttctccgtcgttcaggtgcaacatatcttcacgcctgtcgctatcagtcacacgctggcgcttgccgcgacacttgatgcgcaggggtacagtgttaacgacatcatccatatcctgatggcagaaggaggtcaggcatga

SEQ ID NO: 191917 - DNA, 720 bp, Klebsiella oxytoca
atgagcgcacgttcacgggcactgatccccctcagcgcagagcaacaggccgccatgcaggctgtggctgtcacagaacaacgtcgtcgtcagggacgcacactttcagcatggccttatgccagcgctttctttcgctgcctgaatggcagtcgccggatttcgctgaccgatctccgcttttttgctcctgcgctgacgaaggaggaatttcatggcaaccgtctcctgtggctggctgccgtggataaactgattgaaagttttggtgaagtctgtgttcttcccctgccatccgatgcggggcatcgtctgttcccgtccgttccttttcgtgaaggtgagcggcgtcgtcagaaaaccacgctgacagagcagaaatacagccgccagcgggaacgtgaggcagaacgacgggaactggaataccagacatgttttgctcaggcgcagattgaccttgcgtttcatactcccgccacggtcggaagctggttgtcccgctggtctggtgttgttgaggagcatgatctggaaacgattttctgggggtggtgcgggcgttttccatcactgtcatcatttgaccggtttttctggcaggaggaaccactctggcggctgatttttgaagccggtgaggccggtcgtggtgcaccggtacaggtacgtgcacttgagcagtggatgatcccgaacaagctggagaacgcaatatga

SEQ ID NO: 191918 - DNA, 597 bp, Klebsiella oxytoca
atgatgaaatcagacgaacaatatcaggttcccgtgtggatgcgacctctgttgccgttgctctgcaataccggtggtaatgatccggaggaactgctgaatgatacagaaaccaccgccagtgcgaatattgtccgttatgtactgatagttgcagtgcggtcgcagattgatctgctgcagctactgtacaggaaaggactgttgcgcacagagataccaggtggcttttcaccggaagaagcgcaggaactcctggataatctggtacacagccatatcagcaaggcgctgtcgggtgagcgaatggcagcccgtgacagaaatgccgatctgacctggattcgccagcaactggtcgatgccgcctggtttgtccgtgccacactggaagcgcatgggatgggcgtcggaaatgagagtccctctgctccgccggagacaatgccggacatacagacacgggaactggttatgttgatcaagcgactggcatcatcgctgaaagcggtgaaacccgacagtagcgtggtgcgtgaagcgcaggactggctgtgcgacagaaaacttgtggatatcacagatattctccggtga

SEQ ID NO: 191919 - DNA, 501 bp, Klebsiella oxytoca; identical to SEQ ID NO: 79078

SEQ ID NO: 191920 - DNA, 435 bp, Klebsiella oxytoca
atgactgtcagcagcacgatttccgttttttgccgcgacggggtgttccgtaccgtttactgtcacctgcacggtgagccgacctggaacggtcgcatcctgcatacccactatgccaccggtcagcaggccgaagccctggttgaacacggtgatatccgttgccttggtccccgttgcgacaaacccgccgggcatacgcttcagaacccggtggacggtgtgacggcttattacggacgtgacagtggtttccggatggacagtgaggcgcgtgagtaccgttctttcagggaggctattgccactgaaagcactgaagaggtgcgcttccattatgtgttcatcgacggctactggaaggtgatgtaccgcacgccggaaggctggaagatgaaagcgctcgcgctggcactgcgtcgctgtccgaaatga

SEQ ID NO: 191921 - DNA, 267 bp, Klebsiella oxytoca; identical to SEQ ID NO: 39973

SEQ ID NO: 191922 - DNA, 939 bp, Klebsiella oxytoca
gtgagtaagaagaaaaccaccacgacgcccacgccgcatgatgccgcgttccggtcgttcctggcgaatcccgacgtcgccagagattttctggaactgcatcttccggcggagtaccggcagttgtgcgacctgtccacgctgaagctggaacccgccacctttgttgagccggacctgcatcagtacgccagcgatatcctctggagtgtgaaaaccaccgggggtgaagatggctatgtttatacgctcatcgagcaccagagcaccgaaaatctgtacatgcctttccgcatgttacgttacagtgtggcggcgatgcagagacatctggagcagcacaaaacgttgccactggtcattccggtgctgttctatcacggtgagcgcagcccgtacccgtacagcatgaactggctggactgttttgagaatccggcgcttgcggctaaaatatacacaaagccgtttccgctggttgatatcactgtcgttgatgacaatgaaatcatgaaccatcgccggatggccgcactgacgctgctgatgaagcatatccgccatcgtgacatgatggagctgctggacaaactcccgcaggtcatggtggaaatttcagacgagcaggtgcgtgttctgattcattacatcgttaacgcaggggactctgtatcaccggaatttatgcgggcgctggctgagcgtctgccgcagcatgaggataaactgatgactatcgcagaacgtcttgagcaaaaaggtcgccaggagggcaggatggaaggacgcatggaaggacgcatggaaggacgcatggaaggagcgcttgaaaaagccctggctattgcgtgccagcttcagaaaatggggatgacgccggagcagattaagcaggctaccggactttccgatgacgaactgaagaaaatcactcactga

SEQ ID NO: 191923 - DNA, 159 bp, Klebsiella oxytoca; identical to SEQ ID NO: 80733

SEQ ID NO: 191924 - DNA, 252 bp, Klebsiella oxytoca; identical to SEQ ID NO: 21732

SEQ ID NO: 191925 - DNA, 849 bp, Klebsiella oxytoca
atgaatcagactttacccactgctgacctgaatactgccggcacgacagatgttattccgtctgtggctatcgaccgcatcatcgcgcagcgtaacgaaggtattgcactgttcatgcaggcgatggaatgcctggcgacagcgcgcaagattctgctcgatgcgtcaggtgatatttttctttacgggtttgaagactgcgtgactgattccgttcgtcgcatagataaaccggaagaagcgaaaaggaatatcacccgtcttgccgaccggaaaatctgggaccgcctgatgacagatacgggcatgtacaccttcatgagttcatgccagcgtgatgagtggaacagccagctgatgagcgacacctgtcctgaaatcaccctggacaatgtactggcaacattccgccatctgaatgcctgcaagatgcagacatttgaacagggactgattgatgtctaccggaaattgtcatgggattacagaaccaataatccctgccgtctgggtaagaaaatcattattgaaaacctgctgtaccgctggagtaacgggcgtgtgacgctggactgcagcggacgggaggcactggatgacctggtacgtccgttttatctgctggaggggcgcaacgttcctgacttcaggaacagtatcggggcgcagtatggtgaatttctcgggaacggcgacaatgtcggtaagctgttagaaggggaatattttacggtgcgtggctaccagaaagggaccgtacacattgtctttaagcgttctgaccttgttgaaaaactgaatgatattattgcacggcattatccaggtgcattgccgccacgagtctga

SEQ ID NO: 191926 - DNA, 132 bp, Klebsiella oxytoca; identical to SEQ ID NO: 79086

SEQ ID NO: 191927 - DNA, 2700 bp, Klebsiella oxytoca
gtgaatgcagtcattccgaaaaagagaagggacggcaagtcttcgttcgaagacctggtatcctacgtctctgtccgggatgacatgaccgatgaggaactggatttatcttcttcttcgcaggctgaacaaccgcaccgaagccgtttcagtcgccttgttgattatgcgacacgtcttcgaaatgagtcattcgtggcgctggttgatgtcatgaaggacggctgcgaatgggtcaacttttatggtgtcacctgctttcataactgtacttctcttgaaactgccgctgcagatatggagtacattgcccggcaggcacactatgcaaaagatgacactgaccctgtttttcactacatcctttcctggcagtcacatgaaagcccgcgtccggaacagatttatgacagtgtacgtcatacgctgaaatcactcggccttgccgaccatcagtatgtctctgccgtgcatactgatacagataatctgcacgtccatgtggctgttaaccgggtacaccctgaaacgggttatctgaaccggttatcatggagtcaggaaaaactcagtcgtgcctgccgtgagcttgaactgaagcatggttttgctccggataacggttgctgggtccatgcgccgggaaatcgtatcgttcgcaaaactgccgttgaacgtgatcgccagaacgcctggacacgcggaaaaaaacaaacttttcgtgagtatgttgcgcagacagcggtcgctggtttacgcagtgaacctgtacatgactggttatccctgcatcgtcgtcttgcggaagatggtctgtacctgtctcagatggacggaaaatttctggtgatggatggctgggatcgcaacagggaaggtgtacagcttgactcgtttggtccctcctggtgtgcagaaaaactcatgaaaaaaatgggtgactacacgccagtgccaaaagacattttcagccaggtggaagcaccaggacgctataatccggacttcattgcagctgatgttcgcccggaaaaaatcgctgaaacagaaagtctgcagcagtatgcctgtcgtcatcttggagaacgtctgccggaaatggcacgggaaggacggctggaaaactgcctggctattcaccgcacactggctgaagcgggattatggatgcgtgttcagcatggtcacctggttatctgtgacggttatgatcataaccagactcccgttcgtgctgacagcgtatggtcactgctgacgctcgacaatgtgaatcaactcgatggtggctggcagcctgtaccaacagatattttccgccaggttacgccaacagaacgcttccgtggtcgtcgtatggagagctgtcctgcgaccgataaagaatggcaccgtatgcgtacaggtacggggccgcagggggctatcaaacgcgaactgttttctgacaaagaaagtctgtggggatacagcatcagccattgtagccctcagattgaagaaatgatcacacagggtgagtttacctggcagcgttgtcatgagttgtttgcacaacagggactgatgctacagaaacaacatcacgggcttgttgtcgttgatgcttttaatcatgagcaaacgccggtgaaagccagcagcattcatcctgatctgacactggggcgtgcggagccacaggccggaccttttgtgagtgctccagcagatttgtttgacagggtgcaacctgaaaatcgctataacccggagctggctgtcagtgacaggtacggggtcagcagtaaacgtgacccaatgctgcgccggcagcgacgtgaagccagggctgaggcccgtgctgacctgcgtgcccgctatctggcatggcgtgaacaatggcgtaaaccggatctgcgttatggggaacgttgtcgggaaattcatcaggcatgccgtctgcggaagtcacacattcgtgcgcagtacgatgatccggcattacgtaagctgcattatcacattgcagaagttcagcgaatgcaggcattgatcaggctgaaagaagacatcagggatgagcgacagaaacttattgctgacgggaaatggtatccaccctcttaccgtcagtgggtcgaaattcaggctgctcagggagacagggctgctgtatcgcagttgagaggctgggattatcgcgatcgccgtaaagacaagtcacgcacaacgacgacagaccgctgtgtcgtgctttgtgaaccgggcggaacgccggtatacggtaataccggtgatctcgaggcccgtctgcagaagaacgggagtgttcgtttccgtgaccgtcggacgggagagtttgtctgtacggattatggtgacagagttgttttccgtaatcaccatgaccgcaatgcgctggcagataaactggatttgattgcaccggtattattcgggcgtgatccacgcatggggtttgaaccagaaggaaacgacaaacaatttaaccaggtctttgctgaaatggttgcctggcataatgtgacaggccgtaccggtcacgaagactacaggattacgcgaccggacgtggatcatcaccgtgaaggaagtgaacgctactaccgcgattatatcgcggcgaacagcaacgatgacgcatcactgcctccgccggagcaggataaacgctgggaaccgccttctccaggttaa

SEQ ID NO: 191928 - DNA, 2292 bp, Klebsiella oxytoca
atgagtgaacatcgcgttaaccccgagcttttacatcgtacagcctggggaaatcctgtctggaatgcactccagagtctcaatatctatggcttttgcctggtggcaagtcttgtggccagttttatctggccacttgcattaccggcatgtctgttgttcacactgataacaatgctggtatttagtctgcagcgatggcgctgccctcttcgtatgcccatgacgctggaatgtgctgacccgtcacaggacagaatgattaaaagaagtcttttcagcttctggccaaccctgttccagtatgaggtcattctggaatcaccggccagcggcatattctatgttggttatcaacgcgtcagggatattggcagggagttatggctgagtatggacgatctgacccgccatataatgtttttcgccaccaccggtggcggtaaaacggaaaccatctttgcctgggcgattaacccactttgctgggcaagaggattcacccttgtcgatggcaaggcacagaatgatacggcaagaacgatctggtatctggccagacgctttggacgtgaagacgatgtggaagtcattaacttcatgaacggaggaaaatcccgcagtgaaatcattctgagtggtgaaaaaacgcgtcctcagtcaaatacctggaatcccttctgttacagcaccgaggcattcacagcggagacaatgcagtcaatgctgccccagaacgtccaggggggcgagtggcagtcccgggccattgccatgaataaggcactggtatttggtactaaattctggtgtgtgcgcgaaggcaaaacaatgtcgctgcagatgctccgtgaacatatgactctcgaagggatggccaaactttactgtcgtggcctcgatgatcagtggccggaagaagctatcgcaccgttacgtaactaccttcaggacgttcccggtttcgacctgtcgctggtcaggacaccatcagcctggacggaagaacccagaaaacaacatgcttatctctccgggcagttttctgaaactttcagcacattcacggaagcattcggggatatttttgctgaagattccggtgatatcgatatccgtgacagcattcacagcgacaggattctgatggtaatgatccccgctctggatacatcagcgcatacaacgtctgctcttggacgaatgtttatcacccagaaaagtatgattctcgcccgtgatttgggctaccgcctcgaaggaactgattccgatgcactggaagtcaaaaaatataaggggcgtttcccttatctgtgtttccttgatgaagtaggggcatactatacggaccgtattgctgtggaagccactcaggtgcgttcactggattttgctctgattttgatggcacaggaccaggaacgtatagaaggacagacaacagccacgaatactgcaacactgatgcagaacacggggacaaaatttgccggcaggattgtcagcgagggtagtacggccagaacgctgaaaagcgccgccggtgaagaagccagggcgagaatgaacaacctgcagcgtcaggacggcatatttggtgaatcatggattgacagcccacaaatcagcatcctgatggaaagcaagataaatgttcaggagttgattgaacttcatcctggcgagttcttttctattttccggggagaaaccgtaccatcagcatcattcttcatccctgacgatgagaaaagctgcagcagcgatcccgttgttataaacaggtatatcagcgtggatgcgccacgcctggaccgtctccgccgtcttgttccccgtactactcaacgtcgaataccgtcaccggaaaatgtcagtgccatcattggcgtcctgactgcaaaaccctccagaaaaagacgaaaaattcgcacagagccgcacacgatcgtggatacatttcagcaacgcattgcaggacgtcaggcggctatggcaatgctggaagagtacgacacagatatcaacgcacgtgaaagtgccttgtgggaaacagcggtgaatacgcttaaaacgaccacacgggaagagcgacgaattcgctatatcacgctgaacagaccagaactacctgaaacaaaagaggaaaatcagatatcagtgagagcagaaagagcaggtataaacctgttaacgcttccacaggacaataaccacccgacagggcgtcctgtaaacgggtttcatcataaaaaaaccaaccgtccggactgggacggaatgtactga

SEQ ID NO: 191929 - DNA, 1071 bp, Klebsiella oxytoca
atgacaatcgagtactttgcaacacgtattgcaaaacatatttccgtgcaggcaatctggccggatggcaggacagaaattattgccgtccttccacgggatgccctgtcagggctggtaacacgaaataatcaactgattcatatagcctttgacgccatgggcacccgtaacagagaaaccgtcctgattgataaacaggagcataacgctgaccagatacttacagctattgattcctgcctgcgccttgaatatctgatggaacgccgcttcagcagaacacctttgttccgtggcataatcgccagcgttgtgctgttcgtaatggcaacgattggcttctctctgttccgctatgttgatcgtgtattctgggatgatacaacgcctgaagcagtacagacagcaggtgagccacgactgcttccccctcacctgaatcacactgtgccattaaatgaaggcattcaactcccggttcccccgaaaaaagacgtccaggtaccggagaaaacaatcacaagcaaaaatccggaagccgcagctgcgcgacataatctggctactgttctgaagcggaacgccgatcggggcatgtttaccatcaacctgtcatccggtcatgaacgaaccctgttcgcatttctcgatcctgcctgtcctaactgcagacttctggagccggccttaaaacgcctggccagcgacttcaatgtcgttatctacccggtttcagttattggtggagaggaatccaccgaccgtgtggcaccactgctgtgtgaaaaagatgctcagaaacgtgctgccggctggcaccgactgtattccgcagataacggaatgatgacgccatcagaagaaacaacgcctgcagatgaaacatgcctgaaagcagccagagctgcgattgatgttaacaatgtcgccttccgtaagttcggatttgccggtaccccatgggtgctgtccgacaccggctggcatctgcctacaggaattctgcaggaaactggcacgcttaatttattcctgaaaaccaccgacagcgagtctggccatgagtga

SEQ ID NO: 191930 - DNA, 1209 bp, Klebsiella oxytoca
atgtcttacaatcgacagcctgtcgcagaagatcctatgcagatatggggcgctgttggtgtccttcttatcctgctgctattcgttatatggttattcttgccggaagtggtttacgccagctgcctgattcttcataccttatggggactggttgactggggaccatttcataactatgcagcaccacgatacaacctgcttgccatgaccggtaacaacgccgccaacataagctatagccagtgggttaacgtcatggagcagaccataggtattctgtggatgtacctcttacctgtgacactctggtgtttgtgggagtggtatcaacatccgggacaaagtcgtttcacccgcagaccagtagatattacccgcctgccatacatctttgcttcgttgtcccctgctatcgcccctgtactggcagatggtgatccggaaaaactctttcatggtggcaaacgacctgaacggcgggttgctctcaccccggaagcatttgtcgagcagcatactctcatcaccaatatgcagctcgatgttgcagctgcaagacgatgtttcatggcccagttgggtaaacctttaacgtcctggaaagacatggcaccacatgaaaaagcgctctttgccatatttggtcttcagtatttcctggatgatcgtaaggcagcattaaagctcatggatacactgaacctctcatgcagaattaaaagcaaacgggacagtgggaaattctgtacccctgtttattcactggccaaatcagctttccagagagtgattaaaagcaacggagcacagcaatggctgaaacaacatcgctacgtccgcagtgggctggtctggctgtatgcacatgacctgcggcttacgccacccaactggatttggctgaaaggcgtggacaggacgctgttttatgcattacaccgcgccaataccacgaaaggatttattgaaggcgctggcgtggtggccgttgcacgtgcagaggccgaagccatgcgttttggccttccctgccctgaaccctgtgttgatgaagcggtggaaggcttacggcgggatatgctcagtctcggtcttatctgggatgaaccacaaccagatcgcgaccggaaacgccgcatcctgaccaactggtccctcaccgacgacatcctgccccgcacacctgctacagacaacgaattctga

SEQ ID NO: 191931 - DNA, 156 bp, Klebsiella oxytoca; identical to SEQ ID NO: 79091

SEQ ID NO: 191932 - DNA, 177 bp, Klebsiella oxytoca
atgaatctggtagatgcctttgtcaaaaaagtaatatccgggccatataaagaatatggaaaatggtggatagatgttgaatacatttcatggggcgttcccgggaaaacaagactgatgtttgagtcaaaggagcaggcactggaagttaaagaagggtacaaatttttaacgtga

SEQ ID NO: 191933 - DNA, 210 bp, Klebsiella oxytoca; identical to SEQ ID NO: 8510

SEQ ID NO: 191934 - DNA, 663 bp, Klebsiella oxytoca; identical to SEQ ID NO: 19459

SEQ ID NO: 191935 - DNA, 2163 bp, Klebsiella oxytoca; identical to SEQ ID NO: 19458

SEQ ID NO: 191936 - DNA, 585 bp, Klebsiella oxytoca
atgaataagttaccggaaaattcagaccagacgaaaaacgtcaaaaaatcaccatccataacccgcatagccacccgggggattattaacatttttgttcctctgatggagactcgcctgataacgaattctgtacagcatatgctggaacaacaaaaacgcagactggacagatttcgtcaggtaaataataaaaaggcgcaactccacctcacgtgggaagaagctctgcaggccagccatatgtcagtagacgatctggatcgtcgtttccgccggcgcagaacagtatggcgattctgttgctggagtctgctggccatcgctttgtttctcagtggtatgctctttgccgcctcttcattacctcttacgactctggtacgcgccatcagcactcttgtgctgatactgtcaggcgtcgctctttgtgcttccagagcactgattgttacataccgcctctggcagttgcatgaacgaaaagtcagcgaacccgagcaggggactttccgtgattttctgaacgaccgcaatggctggcgcaatgccacgttaattgccgtaaccagtaaacaatactga

SEQ ID NO: 191937 - DNA, 1203 bp, Klebsiella oxytoca
atgcaaagaaaaacattactcgcagcccttatagccaccctgagtggaacggcatgccaggctcatgcttattcagtcaccgtcgtcgccagccggcctgttgaagagcaggtcatccccagaatggaagccatcaaagatgtccttggcaacatactgagtacccagacagccacgggtaccgctatcaatcagaactctgaaaagctggcaagtgtcattgcccagaacggacaggcgacacgtcagcagatgattttcagtaatgaaactcagcgcctcgaggaggcacggaaaagcttcaccgtgccagactccatctgcagtgaatccgcatcagggattgcaacagaaagcaaaagtgcctcagcatccgcagcctcaaaactcagtaaaggtggcggtgtgagcaaccgtagcatccgcgaccgtctggccagcgcagcaaactctcccgtgcgggaagcttatgatggcgcggccatacacgccagttactgtacagaagcagaatatgcacgttttggaggaaccgccgtttgtccttctgtgggcgaaataccaggtggagacagtcaggtacgctcgatttaccacggcgcaggtacagcggacacacctgcagcactgacatgggatcagaagcaaatagatgcagcgacggcttacatgaaaaacacttcccgcccctctgccggtcgtgctctgggtaaaggagaagtgaatacccagagtgggcgaacctacgtcggactccagaacgaatacaacggcatcattgattctgcgtcgaatccccaactgacgctgattgctgacagcacgcctaatgaaagcacacgtaaagcactggctgaaacactgcagtcagactcagcggccgcttacttcgaccaggtggcttcaccagaagcaaaagcacggggatatatgagtacccgtgagtttgaagcttttgaggctggccggcgctacgccaacacagcatacctggtggatttacaggaaatgcagggagataacctgctccgtgaactggtaagaatcactgcgcaaatgaactggcaactgaacgacctgaaagaacagatccgccagggtaatgtcatctctggacagcaactggctctgaccgcccgccagtattatgaaaaacaactcggtagccttgagaaaacaatcaatcaggcaaacgcacgttga

SEQ ID NO: 191938 - DNA, 615 bp, Klebsiella oxytoca
atgtgtacaattcatatcaccccacgctgccggagacctgccagagggcaggtatttcttaaaaaacttgaggtaaaaggtgacagtttctcattcactctgccgtcacgtgtcttcaggttacatccggcccccaatcccagagtgatatacgcctcggatgccagaacacagggaaaggttacaggcatgcggttgttgttgccgtccagcacagatgagctgataacaacggcaatatggcaggtttctgtcccggatgaagcaccattcgacgttcagcatgtcatccagtggatactcccttcaccgctggcttcgctgatgtccgatgatacctggttatggccatccgttcccggaacgccggcactgagtgccggtgactggcctgttatggatactgacccttccaccttacggcgcgtcagacgtcgttctttcagcatcatcgataaccggaacaggaaaggttatatcaccaggcgatttcagtgtttcccactggccccactacctgaaaacagaaaatacgacagccttcctgaccttgtgctccatcccgagcaggagacaataaaatgcaaagaaaaacattactcgcagcccttatag

SEQ ID NO: 191939 - DNA, 3045 bp, Klebsiella oxytoca
atgaacataaaccgtttaatcttcactatcgaagactgtctgaacacgctatcccgtttctctgtcgcaagcagttttgttgagtattgcgatttacgtactgtaataggtctggacagacaggatcgtgaacgtcgcccatggctgaattcgccctatattgcagccacaaagcgtggagaatatctctctgtctttgaagtcagcggtgctttcagggaaatggatgaagcatccgaccagactggcccaggttcactggaatcgctgatcaccagcatgagtgacagcctgaatacggcatataaaaacagcggtcataaaatcagcttcgtttttgagcgtgatcctgacatggggaaagaagaaatcgaagacatggtcgccccacaaaagcgctcactggctaatacaggtatccagttacaggatgtggtcgatgagaaagtcacaacactgtccccatggctggtccgggagcgttgctggctggcgatctggagtggacccgaccttatcagcaacagcgatcgtaccgcccatgatgagcttgtcagaagactggctgaacgggtaccgaaagcacgctttgcccagtccccctggcagtggaccttatctgcactgaaaatccgccacgaagcttttcttgataatgtggaacaggcactgagacattcatctgatggcctgattctccggctactggatatacacgaggtcgggcgtgaaatacgtcgtcagacagaacggcacagcacaccgcgtaactggcaaccccacctgcctgaagatgcccagccagcgggatatcgctggactgacgatgaatccgtactacatgctccttcattgcatttgcagttattcaacactcaggtgaccacacagggcaacctggttcaggcgggcggactctggcacggaatggtatcgattactttacctccgcaaaatctgcagacgtttaacgaactggtccgtgccgtcccacgcgcagtcccctggcgcatcagaatggatctgatgcccggcgggatgaaggctcttaatctgaagaaaacgcttctgacttacagcagtttcatttctgccgttcgtccaatgtatgaatccgttatggccctggcggcaacggatgaaaaagaacctgtctgcataatgaccatcatggcctccacgtggggaaaaacacgtgaaatatgcacacgaaaccaggccattctgaaatcagccattgaaggctggggcgtatgtggcaccacgacaacatttggcgatccccgacgcgcctgggtgaataccattctcgcggcatccggaggctccggcccggttcccctgtatcccccgttgtcacatgccatctcgcttttcccgcttaacagggcaggctctgtctggcgaggcaaagggaatctgatgttacatacagaagacggttccgcaattgaggttggtctggcgtcatcccaacaaaataaacatacagaactcgcaccaggcgatccgggactgggtaaatcagttctgattaatacattgtcggaaatacagatatcatctgctcagaaaaacctgcccttcattgcctatatcgataagggatacagtgctcagggactggttcagcttattcgcgacagtcttcctccggaaagaaaagacgaagctgtcggtattattctgagcaatgatccggaatacacccgtaacctttttgacgtgatgtacggcgctaaaaagcctattacgccggaaaagaatttcatgtcatcggtgctgtgtgctctctgtgtcgataccggtaccggtcaaccctgtaaccccggagacacccgacaaattatcaaccagcttatcgagctggcttttaaagagtacggtgaaaataatccgcgactttatcgcgcctcaacggaagaactggtggattcagcactgcaggactcgggactgtatgaaaaacatgatgcaacctggtgggccagatcaacctggttcgaagtccgggatatgctccacaatgccgggtatatcatggcggctcagcgggcacattatcaggcaatgccccagcttcccgaagtgtcctcgatgctgggccataccagtctcagggatgttttcggtactgttcagcgtgatggttcaaacgagcttctgctggactacatccgccgcgccctggagcagggacataacgactaccccatgatatccgggtatacccggtttatgatcaacccggaaacccgggtcatcgctgtcgatctgaataatgttgccggtgacaaaacgcctgcaggcaggcttaaaaccggcatcatgtacctgcttgcaggtcagatcgccggtggtgacttcaccctgccacaatacagggatgaagtgttaaagcagcttccacgggaataccatgaaatcgctcttaaacgtattaaccaacttgatcaggaggttaagacaaaagtttatgatgaactgcataacgcccggggcattgacttcatctgggaaaatctggatacccaggagcgtgagcaacgcaagtttgctatccgcacggttctgagtacgcagtatctgagggactacccggaaagcgttcttaagtcagcaaatactctctggttactgcgctacaaacccgaagatatccccgtactgagggataacttcaacgttcctgaatttatgctgaaacgcttcctgaaaatgccggaaggcccggcaccagatggtagtggtgttcctgttctgggagtattcagggtaaaaagtggcacgcttgcgagaatactcaaatttaccgtcggtccactggagctatgggcgctgaactcatcgccaaaagacagtgccctgcgtaaaacactgacaaataagttaggttcagttcgggcacgtaagattctggccgaaaacttccccagaggttctgcaacgtcattaattgagcaccgggcgggccaacataacagtgacaatgttattgaagaactggcctcggagctcatccgaaaacagggatacaatctctga

SEQ ID NO: 191940 - DNA, 801 bp, Klebsiella oxytoca; identical to SEQ ID NO: 8503

SEQ ID NO: 191941 - DNA, 189 bp, Klebsiella oxytoca; identical to SEQ ID NO: 8502

SEQ ID NO: 191942 - DNA, 405 bp, Klebsiella oxytoca
atgtcacgtattcgtgtcgtagcggcccgtctgtacgccgcatttatccacgcacaactgtttgtaatgtcatgccggagcaaactgactaagttcctgctgctcattcccatgatgttgctgcccaaagccgttcttgccgatggagatcttgccgatatggttcgcaatgtcgaacaaggtgccaaaacagcacagtcatcatcactgactattgcgcagttcatcggcgtaattgcgtttctcgggggcctgattgggctgaaaaaagttgggaaacaaggggggatgggactggctggttgcattctatctatcgtcattggggcgctacttgccgccggacctgaaatgatgagtcgcagccagaaacagttggggatttcctcaatttccattggctaa

SEQ ID NO: 191943 - DNA, 528 bp, Klebsiella oxytoca; identical to SEQ ID NO: 8500

SEQ ID NO: 191944 - DNA, 705 bp, Klebsiella oxytoca
atgaaacctgaaacagaaatagatgaaaccggcagcttcggtgaacccgaagagaaacccgcccccttctggaaacgttccgtctgggggatatctgtagcaacatgggggctatgtgcagtcgtgttgctcgcagccatatggtatctgttcctgagagcgccatcggaaacaggcatgcctccgtttaatgatgcggatgctggcgtacagacctggcaaaccacacaagaatcatcaccttccgttcagtccactgagactatgactgtccggacaggagaagatatgagccagcttgcccgggatgtaaaaacagagctggataaccgcgatgaaaaaattcaggcaacactgaatatgcttcacgacagcattaacaagctgggcgaagctataaaaaaggatgaagaatacgcacaggaaacacgccgtcagttggatgatatccggagccgcctgaacggaataatgacacagaaaagcgtcactgaatcctcttccacaccgcatccagcaaagaaaaaaacgtcgtctgtacttaacggaatgaaaatcatgtcgatggaaactggtatggcctggattcgctggcagggtagtacctgggctgtcagagaaggtcagacgctgggcaatgtggtgatccagcggattgatccgactacccggaccatcatcaccagtgcagggacgttacgctga

SEQ ID NO: 191945 - DNA, 1290 bp, Klebsiella oxytoca
atgagtgctgaacaggatgccggtaaatccggaaagaaactggctgccctgcttgggctgagcagcatcatcttatttggcggcagctatatcgcgttttccaaagtatcagggagtaacagcgatatgcagtcagccgtgaacataaacagtgctgcaagtggcggtacgcgcagcgttaccgaaacgcctcactatcgtgaactgttaagagcggataatgaacgaggggctgcggcggcagcccgcaataatcagacgttcattgccagtcttccgcaggggcttgatattccggacactccggaaaagcaacaacagcctgcagcaaaaccggaaaactatgcttatcgccaggcttccggcacaccacaggaggatcgagcagccagtgaaaagcgtatggaacggctgcaaaagctgattgtaagaataaaagatcagcatcctgccggtagtacaccaaccatagcaacgactatgtggaataaatctccggcagaaacaacagggcagaatggtacgcagcaattcgcattacagaatgccagcctgtccacgcctgtagcagaaaaagggatacaactgatacctgccctgacccgtataccggcatatattgatactgcagtggattctgataacccgtcatccaaggttatcgcaaccattcccgctggcccctgggcaggggcaacgctgttcagtccgggagtcaaactggtgggtaacggcgtggagatccatttcgaccggatgagctggaacggcatggaccttaaggtcaatgcatatgctcaacgggaagacaacctgatgtcatccgtggccagcaatgtgaatacacgctggtttaaacatatcattctgccgtcagtgttaggaggtgtgggcagtattggcacactttataaagatgccaacacgcaggttattcagggtaactatggcacggttaccggacgcgtgggaatgcccagtggtgaagctgttgcgggcgttattgccggtggtatggcggaaagaggaagtcagatattaacccgccaggcagaaagtgagccctataaacaggtagaagtgtatcagcatgaagtcgtatcaattctgtttgttgacccggtaatgacaaacgacgccaggtcatcttccctttccagtggcatttccccttcagttaatcgtacatcacaggcggaacaacgctcgcaggcacgaatgcagacagccatggagcaaagaaaagctgtgatgcaacgtcggtatgatgaacaaccggagacaccataa

SEQ ID NO: 191946 - DNA, 984 bp, Klebsiella oxytoca
atgcaatcacgttatttactgagcacactgctcctggtgtgcagcgccgccacgtctgccgataacgcaggatggcagaacgcacgcacaccacaaacgacaaattctgccagcgatcacgttcagaacgcctcccaaaacaccggaggtgttccggcaacactggtaaaaggtgagctgcctgcccccgggcaggccagcccgctggtacaggatgcggcaagacttgattctgagctctccgccgatgagattcgctcactacgcagtctcatggcggataacgagcgggccatcaatgcgcccatcaccagtgttgtaccccgtatcagctctctgacagttaatctgtcccccggtgccagccttcctcttgttcgcacagccatgaacaacctgagcgtagtgacatttaccgatatcaacggttcaccatggccacaatccgatcctccttataacgcggcaccaaaactctttgatgtgcagtacaacgagaacatggtgacaatcacaccattgcggccatgggcatccggaaacatttctgtctacctgaaaggtctgtcggtaccggtcatcctgaacgtaaccagtggcgaaacagatacgccgtcatccagtcaggaaatggacagtcgtctggatctgcgaataccacggcagggaccaaccagcccggttgtctccatcccgacggataaaatcgccctgcatgatgcaacattacaggcatttctggatggtattcctccccgggacccttcagttaagaggctgaaattcacaggtaatgtcccggatacaacgatctggcaacacggcgatgaccttctggttcgttcccgggcgatattgcgcgatgaatttgaacagaccttgtcctctgccgacggaactcatctctggaagcttcccgtcaccccactactgactttctctgtgaatggccagtccgttcacgtgacaccagaactggagtaa

SEQ ID NO: 191947 - DNA, 693 bp, Klebsiella oxytoca
atgaccgaaaataccgagctatcctcgccatcacatccggcacctgacccggaaatactgaagagcacaatcagggctatgaagcagtcagaacagcgggcaaataatgtccctgcgctgataaaagcgcttttatgtacgggcacatgtcttcttatcagtattactggcaacgccattcagtactggcactcaacgaatgtggagcgcgaatatttcgctacagacaatggtcgtctggtcaggctggcaccaacaaatcagccagcatggagtcagaatgacgcaatggcctttggcagccaggcactggcgaccgcattcaacctggattttgtgcactatcgttcacagatttcctccctgtctccgcgtttttctgacgaaggttttgccggatatgtgaatgcattacaggcatctaacattctggagacgatcaagaaagagaagatgaatctgaccgccacgacaggcgctggcgttctggtacgacagggacaaatgtccgacggcgtatggttctggacatttcagtatcctgtccgtatgcgtctggtcggccagacaaccagcaagccagaacagtcttttgttttcgaaatcaccatccagcgtgttgaccccagactgaaaccatccggtatggaaatccggcagatgatctcccgtaacgccggaccgaactcctga

SEQ ID NO: 191948 - DNA, 348 bp, Klebsiella oxytoca; identical to SEQ ID NO: 8495

SEQ ID NO: 191949 - DNA, 3768 bp, Klebsiella oxytoca
atgccgtctgtatcccgctaccgcacctggcttgccgtgcctgcagatgaaatagaagatctcaaaaaagcacatcccccgatgaacgggcacacgcccgtcatctgggacaaggagcacaaactctggttcgcccgcccgggggcggacctgtccaggctggaccgctggctgccccggccacaggacgtctccatgaacggcagtgatccggtcaccgagtttgcccaggttctggagaatgccggactggttctgaaagaactgccggtcatggacgggaaaatccaccgtgtcccgactgccgatgacaaaaaaggacaaaaaagtggcgcatatcgcggattcctggacggcagacctgccggctggtacagggattatcgcagcgcggatgattcgccgatcacctggaccttctccggcggagaacagacagatccccgcgcaagactccacctgaaagcgcattcaatgcaacgcagggaggacgcggagcgggaactgaaagcacagtacaaccgacaggccgcgtatgcccgccgctatgtcaacaaatggccgcaggccacagcacatgaatacctgacccggaaaggcattcaggctgcaccgggggtgcgggtaaacaacaaaaatgaactggttattcccttcagtaaccgtaacggcgcgatacgctcttaccagcgtattccggtcaccggggggaaggatgcccgcatcctgaaagattcagagaaaaccggtaactggtttgcgctgggcacaccgcgcaacggtcagccggtactgtttgccgagggctatgccactgcggcctccctgcacgaagccacgggccttccggtactgatgacggtggatggaggcaacatgattgccgttgccgaaaatgcccggcaaaagtggacgcaaagcccctttatcttctgtgccgacaacgatcatgcaatccgggttaacaaaggtatcgtcagtgcaacaaaagccgcagaactgacaggaggaacggtcatctttcctgcgttcaccgatgccgaaaaagcgcaggggctgaccgatttcaatgacctggacgcaagccggggacgggccgcttttcagcatgtcatcaacgcccagttagaacacatcggggtttccacccccaacagtaacaccccggaaatccgcgaggcactggtgatcggcaacctcgtttttacaccggtccacactgaggaaaaaaccatgactccgacagaatatcctgaaacatcacccgatacagggcacagccatgaccagggaccttctctgccgtccgccacgcagcaggaacaaccagctgcttccagcagtaacattgctgacgaaacacagtcatttaccagtcacgccactgaaaataacggcaaagatgagcggcacgctgataacgttcaggcgcaaacggaaagctctgtagttcaggactcccctgcagaatcaccggcgtccccggaaagtacaacggcatctgcccctgatgaacccgctcatccggcggaacctccggaaaaagttgtctcggtggccacagataaagactggcgtgaatttgaagccgaactgtcacaaccggaaaaaaacgagtcacaacaggaatccggcacttcacctgaaataccggcccctgctgccgcccccgcatcccctgaagacagtccctcatctgaaaccatgaatgaatcagccgagccatcaccttcccctgatgcagtcaaagaggaaatgaccgtgatgacggagcctgatgacaaacaaagcaccggaatatccccggatactccccgggaagaggcggtcagccatgtaactgaagacattccccttcagccagagccgttccttcctgagtcagatggccccgaagaatacgaaaactacagcgcatatcaggagctgatgaacaatgaaaatcctgagcatctgcaggaaaacagtgatatgccgtcgcaaccggacacagaccacgttcaggcagatgagtcagaacttcaggccacaacagatactgcagaaccggctgtccgggatgaacccaatccacagcaacctgttcagagcacatcaccttctgataatacttcatcgtttctcgacaaagcgcgtggcttttttacgcgtaaaaaaacggattcacaggcacatgagaacagtgatcccacgccctcaccggaaaccacgacgaccacaccgacacctgacagtattgtctacgccccggaacgtcctgatgcaccgatatcgcttaatctggacgaaatcataaaatcactgaagggtgaaaaacgagcagacagaaccgtcctgtacaagctggatggcaaaccagccttcattgaccgggtaaaccggctggaaatggtcgacggtgccagcaatgacgatcgcagtgttctggccgcacttgctgtggccactaatttctatggtggcgtcattgagctgacaggcagtgatgcctttaagcaaaaagcgatgcggttgattatcgagcacaacatcaatgtgcgcatgaaacacgctgatcagcgtctggagctcgatacattacgtaaggaaatggctgtcggtaaggatgctgttgtcacccatcagccaacgccggaacttaaccggaatacccctgaacaaccggttgtccctgaccccgttcaggaaaaagaagccacacaatccccggcgtccccagttgcccctgaagcatcaaccgtcagcaccgtccctgcatcatcaccggctgaacctggcaaaacggcagatgcggcacaaggtgaagaaccaccaggaaaacttcgcccgggagagagcgtgactgccgtactgcacaattttggtcgtgctgaatatgcacccggcaaaggagagagtttctttgttgagcttaaaaaccgcagtggcagcaaactctactggggggaacaactggaaagtctggtcaaaaaccatcagaaaggtgacgtggtgacactgacacttcagaaccgcgaacaattcattctccctggtgagcaaaaagcacgtttccggaataagtggtccatggagtcagttaccaacgggatctcggtatcacatgataatccggataaaggtcagcgtattcaggcgattccggtcgaaacctttatgaaagtggctgcgcaaatcagccaggggtggcccgaagagatgaaagcgttacgtatgccagaaaacgtcggctcacatctgtttatcggtgaagaccgacatccggtctccgcgccacagaacgcaaatcaggtaacagaaataaccagcgcagcccctgacaagctgacacctgttctgggatcagtggataaggatacgcgtgaactcaacctgctacttgtccagagtgccgatgaacatctgcagggtgtggtccggctgaacggcacattgtatccggcactggccaccccatcggccgacaacagtcagttggttatcaatgcgctgaccgacaaaggtttacgctttgcaggttatggtgaagcggtaaaccacgatgctgacagcacgaatcgccccgcaccggagcttatgcagtttcatctgaaaacccgggaagaaccgctttttgctgctgtctacacgccggaaaaacaacctgatgcgttgtaccggaacctgggcttcgagcagtcatggcagcagtggtccaacagccaaaagccggaggacaggcaggaaaaaactctgcatcaggatctctcccacagccccggccgatga

SEQ ID NO: 191950 - DNA, 552 bp, Klebsiella oxytoca; identical to SEQ ID NO: 79111

SEQ ID NO: 191951 - DNA, 291 bp, Klebsiella oxytoca; identical to SEQ ID NO: 79112

SEQ ID NO: 191952 - DNA, 1149 bp, Klebsiella oxytoca; identical to SEQ ID NO: 79113

SEQ ID NO: 191953 - DNA, 819 bp, Klebsiella oxytoca; identical to SEQ ID NO: 79114

SEQ ID NO: 191954 - DNA, 459 bp, Klebsiella oxytoca; identical to SEQ ID NO: 79115

SEQ ID NO: 191955 - DNA, 582 bp, Klebsiella oxytoca; identical to SEQ ID NO: 79116

SEQ ID NO: 191956 - DNA, 1203 bp, Klebsiella oxytoca
atgatgaagaaaaatcatattacccgcaccatcattgcatctgctgtattattttcctttaacgctgcagcagcgacgtcatattttgaagcgcgtaacgatgcaatgggtggtaccggggtagcatcttcccattatggtgtggcacctctggcaaacccggctttactgacaaagcacaacagcaatgatgatttcagccttcttctgccgtctgttggggcacaagttgctgatcctgatgatgtatcaaataaagctgatgatgttaaagatgactgggatttgtttgacagtgctgtagataaccagcatggcgtacaacaggcagcggcaaatcttaaacatcgtctgcaggaattccgcaatatcaatgcagatgctcaggtaggtgtatcagctgtagcagccatggcaaatgacactctgccgtttgcccttatggtcaagtcttacggaactgtcagcgtaaacggaaaagtaaacgatgcagacctggattatctggacaaagttgccaatggaacaattaccgacgtcgataagaatgccctgacctcacgcgcattcgggcgtgcagctgtaattaccgacgtcggaatttcatttgccaaagaactggaaacggccggacaaaaatggtctcttggcgtcacaccaaaatatcagcgtgtggacctgtttaactacaacgtaacggttcgtgattacgacaaagacgattttgacggtgacaagtaccacaacacgaaaaacggattcaacgccgatattggtgcttatacagacctgaatgacaactggactgtcggtcttgttgcccagaacatcattccacgcagtattgatactaaagtcgtcaatggctttaaagaaaccttcaaagttcgtccgcaggcaaccgccggtgtatcctggcataatgacctgtttaccactgctcttgacattgatctgactcctgccagtggcttcacttctgacagcaaacgtcagtttgcaagtgttggtgctgaatttaacgcatggaaatgggcgcaattgcgtgccggttatcgtcagaacatggcatcaaactccggaagcgccttcaccgctggcgttggtatctctccatttgacgtcgtacatatcgatgtttccggcctggtaggaactgaccacgattacggtgcaatggcacaacttcagttcactttctga

SEQ ID NO: 191957 - DNA, 825 bp, Klebsiella oxytoca; identical to SEQ ID NO: 79118

SEQ ID NO: 191958 - DNA, 1155 bp, Klebsiella oxytoca
atgccgtctccacgcatccgtaaaatgtccctgtcacgcgcactggataagtacctgaaaacagtttctgttcacaagaaagggcatcaacaggagttttaccggagcaatgttatcaagcgatatcccattgcccttcggaatatggacgaaataacaaccgttgatattgctacatacagagacgttcgtttagcagaaatcaacccccgaacgggtaaacccattacaggtaatactgtacgtcttgaactcgcccttctgtcatctctgttcaatattgctcgtgttgaatggggaacctgtcgtactaacccggttgaactggttcgcaagccgaaagtatcctcgggacgagatcgccggctaacgtcttcagaagaacgtcgcctttctcgctatttccgcgaaaaaaatctgatgttgtatgtcattttccatcttgcccttgagacagccatgcggcagggcgaaatactggccttacgttgggagcacattgatttgcgccacggtgtggctcatttacctgaaaccaaaaacggtcactcacgggatgttcctctgtccagacgtgcccgtaactttcttcagatgatgcccgttaatctccacggcaatgtttttgattacaccgcatccggctttaaaaatgcctggagaatagccacacaacgacttcgcatcgaggacctgcattttcacgatctacggcatgaagcaataagccgcttcttcgaactgggtagcctgaatgtaatggagattgctgcaatatcaggacatcgttccatgaatatgctgaaacggtatactcatcttcgtgcatggcaactggtcagtaagcttgatgcccgccggcggcagacacaaaaagtagcagcatggtttgtgccgtatcctgcccatatcacgaccatcgatgaagaaaatgggcagaaagcgcatcgtattgagatcggtgattttgataaccttcacgtcactgccacaacgaaagaggaagcagttcaccgcgccagtgaggttttgttgcgtacactggccattgcagcacagaaaggcgaacgtgtcccatctcccggagcgttacctgttaacgaccctgactacattatgatttgccctctgaacccgggcagcaccccgctgtaa

SEQ ID NO: 191959 - DNA, 135 bp, Klebsiella oxytoca; identical to SEQ ID NO: 10665

SEQ ID NO: 191960 - DNA, 153 bp, Klebsiella oxytoca; identical to SEQ ID NO: 38610

SEQ ID NO: 191961 - DNA, 648 bp, Klebsiella oxytoca
atggtgcgggcgctgctcgacgaccggaagacgcagacacggcgcccggttaggtttccggtattagacaaaaaccttggatgtgagctggctggcaatgaattagccggggagctgtcggcagggaactatctgaatagcgcatttggcaagccaggagaccgcatctgggtgcgcgaggcttatcgtttcccggcatcgttagacgatgttagcccaactggtgttggtgaaatggctgtggcaacaggatacagaaaaccatgggcgccgaccttctacgagttcacaggcactttcagtgatggatggacaggattcgaaacccctccaaaagtttctggcgccggaaagcttcgcccatccatccacatgccgcgctgggccagtcggataacgctggaaatcaccgacgtgcgcgttgagcgtcttaactcaatacacgatgtcgatgctatgcgagaaggaatccagaatctgacgacatgttcacacgctgatttcggcattcctggcgtcgtaaatgcgcaacatcctgtacgagcgtttcaactgctatgggaatcaatctacggcgctgacaactggaaggctaacccatgggtttgggttatcgagttcaagcgcgttgaaggcggtgcagcatga

SEQ ID NO: 191962 - DNA, 423 bp, Klebsiella oxytoca
atggaaggtatgaaagaagagaataaaaatttcgcctaccgcattcagctcatactccagcaaacaggttggaacctatctgaactggcgcgtagggttgcagtaagcccacaagcgactcatcaatggtcgaggggcgatactacagccagaggagagcgactaaaaagactctccgctgcaacagggaagcccgggcactggttcttcttgcctgcaggcgaagagcctagcgaagaggagctcaaggaactagctagcactactcctctcgatgacaaagaacaagcattgttagcgctattcaaccaaatgccagaggcagagaaaaacaggcttattgttcatgccaaaggcgtattgaaagaactcgacctccttaaaggcgacgtcgccgacatcatcaaaaatatctctaactaa

SEQ ID NO: 191963 - DNA, 228 bp, Klebsiella oxytoca
atgaaacctgaactgaagcggcagatttgcaaacttaagagccaaaccgaaatcgccattgagcttggtacaaaaccacaaaccgtaagtctctggcttagcgggcaaatccctgctaatcgagtcatcccgttatgcaaagtcttgggctggactattacgccgcatcaaatgcgcaaagatatttatccaaaccccaccgacggcctaccaaaccaggaaggatga

SEQ ID NO: 191964 - DNA, 273 bp, Klebsiella oxytoca
atggataacgaattaacaaagatttacgtcacgaagtacgcgctgtcggatggcccattcactgtaaatgctgaaattcattatggcggttcaatggcgtcatacaaagtaaatggctatcggaaccacgcgcatgggaaagatttctggctctctgaatcagaagctctggctgactgcgagcgtcgtcggcaggcgaagctgaagtcgatcgacaagcaaaaaatgaagcttgaaaaaatgacattcaccatctcggagtgcaaagcatga

SEQ ID NO: 191965 - DNA, 588 bp, Klebsiella oxytoca
atgaataacgaactcacagcagcactgttaactatcgagaaatgccgcgagctgaccaactgcccggctggcgtagacctgcaggactgggtgaagacgttggcagatgagcgtgatgcgtcactgaatgcagagcgcgtatgggaaacggccatgatggaagcttgcggcgaggatggccctgcgtcggtagccaacgaaattcgctcgttgcgggctctacgggatacgagaattcaggcgcttaattctcaggttaagcagctggctgcggagaatgtggcgctgaaagattgcgttgttaatcatgctcccgcagtagaacactggaacgcatgggccgacccagaatacaagattcagaacgcacctgaaacccccgccaccgattgcatctattccgggattaaggctgatggggttactgctgctcttgaatcttgctccgattatctcgatacagactgcgttatggataggcttgatatcagctacgaagacgccgagaagcgaacctcaggggcaatcgagtttcatgatgcgatggtcaattttgcaaaccagctgcgcgagggggccgacaaatga

SEQ ID NO: 191966 - DNA, 249 bp, Klebsiella oxytoca
atgactgatatcaccagacttacccaggagatgaaagcggcggcggaaaaagcgaaacatgcaggggaagcgccagtaatgccgtttgatactcggatctctacgctcaatgaataccagcttacggtatgccccgataatgttctcactttggtagaggcgctggagaaggtgcagcagcttataactgaacttgaaacgcaaaacaaaaatatcaacacgtttagaaattcatcacgaatgacataa

SEQ ID NO: 191967 - DNA, 579 bp, Klebsiella oxytoca
  misc_feature (566)..(575): n is a, c, g, or t
atgtcgaaaaatgctacgttcactgctttttcatcatttatgctgatacttacgcaatcacgtattacattagttgcctctatactagttttcttgtttggtaacctgaatagtgttattaaaattatcagaaagaaaatagtcgtacttagcatatgtatattcacttcattattgtcaatctgggctttatactcctttactgcatcggattatatttcacatcaaaaagcatctaatagcggtgttactgcccgattcgaaacttttggcagcaatgatactttaacaacgctgaatgaaattctggttaccactaaagctgcaagtaacaggcaagattattttaacaaaacgtatggtgaagggctgaatgatatattgacaaactcaggtgaaggcgatgcaagtgcctttgtaaggtttactagatgggtcacgctagttaaaacgaccagcaataacattataactttattaattggacttgggccatcctatgcaggtaaagctgttgatggcaactatgttagaatatttgttgaaacagggcttgttgggttaannnnnnnnnnttaa

SEQ ID NO: 191968 - DNA, 177 bp, Klebsiella oxytoca
gtggataataccaccaatatcttacgcctgatgctgttactgtccctggctatcggcgtggtgctgacccgcacgctgctgcagggcaaacgcacccgctggcagcaatcgcccttcctgctcaccgccaacaagccggttgaggatgaagacgatgaaaagaaaggaaatctataa

SEQ ID NO: 191969 - DNA, 1218 bp, Klebsiella oxytoca
atgatggcgtatttggattattttttgaaatttattgagagcaacccagcactagccataggttttaacattgtgcttcttattatgtctggattttttgcgcatattatgtgtaagttcctgttaataaaggctgtcaggaaagcatttttttccagtcataaacaagatgttcctcttgaaaaagatcgccgtattgctgaaaagttatccaacttcgttcctgtcattattgtatattatgttctgcaattcatgccaaatatgccagtatctttagttactggcataaatacaatatgtggaatcttgtttttcgtttttctgtctgtcttttttaatgaaatgctagatatcgttaatagttcttatttaagaaaaacaaagcgcaaaaatcattcgataaaaggttacatacaaataggtaagattttagttcacatcattgcggcaataatgatacttgccgttatgtcaaacaaatctcctgcaattattatctcgagtctaggtgctgttgctgctgtactgatgctggtatttcagcatacgctgctttcgcttgtagctaacgtccagttgtcatcaaatgacgtacttcaactcggtgattggattgaaatgcctgataagaatttgagcggggaggttaccgatattgcattacatacaattactatacgcaattgggataatacgatttcacgtataccgacaaaaaatttcctaacagaaacatatactaactggcaggctatgttctcttctggtgccagaaggataatgcgtagtactacaatagatcagcactcggttacttttctaactcaagaaatacttgcaccaatacttacgattagaggtgtaagtgagcctctctctaagttaatcgatgggcgtgatgcaatggggattgcggatagctggtttatagataatggactgacaaatttaacgctatttcgtcattacattatggcctatttggctgaacgatctgatattataaaagatatgtatgtcgtagtgagaacgttaaaaccatcagcttcggggattccgctggaaatttattgctttaccagttcaacgctatgggtggattacgaaaatactcaatcagaaatttttgagtacatcacggctatcgttgaaaaattctcccttcgtatatatcaatatccggcagggcatgatttttggcattcgtcacaataa

SEQ ID NO: 191970 - DNA, 165 bp, Klebsiella oxytoca
atgtctgatagtatatatcgtaccaaaagagttattgctagcaatgagtgctttctattaatctacaatattcttttatttctgacaaattacttttttacttggttgcttttaatttatctatatatattaaaaggtttaccttactttcaaaagcggagataa

SEQ ID NO: 191971 - DNA, 387 bp, Klebsiella oxytoca
atgaaaagaaacttacagtacgagtttcaccattttggcattccattacaggatggaagatgtgaaggaacgttcagtgagaaggctggaatgttcacttccgacaatcccgggaaatttaaagtccagtggcatcgctttactgacgactcaccacttcatcctttattgaaaacggtacctcatgttgcgtttaaagttgataacttatcagcagccatcagagatgaagagataatcctcggcccctatgagcccatagatgattacttcgtagcagttatcaatgacgcaggtgttccaatcgaactgattcaaacaaccctgacggatgaggaactttgggagagagcaaggacaggtaaaggaagcctctatcgtaaataa

SEQ ID NO: 191972 - DNA, 234 bp, Klebsiella oxytoca
atgctgggcgatttctacagccagggcgtggcacagctgaatctttttgatgacaacgcaccgcggcagaacagcgaaaagttaatggaagtcctcgaccatctcaatgcaaaggatggcagggggacgctctattttgcggggcaggggatccagactgcctggcagatgaagagagaaatgctatccccgcgctatactacgaggttctgtgacctgctcaaagttagatga

SEQ ID NO: 191973 - DNA, 744 bp, Klebsiella oxytoca
atgctaaaaggtaagagggctgtgattaccggtggtggcgggggatttggtcaggcgttgagcgtatggttggcacgagaaggcgtcgaggtcgatttttgcgcgaggcgtgccaatgatattcaaaaaacttgcagtatcatctcggctgaaggcggaattgcgaaaggatatatctgtgatttaacccagcctgaatccctttctcagttttcttcacagttgttaagttcagataagcccatagacattttaatcctcaatgctgctcagtggttatccggaacgttagacgatcaaccagacacagaaattatcaatactgtcagctcaggactaacaggttcgattctactgactcaggcattgctgcccagcttaagacgttcagaaagtgcggatatagtatcaattatatcttcatgtgggattccgaattttacagattcaattgcgcatcccgcattttttgccagtaaacacggtcttagcgggtttacaactaaactctcacaccagttgtccgaagaaaatatacgtgtgactgggttatatcccccagatttcgaactgacaggattagatacgtttgtcgataaccaattcaaaatgggggagcgtttaatggatgggcgctcggtctgggaaacaattcgctttgtgttggctcaaccgcgtagttgccacattagtagcatctattttgatggtcctacacgcgaaaagctgggaaataaaggctga

SEQ ID NO: 191974 - DNA, 471 bp, Klebsiella oxytoca
atgatcgtcggcaaccttaacgctctgccgctggcagggcttcccccagcgctgcggcaaattctcgcccatccgcaggccacgctagcggcgctgagcgccaggaaagacgggcgctggcagccggaaaactgtcgctggtattgcgatatcggcgaagcgtccacccagcccgccgcgcggcgtcacaccgaatatcaccatcaatgggccgatattcaggtgatgctggcaggctgcgaggtgattaacgccggaacgctccgcgtcgcgcaggatagcgatgaagagcgcaaaccggatctgtttatcgcccgcgattgccctctaccggtatccatcaccctgcatgccggtgattttgcgctatttctgcccggcgaaccccaccaggcgctgtgcgcggtagacgcgccggtaacggtacgcaaagccgtatttaaagtgccgggcgacatgctggaagggtaa

SEQ ID NO: 191975 - DNA, 1239 bp, Klebsiella oxytoca
atgggcagcggggataataaggtgttggttctggcggacgacttcaccggcgctaatgacgccggcgtcagcctggcggagacgggaatgcgggcggaagtggcgttttccgatcgctatcggggagaggcgcaggcgctgatcctcaatagcgacagccgtgcgcagcccgccgcagaagcggcacggcgtattacgtatctcttgcaggctatcttgccgcgttttcagccgcgctggacggtgaagaaaatcgactccaccctgcgcggcaacctcggcgccgaactggaggcgacgatgcgcgctctggcgtgctccgtggcggtcctggccccggctttcccggcggcaggccgggtgacgcgagatgggctgtgctatgtgcgcggcctgccggtcaatgaaaccgagttcgccaccgacccgaaaacgccggtcggcagcgcggatatcgccgccgtggtggcgcagcaaagcgagctgcgctgccttagggcgacggtcgataccctggcgaccgcgctggcgcagacgggcgatgtaccgcgagtattgatcgtggacgccgaagaggatcggcaactggacgccattatcgaggcagtcgcggcctgcgatcggaaagtgctgctggcggggtcggcaggaatgtgtgacgccctggcgcgtcggctggctgccgtaccgcgcggaccgctgctggcgattgtcggttcaatgagcgagatcgcgcaacagcaggtcgcccggcttgaggcgcatccgcgcgttgttcgcgtagaaattgatgtcgcgatggcctttggcggcgatgtcgacgctgacgcccgacgcatcgccgcggtattgagtgaaaataatcattgcgtcgtcaccacgcgtcccgatagcgaggcgcgaaagggcattgatgccctgtgccgtcagcacggcgtcgatcgcaccgcgcttggcgaacgtatctgcgcgtatctggcgcaggtcagcgaacgggccatcgcccagcgccagccgggggcgctatatctgtccggcggcgacgtggccatcgccgtcgcgcaggcgctgggggccagcggatttcatattacgggtcgggtggcgcagtgcgtgccgtacggcaattttctgggtagcagctggcagcggccggtaatgactaaggcaggcggattcggaacggaaaccagcctgctggaggtcgtgaactttattgaggagaaaatgagtgactaa

SEQ ID NO: 191976 - DNA, 345 bp, Klebsiella oxytoca
atgaactggattaatatgctgtgggcgatattgacgctactgtcagtggtggtctttatttccggaagcgggttcgcgcagcgcaaaatacgctttattaattatgttctctttacgttcatcgttatttatattgccgagtcattacaaacgatcgataacctcagcaagccaggctatctgatgcggatgttgacctggacaatacaggcgtcgtttatcgccatcagtctgttcgatgtttggcagcgtccgtggtttcacgtcccgacccgccgggcggccggtctgcacgttgtcttatctctgatacttatgtcatgcttaggcgtgctgtttctgtaa

SEQ ID NO: 191977 - DNA, 1104 bp, Klebsiella oxytoca
atgatcgggtatcgttatcgcagagaccggcaaattctgtgttcagccctggcctttatcgccatgattgcgacaggcatttacttgcaacccggtttccgcccattgaccgcggaggtttccggggacaaagcgctggttgcctttttaacgccgctgcttaaaggcgcgcacggtcacgtcgccgccgcgcttatcaccccagatggcgttcgctatggcctctggggcgctgattacgccaggcaatatgagattggcagcctgaccaaaaccatgaccgccagcctgctgatcgatgccatccagcgcggagaagtcacgccaacgacgcgggtcggcgagctggtgccggaacttgtcggtccggcgagggacatcaccctcgaggagctggtatcgcatcgatccggtttgccgccgttcgccgcttcgcttacgcaaaaaatcgccatgctgaccgccatcgttaggcgagaaaatccgtggcgctacgaccgcgaggacctgccgaaaatgattaatctggcgcggataccgacggttaaaattttcgattattccaattcggggtttgcactgctggggttggcgctggaacgcgcctcgcaccggcccttcgcacaattgctggaacagcgcctctttgcgccgatcgcgatgagtcattcactcgtggcgcaagagacgacgccgccggatgcagcgtttgctccgggctggtcagcttccggtttacgcgaagcaccgtggatttcaaacgctttctcgcccgcggccggggtacgttccaccattgccgatatgacgaaatacgcccaggcgcttttggcgggaaaactggccggaagccagggcatgacgccgcggtttgcgaccgacgatcccgactcacgggtaggctattcatggttcaccacccaaatcaaggggcgggatatcatctggcacgacggtcagtcagcgggctatgccgccgtcatggtcttcgaccccgagcgtaaaatcgccgtcgtaatcctctcggataccgcctggtctgtaattgcgccagccatcaaactcctgctctccacgccatccgccgttaaggaaaaccaatga

SEQ ID NO: 191978 - DNA, 807 bp, Klebsiella oxytoca
atggacagaagaatgctgcgcgggggtttactcgcaggggtgctgttgtgcacacgggcgatgtcagccgagatctccggatttgccgggctgggagcgtcggttgcgccactctattcgggatccagccgctacgcccccggaccgctgctgacggctggagtgacatggcggagtcaggactttggtacgtttgcgctcaccagcaatgacttcaactgggatccggcgccgaattcccccttttccatgagcctgcaggtgaccagcgacggcgggcgcaaagagaccattaactcccctttttccgccaggaaaaatcatgacctacgtggaatgggcgatcttcctgccaccgtaatggccggagtgcgactgcgctaccggcaggacggctggtccgcatgggccaacgctctaaccgcaacgcaaaaacggcattacggcggtgaagcgctcggcaacccggtaaccgcttcaagtggggctgaaatgaccctgttgcgctggcgtgacggcgcgctcgcggtcggtggtgatatcacctgggccagtcgcgggtatctacaggggcactatggcatcagcgcgcgtcaggcagcacaaaccgggtttcctccctattcaccctctgccggatggcaaaacggcggcgtttatagcgaactcacctggcatctgaccgaccttctctctgccggttttaacggccgcgtcgagtacttatttagcgagccgggtaaaagcccgctggtgcgcagtcgggtccagtacaccctgtcttcactgctgttatattcattttaa

SEQ ID NO: 191979 - DNA, 1023 bp, Klebsiella oxytoca
atgacgcatacgttgatgatcgaagaggtgctggcgcgtccgcaagaggtgagctggctaccgtgggcggtgcagtatttcttttttattggtattgccgcctgcgcggcgctgtttgcctgcctgcttcactggcgcaaaagacacgatgaaacgctggaaaggctaacgctgctgattgcgctgacctgcgcgattaccgcgccgctggcgctaacggcggatctgcatcagaccgcccgcttctggcacttttacgcctaccccacgccctggtcgtggatgccatggggggcgctgtttctgccgctgttcacgttgtttttaggctggtggtttgtggcgcagtggatcaaacagcttttcaataaaagttacagtgtcactaaatgggttgcgcttgccagcgccctcacggcggttggcctgctggtctataccggacgtgaagtttcagttgttctggcccgaccggtctggttcagctacgccttcccactggcgatgttctttagcgcgctgcaaacttttttcgccctactgattgtggcaacacgcgatgattttccccttcagcggcgcctggcgcggtggcagctctcggcgctgattctgctggccgtggtggtggcgatgtgggtcagcggcgataccctgtccggcaccgcgatacggcaatggctggctatctcgtcttcagcccgtcattacgccttcggctggtttgtcttctggttgatgtcattgggctttgctattcatgcgctgcgctattcgctcaacctcccccttcgcgctttacaggccagtagcgccatggccttgtgctggctgatgcgctggacgctgctgattcaggggcaaactatccctaagtttaatgcccagtttaatccctataccctgccggtcggtaccgacggctggctcgcaatccttggcaccttcggcctgtggattgcgctgctgattattgtaagtgaaaccgtgaacggactcgccaggagaaggcaacatgactaa

SEQ ID NO: 191980 - DNA, 423 bp, Klebsiella oxytoca
atgaaaatcagcccgctgctcatttgcaccctctctttactcctttccgcctgctcgggtagtgcttctgcgccggacagcaccgaagacgctaaaatatcggcagaagcggataaaatacttcgcgattatcaaacgggtgcagatacttcaccgcaggccaatgcctcacgctatctggcgcggatccaggcggctgtcttcgctaacatagaccagccggcgtcctggcaagggcaaacatgctcggtgcgcttaacgctacagcgtgacgggacagtgcagaatccaacggtcgagaacggcgatccggcactatgcgcgcaggtgatgtccgcgctgaaacaagccaaaatcccgcctgcgccagacgaaaaaacctatcaaacattcagtcatcccgttctggacttcaggccctga

SEQ ID NO: 191981 - DNA, 273 bp, Klebsiella oxytoca
atggagagatatgaagttgtttatcatcgtagtctatttaacataatatacattatgcgcaccatgatagaagccgcaagattatgcgattttgatcagaactcagttaaccatcctgggattctgctcatggcccattcagcgcagttttttactttggatgaagttaaccccattcaagatgttgtcgaccggcacctaacaacgcagatggccgcgcagcgcctgggtatctccgctcgtcagcgccgacgtcttctcgcgttaccgtga

SEQ ID NO: 191982 - DNA, 303 bp, Klebsiella oxytoca
atgtactcgctcaaccaactagttgccatcaaccacaaacggcaatggacactgaaacctgctcaccgttgttgtacccactcagatatcacatcgatcatttggcttttcgttcattgtccacgcagtctgcttcgctgcaggccgttaagttcttttacgaattccggttgcagaatgcagaagcacggcgtcacgttttgctatagcttctgtacatctggctgcaacccgtgcattgctattgaggaaatgtcggcattttctcactatctggaaaatgattggttactgacgaattaa

SEQ ID NO: 191983 - DNA, 1281 bp, Klebsiella oxytoca
atggatgattttgaactacagcgaatatttcatcaaattactgctacatcttctccacttgaagcacttaacatatatgaacggcatttcgatttgttgaagggctggcgaatcatctacgccgctaacgatgatcatggtccatttaaactacagaacagagtagtagatggctcaacgggaatctgttccatttttagggggcaatccttatgggttattgatgcgaacatggtaggaaccgaaggagtggttccttatcttgcaggaacaggaacatatttcgactcaaacgcggcctcatttatttattcattaggatataaagagaaatttggtccagagctaagaaaacaactggggcgaatacagtctttagggatagattaccgaaacatcaatccttatttatatctttttgaaaatagaaaacattttgacaacaagcctgaaaacatcgaatatggcagaaaaacctttgctgtcatgactgcgttatcaaaaattgagggcccactggatgaatcctggcgggagatgtacaaaaaatatttccttgagcaatgcgaggaaagcatcgctccgttatttaaaaatttcctttcctggcatcagaatggggagtttaatttacttgatcaccaatttgctttgactgaattattgctactagaaaccaagatactggatatcactacgaaagataaaaatgaacataagcttgaagtgcttatacagtttatggatgaaaaattgcaagtaatgatgctacgagagattgctgtttgtgtagacattctttttaatgggaacagtaaccaattagcaaaaaaacttcgaaaaatcaaccatcatcaccccgactcccttggtattattcatggttgcgcctgggatttgttcatgtttcgtgttatggattggttcagtaatacaagcaatgaatttggtgtcgacttctatatatcaaacctcgtttcttgcgataaggatgttttggacgtagcagaactcaccaaactaaaagcaatcgcgatacataatgactcacacgagcatgttattttccaggataatagccctgaggaaatactcatttctatcctgggggaagataaacgtgaatttctgctaaatttattcaactacgactcacgtcaaaaacgcattggctggacacagaaaaaaaacaacaaagagatctatgctggtaagaatcaaattattcagggatttttaatggaaaaacgggaggaattggcatcattaattcgtcagtaa

SEQ ID NO: 191984 - DNA, 570 bp, Klebsiella oxytoca
atgagagcgtcgctaacgctaatttgccagggagaaacggcagcttccagaggttcacacttcccctgtgatgatcctctggaggcacgggagtggcaacgggcccatcagttacaaagcggtactgaccgttatcaacgcgtctggatctccccagacaccgccgcccggcaaaccgcagctgcgctctctttaccgggtactctggtaacggaactggccgaacccgactacggcatctgggcgggtcggtcattacgtgaggtgatgacgcaagacgccgaagcattccgggcatggcttgagggtgactctccgccgggcggagagtcgcgcgcacagctgctggcgcgctgtggcagctggctggctaaacacgtcgatattcaaggtcggcactgcgccattgcgccagccgccataatccgcgccatgatcgtcgatgttctcggcgccccacttcactcatttgcacgcatcgacatccacccgctgagcatcaccgagttgcgcagcgacggacggcgctggaatttatgtttattgaagggccacatcaatggtgaatag

SEQ ID NO: 191985 - DNA, 231 bp, Klebsiella oxytoca
atggacaacatcatcctgtataaagttatcgtcatcatggtcattgcctggtggggctggagcatactgaaaagtaagcagaaacagaggagcctggagcccgccattgcgcaggcgaatgccagagagcgttatcagtggcgttatttcagatggggctggagagttttgcaaatcgtctgcggtttgtatttgctgatcatccttatccagttccttgtacgctgctag

SEQ ID NO: 191986 - DNA, 177 bp, Klebsiella oxytoca
atgaaactaaacgatattgaaaacctaaccgtcaaagcccctccacagaatccatgtcaggcatctgacgatcgcgatgaacagtaccagaaggacaaggagtttatgcaggcaatgaatgaatttactgctgaagccggcctgttatctgatgaccccttctttgagggactgtga

SEQ ID NO: 191987 - DNA, 513 bp, Klebsiella oxytoca
atggaacttgaacagaaatacctttctctactgcaggaggcagagcgtcaccagcttaccgacgtggataacatccgtctctgttttcagaccctgtcgctcgccgccgccatcgatcgcgattgtgcaacgctgctggctccgtggggattatccgaagggcgcttcgtgctgctgtttttgcttgatgccgcgccagacggcctggcccccaacgtgctggcggaaaaagcgggcgtcacacgcgccaccattaccggcctgctcaacggcctggagcgcgaccagcttattgagcgccatgccgacccccttgatggccgggccatgagcattgccttaaccgcagaaggaaaacagcttatcacccacgtcttcgcccagcatagccgctggattggcggcttattcagccatctctcggcgcaggagcgcggccagctgtccgaactgctgacgaaggtcgccgccgggacgctggcaggtaaaggcgttcccccttgtggcggataa

SEQ ID NO: 191988 - DNA, 333 bp, Klebsiella oxytoca
atgccccactatttagtcgaactttatacgcccaatgcagcctggcgcggcctgtccccggagcaccgtcagcagtttatcagcggcattcaggcggcaatgggcggcctcgcgggatccggcattgaactattgacgctggcggaaaccgataccgctgtcgaccatactacatcgcaccgctttttggggatctggcgttttcctgacgcacaggcccgcaatgcgctgctcgccggtatcgccgccagcggctggtatgattattttgatcatattaatgccgcggcagctaccggcggtatggaagaacatctccgctcgctgagctga

SEQ ID NO: 191989 - DNA, 327 bp, Klebsiella oxytoca
atgccacactgcatacgaaaaatgcttgtatggcataacagtatctacctaaactacccaaacgcaggcgcacgtacccgtagcccgggcaggcgctctgcgccgcccggggaacagagcgcaggatggcatcatttcccggaggcgatgctgcgcatctgtccgggctacgcgtgccgaaccgtctgcgacttacttcgcgaatttatccagcacccggataagctgggtaacgaagccatactcgttatcgtaccaggccacggttttcaccagttgcagatcgccaacctcagcaatctccagctgcgtggcatcgtaaattga

SEQ ID NO: 191990 - DNA, 846 bp, Klebsiella oxytoca
atgaatataaaaatcgtcacgatgatttcaattttaaccgcagcgtgctcttcggcctttgctaatgaaaagaccacgacgacttgtgcagaaaaacagttatttatcaatagttcaaactatatgattctgacaaaaatgccgcccatgatgccgggcgagaagtctcttagcgtgcacttttccggtaaaggaaaactttatcgttatgaatcatccggcacgatgtcactttctcactgcgggcaactggaaagtcgcgctgaaacggaagagcgtgatattggtaataataagacaatgcgaagcacaacgactgtcatccgtgataaacaaaagggctggctgacggagatgagaatcgacggcttttatccgaataagaccagcatcgatagccgacattactataccgacgaattgggccgaattgtccgcgcagaaggccaatataaaatggatgacaaactgctggaaaccacgacctgggaatatctttatgacgatcaaaatcgcctgattcgtgaagtgataaagcccacgggttctccggcggcaatcatcgtcgactattaccacgatatcaatgggcgtttagcacatgttaccgaagagtcacgttcccgactcctgcgctgggacggacaagggcgctggctgtcgagcctgcttctgggactgacggctgaaaatcgctcccgtttcgaggaaaaatgcgtaaggtgggatgttgtcggaaactgcacgcaggagaacaggtgggaagctgatacagctcgcgcgggggccgacagggaaatagaggtaaattatcagattgaatatcagccgaatcattctcaatga

SEQ ID NO: 191991 - DNA, 990 bp, Klebsiella oxytoca
atggaaacccgaggcaaagtactgatacttggcgcaaccggcggtatcggtggtgaaactgctcgccggctcattcagaaaaaatgggacgtacgtgcactaaaacgaggacttcatggcagtgaacaacgtgatgacatccagtggatagggggcgacgttctcgacccggaccaggtcgccgcggcggcggcaggctgtagcgcgatcgttcacgccgtcaatccgcccggctacagaaactgggagcatctggtgctgcctatgctgcgcaacacgatcgacgcagcagaacgaaccggcgccttgatcgtgcttcccggtaccctttacaactatggtcctgacgcttttccgctagtacgggaagatgctccgcagatgccggtcacaaagaagggagcgatcagggtacaaatggagaacgaacttgaggcctattcgcagcggggcgggcgggtattaatcctccgtgcaggggatttttttggtccacgcgccggtaataactggttttcgcaaggtttgattaaacccggcaagctgcctggcgtcattagcaatcctggttcgcatgaaacgggtcaccagtgggcttatttacctgatgtagcggaaacgatagctgcgctgctagaacgacgcgaggaacttgagccctttgcgcgcttccatatgcaaggccattgggatgccgacggcagcgaaatggtcagtgcgattcaacgcactgcggcgcgctacggcggcgttgccaaaatacaatcatttccgtggtggttcgcgtacctggctgcgcctttcaacgcaaccttacgcgagcttttggagatgcggtacctgtggcgcaagtcggtccgcctggacaatacgaaactggtgaaatttttaggtgccgagcctcacacccctcttgatgtagctgtccatacgacgttacagggccagggttgcattgatcataccgagatacctcgcacaacggtatag

SEQ ID NO: 191992 - DNA, 588 bp, Klebsiella oxytoca
atgagtttgattttggcaatgtttatgttcgctctgacgatgtccttttcgccaggtccggtgaatatggttattatatcttcaggggcgaaccatggatttagaaaaacccttccgtttgtttcaggtgctaccataggatttacgctattacttatccttgtcggttttgggttctatgccgttatcgagtcgtatccactcttcttaaaatatcttaatatcgccggttcagcatttattatatttgtgggttataagatagcttcgtcccaacctgagttatctctgaaaaaaacagataccccaggtttcgttcagggttttttactccagtggctcaatcctaaagcctggatcgcctgtgcatctggggtggcgctattttctgattcgtcaacccacacaatgctgattacctttataattatctatttttcagtgtgttacatctctctggctgcatgggcaatactgggaaataaagtatcaacattactaagtagcgctcagcggatccgtgtatttaacgtcctgatgggtgggttactgatcatgaccgcttgctatatgctctcttttcaatga

SEQ ID NO: 191993 - DNA, 162 bp, Klebsiella oxytoca
atgatgcgtatcgtgcctgtcttcgctcacggatcgttaatcaatccccttttgttatgtgccagcccggccagcaacagtatcaatgccaggaaaacacccattgaacttcacatagtgcagacgagcctcatcctgttcgtctgtatccggcgccagtaa

SEQ ID NO: 191994 - DNA, 168 bp, Klebsiella oxytoca
atgaccgtcgatcgcagcctggagatcccggtactcctcgcagctatggccgcacagcgcggcgatagttttcaattgcgcttttgccaggtcaggacgacctttcgccagccatgcttcaccaagatattcacgtactttggcataggtcggatcgagcgcgattga

SEQ ID NO: 191995 - DNA, 150 bp, Klebsiella oxytoca
atggggactgacaaagtgcataaacaaatatcaagaagcttcgatcccctccgtcaggggagtaaaccatttagtcgcaagatgggcgggccctcgcccgccctgccgccgctaccgcggccagacctgcggaaactcatcggcgattag

SEQ ID NO: 191996 - DNA, 156 bp, Klebsiella oxytoca
atggagcgaagcttacgcgagccggcgatcgctttcagatttcacgtaaaaaaaagtagcctgagcgttatccccgcgattcccagcatcacaggggccttcgtttttagcgcctgtgatgctcgccagcagaataaaaacatcctcataaattaa

SEQ ID NO: 191997 - DNA, 171 bp, Klebsiella oxytoca
atgatcgttttttggtcaaaaagtgcagaaaagcagctcgccgcaactgattcccgctatcaggagagaatcaaagaaaagctacgagccatggatgataaaaatgcaccggctccggacattaagaaactcaagcagccggcgtccaagatcattatcgattgcgtgtag

SEQ ID NO: 191998 - DNA, 126 bp, Klebsiella oxytoca
atgagggaaaaagagtacaaaaggcaaaatgcagaaatggaaaaggccgcgaaagcggcctttgaggattacatcacgttacttgcttttgcgaagcagcgcgaaattattgttgctggtcgatga

SEQ ID NO: 191999 - DNA, 333 bp, Klebsiella oxytoca
atgaaagaattaacatttaacgaaatggagtacgtttctggtggttttaatttagttggcgccgcaaccggctttaccgattttgtggtcaattccgggctgggattcagctcttttgtcgctacctcaggagctgcattcgcaagcttcgtgatcgacagcaccgttgaaattggcaagtttgttgctggtcaaaccaactggaatacctttgttactaacggcgccaataactggaatggctttgtcaacaccgcggcaaacagctggtcaacattcgtgaacaacgctggtgcagactggaacggctttatcgacaccgctaaagcataa

SEQ ID NO: 192000 - DNA, 327 bp, Klebsiella oxytoca
atgaaagaattaacacaatatgaaatggaaaatatctcgggtgctggcctctttgacctgccttgtgcactagttgatttcactattcaatcagcatttggtctgattaaagtcggtattgatggctccctgaccgttgccaaaacggcggtggaaacctctctggatatattcagcaacttactaagcggctccccatccagtattgggagcattctgggagatcacttcaattcaatgatgtatgaaaaatcaggtatctggtcaaacttcgcctatgatgcagcgacgggctggggcgacgtggtctattctttacagaaataa

SEQ ID NO: 192001 - DNA, 987 bp, Klebsiella oxytoca
atgatcccggactattcaaaatttactcgttatcaggataagcgagtgattatttatctttaccttttaactgtttttttactttttcttttctggaagaacaatggttatatcttactgccgagtaatatattgagcctgagcatcatcctggcattaattgtattttcttttatttacgagctgaaaaattactggggatataaatgtgtcatgcaacatattgatttttcttgcttccagggaaaaaccatatcatcgcatgaggcctttttgtggcatccggcggtcgtcaccttcgcatgctttgtgatgttttatcttctcattacgggctgtctgtcgtttatgtcatctgttcatgcactactttgtattgcatttattaccccatttactatttacctggcatttaattttgcacgttatagctatgtgaagcgaatgaaggagttaactgttcaaaaggtagtctggaggaatcttcatcattacgtctgtttcaatctttttatcacctttttaatgaatagcttgatagtaagccctttggcaaatcaggatgatttttctttggccgatggttttttttcagctagactaataatagcgatgtttattctttgtgttattgttttattcttagacatgatcttcatacgcccgtcgaaacgctacatttttctcggaagattgttcctgcgggaatttgatttccatctatcaaagtcaataccctggccatggctctataataaagcaatatggcttagattattcttggttttaatcattcaatttttttggataatttcgctcaatgtgattttggcattttctggttttaagatttgttttgtaatttattttttatccagctctctgccttcgtttttttatttctactttcatgcttactggcattggcataatgattatatcatcgcatgtgatatgtattttcgttgtgatcgaattcaacgttaa

SEQ ID NO: 192002 - DNA, 933 bp, Klebsiella oxytoca
atggtatcacagctatcaacacgtcctgtcgctcttatctttgcaggccaaggtaatcctgttattggaatgggggctgatttatgggatctgaatgcagtgacaaagaatatttgggattgcgctagcgacattacccaaatggatattcgtcgtctatgtgagcgcgggccgatgaatcgcctggtccagacaacagctcagcaagttgccgttacggctattaacgtgacgctccattgtctctgtcttgaaaaaatgaccaatttgtcaatcgtgggttcttgtgggcatagcgttggcgaatacagtgcgcttttcgctgcgggtgcatttagcctggaggcactttttaagatgatacaaacccgttcaaacattatgaatgatttaagtaaaattcataaaggaactatgctagcggttaagggggcggattttaaaaccttaactaatatgatttctgcatctgggatacctgtggaagtgagttgcgataatagctgtcgtcagcaggttatcggcggcgcaactgctgacctggggcgcatatcacatattctgaacggtgccggtttggaggtggttaagttgggggttagcggagcatggcatacatgtttaatgaccgatggtgtgcagttgatgcgagattttttgcaaaaaatcgatattcgttcacctaagcacagcgtgctgatgaatgttaccggacaagcagaatttcttcccgaacagatcaaagaaaatctggctttacatctgactcatacagtgcaatggacaaattctattacggctcaattaaataattctcagccggtaacctttctggagttcagcaataaagcctatttaggacaactactttatgacttccggcgtttaacgccagacaatatcgtgcattgtagaaaactgattggcttgtaa

SEQ ID NO: 192003 - DNA, 645 bp, Klebsiella oxytoca
atgattcatataaataatttattcaggttactatgcttgagcctgtctatgattgtagtatccgccactgctgccgcctcttatgcgcctgtagtagaaagcatactccataatgggtttccaactcagcctgacgtgttagcaaaaacaacccaatctttatccgatgagttcaaagagacagggaacattgcttcgctggttttttacgcctacgggatgttgagacaagcaaattattttgtgggtactaatgatattattaaggcttctgagtacgcaaaaacaggtttcttttatctcgatgaagctgtggatttaaatcaaaaccaaccacttatcagatatctgcgtgctaaggtcgatgcgtacctacctgcagatttgggacgttgcgtcattactctcgaggacagcgacatactattaaaacaaaaattaagtagtagaattcgagataacgtcaatgatatgcgttacagagcactttataactgtaaactatatcaacaggcaagccaattattatcaatgttacaggcgcataacccaaataaaaaaattgatatgtattataacggttcatctagttgggatcttgacgaagttacgcaaattattaatcccttagcgagggtcaaataa

SEQ ID NO: 192004 - DNA, 963 bp, Klebsiella oxytoca
atggatgatgttatgcatttattatcatggtctcttattgagccagaggcacctttatttttatacagtcccagttggcttaatgtttgggaagcacattcctataatatggccttgaaaaatactgatgcaaatagctgggcttttaagcgatttggtactcgcacagatgcctatgttaaagaagtagtgaacagaactaattacatggcgtatatctcggcgttagaaaaagtatccgatgccgcaatgcagacgttatcccagaaggaacgtatgctattgatgaaatcacgaaccgccttcatctatgttgactcatggggagaagcggctagctttgaatatgatattagtacgctgcatttatctactattgatacgctacctaaaaacttagtaaaaaaattttctgtagataatgtgacttgtaaaatccgcggggaaaaaaatgcgctgattcaggcaatgcgtctggcacaggactatttaaactgggatgtctttgattttgtcattatttgtggtggttatcgttccataccattgttagcttttaccgcagcaaatatcaccccccggcgtaaaacgaaaaaatcgcgaaacatccctggtatgaatttatccattgaacgcgtaggatgttttatttttagccagactaccggtgacctaaaaataaactgtggaccctatttgagtacagacttttctcggtatgataaatatcatgaatcagatattgatttgatcgcattttctggtgaagactgttcaataacgccgttttttgacaattctgtaaaattacttgatcttgagaagaaatatggtttcagtggctgtataacaccagctttaagctggtgttatatttttcagcacgcatttaatggcggtcgcatgagaacaatcttacctgactgtaataacggcgttagttattttgatacctggtattaa

SEQ ID NO: 192005 - DNA, 138 bp, Klebsiella oxytoca
atgatacgtatttcctctgataaatataatgcggtgtatgcgatatttgcaggggaaatttaccgcctcgggcgcaaaggcatcattcaggatgttcgtgcctgccttcttgctgagtcggttttaccgaatagttaa

SEQ ID NO: 192006 - DNA, 870 bp, Klebsiella oxytoca
atgcattctcgatacgctttgctcgcctcgcaggcgacaacggcaacctttgtcctgctgtggggcagcgccgcgatttttacccgctgggggctggacaacgcatcgccgatggcgctgctggttttccgttttctgatagccctgctggcgctgctgccgctcgctattttgcgcaaacgctggctaccggcgcgcgggacgcgattgcaggtcatcatcagcggactgatgctgattggcggctattctgtctgctactttgaagcgatggcccacggcgtgacgccggggctgattgccaccatcatgggcattcagccgattctcaccctctgcgtcgttgagcggcggctgcagggcattcggctgctgggcctgctgctggcgctggcggggctggttctgctggtatggcggagcctggcggcttcgcagatggcggtcagcggcattatttttgcccttgccgcgctgctgttgatgacctttggcgccattttgcaaaagcgtagccgccaggcgccggttgacgttctgccgctacagtatctggttagcctgcttttgtgcttatttatggcgccggtgagcggtttttatgttcactttagcgcaggctttatcatcccggtgctgttccttggcctgctgatttcggtcgtggctcagctgctgctctatcgtttgctgagcgccgggaatatcgttaacgtcaccagtctgttttatctggtgccggtgattaccgcgctgctggactatctgatgctggggaaccgactcccctcggcggcggtcgtcggtatggcggcgatccttggcggaattatgctggtgtttcgcgcgccgaaagttagcgccgcatag

SEQ ID NO: 192007 - DNA, 1212 bp, Klebsiella oxytoca
atgagtcgagctgtgaaccataccgcagaaggagctgcacttggtttttactaccagtcactctatgcacttaaagcaatcctcgaaaacgagcatgatgatgcagctctttgtcttgaacgcctagatgacgtcgagattgtagctaatggcgaaagccttttatcacaattaaagcattctattaagcctaatccagcctcagtcacgatcacatctacattgttatggaaaacattcaaggtttggatagatcttttacctaaaattaatttagatgaaacaagactacaattaattactgttgcacctgtcggtaataaagacgaattgtttgttttaactcaagaaaattcagaccgtgaattactactactaaaactcatcgatgaggctactcgggtcgtagaagaacatgaacattcattagctcaaaagaaagttccagcaccacatgtccagcgatataatgcatgtaaatcatttttagaattgcaaaaagatactcgaaaagaattattgggaaaagtagtgctttttgcaagtgaaaaaaacatatcaaatataagtaaagatatagaaagcaagttaactaacttccctccaagtaaacgtgaattaatctgtcaacgattactggagtggtgggatcttcaagtgatattctctttgtgtgggaaaagagaaagggttatatataagcttgaggttcaacaaagattatcagaaatatctggtgaactagaaagggacgaactgaacgccgattttgaaaatgcaattttgcctagtaactacaatccacattcaatgattgtcaatcaaatagagcttattaaggggcggcgggttgatatatcgcaagcaactcgtgaagaatggagggcaagatctcaacggcacaagtggtgcaatgaacgatttgatatggcgagcagaatagatcaatacgataaattactattagaaacatggtctgataagtatgaaagaatggccgaggagtgtgaggattgtgaaggtcatcataaagaagaacaaggatatcaattgttcagatggtcttttgacttggctcatacccagatacgttcttttgctccgaattggaatgctagctattatgttcgtgggacctatcaattattatcaatagagttaaaagtgggatggcatcctgattacaagggtttgttaagggataagaaatga

SEQ ID NO: 192008 - DNA, 471 bp, Klebsiella oxytoca
atgattttagctcacgatatatatgctgaaacgaaccctgtattttgctcgtttttattatcggggttttgtgatttctataatacttccattgagataaatccagaaattcctctcatctacttagttcttcctattgttttatcagaggatttaagttcaacatttttaggatgcaatataaagactggtttgctagtttggttggaaaggaatccaagtgtgcttaatgaattaactaagcgagtaaactctacattagctattacaactgaagccattagatttggatgtatttcaaaaatattgaaattaaatgttgatggaacagtagttggaaataatattaagctagagcgtcttatgaaagacaatagtctatccctaaagaaaacacgtttattagcttattggttttctgaaatgggatcaacgagggccacttttgaagctatgggacttacgttatga

SEQ ID NO: 192009 - DNA, 2010 bp, Klebsiella oxytoca
atgaaaagatggaatatcgaaagaatctttttttttggggttgaagatttatttcgtgagatccaatttgatgttggtaaagttaatattattactggagcctcgggaacaggtaaatccgcaataataaaagcaattgattattgcttgggctcttcttcgtgtgaattacccgcttatattaagcgccattgtaccgttgtgggagttagatggtcaaaagggaaggaccagttgattgtgtgtcgccaaattcctcccgttggtaaaaaatcaagtgattgtatgtatattacttcggggcgagaactctctgttccaaagaatattaaagaacttgaggggcgtactacagtatctgcagcaaaagctattttagagcgagcttttcagattggcgacttaaataatgatttagactctaatcgtcaatatacagagaaagctacagttcgacatataacaccatacatatttgttacgaaggaagttatagatagcgaaacagtactccttcatggcttggacgataataaaaaatccccagcaattatctcaactcttccttattttttaggcgtaagttcagaagcttcagtcgttgctgaaaaacgtttgcgccagcttcgtagagtactggaaattgaaagtagcagagtagaagctcgccgttcaaaagatgggttagtaaaacaacgtttaagagttcttttagcagaagcccaagaaataggattgttatcagagagagatttatatggtattgatgagcatgagcttatttttttattaaaaagcaccatgaataaccccatggatactttaaattatcctgacgagaatgagctttcagagttacatgattatcgaaaaaatatcctacatgatctcaatcgaactaaacgtaagaaacgtgcaatgttcatggcattgaaagaatcaaatgattatcaatgtgctattaaaaaacaacatgagaagttaaggatagctgagtatttgaacttgtcagaaatccctacaacatgtcccatttgcaactctgaaactaagaaaggtgcagaagttgctcaaaagataaaacattcacttgaggttttaagttctgaaaatagtgaggttgggcgaatcaaacctcatcttagcttacaaatggatgaactatctgaaggtgaaattaaccttagtttaaaacttagagaagttgatgcagcaattgaatcaaaattatctcaaatacagaatggaaaaagactaactagtttagctcaaatgcatgcttattttcgtggtaaagctagttttttcctcgagacactcgatgataggttattacattctgcaaaagacttaagtggcttgcaaggtgaaatcaataagttagagtctgttgtagacctagataacagaagggtaaggttacagagagcggagaacttgatttctaacttttctaatcaagcatttcaaatgctaccgagagaagaaccttgtactaatgctgaaatattattctcttccagagagcctaaagttagtctcgtagagaaaggtccttatggttctattttatcaatggctgatattggttctgatcaaaactacttagctgttcacatagcattatcatttggtttgcagcggtattttgcaaaagaagaacgtcctattcctggattgttagtgttagatcaattgagccggccatatttttctaattcgcctagtaaaataaatattaattctaatgctcatgaagaagatgaatcaaatggcgtagatgaaactcaaatagactctaatgatgaagactttagggcaatgagaaaacatattaattttctctttgatgaggtcaatagagaggaaggattacaggttatattattagagcacgcttattttgtagatgatgttcgatatgttgaagcaacaaaacaacgttggactagagaatctggggaggccttgattcctaaaagctggaaacgtagggcagactataaataa

SEQ ID NO: 192010 - DNA, 564 bp, Klebsiella oxytoca
atgtccactgatgcactggcacaactcagccaacgactggtcactttcaccatgatactgttgatcgccgtcgttttgttaaattcgattgtcttgttttttcccgcatggtcattttcgaatgagttctacgggataacgctgtctctcactgaccaacgactctcggctctcaacgtcagtttacagacgttgccatggtggcaggttgcgggtgccggcgtcatcagcctgttggttatcgctccactttgctactgcctgtatcaactacgatcgctgtttcagacctatgcccgacggaattatttttccactcgatcggcacaacatatgagcagagttggtgcctcactgggagtctggacggtgatgaccctgcttgccgaacccatgaccagttactggctgacgatgctgaaccccgcaggagagcgtgtaatattaatcgggtttgagctctatcatatcgtctggttttttattgcgctgtgcgtgatggcagtggctaaaatactggaaaaggcgagtatcctgtacgaagaaaataaacttttcctctga

SEQ ID NO: 192011 - DNA, 1431 bp, Klebsiella oxytoca
atgtttataaggataatagcaacatccattgccctttattcaatttcgtttatcccctttgctgcgggggcgaatgagaattcgcgccaggccgaaaatactcagaagcacatttctgacgagcgactgaatcgccaggattatcgcgatcttctcatttccagaacaagtcgtcttgcagaacatcccgctaataatgccctgcgctgggaaattgcacaggatgaattgcttacaggaaatctcgctaaagcagaagaatatctgaagccgttattagatgtacctctgtacgcggacgaagcgacctatacacagggattgattcgttatttgcagggcaattatgcgcaggcggaaacattgttccgaaaggttcccggagatctgagaagtcggattcggctactttacgtctattatcagacagggcagtattcgaaggcgaaaacgctgttcgacgatacgcaactacagtctctcagtcagcatgaaagcgctcttctgagtttaatgaatgcgtttggcaatgaccaaccttacaaatccgactggaaaggttaccgggccgtgctgccgtttatctccatgaatcatctaccggtggtatccgtcagggtaaacgggcagcctgttaatgttttcatcgatactggcgccgatttatttgttcttaacacgacaatggcaaagaaactggatctcaaaccgcaagccagtttcacggggacgtatgccggcggaaagaccgcagaaacgcattattcccgactgcagacattgggtctgggagaagtcacgttgcataacgtaccgattgatattgcagaatttccagactcatgggtttttacggatgaaacgacgggagaaaaaattaatgtcgacggtatattatccactggcgtgtttcaccagtacctcaccacgctggactatccggaacgacagctggtgctgatgcccagaaataaagaaagtcaaaacaacgtcgccaaaagtggcggcgtaaacgttccctttatccttgagggaacgcatttcatgatagtcaaaggcgcagtgaacggtaagaaagacatgacctttttcctcgattccggtcttgacgatccggatgccgcaattttgttgcaaaaagaagccttaaattatgttggggtgaaattgcaggacggagagcacgtgattccggatgacgataaaggcggacttggcggtggcggttttgcaataacccgtctgcccatcgacagtatctctgtcggtaccttaattcaaaaagattcgacaggactttatggtgtcttaccagaagagctctatttcactgaatcgggtatgattctggacggttttatcagtcatcagtttttaaaacactataaatggaccatcgattttgactcaatgatgatgacattccagtaa

SEQ ID NO: 192012 - DNA, 810 bp, Klebsiella oxytoca
atggaacgctatagcacgctttttactgagctgaaaacccgtggcgaaggcgcttttgtcccctttgtcatgttcggcgatccgggcccggtgcagtcgctccgaatcattgataccctgattgcggcgggcgcagacgcgctggaactggggatcccattttcagatccgctggccgatggtccgacaattcaaaatgccgcgttacgagcctttgctgcagacgtcacaccgaccctgtgttttgaaatgctggccacgattcgccagacgcatccggccattccgatgggtctgttggtgtatgccaatctggtcttcaaccgtggcatcgacgcgttttatgctgaatgtgctcgtattggggttgattcagtgctggtggcggatgtgccgttcgaagagtcggagccgttccgtcaggccgcgatgcggcatgacgtggcccccatttttatctgtccaccgaatgccgacgataaactcctccaggagattgctcgccatgggaggggttatacttatctgctctcccgggcaggggtcacaggtaccgaacggcaggcagcaaagccgctgcaacatctggttgcaacgctggataagtatcaggccccgccaaccctccaggggtttggtatttccacgcccgatcaggtggcgggcgcaattgaagccggtgcaacgggggccatttcaggctctgccatcatcaacatcattgagaaacatgtcgataataaggaggcgatgctggctgagctgaaggcatttgtgatgagcatgaaagcggcaacgcgtcaggggtaa

SEQ ID NO: 192013 - DNA, 1194 bp, Klebsiella oxytoca
atgagcacattacttaatccctactttggcgaatttggcgggatgtttgtccctcaaatcctgatgcctgccctgcgtgaactggaagaagccttcgtcagtgcgcagaaagatcccgcattccaggctgagtttactgacctgctgaaaaactgcgccgggcgtccaacagcgttgaccctgtgccgcaacctcaccagaggaacccgcaccacgttatatctcaaacgtgaagatctgctgcacggcggtgcacacaaaaccaatcaggtactgggccaggcgctgctggcaaagcgcatggggaaaactgaaatcattgccgaaacgggggccggacagcacggcgtcgcctcggcgctcgccagcgcactgcttggcctgaaatgccgcatttatatgggggcaaaggatatagagcgccagtcgccgaacgtttttcgtatgcgtctgatgggggctgaagtgatcccggtacacagcggttctgccaccctgaaagatgcctcgaacgaggcgcttcgcgactggtccgggagttatgaaacggcgcattttatgctcggtacagcggccggaccacatccgttcccgaccatcgtgcgtgagtttcagcgcatgatcggcgaggagacaaaagtacagattctggaaaaagaaggacgcctgccggatgcggtgatcgcctgcgtgggtggtggatccaacgctatcggcatgtttgccgactttattgatgaggcagatgtaagccttatcggcgttgaaccggcgggtcacggaattgaaaccggcgagcacggtgccccgctgaaacacggtcgtgtggggatctactttggcatgaaatcaccaatgatgcagaccgatgagggacaaatcattgaatccttttccatttctgccggtctggatttcccttccgtcggaccacagcatgcgtacctgaacagtacggggcgagcaaactacgtctccattaccgacgatgaggcactggatgccttcaaaaccctgagccggaaagaaggcattattcccgccctggagtcctctcatgcgctggctcacgccctgagaatgatgcgtgataatcctgacaaagagcagttgctggtggttaacctctccggtcggggagacaaggatatttttaccgtaaacgatattctgcacgcacgaggagaaatgtga

SEQ ID NO: 192014 - DNA, 609 bp, Klebsiella oxytoca
atgaaagttacatggaccgtcacgcccgtgggctatcagcgcattgcgaaacgctgcccttcatgcagcattaaacgggactttttgccttcgggggcatttcgggttaattcgcaaaagaaggtgctggacgtgtggagtatctacaaatgcacacactgcgattacacttggaatatatccctgtttacgcgcctgcacgtcagcaaaattgaccgcgaacttcataaccgattgatgatgaacgatgcagccacggttctacattttgcctatgacacagctacgctgaagcgaaataatgccgagctatcgggtcggcctgattttcgcattcaggagcagtggttagccagcctttctcccggcaaacgggtcaaggttagcgtcaggatttcccgttcttttcaggtcagcctgctgtcgattttgaagcaacagctcatgctgagcactggtgagattcagagaagggttgaagcagggcagatcagcggcgttacgatgaagatgcttaaatcgagaaagctaaaggcagaggaatatgaattccagctgtctgcggaaacgttatatgctcggcgcaagattgttctgatacatcgttaa

SEQ ID NO: 192015 - DNA, 441 bp, Klebsiella oxytoca
atggatacacaacaccctcaattcgctcagcagacagcaattacggcctcagtggtccctgacgagctacgcatcgacttctggccgcagcactttggcaccatcccgcagtggataacgcttgagccccgaatatttggctggatggatcgtctgcgcgctgattacagcggcggcgtctggagcttttacacactcagcaacggcggcgcatttatggctccggagcccgacggtgagaagtggacgttgttcaacccgatgaatggcaacgatgcggagatgagcggagaggctgccggtatagcggtctgcttgatggcatacagccaccacgtctgtcgcaccgagtgtgacgcaattagtgagcactattatcgcttacgcgactacgcgctaaaccatccagaatgcagcgccattatgtatctaatcgactga

SEQ ID NO: 192016 - DNA, 357 bp, Klebsiella oxytoca
atgagcattcactcagattccggtaccaagccggagaatcccgccagccagccgtggggacttaaacgcgctattacgccctgttttggagctcgtctggtacaggaaggcagccgggtgcattttctcgctgaccgcgccgggtttaatggtgctttcagcgacgaggatgcgttgagcctcgaccaggcatttccattaatactcaaacaactggaactaatgctcatcagtggcgagctcaatccccgctatcaacacagcgtcatgctttaccacaacggactcacctgcgaagccgatacgcttggtagttgtggctacgtatacatcgccgtttatcccactcaacgttaa

SEQ ID NO: 192017 - DNA, 1899 bp, Klebsiella oxytoca
atgaattttaaacctgtagatgaattgaaaattggccatgttgttgaggtttcaggaacaaaaatcagagttgagttatcaaataatgttgaggaactcactagaagttatgcggggaaagtatatgcaattggtcagttaggaagcattgtaaaaattcactttggcaggaatgttatatttggattcgttaccttattacgtatgcggtctgatgaactgttaccagatgccttgcctattcctcctgaagccgaccaacgaattatggaggttgagctatttgctcatgggctatggtctcctgcgaatggaaaattaacatttaatcgaggcgtaaaaaactatcctctccctcaacaagggatatacttgatgacacactctgaatcttcagagttatttacagcagctgaaggagcgaggaaagatgattgtaatccactcgttccatttgcccactatacaagcgcaacatctattccttgcagagccaacattgataagctatttggactccattgtgccgtgctaggttcaacagggtcaggaaaatcaggtgcagtagcaacattactacatagtatattggatcatacaagcatcgaaaacaaacgcttatctccaaggattataatgattgaccctcatgatgaatatgggaatgcttttaaaaatagaggtgttatttatcaggcatatagcgcgttagagagtagtgactctaagagaaatataaagcttccatactggttaatgtctagtgatgaatttagaacactcatcattggtaagactgagaaagaagcgacatctcagaataatataatatttaaagccctttcatacgctagaatggtaactttaggtataacttcagcgtctccaagtaattatttatgggcacctcctgacgatggtttatctcatgatgagccaaggcctgcaatagggcattctgttgaggaaataatctcatttgactcagataagcctattccattttctttgcaggaatttgaaaatcatattcggtttgttcaagcatctaggtttaaatccaaggctgccacagtggaaagagaaactgataccaatttctctgacaagttcaaatctatattagataagttatcagtattaaaaagagatccaagaatatcatttatgatggagaattggacacctgattctgatatatctttagagagagtgttagagcaattagttggtgagatagaagaggatggtgtatataaagacatacgaataattgatatttcaggattgccgaatgaagttgctggtcctcttacggcaactatagcaaggttacttttccaatataaagttttccaaaccattgaagaaaggaataaagatccttttttattagtttgtgaggaagcccatagatatgtgcctaaccaaggagaagcacaatatgcggcggctcagtcagcaattcgacgcatagcaagagagggacgaaaatatgggcttggacttatgttagtaagtcaacgccccgctgatattgaaagcactgtgatttcacaatgtgggtcatgggtcgttctcaggttaaccaactctactgatcagcagcacgtgtcaaaattcttacccgatggattatctggtcttgtagctgctttaccagcactttcacagcaagaagctatatttgttggtgaagcagcagcattgccatctaaaattaaaattaatcatctctctgaagataaaagacctagatctgaaaatattagtttctcaaaagggtggtcagagccaaggttaacaactgaaaaacttgagattgtttccaatagaatggcagggcaattaccaacacatgctactcaaactacagagaaagacgatttacccttttga

SEQ ID NO: 192018 - DNA, 1158 bp, Klebsiella oxytoca
atgaaagacgatcacacagaagatgacttggaacagtttcaagcattactgaactgcccagagcaaaattggttactaggtgcaggaataagctattcggcaaaaattccgcttatgtatccattaacgaatagagtactagaacttatcaacgatgatgttgatacattgaatttaatccaaaaaataaaatcgcagcttccacctgacttacatattgaacatatacttagccatcttggtgactacgctgcaattgcatcacgctcgcattcaaaaaatgttgatatttgtggtgaagcctttagcttagaaagaattgaaaagatccataatataattctcaaacacattgctgataccatacgatttggatatgttgagtcaccggtaaaggaaattggtgataaaaataattatattgttcagattaaagatcattttgattttatccaagcactattttatagcttaagggctggggtaaatgaaagaagacgtccagttagattatttaccacgaactatgatacattgctggaagatgctcttgcattaaatagaattccttattgggatggttttagtggtggtgcggtagcatatagatcctataagtatggacagagtgaaccaacgagtgaagcaaaagctaatgtcataaaaatgcatgggtcaattgattggtttcagcacgaagatggttcattgtggcgagtgagagacagagatacatatccaattaaaaataatagagttcttatttatcctcaatcaacaaaatacattgcaactcaaaaagatccattttcatcacaatttgacctgttcagaaaatcattgtccacattatcatatcatgttctaattatttgtggttatagctttggtgatgaacatataaatcaagaaatatatctttctatgagcaatccaagtaataaaactataattctggcattttgccaagagatagataatcaacttccttcagtattaacagaatggaggcatggtgtttggagggatagaatttacatagctacgcaaaatggtctatatgttgctgatagaccaccaataaagagaacagaagaaaacgatgattggtggactttcgcaggaatgactaaagtattgaaagagggggttgtataa

SEQ ID NO: 192019 - DNA, 1089 bp, Klebsiella oxytoca
atgagaacctttccgctgaaaagtctgtcgctggttgaagcccaacataagcagttcgcgctagtggatgctatctgtcgccattttcctggggccgatttcctgcgcggtggggactttggtctggcgtcggggctgaatcagccccgcgtcacgcagcgcgtcgaagcagtgctggctgatgcattccatgccgaggccgccgtgctgctgcaaggagccgggaccggggcaattcgcgcggcgatagcggcattggtgaagcccggcggcacgctattaatccacgatgcgccggtctatccgacgacgtcggtgattattgagcagatgggactaaagccaattcgcgtggactttaacgatctggcggcgctctcagagacggtggcgcagcatcgacccgatgctgcgctggtgcagcatacgcgtcagtgccctgaagatagctatcggttggcagaggtgctctctgtgcttaatgagcagcatgttccgacactgaccgacgataactacgcggtgatgaaggtggcgaatatcggctgcgaatgcggtgcgacgctggcgacattttcctgctttaagctgtttggtccggaaggcgtgggtgcggtggtgggacgtgctgatgccgttgcccgcatccgcgccagcatgtattccggcggcagccagattcagggggggcaggcgctggaagtactgcgagggatggtgttcgccccagtgatgcacgcagtgcaggcgggggtgacggagcggcttctgctgcagttgaatcacggcgtggtgtcgcaggttaaacaggcaattatcgctaacgcgcagtcccgggtcctgctggttgagtttcatcagccgattgcggagcaggtactggctaatgcacagcggcttggggcattgccatatccggttggcgccgagtcaaaatatgaaataccgccgttgttctatcgcttatccggaaccttccgtgaggcaaatccgggtattgaacgctatgcgattcgtattaaccctaatcgtagcggtgaggaaacggtgttgagaatattgcaggaaagctgtgaggaagtgcattaa

SEQ ID NO: 192020 - DNA, 1305 bp, Klebsiella oxytoca
atggcgctttatattcaactcattgtggtggcttgtctgacggggatgacgtcgttactggcgcaccggtcagccgcggtttttcatgatggtattcgcccgatcctcccgcagttgattgaaggtaacatgcatcgtcgggaagcgggcagtatcgcatttggtttaagtattggctttgtcgcctcagtcgggatttcgttcacgttgaaaaccgggctgctgaatgcctggctgctgtttttgcctaccgatatccttggtgtactggcagcgaatagtcttttggctttcggcctgggggcggtctgggggattctgatccttacctgcctgctgccggttaaccatctgctgacggcgctaccggtcgatgtattgggatcgttgggcgaattgagttcgccggtagtatccgcttttgcactgttcccattggtggccattttctaccagttcggttggaaaagcagcctgctggcagcggttgttgtactgattacgcgcgtactggtcgtccgctatttcccgcatctcaatcctgagtcgattgagattttcattggcatggtaatgctgttggggattgcgattacccaggatctgcgcaatcgcggtagcgaggatcatgacgccagcgggatgtcggtgtttgaagagcgcacgtcgcggattatcaaaaacctgccgtatatcgctattgtgggcgcgctgattgcggcggtagccagcatgaaaatttttgccggtagcgaggtgtccatctttactctggaaaaagcgtattcggcaggcgtgacgccggagcagtcgcaaacgctgattcatcaagcggcgctggcggagtttatgcgtggtctgggtttcgtgccgatgatcgccactaccgccctggctaccggggtgtatgcggttgccggttttaccttcgtgtatgcagtgggctacctggcgccgaatccgtggattgccgcgctgctgggcgctctggtgatttcagcggaagtgctgctgctgcgttcaatcggtaagtggttggggcgctatccttcagtgcgcaatgcgtcagataacattcgtaatgcgatgaacatgctgatggagatggcgctgctggttggctctatttttgcctccatcaaaatggctgggtataccggtttctcaatcaccgctgcgatctacttcctcaatgagtcgttgggacgtccggttcaaaaaatggccgcgccggttgtggcagtcatgattaccggtattgtgctgaatattctgttctggctcggattatttattccggcataa

SEQ ID NO: 192021 - DNA, 354 bp, Klebsiella oxytoca
atgaaaaagattggtgttgctggcttacagcgcgagctgattaaaaaaacgattgaaaatacggcgccagggtgtttcgaggtgttcatctacaacgacatggaagcggctatgaaggtgaaaaacggccagttggattactacattggtgcgtgtaacaccggtgctggcgcggcgctttccattgcgatcgccattatcgggttcaacaaaagttgcactattgctaagccgggtattaaggcgaaagaggatcagattgcaaaaatggtggcggaaggaagagtcgcgtttggcctttcggttgaacatattgaacatgcgatcccattactgatcaactatttaaaataa

SEQ ID NO: 192022 - DNA, 879 bp, Klebsiella oxytoca
atgatgattgatagctccggttatacctacgcgcacgagcacttacatatcgatttgtccggttttaaaggcaacatcgattgtcgcctggatcaatacgaactgattagtaaagagatgcgcgatttaatgcacctcggcgtgcgcaatattgttgagatgactaaccgttatatggggcgcaacccgtcctttatgttggatctgatgcgcgataccggcatcaacgtgattgcctgcaccggctattatcagcacgctttctttcctgagcatgttgctacccgttctgtgcaggaactggcgcaggagatgatcgatgagatcgaaatcggtattgatggcacaccgctcaaagccggaattatcgccgaaatcggttccagtgaaggggtgattaccgatctggaagccaaagtgtttagcgccgcggcgctggcgcataacgcgaccggacgacctatctcaacgcatacttcgtttagcaccatggggctggagcagcttgccctgctgaaacaacacggcgtcaatctctcccgcgtggttattggccattgcgacctgaaagataatatcgatgatattttgcgcatgatcgatctcggcgcttatgtccagttcgacacaattggtaaaaacaattattaccccgacgcaaaacgcatcgctatgctgctcgccctgcgtgaaaggggctgcctggaccacgtcatgctgtcgatggatatcacccgccgttctcacttaaaggctaatggcggcaacggttacgactatctgttgactacctttgtccctctgctttaccaggccggtttcagccaggccgatgtggatctgatgttacgaactaaccctactcaatttttcctgtaa

SEQ ID NO: 192023 - DNA, 1224 bp, Klebsiella oxytoca
atggcgagatttgtagtgttggtgatagacagctttggcgtcggcgcgatggctgatgttcccgaagtgaggccgcaggatatcggtgcgaatacctgcgggcatattctgcaacgctttcctgcgctgcggctgccaacgctggaaaagctgggtctgataaacgccctcggttttgccccaggtgtgatgcagctttctgaagatgccgtatggggaaccgcagagcttgaacatgagggcggtgatacctttatggggcatcaggagatttttgggaccaaaccccgaaccccgctgcgaatgccatttaatgctgttatcgataaggttgaagatgcgctgcttgccgccggacatcaaacagagcgtcatggcaaaggcccgttttggctgttggtggacggcgcggtggcggttggcgataacctggaagccgatctggggcaggtttacaacatcaccggcaacctgagtgaaaagacttttgctgaggtgaaagcgattggcaggacggtgcgtgaacaggcttccgtgggacgcgttatcacttttggcggtcagctgtccagtacacagaatatcttcgacgcggtggaagagaaagagggcggctatatcggtatcaacgcaccgcgctcaggcgcctataagcagggattccaggttgtgcatatgggctacggcgttgatgaacaggtgcaggttcctgcccagctctttgcggtggacgttccgacggttctcgtcggcaaggtcgctgatatcgttagcaatccccatggcatcagctgggaaaatctggtcgatagccagcagattatggagatcacccgggcggagtttaaccgccgggagacggcatttatctgcaccaatatccaggaaaccgatctggcgggtcatgctgaagatgtggagcgctatgtcgacaggctggagctggtcgatgagcagctggctctgctgatggcggatatgcgcccggatgattgcctggtggtgatggccgaccacggtaacgatccaacgataggccacagtaaacacacgcgggagaaggtgccgctgctggtgtggtctcccgggcaatcgcctgcacggctcgggacccgtcgcacgttgtctgatgtcggcgcgaccgtatgcgacttttttggtgcgcatgcgccggaaaatgggtgctctttcctttcgcttataacgctcgcaaggaatacataa

SEQ ID NO: 192024 - DNA, 1164 bp, Klebsiella oxytoca
atgtttattaaagcattacaacggcagaacccggcgctgattgcgacagcgctccgcttctggcagcaagggcttatcgccccggatagctgggttattgatgtcgatcaggtgctggaaaatggcaagctgctgctgaagaccgcgcagcaatatggaattagcctgtacgtgatgaccaagcagattggtcgaaatccgtggctggcagaaaagctgttggcgctggggtatcagggcattgttgttgtggattacaaagagagtcgggtgatgcgccgtgccggtttgcccgtttcccatcagggtcatctggtgcaaataccttccgcgcaggtggcgggcgcggtagagcagggtaccgaagtcattaccctgttctctctggagaaagctcaggaagtttcggcggcggcggtagcaagcggtcgggcgcaggcggtcatgcttaaggtctatggagagagcgatttcctctatccgggacaggagagtggattcgcgttggctgagctggacaacgtggtggctcatcttcaaagcctgccgggcattgaactgaccgggctcacccacttcccttgcctgctgtgggatgacgaacaggaaaaaattctgccaacgccgaatttacgctctttgctcgccgcgagagacaaactcgaaagtctcggcgtgacggttcagcaactgaatgcgccttcggcaaccagctgcagctctctgccgctactggcggagtttggcgtcacccacgctgagccggggcatgcgctgaccggtaccatccccgccaaccagcagggagatcaaccggagcgtgttgccatgctgtggctgagtgaaatttcccatcattttgccgggcaaagctattgctacggcggcggctattatcggcgtggtcatgctaagcatgcgctgatattcgctccggccagcgaaaaagcccaactggcgcagcttaatgcggtagatgacagcagcattgattactacctgccgctggaaggtgagtttcctgtcggcagtgcggcaatcttctgtttccgcacgcagattttcgttacccgtagcgatgtggtgctgattgccggtattcaaagcggcagccctgaaatcgttgcccgttatgacagtcttggcaacgttctggaggactaa

SEQ ID NO: 192025 - DNA, 363 bp, Klebsiella oxytoca
atggaaaacaggctcaacttgctgtgtgaggcagggattatcgaccaggatatttgtcgcggaatgatgcaggtcgtccgccagctggacgagcagtggcatcttcccgtctttagcgagcaaggggaaatcgcgataactcatatggcaaatgcgctgatgcgcagccgccgcggtgaggttattgagccgctggatgaggagttcatggcagagataaccagttcggcgcattgggatgagattcatcaattgcatcaggcgctgatgcaagaatttgacgtcactctacatgctaatgaaaaaggttatttgctggctaactggtatgggttgtggggagcggcgcagcaggccgtgtga

SEQ ID NO: 192026 - DNA, 906 bp, Klebsiella oxytoca
atgcgtcggacattcattaaaaaagagggcatggcactaacgaccctggctcgttatttgttgggcgagcagtgcggtaatcgtctaaaaacgattgatgagttagcgggtgaatgcggctcttccgttgggctgactcaggcggcgctaaaaacgctggagtcttccggggccattcgtattgaacgccgagggcgcaacggcagttacctggttgagatggataacaaggccctattggcgcatatcgatatcactaacgtcgtttgcgcaatgcctctgccctatacgcgattgtatgaagggctggcgagcggactgaaagcgcagtttgaaggtattcctttttactatgcgcatatgcgcggcgccgacattcgcgtggagtgcttacttaacggtgtttacgacatggcggtggtttcgcgcctggcggcagaaagttatttagcgcagagcgggctgcggatggtaatgacccttgggccgcacacctatgtcggtgagcaccagctgatttgccggaaaggcgaaatcgattcggtgcggcgagtggggcttgataaccgctcggcggaccagaaaattatgaccgaaatttattttgccaatagcgacgtagagcgcgtcgacctctcttatcacgagagtctaagtcgcatcgtcaaaggcgaaattgacgccgttatctggaacgtcaccgctggcgcggagctggccatgttagggctggaagccctgccgctaagtgacgatccgcgttttttgcaggcgactgaggcggtagtgttggccagggcagatgattacccgattcaacatctgctacgtgcattcgttgataaacaggcgctattagctcatcaacaacgggtggtgagcggagagcaagagccaagctattaa

SEQ ID NO: 192027 - DNA, 441 bp, Klebsiella oxytoca
atgcgggttgagattgaacgctggctgacggggcgcaaaagcctggtaacaatacctgtcgttctggttctcattgccggatcctggggatggctactgcggctccctcagccagacactaacggggccggcacgctgcgcatacaagcgcagtggcgcaaactgttgccgctgcgggctgcgctacaaaacgttgatattgaggagcaacaaacccaggctttctctcccattgacctcccggtgacgggcgctgcgcttatggactggcggccgatagggcgcggtggcgagatgcagctggcggttgactggcaagtagtaccggcgcttttttcctggctagcccgctgcgggatgcgggccacggctttctcaattcagccgggcaatcaggctctacggcttaccctgcaactggaggcggaagatgcgccgtaa

SEQ ID NO: 192028 - DNA, 534 bp, Klebsiella oxytoca
atgagccatattgtcaacttccttccctggcgcgaaacgcgtcgacggcaacgtctgcagatggcggggctgctgattgttggtctgctgcttatgctgctggcggcgttcttcacttcacagctcaaccaacgggtcggccatttgcttgaaaccgcgaggattagcgctgaagaccagctttataccgccttgcagcagcgtgagcgagccatgcgccagcggctacagcagcaggaacaacaacgtctgcgcgttcttcggcgggagaaaaccgccgcgtggcagtcaaggttgcaggcgatagcggcgcttatgccggaacacgcctggttaactcagttggaataccgccagaatactctgtggctgagcgggttaacgttaaatcttaaggggttatccgcgctggaaaaggcgctggggcgcctgcccggcttgcgcccccccagggcgggtgaaacgcaccgcgacggtgaaggacgctggttatttcacttttccatggccggagaggaagacaatgcgggttga

SEQ ID NO: 192029 - DNA, 588 bp, Klebsiella oxytoca
atgaaccattatgatgatttgcagcgcttcaaggaaaagacgcggacacacagtctaaaattcaaggacctctcatcagaaaccggcgccggtgaaaaaggcgattgggttattctcaatcagcttattcccgcggaggaagcatcctctttggctatgggcggatcggtatctttacccgtgccgcagctggtacctgccaatatgtttcatcaggtggagcggacagccgttcagaccgcgccggcggcatcgtcggttgtgccgtcggtaatgattccagaccctgtcgcatcatccgcgccgcagcctgttcccgcggtgagtcctgttgctccggtggccgtagaaccggtagtgcaggcaagcgaggccgcgaccgggcaagctccccgggcagccgtgtcgcaacctgctgcaccgctatctgaccacgtgacagctccggctgtcagacatcgcccggcgatagcgccgacggcggaagggtttgcccatctctttgcgacaaaaaccgcagagccggtagcaaaagataaagatcagtcactgaaatcactcctggagaggatcgcgacatgccgttga

SEQ ID NO: 192030 - DNA, 912 bp, Klebsiella oxytoca
atgttgataagcgtccaggcattgaacgtcatcgtcaccatcgcgcgctgtggcaactttagtgctgccgccgaagagctgcacaaggtgcccacggctctcagctacacggtacataagctggaaaacgagctgggcgccaaactgtttgagcgccagggcaaacagctgatcctgacggaagcgggccgttattttatcaaaaaagggcagttgatcctgagcgaactgggagagttgcagcacaccactcgtcgcattgccagcggtacagagacgagcttaagcctctcgctcaataacattatcagcctgcaacctatttacgcgctgttgaaacaaagtgaacaccacttcccgcaaacggaaattcagttgagtattgatgtgcatgatggcgtctgggacgcgctgctggaaaagcgtgcggatatcgctatcggcgcgcctaaccaggtggtacgccacggtgaagtcctttgtgcagaaatgcccgccgttgagtggctgttcgccattgcgcccgaccatccgctggcggcggttcaccgcccgctacaggcagaagatctgcgccgctacccggcaatctgtatccaggatacttccgtgcagctcgagccacaggttgcctggcaactgcgcggccaaaaagcgctgctcgctcccgattaccacagcaaaattacgatgcatctccacggtctgggcattggctttcttccccgccatttttgccagcgctacattgacgacggcagactcgttagcgtgccggtggacgtcagtaaaccgccgacgccgctttttctggcctggcaaaacgaacctccccgcccttgttgccactggtggctgacgcagttgcagcgggcggatgtcatcgaagggtttttaaccgaactcagttga

SEQ ID NO: 192031 - DNA, 792 bp, Klebsiella oxytoca
atggctttgaatgcactaaaacattgcgccaggctgacttctggccaagcggggcgcgtgcactcggtcttcacccacgcctgtaatctgctcatgccgaatggcgaactctgggttgtgcaaacccgcgaaatgccgctggcccccaacggtatcattgtcgacgtcgacgatttgcgactccgttttatcgccgggacgagcgtggcctgtttgccccgcgggggcgatgtgtcgatgctcggttcgactcctgtctccacgcagcttatttctgccgggaacgccgcgaatttacggcgtttcgccagcgcattatctgttttcctcgcagggcaaccctgcaatggtattcggctggccttgcagcaagagcccgcgctggctgatgtctatcaacgctttacccgctggctgacgaatggtgaaggtgatgtcgttcccctgctgcgttttctgattgggcgcggggaggggctaacgccctcaggcgatgatttcctggtgggcgtattgctggtcatggagaactggcaacatccccggctctccttgctgcgccgggctattcccccgctgttgttagctaccacggatatcagtcgggaaatgctgggacatgcgtgtcaggggcgctatagccagcatttgttagcgctgatggcgacgcctgcggttaattttcctgcggttgccaggtatggtcatacgtctggtctggatatgctggccgggatggcggcggcggtcagcgttttatacccgtcatacttcaagttgcatgtgcgttag

SEQ ID NO: 192032 - DNA, 663 bp, Klebsiella oxytoca
atgcgtactattcaagctcaaccttttgatttcacgtttgatcctgccagcactgcgctggtcatcatcgatatgcaacgcgactttgtcgaacccgccggttttggcgaggtgctgggtaatgacgtctcgcatctgcgccggactatcgcgccatgccgtcaactgctggaacaagcccgagcctcagggttatttattattcacacccgcgaaggccatcgcgcggatatggcggactgtcctccagcgaaaaaaacacgcggcgggaaaacatttatcggcgaatccggcccgatggggcgtattttaattcgtggcgaacaagggcacgatatcatcccggagctcacgccactccccggtgaaccgattatcgataaacccggcaagggagcattttacgccaccgacctggggctgattctgcaaactcgcggcattaaatcactgattatctgcggcgtgaccacggaagtgtgcgtgcaaaccacggccagagaagccaacgacagaggctacgagctggtcatcccggaagactgctgcgcctcctactttccagaattccaccgcgccgcgctcgacatgatgaaagcccagggcgccatcgtcggctgggtcagcgattcagccagcattatcggcgcgctgcaaaactaa

SEQ ID NO: 192033 - DNA, 1551 bp, Klebsiella oxytoca
atgactctgcattaccactgcttcccaaacctgtataaagattccgtttctctgatgcaggtttccgcaaaactcaatgctttagagggcgttgagcaagcttctgtcgccatggcgacggcggccaatatcgaacgcatgcgcgatgcgggaatgcccattacgcttgaggcccgacctaacgatctgcttattgccctgctggccgatgacgaaacggcaaaacaggcgctgacgctggcgggtgagttactgagccctccagccgcaacggaaaacaccgaaggtacaacccgacgcccggccaccagcatcgccgcaggtgtgggagcgtccgcgcaggctaatctggcgctgatttcggttcccggcagctacgccgccgccgaagcgcttaaagccctgagcgccgggctgcacgtgatgctctttagcgataacgtccaggaagaacaggaagcggccattaagcagtatgcccgcgagcataacctgctggtgatggggccggactgcggtaccgccatcatcaacggaatgccgctgggattcgccaacgtagtccgccgcggagcgattggtctggttgccgcttccggtaccggcttacaggaagtgagctgccgcattcaccacctcggtgaaggtgtttcgcaagctatcggcaccggcggtcgcgatctgcacgaagagattggtggtctgagcatgctgcaagggatcgccatgctggcggacgatcccgaaacgcagctcattgcgctgatctccaaaccaccgtcacccgccatcatggaaaaagtgctggaatccgcccgtcagtgtggcaaaccggttgtagcccatttcctcgggacaagcgaggcgacgctgctgacgtatggcatcatcccagcccacagtctgcagcatgccgcggatatcgcggtcgccacgctgcggggagaaacggcccccgccagccattccttacctgaagccttacggcagcaagcggtgcaatcgattcgcgagatgaccgcggagcaaaccgacattcgcggcgttttcgcgggcgggactttctgctacgaagcccagctcgcgctccaggcggcaggactgtcctgtgaatccaatgcccctgtaacgggcgcacgggcgctgcaggataaacatcatggtcacggccacagtctggtggatatgggcgatgatgagttcacccagggacgcccgcatccgatgattgacccggaactgcgtaacgcgcgcctgctgtcggaagcgctggacccgcgcaccgccgtcctgctattcgacatcgtgctgggctatggcgccagcgccgagccgtgcagcgccctgctgcccattatcgaagaaattcagcgcattgaagccgctgaacagcgccatattgtcttgcttgctcatgtctgcggcacggataccgatccccaggacagagcgcagcagatcacgctgctgcaaagcgctggcgtcctggtggctgacagcaatatcgaggccgctcgcctggcggcatttatcgcgcaacaacggaaataa

SEQ ID NO: 192034 - DNA, 1407 bp, Klebsiella oxytoca
atgacgaccttatttcaacaaccgctttcggttatcaatctcggactggaaagttttgctgataatctgcgcgaagccggtggcgaagtgcttcatctgcaatggcaacccgtggcgcagggtgatgaacaggcgggctggacgctggcgaccctgctggccgacgagcgtataaaagccgctaacgaacaggcgctacagcgctatcttgatgcccaaccggtactggtcgatgtcgccaaagccagcgaggcaatctccggcctgaacggcgtacgcaaaattcttcatgccgggccaccgatcgcctggagcgatatgtgcggcccgatgcagggcgcgattgctggcgcgattgtttttgaaggctgggccagcagcacggaagaagcaatgcaaatggcggcgacggggctggtcgatctcgaaccgtgccatcatcaccacgccaccgggccgatggcagggattatcagtccttccatgccggtgtggattgtagaaaaccgcactcacggcaatcgcgcgttttgtaacttcaacgagggactcggtaaagttctgcgtttcggggccaataacgaggatgtgctgagccgcctgacctggatggggaacgtgctggctcctgcattgaagcaggcgctggcgctcagcggcgaaatagagctcaaaccgctgattgcccaggcgctgcatatgggtgatgagtgccataaccgcaacgcggcagcgagcgggctgttctttaaacgcctggcgccgcatctggcgcgtattcaacacggcccggaagcgctggagtttatcgccgccaacgaccatttcttccttaatctttcgatggctgcctgtaaatcaatgctggatgccgcctgtgatgtgccgcacagctcgctggttacggtaatggcgcgcaacggtgtcaacttcggcattcgcctctctggtaccggtgaacgctggttccaggccccggctaatcccgtcgatggcctgttcttccctggctacggtatcgacgatgcggcggccgatttaggcgactcggcaattaccgaaaccgccgggatcggcggatttgccatggcagcctccccggccatcgttaaattcgtcggcggcacgccagccgatgccgtccgtcatagcctgacgatgcaggaaatcacgctcgccacccatccggcgttcacgctgcccgcgctgaactttgccggtagcggctgcggtatcgatgcccgctacgtggttgatcgcaatattctcccggtcatcaacaccgggattgcgcataaacgcgcgggcgtagggcagatcggtgccgggatcaccactgcgccgctggcctgctttaccgccgcgcttcgcgcgctggcagaaggagctgaccatgaaaaaaactaa

SEQ ID NO: 192035 - DNA, 954 bp, Klebsiella oxytoca
atgaaaaaaactaaagtcgccgtcgtcgccgtcggcggtaatgcattgatccgcaaccccggagaaaatgcgctggaacagcagtacgaagcggtaaaagccactgctgaaaatgtggttgatctgattgccgcaggctggcgcgtggtggtgacgcacggtaatggtccgcaggtgggttttatcctgcgccgtagcgaaatcgccaaagacgccgttcctgcggtgccgctggagtacgcggtcggcgatacccagggcgcaattggttttatgttccagaacgcgctgaataacgcattgaccttacgcggtcttgatagcgtcagcgccgtcgcgctggtgacgcaaacgttaatagacccaaacgataccgccttcagccatcctgataagcctatcggcgactatatgactctggaaacggcggagacgctggcggcggctcagggctgggatatcgcagaagattcgggccgcggctggcggcgcgtcgtggcatcaccggcaccaaaagaagtcatcgaaacgccggttattcgcactctgcttgagcaaaatgtcttagtcattgcctgcggaggcggcggtattccagtctggcgcgatacgtctggcaagcttattgccgcccaggcggtcattgataaagaccgcgcatcggcgctgctggcctgcgaattgcaggcggacatgctgctgattccgaccggcgtagagcaagtcgccatcaactttggcacaccggagcagcgctggctcgatactttaacgttagctgaagcgcaggccatgctgcaaagcggtcagttcggagccggcagcatggcgccaaaagtcgaagccatgctgaccttcctgcgatgtaatcctgcgggggttgggctgattaccaatccggaaaccatcgttcgcgccattgacggtaacggtggaacccggtttaccggttaa

SEQ ID NO: 192036 - DNA, 396 bp, Klebsiella oxytoca
atgtcagatagcaaaatcctgcttgcggttaacggcacgctaatgcgcggcctgaagctaaaccccaacatgcttgccgttaatgccgaattcgttcgtgaggataaaacggccccctgctaccgctgttggagcatcaacgacgatcatcccggaatgattcgttcaccggataacggcgcaaaaatcgcgctcgaaatctgggcggttcctcctgccggactggggaatattctgcaaaaagaacctgctggactctgtatcggcaaagtgttactggacgacggtagtgaagtgttgggcgttctggcggaatcctggctggttgaaggccagccggagatcactgacctcggcggttggcgggcatacaccggccaccacatgactgaataa

SEQ ID NO: 192037 - DNA, 1599 bp, Klebsiella oxytoca
atggggcaaggaaaactcacatttcgtccaccgctatgggtgacgggcgatctcaacgcttttttcggactgtttaccaacgtattactgaacgtgctggtcctgtcaggcctcgcgctgtacgtcgcgcaaatcccggcgaccaccgtttatggccgcatcctaccagcgttaggtatcgcgctgccgctgggtaatctgttttacgcctggcttgcctggcggatggcaaaacgcgagggtcgcgacacggtgaccgccctgccatacgggccaagcgtaccgcacatgttcatcgtggtgttcgttgtcatgctgccaacgctgcttatccataaagactggatgctggcgtggaagctcgggcttatctgggcaatgattgtcggccttattgtgctggcaggcgtgctggttggcccggcgattcgtaaatatacgccgcgcgccgcaatgctggggacgctggcggggattgcgattgcgtttatcgccatgcgcccggcgtatcagatgtttgataccgcctggattggcattgtctgcttcgccattatcctgctcaactgggtcggtaacgtgcggctgccgttcggtctgccgggcgggctggcggtggttctggtgggttgcctgctgggctggggcgcgacctggcttggctttagcgacattatgaatccggcggaagtcaaagaggccgcggggcgtttctcgctctatttacccacgctttctactgatgtctttaacgtcccgatgagcctggtctggccactgctggtgacggcgatcccgttagggattttcaactttaccgaaatcctcaataacgtcgaatccgccgcagtaggaggcgacagctacaacctgcgcgcggtactggcggctgacgggctgggcgcgattgtcggcgcattgttgggttcgccgtttccacctgcggtttatatcggccatccgggctggaaagcgatgggcgggcgcattggttattcgctggcaaccggtgtttgtatggccatcgtctgcttcctgggcctcaccgcgctgctgctctccatcatcccactggtggcaatcgtacctattctgctgtttatcggtctggtcattggcgctcaggcgttccaggtgtcgccgaaacgccacgctccggcgatcgtgttggcgctggtaccgaatatcgccgaatgggcgaagacccaggtcgatggtgcgctggcggcggccggcgcgaataccgtcaacctcccggctgacgtcgttaatacgatggccaacaacggtgtgctgtatcacggtatggcaaccaccgggggcggtgcggtgttggcggggttaatgatgggggcgattgccgcgttcattatcgaccggcgctttaactgggcggcgctttatgccgcagcagccaccgtcctgtcgttcttcggctttattcacggccatcagatggcgtttaacgcttcaccgacggtgacgtttggctatggcgttgccacgctgttcctgacctttatggcctggcgacaggttaaggaagaaggaaaagtcgactggtcgccaattgataatggcgatgaggtggtacattaa

SEQ ID NO: 192038 - DNA, 246 bp, Klebsiella oxytoca
gtggaggcgtttttttacactcttagcaagcagcgtattttcccggaggcgatgctgcgcatctgtccgggctaccggcccgcagacaacggtgaacccgtagccccccccggtaaggcgtcagccgccaccggggagccgagcgcagagtcgctgaaattcccggaggcggtgctgggcgcctttaccggcgacagacgcaaaaaagcccgctcgttgagcaggctttttgaatttggtcggtga

SEQ ID NO: 192039 - DNA, 1374 bp, Klebsiella oxytoca
atgaagcataaaaaggttgcgacctgctataccgagcagcgccgcgcggtacgtctggggaaacttatcaagagcggcggtgcgggtagcgtctatttcctggcggatgacccggaccgcgttgccaaaatttaccatccccataccgataccggttattaccagcgtaagctccgcgctatgctggcgcagcgcccggaaatccctgcgccgacagaagatgaggcgattgttcagctggcatggcctgattatttgcttttcgatgagcgcaggcgcgtcgttggttttgttatgcctgttctggatacccagcgcaccattgagctggagtacattttacaggcgcggcaggcgaaggcgcagaatctgccggaaggcatcggcgcaaaagtgagcctggcctgtaacctcgcaaccctggtatccgcgctgcacgctcggcagcaccgggtgatcgacatgaagccgatcaacctgcggttttatcgtgacagcctctatatcgcgctgctggactgcgatggctttagcatccagggcgtcggtgaacgtttcccggccgggcagtttacggcggattacctggcgccggagtttcagcgcatcgggcaagtacccggagaacaggaagaggctcaggatcgcttttctctggcagtcattattttccaactgcttaaccacggtatccatccctatagcggccgttcgcaaacggcgaaggtgcctgatgatttatcagggcgtataggcgctgattgctacgcttacggtatcaatgccgcaaaaaatatcgccccggtaccggccagcactcaccatctcttgccgctcgagctacgtaagctgttcgatcgcgcttttagcgattcagcctcccgacgtccttccgccgatgaatgggcgcaggtgctgcgtccttatgcgctacgcagcacgcaaaaaattattctctgtagtcagaagcatcagcatttcgccggaatgccgtgcctggtctgcgcgcgtgaaaaacagcttactgagggggtaaaacaggcgaagcagcataaaaggacgcaaaccattcgcccgcgtcctgcgcctgtaaaacggcagcctcatgcggcgtcagccgccgcggttcctcggcagccagccgtgccggggccgttaacgctgctgtggcgcaatattcgcggcaaagtcccttcgtttgtatggcatggcgccctggctcttattagtacgctggtgatggccatattagcgcgcaattttacccaactgagcggtccctggcatgcctggtacgataacgcggcgttaatcctgattttagtctggataaccgtgatggggttgctggcgatttttcggagtaagccataa

SEQ ID NO: 192040 - DNA, 726 bp, Klebsiella oxytoca
atgagctggcgcgtttacgcttcgtcggtcattggcagcagccaccgacaaaataaccttccctgtcaggatgctttttgctatcgcaatttgggcgatcgtctggtggccgtcgtttgtgacggcgcaggctccgccacgtatggcgaacagggggcggctttggtcagccgggagctggttgaggggctggtaaaatttaccgccgtacccgatgaaaatcagctgtctactctggtggagagcgtgcgcaagaccattctgagccaggcgcaagaacgggaacgctccgcaggcgattttgcctgtactgttgtggccgcgtggctcggggagagtgcctcagtgatgctacatatcggcgacggtgttgcagcgttgcatattgatgctgatgagcacttctctttacctgagaacggagaatacgctaaccagacctggtttcttaccagtcacgactggcgagaccatttacgtatcagccagtttgctggtcgcgccacgcagctggtgatgatgtctgacggcgtgcagccgttcgcgctaaaccggcgcggcgatgcgctgttctctccttttatggatcctgttttgcgctatttacagcaggtctccgaggctaaagggagcgaagcgatatgcgccacgcttgacgatccgcgctcctgggcgataaccggtgatgacaagacgcttctggtagctctgcgtcatgaagcataa

SEQ ID NO: 192041 - DNA, 192 bp, Klebsiella oxytoca
atgacatggctacatagtaatgttgaatgggtattctctggtattggcgtttatgtcatatcacttatagtgttagccattacagcattaatatttagaaaaaaaataaaagctggcacccaaaagatcgctaaagtttttaattttggatggggtaacacaacaaatatcaaacaaaatgatggaaaataa

SEQ ID NO: 192042 - DNA, 675 bp, Klebsiella oxytoca
atggaaaataataaccctcaaaatgttgatcagaaaataaaatctactgtcgtgggtgcgaacaacacgacaattatcgcgcaagtcattgttaatgctaatagtcctaacattgatacaaatgcaatacaaaaaactctgattaatgagataagaagctctttaaaagaagagtttgtatccacggaatataacatattactttgttaccctaacaaagtaattcatgacaaagtaactttaaaaatcatagaggaaataaaacaagaattatataaaatgggtgctaaagtttatgagggcggaggtaaaacagccctgcctaaaacccaaataacatatccacaccttgcagaattagagtttataaaaaccgtcaaatgtgacacggtgataatttttgcattagatgaagtcacactatcacaactaacattaataagttactttaaagtatctaaaaaaattgataatacagatatgataataatatctagcgacactttaaaaaatagcgatatttttttatctaatggcgcattccaatactgtgatgataataactgcaagttatattctttgaactcactagatgatgctgggttaaaatctgtgatttccaggatagaaaataaaaaaataattcagcgaaaaggcggcttattaggagattaa

SEQ ID NO: 192043 - DNA, 1500 bp, Klebsiella oxytoca
atggaagagtctactaattataaattaattatctgggggctatccgttattcagcctgcatcgccaaatgaggttttgaattaccttacatctactttaaatgataatggattattacctgaagttgaaaaaatgattcgttactttgaattacttgatcaacatggatatataaatcaagtatcgaagcgcaacaacctttattcgttaacgcctcgaggaaatgaacgactaactccagcgctgaaaagacttcgtgataaaattagactatttatgcttgacaactgtcactctactagtaaattaggagtgctggcctcaactgatacagagaatatgggcggtgattcgccgtctttacagttaaggcacaattcaaaagaggttccgcacccaagcctgtcttgggctgcagggaccctgcccagcagcccaagacaggcttgggtgcggatctacgagcaattaaatattggttcgatgtccagtaatgaggccagcaccccactcacaacgaaaggctcaccacaccattctattggacgattaggcttttctttaaattactactcatttaataaaattgacgagattttttttaataatgatggagtgactgctattgcctcttgtattggcatatctccagggctgataactgcaatgataaaatcgcccaaaagatactatcgcacatttaacttacaaaaaaaatccggcggttttagacccattcttgcccctcgtaaattcattaaaaccttacagtattggttaaaagatcatcttttaaaccgtttaaaaatacattcctcctgttattcatatagaggtggtgtaagtataaaagacaatgcaattaatcatgtaagaaaaaaatttattgcaaatatagatatttcagattactttggctcgattaataaaaaaatgataaaggattgcttttataaaaacaacattccagaacatgttatcaacactatctctggtatagtcacctataatgatgcactgccacaaggtgcacctacaagccctataatatcaaatgcagtacttttcgaatttgacgaagaaatgagtttccaagccttaactcttgatagtacatatactcgttactcagatgacatatccatcagcagtgataaaaaagaaaacttagagatacttataagcgttgctgaggataaattactatcatctggatttacattaaacaaagaaaaaaaacgaatttcttcatataacagccgtcaagtggtcactggtattctcgttaatgaagcggtaagaccaacaagaacttacagaaagaaaattcgctcagcatttgatcacgcccttaaagaacaggataacagtcaattaacgattaacaaattaagaggttatttaaattatctaaaatcttttgaaccctatggcttccattttaatgaaaaaaaatataaagacattctaatttttttgcaaacgcttaaacaagggtag

SEQ ID NO: 192044 - DNA, 720 bp, Klebsiella oxytoca
atgataataaaaggaaaaataggactttcctgtactcttcttctgctctgcgccgttgccagagcagaaatcaccgagcagcagatcgaggccgactgcgcaaaaatcccggtctgggccagccagggcgagcagtactataaagccaaaaactactctaaagcgcgcaacgctttcgagcagcaggctgcgtggagcgaaagctgtgcccttgatgacagcgccatcgccacggcctacaacaatgtggcgctgacctggatacgcgaaggccaatggcgtaaagcccgcgcctggctgatgataaggccgaacgacagcaagtcagtttacaatctggggcttatcaaagataagctggccgccatgccgcagcctgtttcagcagcgggagagtactggcgctatgccgggcgcgcctcctggaacgtccttaccttgaagcctttaccacaatcatcacagtattacgttgattttcaaggctattatttcggtctaatgggaatgtatgccggccccaacatgggggaattctctgaaacggttacgcttaacaacaaccacgccgtcgtagcgcttcgcgaaggggatgttattcactgtaatatctcactggcgttttcttcgcaggctatcgacgccagtaccgatacccctgcggactgtggttttggtatgaacgtcagggccgacgggcgctatctgcgcgttgattaa

SEQ ID NO: 192045 - DNA, 1029 bp, Klebsiella oxytoca
atggtatatcccagagtctaccctttgcgcaaaccggagggatttacgccgcaggtgcagcgctggtcgacgcgttttcctccaggctgcagcgcattacatctcggattctttgcagtgcagatacctgaaggctgcagcaagacagatccagcatttgatacttggctgaaggcggcattcgagggtaagtatgcacccattgcacgggatcacgcttgttttaaagatgaatcaggcatgtttaactttgtggtgacagcttactggacggatagcatggcatttacaggctggcggcaaagcgagcaacaaggaggttggtgggatcgtccagaacggttgtccggtccttatggctactggcgcgaaatgttgacagtaccactcgaacgactggaaaacctgtattggtcggattatatggccgcgctgagcaaggcgttgccgatcgagcccgcaccctacagtggttatttcggtgcaatgcgtgaccgcatccctttagcagcgtgtgatcctctagatgggaccgatgatttaccgccagcgtcggaagcgaaacccggtcataggtattttgtggtgccaccacacaatttggcgatgattcgctctgccagtttttgggggaattgcgatgaggagcagcgcgtagactatgagcagaaactacgagatccattggctcgtggtatggattacctgcgaactcagccagcgcaaagtggctgctgcgcgctgcgtttccaacaaacactgaatgaacatggccaatctttaccggagactcatgcccatgcatattttctcagcctgaaacatatggaacgttgggccgaaggccatgcctcgcatgaggccatttttcatgcagccattgcacgctatcgaaaatacggtgcagccaaccaattacgtacctggcacgaagtttatgtattgccgcgtggcagccagcactttgaatatataaactgccattccaaaaccggcttattaccttttttcgaacgaattgaaatttga

SEQ ID NO: 192046 - DNA, 738 bp, Klebsiella oxytoca
atgagagaagatttgctggttgtggacaatgtggtgacgggttacgacagcgtcaatgtattggaaggcgtatcgctgcgcgtcagagcgggagagattacctgtttgctaggcgctaatggagcggggaaaagtaccttaattaaggcaatcttcggactgctaccgctgcgttcaggggcaatacacttcgcaggacaaagcatcagtaattgggatacgcatcgtatcgtgggccaagggattgcggcgatcccggaaggaaacaaggtttttccacgaatgacggtaattgataaccttaaggtaggtgcgtacctggaaccatcaagaattaaaatcgcggagcgactggagcgcgtatttgcgctttttccccggttaagcgaacggcgggagcagtttgccggcacactatcgggtggagaacgttcgatggtctctatcggccgtggattgatgagcaatccacaactattggtgatagacgaaccttctcttggtttgtctccgttgtatgtgaaggagaactttcgtcttatcagcgagctttgcgctaataaatgcaccatcctgttgatagagcaaaacgtgcatcagactctggaggtcgctcaccatggatacgttattgcacagggaagggttgtagccagtggcgaagctgctgcgctgcaaaggagtcctgaagtcagcaaggcctattttggcaacggtcaaccgacagtagaggaatga

SEQ ID NO: 192047 - DNA, 783 bp, Klebsiella oxytoca
atgaataaaggatgctggctaagctgtcgcgagctaacgatgaaattcggagggctggttgcgcttgattcattcgatattgatgtacatggtggcgatgtgatcggtttactcggaccaaacggttcggggaaaacgacctttttcaatgtgttgaccggactttataaaccctcggatggcagcattacatttaatggcaacaatctgttcaatcgttcgccgagcgaaattaaccaggcaggggtggcgcgaagttttcaacgttgcagactgatgctggagttatccgtattcgataatctaatggtgggtgcccataatcagtttgaccatagtttaattaaaaatctgctatggcggcgctttcttggccggaatctctctgcatttgagcgccgagcccgagatatttgcgcccgtttcaatccggaaatagccgatcggttatttgatcccgcaggcagtttcaacatgattgatcggcgtcgcatagaactttgccgagctctactcggccagccccggctgctcctcttggacgaaccttcagcgggaatgacgcatgatgaaacattccggctaatggaagatgtcactgcatttcaacgcgaggaaccgcagctggctattatcctgatcgagcacgagatgcaggtcattgagaaaatgacccatcgctgcatcgtcctgaacttcggcaagaaaatatgcgaggggccataccgggatgtgatcagtaatccacaggtgcgccaggcttatctgggagacgacaaatga

SEQ ID NO: 192048 - DNA, 1173 bp, Klebsiella oxytoca
atgaatcttaaactgttattcatgcgggctgacggtctgttaggactggctatcgttattgccctgtgtattggcgaggcgtgcttattactgctgctggaatcacaactggcactatttctgcttctactgttgacggtggttctatggttcaccgtacggcgggtgggtcttgcacaggcagctggcagtgctgtggcctgccgagtaggtgcggcgaacatgctggtttgtcttggtattttcattttgattctgattttccgtgaggagcattacgcattactgatgatcgggacggttctgctttttactaccgcaggtatcggcctcaatattcaaaccggattaacggggttggccaatttcgcgggcgcttctttttttgccagcgggggctacaccatggcggtgttagtgcaaaaaggaactattccgcatgagttggctcttctggccggtggcgctatatcggcacttatagggattttgctattactgccggttctgcgtactcgtggatattattcggctctggtaacgattgcttttggtcttctgtttagttcatttcttcaagttaatgagcatttgggtggtagcgaggggcttcaggtagaaggtctcagattgtttggctgggatatgagtacaggctttgaatggggaggcggtgaagtttctttttattttgcctactgtgtgctggcgatactggttttcctaatggcgtccttactcgcacacgctatcgagtggtctgctatcggggttaatctcgatgcgacccgcaatgatgaattagtgagctcgacctttggtatcagtacacagcgctggaaaattacagccttcttgctgggaaactttgtcatcggcgtggcgggtgcactctatagcggcatgactgggtttataagccctgctggggcaactttcgaacaatcactgctactaatttccattattgttctggggggaataggcaatacctggggcacgctgattgcggccacattcattattttattgccggaaaagctgcatgccttacaggaatatcgcgtcctgctcttctcagtattggttgtgattattctgatgttcagtccgaaagggctggtgcctcgtgcaatgcgtaatttctcgcgcaaaagggggatacatgaataa

SEQ ID NO: 192049 - DNA, 921 bp, Klebsiella oxytoca
atggaatatagttttttattccagcatttttttaacttcctgatgctggggacgatatacgcgctagtagcggtcggattttccctttattttggggtggtggatgttgtgcagttttcgcatcccgatgtaatgacactgggagggttcgcaggattaggtgggatagtactggtatccgcgctgggattgactggtaacgctttcgcattgatagcaatgttgatcagcgcatttgtcgtagtcggtatcgttggtgccctgattgggcgctatctggtactacctttaaaaggatcgtctccgatcaatgtattgctgattaccttgatgacaggaactgcgattcgcgaagcgctgcggatttttgttcctggcggctctaacccctcgccgtttcctatggtcttgcccgacgcgttagtggtggttaacggcgtttccgcgcgagtcagcagcctgattctgctgctgataggcgcgctggctattataggaacacatctcctcctcacccgaactcgcttggggatggcgatccgctgcgtagcgcaggatgaagagacgtctcgctttcttggaatcaacttcaaacgtgttgtcatcatcacttttgtcatcgggtcttgcctgggggccctggcaggcatcatgtctggcctatactaccgccagattattttcaatatgggactgatgcttggggttatcggtttttgttctgctgtagttggtggactgggcagtctccttggcgcggtactgggcggctttctattctctgccctacaggtattagcgaccgttgcgttgccgatccccagtgcatacaaggatgtttttgcttttggggcgatgatcctaataatcgccatacgcccgaccggtttactgcgtgaacgttatcaggagcgggtatga

SEQ ID NO: 192050 - DNA, 1164 bp, Klebsiella oxytoca
atgaataaacatattatggttttaaaagtatttcgctcgtcattgatcgctttatccttattaggatcgacatctctgcttgctaaagaaacggtgaaaattgcttttatcggtccactaactggcggtgccagcgcaactgggttaggtggccgaaactcagctcagctggcggtaaaccaacataatgccgatccggcagcaaaatatacctttgagctgataaagtttgacgacgagtgcaaacccgccacaggagttcaggtggtcaccaaagcggccacgaataattccattattgccgctattggtcattactgttctgcggtggctgctgtcactgtaaatacctatcatcgttttggtttaccgctagtcgtctggggcgctgtattgccggaaatcacctatggcaataattataaagaaattcatcgtgtcaatggcacgatgattaacgaaggcaaactggctgcagaatatgtaaaaaacagcggttttaaacgtatagctgtaatttatgacaccactgattatggaaaagggcaaagcaaatactttctgcaatatctgaaagaaaacccgcaagccagcgtagtcagttcgtttggcgtggacattagccagcaggacttttccgctgagctaacagcggtacaaaagagcaaccctgatattatctatttcggagggctgacgccacaaggggtagcgcttcgtgcacaaatgcagcgtatggggattagcaaacctatgatgggcgtgtctggcattttgaactccggttttattgacggtgtaggcaaggaggctgctgaaggagtggtgtcattccacaacggtgcaccgatcgacaaatactcgcaaggtgcagccttcctcaaagcctataatatggccggtttcaaggaggagcctgatgcctacggcccgtttgcttatagtgcggcaacgttgatcatggatgcagtagaaaaagtggggcctgaccgcaagaaggtgcgtgacgtgctcaatcacaccgcgggttataaatccttagttgggacgattaactttgatgaccatcgccagaatctaactaacgcctatcaatatgtggtgcaggatggtaagtgggtgtactggcctgacagtaaatatgggcatgcaatagagaaataa

SEQ ID NO: 192051 - DNA, 1044 bp, Klebsiella oxytoca
atgcaattacccgaagttaaggttgctgcggttcatgccgcaccggtatatatgaatgccaaagccactcttgagaaagccattgattatatcgctgaggcgaaaaaaaatggggctgagctggtcgtattccccgaatcttttattcctgggtttcctgtatgggccgcattatggggacctattcataatcacaagtggtttgaaacaatggccgaaaatagtcttctcatcgacgggccggaaatccgagcgttgtgcagcgccgctgcccaatatgatgttctggtgtgcatgggattcagtgaacgaagtgcggtcagcgtgggctgtttatggaattcaagcattcttattagtgaaaagggcgaaatactcaatcatcaccgaaagcttgttccgacgttctatgaaaaaatggtctgggcgccgggagatggggctggtttgttcgtggctgatacacgcattggtcgcattggcagtctcatctgcggtgaaaacacaaatcccctggcgcgctattctttgatggcgcaaggagaacaaatccatatttcgcagtggccctcaatctggccgaccaagaaaccatcttgtggtggaaattttgacaatcaggtagcaaaccgtatccgcgcaggagcacattctttcgaagctaaatgtttcggtattatgagcgcttccttaatggacgaagaaatgaaacggatgctaacagagtgggatagctcggtggctgacatcatcgaacagactccacaagctgcgacaatgtttgttgacccgacaggtacgccaattggcgatatccttcaacatgaagaagggatcgcatatgcgacattccaactcaaaaaaatcatcgagttaaaacagttgcacgatgtagtcggatattataaccgattcgatgtatttaatctgacggtaaatcgtaaccgcttgaatccggcgacatttacaacctcaagcgtagcagagaatatccccttgccgtcaggatttaaggttgaaacgaacgatattgctgacgtttaa

SEQ ID NO: 192052 - DNA, 159 bp, Klebsiella oxytoca
atgaaatcaaatttatgtgagcatattttatttattgttgatgctgcaatacaaccgacgctagggagacaaattaccgttcatcgtcaggcctgggatgaattagttattgcagtggtgggcttacttataggtgataagtgtaatgtccagcgttaa

SEQ ID NO: 192053 - DNA, 609 bp, Klebsiella oxytoca
atggaaggcatcgcctctttttaccttgctgaaaaatttgccatattctgtaaaaaatacagtgagatatcagttgaactgttgacatcatctcatcaggttcatgtcaatcgtcgggaagccgatcttttcctgagtttttatccctatgaagttaaggggctggatataatgcctataggcaaatttagcctgtatctctatgctgcaccgagctaccttagccggtgcggaacgcctgagagtagagccgaattgcatcagcatagctttattagctatatcgaagacctggtcgaactggatactgttcggtggctgtacgaggtgatcgaaaggcctgatatcgccttcagttcaagcagcatggttacgcaaatgtttgccgcaaccggtggaataggcatggtcttgttgcccgaattcatgcaggctgagcaatttggattgcaaaaagtgctgcctgaaacggttagcgtttcgagagtagtgtggttatccgtccaccgtgatctgcgttacctgcctaaaatgaaggctgttataagttttcttattcatcaattttctacggattaccccaatcaggttggggtcaaaatagagtag

SEQ ID NO: 192054 - DNA, 828 bp, Klebsiella oxytoca
atggccctttcaaacttattgattttggcaatcattcaggggttagctgagctgttgcccgtttccagttcggctcacgttattatggcagaaaagatattggggcttgatccaagtgctccagacatgacattgctgttggttatgcttcactcggggactatgtttgccgttatcgttcatttctggaaatcctggcattcaacctattttagttccgttgcggcgtttaaacattatgctctacgcatttttactgccaccatgatgacaggtattgtaggcttgaccctacaacatatcatcaaggtttatttcgctggcaatacgtcgaatttcgaaattgaatcactgttcagcaacagtaaactgattgcttctgggcttttcgtttcgggcattctcatcattgtttcgtcacgaataaaagaaagccacactgaaaacctctccttaatccagtcagtgcttgtgggtatggtacaggggttatgtctgccgtttcgtgggctttcccgctcaggcgcaaccatttctgctgcattatccataggtgttgcccgaaaaactgcagaagaattcagcttcgccctggcggttgtgctgacgcctgttgttatcttcaaagaaatggttcgtgctttccataacagtgctgcactgtctgtttcttctatcgtttttccgagtttactaggtatggttttcagttttattgctggtttagtggcgcttcgctggttggctggctggcttgaacatgacaagtggcacctgtttggcggttactgccttcttgctgcctgcgtcattctttggataggataa

SEQ ID NO: 192055 - DNA, 1140 bp, Klebsiella oxytoca
atgtctgacaaccattggctgcagcaaaccgaaactccctttcttcttatcgatgaagcaagatatcaacgaaatgtagaccgtctgttcaaacgtgtggaagggcttggcagtagcgttcgcccacacctcaagacactccgttctcctgaagcagctcgatatctactaagaacaaatgattctccggcaaccgtatctacccttgcagaagcagaaggttttgccaaagcaggttatacgaaccttctctacgcggtaggtattgccccgcaaaaacttgcacgcgttgcctgcctgattaaccagggcataaacatacatattctgctggatagcccggaacaggcgcttgcagtatccgaatttgcccagcggcacaacgtcacgttctcagtatttattgaggttgattgcgatggccatcgtggtggccttccaccacggagtaatgcgctcactgaactggctacgcttgttgaaggcaacggtgccgtgctgacgggtctgatggcccacgccggtgaatcatacagctgccggactgaagaacaaattcgtcaggcagcacgtaatgaatgtgaagcaatcaggaccgctgcagagcgtgtacgagcactgggcattgcctgtccgatactcagcgtaggtgcaacaccaacggcacactttgccgaagaactggaaggtatcgctgaagtgcgcgcgggcgtgtttacatgctttgacctggtgatgaaaaacgttggcgtttgcagtacggacgacattgccatttcggtagtggcctcagtcattgggtataatcgcgcaaaaaactgggtgtttattgatgctggctggatggcgctttcccgcgatcgtggtacagctgcaggcccggtagattacgtttacggtctggtctgtgatatcagcggtaaaccactcaacgtctgtgttactaccacaaaccaggagcacggtatcatcgctctacccgctgacaatgggcttactccggatgattttcctgtaggtatgcgcgtgaggattctgcctaatcatgcctgtgctgcagcatctatgcatcaagaatatcaggtgcttcaagctggggaagacgcccctgaggtctggcaccgtattattggttggtaa

SEQ ID NO: 192056 - DNA, 912 bp, Klebsiella oxytoca
atgcttaacagtgatgacttgcgttttttctatacgatagccacgcatcctactctggctgctgcggcacgttatcttggcgttacgcctccttcagtgacgcagcgccttcagggaattgaacagcgtttgggtgtcagattaatacaacgcccctcccgatttattacgcttacggatgaaggctgcctggtaaaaaccagagctgaacgaatcattgaagagctggcagagctacaggaaatcatcagaaaccgccgtcatgaggtcagcgggaaactaagcgtcctggccccgttgggatttggcactgactacgtagcccctctgctgggtgagtactcagcccgttacccgcatctggaagtagaacttacgctttccgacgatccgagttggtcttcatttcatcagtgggatgtcgtgatctatattggcgaactgagggattcctctatgcactgcaccccgctggcaaccaaccggaggtatgtgtgcgcttctcccgcttatctggaacaaaagggcatacccgattcaccctccgctctgagactgcatgactgtatagcgctaagagagaatagtgaggacgtcacgttatggcgtttcaaccgtggcaatgaagaatatcccattcgaatacaccccaggcttgccagcaacgaaggccgggttgtgaccgactgggccctggcgggaagaggtataattgtgcgttctgagtgggatgtaatgcctcatcttaaccgtggtaaactggttcgtgtgttgcaggaatttaatctgcctgatgcgccagtcgtcgcgctgactggcagcgatgcggctggccgttctccacgtactcatcagtttattcgcttcctgaaagagtttctttcctcccgtccctgggattgcgaaacttaa

SEQ ID NO: 192057 - DNA, 933 bp, Klebsiella oxytoca
gtgaagtttatttctgaacatgagagcgctgccctcatcagccatgaaatggcctatgacgcgattagggaatccctgatcgctgccagcaagtcggaaaccctgaattttccggtagttcacggtaagggatcaaataatgtgaactctttcagcatcaaagcatcgtcaacctcggagcttgccggacttaaagtcggttcatactggccggggaaccgtgatattgggataccgcgtcacaactctttaatcctgttattcgaccaggaaacaggcaaaatagatgctgcaattgaggctggaaaggtaaatgcattccggacggcagctgcgaatgccgtagcagctgacgtgcttgccagaccagattcagccgtactggccgtatttggtgcaggacatcaggcccgctatgaatgtgccgcactgctcagaatccgcccaatccatagcgtttttattgtgggccgcagtcctgaaggtgctcaggaaatggcggatgagctccgggagaagggaatgactgttcactgctgtgatgctgaaaaagcctgccgggaagctgacatcattgtcaccgctacgccttcacgcagccctcttttcctggcagagtgggttcgtccgggtacgcacgtagtgagtatgggatcagatgctgcgggtaagcaagaattgccagtcgaattgctgactaagtcgcgcctgttctgcgatctgccgtctcagtcgcgacgcattggcgagtttcaacatgcccctggagatacagaagttattgcaattggtgatgtgctgaccggcagagctgagggacgcacagtgaatgatgatatcactatcttcgacagttcaggcctgtcggtgcaggatctgtatattgcaaaggcgcttcttgagctatgggacctccataaggctgacagttaa

SEQ ID NO: 192058 - DNA, 396 bp, Klebsiella oxytoca
atgggcagagaaatcgtactgaatggggctgaaagcgcaccgccagcaggtcattactcacacagctgctcggcagggggcttcgtctggatctcggggcaattacctgttaccccgaacggagagaaaattgccggcgcaccgtttgaagaacaggttcgtcaggttctccgtaatctggatgcctgccttgccggtgctggtattactcgcagagaactggtttctgtacgagtcttcgtgacggatatcgggctgtggccggagttcaataacatttatgcagaatggattgaggattaccgtccctcacgtgcagtcgccggcgtttctgagctgcactacggtgccgccgtcgaagtagaagctatcgcgctggccccggcaggcgtctga

SEQ ID NO: 192059 - DNA, 1266 bp, Klebsiella oxytoca
atgtcctcatccaccttgttaaatccaaccaaaaaaccgttctattattcccttacttttcagcttgttgcaggtctggtaatgggaggaataaccggactgctatggccagactttggcgttcagttaaatccgcttgcaaagggttttgtcagcttgatcaaaatggtggccggactaatcgtttgtctgacagttgtcagtggttttgcgcaaatgaaagaggggtcgggcgtaggcagaacgggtctgattgcagtggtgtattttgaaattgtcagcacgatagctctcctgaccgggctggtgcttggaaatatatttgaaccaggcaaaggccttcacatacatgccgatgcttcagccgcagtaggtacacctcatgctgcgtccggaacagcggatttcattctgagcattattccgaaaacggtagtggatgcccttgccagcggcatcatgctgcaggtgctactggtttccctgttgtttggatatgcactcttcgccctgggtgaaaaggcgaaaccggtggtggattttgtcaatgtgctcagtgacgccactttcaaagttgttggtgtcatccttaaactggctccaatcggtgttttcggcgcagcagcatttatgctgggtaaatatggcctccatgccttaatgcctcttctgaaacttgtagggctggcctatctcgggggacttttcatggtgctcgttattttcatgatcgttgcacgtctgacccgattcaaccttttctggttcattaaacacattcgcgaagagctgattattggctttaccacttgctcctccgaggctgtcctgccgggtctgatgaaaaaacttgagcaggcgggctgccagcgcacaacggttgggtttgttgtaccggccggttattcccttaaccttgatggcgcctctatttatatgactctggctgcgctgtttatcgcccaagcgggcgggcttgatctcaactttggtgagcaggcaagcctgctgtttgttttccttctgacgtcaaaaggcgttgctggcatcacgggcggatcctttgtgacactatcagcaactttactgatgtttcctgacattccgcttgaaggtctggctttcatccttggcgttgatcgcctgatggacaccatgcgtacgaccgtaaatgttctgggcaacggcgtagccactatggctatatcgtggtggcgaaaggagcgtgcagatgccgtatctgctccattagctctgcgtgattaa

SEQ ID NO: 192060 - DNA, 636 bp, Klebsiella oxytoca
atgaaggcatctgaaaacagtttcttattgtctcagctggaatcgattgcggaaggattgagcgaaacttttgccccgttctgcgaagtagtggttcatgatctgaaaacgcctgaacatgccgttatttcaatccgcaacaatctctctggccgtcaacctggcgatccggcaacagagcttggccttgcccgtatcagctctcctgattttccgaatatcctcgcgaattatgccaataaattttccgatggcaggccagcaaaaagtacctctattggtattaaaaatgaagcaggcgaatatgttgccgcgctctgccttaatgttgatatgacgctgttcagaggcatgcaaaatgccctcgcacagttcacaagcctcagcagtaacagcgtcagcgaaaatctggaatcaggcggaacggaaatgatcaggcaacggatagagcagtacgctgcgaggctcgcaacgaccccgcgctcactcagtgtgcatgacagaaagcaactggttgctgaattaaaatcaagtggcctgctcgaggtcaggagggcgatggagacagtttcccagcatctggggatatcgcgggctactgcctatctgtatgccagaagcgacacaactcagtaa

SEQ ID NO: 192061 - DNA, 663 bp, Klebsiella oxytoca
atgaaaacacttgatatcatccataagcatgagcctgtcaaaattatcctttttgacttgcttactgcccttcttgactcctggacattatggaattcggttgctggctccgaagaaaaaggcaggatttggcgtggggcttatctaaaagcaacctatggatgtggagcttatcgaccctatgagacattggttgaggaagctgcggtgagtgtcgggcttgaagctaaactcgctcatgaattggaagcccgctggaccgaattacaagcctggcctgaagtgacgcgtgtactaaaggcgcttgaaccacattacaaattaggcgtggtaaccaactgctcgcagcgcctcggccgcattgctgcagaccttgtaggcgttcccttcgatgtcgtcgtgacttccgaactggctggtttttacaaaccgcatcctgagccataccttcttgcgttgcgtaatgcaggctgtgtgcccgctgaggctatatttgttgctggctctgcttacgacatgtttgggacgcaaaaggtaggattgcccacgtactggcataatagagttggattaactgcacctgtaggtgcgccgagtcctttcatagagcgctcaacgctcgatccgctgttgcaagatattgagtctctggtacggtcctag

SEQ ID NO: 192062 - DNA, 906 bp, Klebsiella oxytoca
atgaatgaagttattgacctccgttttctgctcacgatccgtgaaagcgacagtttgctggctgcctcgcgtaagctcgggttaacgccttctgcggtcactcaacggctacaacagatagagcggcggctatcgatacgacttctcgaccgctcgtctcgtcagcttcgcttcactgacgagggtgaactactatgtcttcgtggcgcaggtctcgtcgagcagttcgatgcgcttctggaggatctgcaggaacggcgacgtggcttcgttggcaagctgaaagtcaacgccccattcgggtttgggcgacatcatgtagcaccagcggccgcggaatttcagcgattacatccggagatcgaaattgctctcagtctgtcggaacagccgatggttgaggtcaatgaccggtttgatgtcgtcgttcatattggccaactgcgctcatcaaatatggtcgctcacatcattgcgcccaatcgaagatacgtttgcgcctcacccgattttattgaacattatgggtcacccgaacatccggaggatttgatttcccttccgtgtatcgcgctgcgtgaaaacaacgaggatgtgacacgttggtcatttagccgtacagggaatacgcttaatgtccgaattcgccctgcgttaagctgtaacgatggcagtacgatacgaaaatgggcatgtgacggtcacggtattatcatgcgctcagagtgggatgttgcggagtcgctggcaaatggctctctcgtgcgattactacccggctgggagctaccagacgccgatattgtcgcactcacgcaccagcgcgaaggattacctgccaggacgacaaatttccttcgatttcttcaagctcgtttccgtccgcatccaacctggcggggataa

SEQ ID NO: 192063 - DNA, 828 bp, Klebsiella oxytoca
atgtacgataaattattaacggtttctgatgcggctaaacttctgggtatctcagctagcacgctacgtcggcttgaagagaatggggaagtcaaaacctatgggctaaaggtggtttacaccccggggggccaacgccgttaccttgcagacgaaattcagcggatcttcacacagactggttttgctcataagttaggctttggcacaaaagctgccattttggtgcgcgatgttacctacgcttacatggattcgggttctacgctggcgattgataccccttttgataaagaagggttacatcggttgttgacgctcgcagctcagtgtggattgcccacggtgtttacccgcacaatttatcgtccagatcattcattttcttggttatgggggaagaaatacccgtttatcaccacgctgagagaagatgcgtaccttaatcaacccgatgaagcattggcgagtttgtcatttatgcgtaactattcaacttgttatgtttctgatttttatggtagtgatttggaaatatggttaaagcagcaaggtattgataccattatcttgggcggggctactgccagcggcagtattcgcgcaaccgctattgaggccttccagatgggttttcacgtcatgatacctcgcgaagtgattggcgatcgtagtcagtcattgctcgatttcacattactggatctaaatgcccgatatgctgacgtattaaaccttcaagaagtgactgattggcttacgacttcgtcgctggagttgaataaaaaaaatatgcttcattgccagcatgatgaattggctaaatga

SEQ ID NO: 192064 - DNA, 1371 bp, Klebsiella oxytoca
atgaagaaaatattagatacctcccccttcaatacgattgccgccacacggcgactgctggaagcgcgcaagatttccccaagtgagctgttgagccattttctgtcccgaattgagcagcgtgatggtgaagtcaaagcatggcgttatctcgataaagaaggggctcgtcagcgcgcactggaattagaccggcagatgggagcgatagcctgcaagcctgcattgtttggcattccctacggcgccaaggatatctttcatacccgcggtttgccgacagaaggggggtcaagagtgctggagggttatatctccagtgaaaatgcaagtgtgatcgacaagcttgatagtatgggcgcattactgttaggaaagttgacgacgaccgagtttgcgaatctgggtacaccacctttgacgggaaatgcatggaatccagcacatacccccggaggctccagtagcggatctgccgccgcagttggaactcgtatggcattgatggcattagggacacaaaccgcggggtcgttgtctcggccggcagcattcaacggtgtgacagcactgaaagctacgtatgggcgtatcagcaaggcgggagtaatccccgccagttggtcattggatcatgttggcgcgtttactcatactgtagaggatgcggtactggtttttaatgcgctgtccggcccggaccatcgtgatgatacgacgcaatccttagcctacacgtcgctgaaactgcgtgaaaaacacgattatattgttgggatagtggatcatccctattatgccagtgtagatgcagaaattggtgcggcctgtcttcgggcaatggacgagctggccgggcgcggcgttaagctcaaacgcatcacgttgccagattgttttgacgaagcttgccgcgcacatcataccgtgatgcaagcagagtgcgcggcgtatcatcacgaaacctttctgcagaatccgaccttgttcggggcatatttacaggaatttctgcaacagggtctcacgatttctgctcaggaatacttacatgcacaacaggtgcgcttgcgtttccgccaaatgttgacggcgttgttcgatgaagttgatatattaatgacaccggcaacaccaacattagcgccacgtggtctggcggaaactggttcccctgcttacaatatgccctttaccaatgctggtgtacccacgttgacgctaccggtagggatttctttaacaggtatgccgataggtatacagtgggtttctcgtcacggtaatgagcaggcgcttgcggacttaggtatattttatcaacagataacagactggcatgcctgtctcccgccactctgtcagggataa

SEQ ID NO: 192065 - DNA, 972 bp, Klebsiella oxytoca
atgaataaaatcgtttcatgggtttgcgctgcgctatttgtcacttgttcttttagtgtgttggcagatgatgcaaagcccgaccgcgtgctggtaacggaagcatttcactcattattgtatttacctgtttatgttggcaaacatcagggattcttcgaaaaaaatcaaattgatgttacgtctattcgatccactggttctggcccaactgctttggcagcagtgctgtctggcgaagcccaattttccgtacatggccctgagcatgtcggatttgctcagcaaaaaggggggaaggctaaagcaatcagtgccgtggctaacagcgcgccagtatggattgtggctaaaccagattttaaattctcttcacctatggatttaaaaggaaagcggatcgctgttagcctggctccagggacctctaacacgctgcttttacgtttgttaggccagaatggattgaatcctaagaccgatgtgacgattagtgaagtacaaaacggttcagaactggggccgcttttggcgggccgtgccgatgctgccgtagtgtatgaaccacaagctgatcagggggtaaggcaagggctgaaaattatttacgatttcactcatgactatcctgaatatgcattctccaccattaacacctcggagaaaatgattgcggataacccgcggcttgttgcgaactttgttaaatccattaatgaatcgctggcttttatccatcaacatccagatgttgcaaaacaagtggctcgagaggagtttgccggactggacggcagtgtagtagatgccgctgtacagaggatgattgacagcaatgtttatccctccagtgcggccatttctcaagaagcttttactaccgcaattaatattcagaaatttgtcggcaacattacgcaggatatgccctatacacaaatcgttgacggtcagtttgtcgccagaccataa

SEQ ID NO: 192066 - DNA, 831 bp, Klebsiella oxytoca
atgagcaaatcagctgttgttgttgatcgttcacgccagggacgtcagcgtaaaaagcgttggctgtcgatgctgcgtgacaatggctggcgggtattactggtcgtcgtcatcgtggctttttggcagttcggggtgagtattggattagtgaatgcttttctcatgggatcgccagcagggatttggctggagtttgtacgtttgattagtaatggcgaactgttacaaaacaccagtgtaacggtatatgccacgataaccggatttgtgttgggcagtttgcttggttctttttccgggcttctgttatggcatacgccaatactggcccgcattcttgatccttttttcattgcgcttaatagtctgccgaagatcgctttggcgcccatcattattatttggtttggttccggtctattttccaaaattgcgctggcctttattgctacctacgtcgtggcattaatctctgcatggcaaggtacgcaccagattgatgatagtcaggtgaacctgatgcgctccttgggggctaatcgaaatcagatttttcgtaaggttgtagtgccttcgaccctaccgtggattatatctgcttttcgtctgaacatcggttttgccctaattgctgacatcggaggtgaatttatctcctcagattacggtttgggaaaaatgattttcgtcgctggcaatcttttcaatctaaatgttgtttgggtgggcgtctttacgctgctggttgttgcacttgtgctctatctgattgtggttcaattgcaacgcagattgctgccctgggagcaaaagaaaacacaccgctaa

SEQ ID NO: 192067 - DNA, 1050 bp, Klebsiella oxytoca
gtgtgcccgtgtgctcaaactatagggcaggatacgcaatcgctcgtcagtgagctccagttgcaaggtatgggaagaaatgacaactttgataagtttgtcatattagacaagtttgacaagttattgcacggtgaagagcgcgtaatcgatatcctgttatccggctcctcttttttgacagtcggatctacctttagtccggagtgtatgatgaacctttcaccaccaagagaaaaaatactttcaggcagtcctgcaaccccagcggtagctattgccatgaaaggtgttaaaaaacagtttttggattatgacgataacgaagtagacgttatcaaagatatttccctcgatatttatcaccaggaatttatcagcattgtcgggcccagtggctgcggtaaaaccactatgtttaacattatcgcggggctactccccccgacagcgggcgaaattcaagtgttcgatccgtactatgccttgcccggtaaaggacgtgtgggttatatgctgcaaaaagatctgctgtttccttggcgttcaattctggacaacgtttgtttaggtctggaaatcagcgagatgccgaagaaggaacgtcatgaacgggcaatgacttacctggaaaaatacggactaggtgatttcgctcacgcctatcccgctacgctgtcgggaggaatgcggcaacgggcagcactgatccgcacgcttgtcactgaacctgacattattttgctcgatgaaccgttctctgctctggactaccaaacgcgactggtattagaagaggaaatcctgactgtactcaaagaatacggaaaaaccgttgtcttgatcacccacgatattggcgaagcgatagcgatgtctgatcgtattgccgtgatgtcacagcgaccaacgtggaacaagaaaacctacgagattggtcttgccaggcggcacggatcagccatgggggcgcgtaaggatcctgaattccagtccttttttgatgctatctgggcagatatggatattcaactaggagaacatgtatga

SEQ ID NO: 192068 - DNA, 3714 bp, Klebsiella oxytoca
atgaaaacctttatttatcatgacgaaaaatcacataaattctggacgattgagcaacagggccacgagctgcatctaagctggggcaaggttggcacaaacgggcagagccagatcaaaacctttgccgacgcggcggcggccagcaagactgaagtcaaattgattaacgaaaaaatccgcaaaggctacgttgaagatactcacaccgagcggcctgccttacccgcatctccatcagccgccccgcagcccgaatacgccttaacgcctgcggacatcacccgcccgtggctggcggacgatggcgaactgcttttatccgatgagctgcttgaaaaagtgctcccttctcgcctctttcccggtaaccccatcgcggccccggaagataacgaactaatggacctcgggaaagcgattcatcagcaatcaggaaaaaccgtcaccttcaactgcgccgactgctcggcctactggcagcaaaccatcaacgacgcccttaccgatggcccgctctcgcctgcggcgctggcgatacaggttgccgttgcgacccgccggggctggcgcagcggcgataatgccaacctgatggacgaaattgtttacgtctacggtctggaatatgccgtcgacacgtttatcgccctgcagcacattgaatttgaatataattatcaaaccgtgcaggtgaccttccattcagagcctaccgtcgcgagggggccgagcttactcgacgttcgtctgcgcgcccatctggcccaggccgaagagccgctctggcaaaagtgcgtagataaactgatcgccgccctggcggatatgcccgtcgggcagctgcctctggtcgccatcttattgccagagcgccaggatattgttgacgacattgcgcgtcgggtgctggcgcataaaaatgtccgcaccgcggaatggcttaagctggtggttcgcgacccgcagctggtaaaagcgctggagccttatcaggcggaaaatttgtttaacgattactaccacggcagcatctggaacgcgacggtgatgcgcgaacagggcgttgccggcatcgcccgcttcgccccctacgtgcacgatgacctgtgcggagaactggtcagcgaggtaaaccatccgcaggcgctgatgcaactgatccgcgtgagcgaacaaggaaaacgctgccacgaacggatgtctcaggccagcctccgcttcccccacgcggcgatggcggcactggccgaactgctgacgcaaaaagaagagaaacgctggcgcatcatgctgatgaccctgctgagcacccatcggcagctggccgggcaaattttgccgtggctctcggcgcgggccgtcacgctgctggaatcctgcctgcagcaattaaaccagcaggccgattgcgccagcgccgatatgctgccagcggtactggtatccccaccatggatagcgaaaaagaaaaaatcccctgttccccagttgagcataacgccgcttgctatagaaccggcctgtatgctgacggaagaagcaagcaagcagctcctcaaacaacatagctggtacgcacatcaggtggagatgggcacaggaaagggagaaaaaaaataccttagccagttaggcttccagcgctggaatggtcaccgttttgaagacatatccgacgccattgtggatgcctggcagcggcaggactacccggcactgattacggaatttaaaagttcccgtacttttcgccaggaagagtggaatctttatatgctcgccgcgctgcccgccgagcaggcgcttcaggcctggaacgcgctcagtaaagaaccgcacaccggggcggaatatgtgatgacgtacctgcgtcttgccgggctgccgggttttatccattctctttcacgctatccgcaggaaaatttaccggtcgctatctggtttgccgccagcgaaatcgccccgatgatcgcccgcgcctttaacaagctcaaaacgctgcgtgaaggcgcgcgcgagtggctactggcctatccggaacacgccattaccggcctgctgcccgccgccttcggcaaagcgggcgaagcgcaggatagcgcgcgtctggcaatccgtatgctggtagagaagggccatcagccgctgcttgaagaggtagcgcggcgctatcaccagccggaggtagcggaggccgtcggcgccctgctggcgctcgacccgctggataactatccgaccaaaattccgcccctcccggcgttttaccagccagggctgtgggcacggccgctgctgcggggaaatggcctggctctcccggatacggcgttaaaatcgcttggtgaaatgctgcgcttcccgttagaggaaggtatttatcccgggctgcagcaggttaaagatttctgcaccgcggaatcactcgccgccttcgcctgggatctgttcagcgcctggcaaaccgccggggcaccgtcgaaagagagctgggcctttaccacgctcggtatcttcggcaacgacgataccgcccggcagctgacgccgctgatccgggcgtggccgggagaatctcaacataaacgcgccactgtcgggctggatattctcgccgccatcggtagcgatatcgccctgatgcagctaaacggtatcgcccaaaagctgaaatttaaggcgctgcaggcgcgcgcgggagaaaaaatcggtgagatcgccgaaagccgcggactcaccgtggaagagctggaagatcgcctcgctccggatctggggctcaacgatgatggaacgctcaccctcgatttcggcccgcggcgctttatcgtgagctttgatgaagcgcttaaaccctacgtgcgcgatgaaaacggcagccgccttaaagacctgccgaaaccgaataaatgcgacgatagcgcgctggccgccgaggccgttaatcgctacaaggctctgaaaaaagacacccgtacaattgccgcccagcaaattgcgcggatggagtcagccatgtgccagcgtcgtcgctggacggtggaaaacttcaacctgttcctggttaatcatccgctggtgcgccatctcacccgtcgccttatctggggcgtatacggtgaggaaaacaacctgctggcctgcttccgcgtggcggaggacaacagctacggtaacgccgatgacgacctcttcaccctgccggaaggcaacattcatatcggccttccgcacctgctggaaatgtccccggaggatgcagccgccttcggccagctgtttgccgactatgaactgctgccgccgttccgtcagctcgatcgcaactgttataccctgaccccggacgagctgacggccagcgaactgacccgctgggccgggcgcaagtgcccgagcggccgggtgatcgggctggcgaataaaggctggctgcgcggcgacccgcaggatgcgggctggatcggctggatgctaaaaccgttgggacagtgggcgctggtgatggagattgacgaaggtttcgccgtgggtatgctgcctgatgaactcagcgcggagcagcagttaacgaaagtctggcttttttccggaagcgcccggcagtacggatggggcagcaacggccatcagcaggcaaccttttcggtgctggataaagtcaccattagcgaattgattaacgatattgacggactgtttgagtaa

SEQ ID NO: 192069 - DNA, 2286 bp, Klebsiella oxytoca
atgccagagcagccgttaattatcggcgttcgccaccacagtccggcctgcgccaggctggtgaaagaacgcatagaacatacgcgtccgggctacgttctgattgaaggtccggtggattttaaccagcgtctggatgagctgtttttatctcatcagctgcctatcgccatttatagctactgtcagtctcaggatggcggcgcggcgggacgcggcgcctggacgccgttcgccgaattctccccggagtggcaggccctgctggccgctcgagcggtcggagctcaaatccgctttatcgatttacctgcctgggcgcaggaacaagacgacagcgatgtctccgacgctcgccgcgtcgatgagcagcagcgtctgctcgaagccagcggaatggagaatagcgacacgctgtgggatcatctgtttgaagatgaaacccagagcgccgaactggagcaggcgctggagacgtactttatccagctgcgcggcgacagcagcggcggcgaaaacagccggcagcgggaagactatatggcccgctggctggcatgggcaatgcagcaaaataatggcccggtggtggcgatctgcggcggctggcacgcgccggcgctgaaagctctttggcgcaattgcctggcgcaggagagggagccggaatctccgctccctccaacgcccggtagcgtcaccggcagctatctgaccccctatagcgaaaagcggctggacgtgctggcgggctatctttccggtatgccggcgccggtgtggcaaaactggtgctggcacttcggccagcggcgggccggggaacagctgctgaaaaccatccttacccgcctgcgtcagcatcgtcttccggcctcaacggcagatttggctgccgcccacctgcgcgctatggcgctggcgcaaatgcgcggccatacccggccgctgcgctgcgactggcttgacgcgctggcaggttcattgattaaagaagcgctgaacgccccgctgccgtggagctaccgcggcgtgatacatccgcaaaccgatcctattctgctgaccatcgttgacgcgctggcgggagccggtttcggcaagctcgctcaggaaacaccgctgccgccgctgccgcaggacgtcgatcgcgagctgacgcgggtcggaatttccctaccttcaaacctgaatctcaaccgctttgagcccggtggattagccaaaagtcaggtgctacaccgcctgtctatcctcgagatccccgggttccagcagcgaacgggcagcgctgtgacgctttccggcgacggcgaagagcgctgggctctgtttcggaccatggagcagcatgcagtcctgattgaagcctcccgctacggcgcgtcacttgcggaggccgcgcgccagcggctggaagcggatattcttgcctcttttggcatcaaaagcctcgccgccagcctgaatcaggcagcgctggcggggctctccacctttagccagcagctgctggaacagctggcgcagctgattgccgaagagagccggtttgcggaaatgggtccggcgctggaggtgctttacgccctgtggcagcgggatgacagcagcggcatgcagaacgccgaggtgctggagatcgcgctctgcgcggcccttgaccggacgctgtggctctgcgaatccagcggcgttgccgacgaaaagcagtttcacgcccatctgcatagctggcgggccctgtgccatatcctgcgcgatatacatagcggtaccgttttacccgggatttcactcaacgccgccatggcgctgtttgagcggcgtattcacgcgtttgacgccgcaccgcttgaccgcggggcggcgctcggcgcgctgattcgccttgaacatcccgccgcctccgccgaaacggcgctgaccctgctaacgcagctccctccggcatcgttgggggaagcggcccacggtttgctggcgctggcgcgccaccagcttgcctgtcagcccgcctttatcactggattcagcgagctcctcgccaggctgacggaggatgagtttattctcgcgctgccggatttacgagcggcgatgggctggctaccgccccgggaacgcggcgatctggcccgcctggtgctggatcactatcacctgaccatgctgccggcgcatgccctacaggcgccggtttcctgctcgcctgggcagctaatctatcaccagcagcgggaacagcaggcgctggcagcgctaagccgctggggagcacgctaa

SEQ ID NO: 192070 - DNA, 2007 bp, Klebsiella oxytoca
atgactcctttacgccctgaactactggaacttacgccgcaggcgctcatggcgttgagcaacgccggtttcgtcaagcgcggtcagaaagagctggataacggcaatatccccgagctggagcaggatgacgacggtacgcttaccgccgtgtttagcgacggcacctgtacccggctggcaaaagatcaggccctcaaagagtccagctgtacctgcggcgccagcggaatgtgccgtcaccgggtgatgctcatcctgagctatcagcgcgccaacgccggcaatgccctcgccgaagcggaaccggaaagcgccgaacgctggcatcccggacagtggcaagaagaactggccaccctgcccgaatcgattctgaagcgggcacaacagctggcggataaagggataacggtggaattattctgccgaccaaacgaagcgccgtcggcaaagctgccgatgagcgacgtgcgtttttattcccgcagcagcatccgttttgcccgctgcgactgcgtggacggttcgctgtgcgagcacgtggcgctggcggtgcaggcctttaccgatgctgaagcccagcagcccggctttacgcatctggtatggcaaacgcgcagtcggaaaatagccgcccgcggtgggccttttgatacgcccgagggcgagacctgtcgacttcgcctgcgccagctcagtcagctgctgtggcataacggcgtcagccagccgccgatcggctttgaggccgcgttcacccgcgcgcagcgcgcagcccaggcggctaactggcgctgggtcgtctccgctcttgccgagctgcgcgaaggcgtcacggcttttgagcagcgcgccagccattaccatcctgaacaactgctcgcccagcttgcaggccttaacgcccgacttgagagcgccgcccacatggcgcagcttgccgataccggccagaccccgcctctgccgtggcgtaccgtcgtcggtctggggatcgccggcgaagcccagctcgaccatctgcggcttatttcactgggcatgcgctgctggcaggataaccatcgctacggcttatgcatctggtttagcgatcccgataccggcagcgttatgcatctgtcgcgcagctggccgctggctgaaagagcgcaaagtccgctatggcaacgccgtctgtttagctttcaggccagtacgctggcgggcgggcaaattattacgcaatccgcgagccgtaacgccggcggcgaactgctgctgggcgcgcgccaccgcctgagcagcaacgttccgctcagcgaagatgcctggcttttgctcagcgcgccgctgcgccagccgggcgccgcagcgctgcgcgagcatctgcgccagcgcgatccggcctgggtgcgcccgctaaaccaggttgataatctgtttattttacccgtggattcctgcgtagccgttgggtgggacgccgcccgacaaacgctggatgcgctagtgctcagcggcgaaggacaagacaaccttttgcagctgtctctccccgtctgcgccagcgcgccgtatgccgttgagcgaatggcggcgctgctacaacaacaggacgatccggtggtgatggtttccgggctggtcacccttagcggcgggatgctttgtctggagccgctggtcatgatgacccgcagccgcgcctgggcgctgaacgccgaaccgctttccgtcgggccactgcctgctggtaatatattaccgccgccttcgctggcccaaagtctgctgcagcgcgcccgaacgctgctgatccagatactgcacaacggcctgcgctatcagcaaaagagtctgtttcgtgaggctcaaacgctgagcgtcgatttggcaaacgctggttttagccatcttgcgcgcctgctccgccagttgggcgagagcgaaacggccacctccgaggatacgctcagcaccatcgcgcaactctgtatacaattagagatgatgattgattaa

SEQ ID NO: 192071 - DNA, 1452 bp, Klebsiella oxytoca
atgaaaataaaacacctggcgatgttgactgctctgatgttaagcgccggagcttttgcccagaacgcgccgttgacgatcccgcatccgaccaaatttgatgagctgaaacaaccgtcaccggacgtcacgatgccggagagctatgtgaaggccattgcacagcaggcctacctttggggctggccaatggtgaaccagttcaaccgccgtgaaacaatcaccaaagtaccatacccggcacttaacggtgggatggttccggtcgcgccgatgggccagctcagcatgctcaccgactacatcaaaccggaagagacctttgttacctgcccgaaccaggacgtggcctacggccttggcttctttgaactggataaagagccagtcgttatccaggtgcctgattttggcgaccgattctgggtttatgccatctatgatgcccgtaccgatcagattggtaatgtgggtaaaccctatggaacgaagcccggtttctatttgctcgtgggtcccaactggaaaggcgaaacgccaaaaggctttaacggcgtaattcagtcttcgacagaaatggcgaacgtcattccccgtattcagatggatgatacgccggaagatcgcaaggcgattcaggctcccatcaaagaagtgatgacttatccgttgagtcagtttgatggcaagatgaaatcctatgaatattccaaaattccggcaatcggcgataaaccggatgccagcgccggagaaacgccttgggtcgttccggaaaaattctttgaccagttcgctaacgtgctggaaaaagtaccgccgctgccgggtgaagaggccctgtatgctcaattccaccatctggtagaagcaggcaagaaaaacccggaaatccgtaaatggatggatgcagccgcagtcgagacggacaaaaccgtcatcgcggatttctttaaatggaagaacaacggtgtgcctgcgggcaacggctggaaccgttcaaaaaataatgccgagtttggtgtggattactacaaccgtaccggtacgtccaaatccaatatgttcgacaacaagccggacgaaacgcagtatttctacaccgacaatgatgctacaggtaagcagctttccggtgagcatgattacacagtaaccttccctaaaggcggtcttccgccggtgaagggcttctggtcacttacgctctacaacggcaagcatctgttcagcccaaatgaactgaaccgttattcgctggggacgaaaaataaaaacctgaagtataacgaagacggttcactgacgctctacgtaagcaaaaagcgccctgcagaggataaagtgaataactggctaccggcacctgatggcaacctgtcactctatatccgagcatattgggggggaacaaccaattctggatggtacctggcagccgccaaaaattga

SEQ ID NO: 192072 - DNA, 1479 bp, Klebsiella oxytoca
atgaaagttaaagtcatcactaccgcggttttgctggcgctcatgtggactcagcccgcatcagccgccgaagcgcctctgtcacccctcatgaaacaactgaataacggtaactggcttcctcaggaagaggctcagtcgctcagcgatgaactttactatcaggatgcaatccaggcctatattcagacgttgccgttgctcaacaccattggactacgcgacggttcagaggcggcatttggcaaaggctataacgtcctgcctatctggaaagagcggatggacagccgcgccgtggtacccacgccgaacggcgacgttatctattcaatgagctatctggatctgaaagagaccggcccgctggtcatcaaagcgccgccgaacgtgatcggcatgtttaccgacttcttccagaaaaccattaccgatgtgggcgctattgggccggatcgcgcccgcggcggcctgtacctgctgttaccgccggactacgaaggaccggtgcctcaggggtactacgcgtttaaatcatcgacctacaatgttttcctgttcttcagaaccattatgggtaaaggcgacggtaagccagacccggttccggcggtgaaaaacgcggaaaccacacgcgtgtatccgctgtgggatgtcgaaaaagaagtcaaaccgatgcagttcccggacgccagcggcaagcgcgtcaatatgatgtacccgaccgacgccagctactggcagaaactgaaaaccttcgtggactatgagccgttgacggcaatcccggaagaaacacgcagcgcgttactgagcattgggatggtgaaaggcaaaccgttcaacccgactgcgaaacagcaagagatgctgaaaaaagccgtcgagaccgcgccgcggatgatccttgcgcgtcgccaggtgggccgggacgatcaacgccagttgtattacaaggaccgccagtgggaaaactcatgggcgggagcaacagcggagtggatgcagtacggcacgcttgatgccaatcagcgcgcggcatttttccagattgcctattccagcgccgcggcaatggtgatgcacaccacgggggcggggtctaaatatccgtatgcggtcaaggacaatacaggcaagttccttgacggaagcaacacttacaagctccatttgccaccaaacccgccagcggcgctgttctgggcggtcaccgcttataacatcaccgacggtaccatgccggaaactgaccaattactgccatcgactaatggctattacaacatacccaaaaataaagatggttcgattgacctctggtttgggccgaataaaccagaaggcgtcgccgacagcgcgtttattaaaaccgtttctggccgtaatttcctcgtggcattacgactttatggtaccgaagacggtttctatgaccaaacctgggtgccggacgatctggttcaaaccaataaataa

SEQ ID NO: 192073 - DNA, 183 bp, Klebsiella oxytoca
atgaatggcaaaccggttatgttgctgacccaggccgatctggacgagggcgacgatctgaccctggatcaggccgcgcagcgcgtgctggcccgcatggaaacgcagcgcttcgcgagcagtacgataccggctggctggtgctttccggaattaaaacgctggcgggattgctggttttag

SEQ ID NO: 192074 - DNA, 828 bp, Klebsiella oxytoca
gtgctttccggaattaaaacgctggcgggattgctggttttagtcggctttttctacggcgcatggcgcgcgtaccgctgggtcagccgctatttccgtcggcgtgtggtggaacagcgcagcaaaatcccgcaaagctggcgtcgatatatcggcattgtggaggcccgactgttcgctctgctgatgattattctcgctatttttgccttttacacatggctgagctgggcgtttggcatgttcccctggactcgcgtctgggcaacatcgttgggtgactggtcactgcgcgtcattcgtcagattgctttgtccatcgtgtcatcgctgcccggcttgctgatcgtgttgattattttcctcatcaccgccttcattcttaagcttcttaagatggtccttaatcaggtcgaggcggggcgcttgcagtttccaggcctgcatcccgaaacggttggcgcgacccgcaaattgatttcggtgatggtgtggttatttgcgctgtctgcggcttacccgtttttaccgggggcaaattcactggcttttaagggtatcagcgtcttctttggcctgatgttaacgctgggatcggcgggggtaatgaaccatgccatgagcggtctggtgcttatttattcccgcgcgctgcgcagaggggatgtcattcgcgtggcagataatgaaggcaaagtcagcgaaataggcatgctcgccaccaaaattatcacccgagaaaactatgtggtcaccgtgcctaacgcagtggtggtcagcggcaagatcaccaatctcagcgcacaaaataactttagggtatattag

SEQ ID NO: 192075 - DNA, 1251 bp, Klebsiella oxytoca
atggatataatgagaagtgttctgggtatggtggtattactggcaatcgcttttctgctgtcagtaaataaaaaacgaattagtctgcgtacgactggcgcggcgctggtactgcaaattgctattggtggtattatgctctattttccgccaggaaaatggttggcggagcaggcggctttcggcgtacataaagtgatgacctacagcgatgccggtagcgcatttatttttggttcgctggtcgggccgaaaatggatctcttattcgatggttctggttttatttttgcttttcgggtattgccagccattatttttatcaccgcattggtaagcctgctttattatattggcgtaatgggaatactgatccgaactcttggcggaattttccagaaagcgctgaatattagcaagattgagtcgtttgttgccgtgaccaccattttccttgggcaaaatgagatcccggcgatcgttaagccctttattaataagctaaatcgtaatgagctatttaccgcgatttgcagcgggatggcttcaatcgccgggtcgacgatgattggctatgccgggctgggcgtgccgattgattatctgctggcggcatcgctgatggcgattcccggcggtattctgtttgcccgccttctcagcccggcgactgaagtatcgcaggtgactttcgaaaacctctccttcaccgaaactccgccgaaaagttttattgaagccgcggctagtggcgcgatggctggggtaaaaattgccgtgggcgtggcgacggtagtgatggcgtttgtggcaattatcgctctgatcaacggcgtgattggcggtatcggcggttggttcggttttggtcacgcgactctggaggggattttcggttatatccttgcaccgctggcctggttaatgggcgttgactggagtgatgcgacgctggcgggcagcctgattggccagaagctggcgattaacgagttcgtagcctacctcaacttttcgccgttcctgcaaacgccgggagcgctggatgtgaaaactatcgccattatttcttttgcgctatgcggtttcgccaactttggttctattggcgtggtggttggcgcattctcggcaattgcaccccagcgcgcgtctgaaattgcccaattggggatgagggcgctggctgcggcaacgctgtcaaacttaatgagcgcaacaattgccgggttttttattggcctggcgtaa

SEQ ID NO: 192076 - DNA, 933 bp, Klebsiella oxytoca
atggaaaaaagaaaaattatactcgactgcgatccaggtcacgatgatgctattgcgataatgatggcggccagacatccggcaattgatttattaggaataacaattgttgcgggtaaccaaacgctggataaaacgttagtcaatggattaaatgtttgccaacatttagatgtcaatgtgccgatttatgccgggatgccacagccaattatgcgtcagcaaattgtcgctgataatattcatggtgaaaccggactggatgggccggtattttcaccgttaactcgtcaggcagaagaaacgcatgcggttaaatatattattgacacgctcatggctagtgagggtgacatcacgctggtgcccgttggcccactgaccaatatagccgtcgccatgcgaatgcagccgaaaatcctgccgaaaattcgcgagattgtattaatgggcggtgcttatggtaccggaaactttacgccatcggcagagtttaatatttatgccgaccctgaagccgctcgcgtgatattcagctcgggtgtccctctggtcatgatgggtctcgatttgactaatcagacggtctgcaccgctgatgttattgcacgcatggaaaaagccggcggtccggcgggacagttgtttagcgatatcatgaatttcaccctcaaaacgcagtttgaaaactacggcttagcgggtggtccggtgcatgatgccacctgcatcggctatctgattaatccccagggcatcaaaacacaggacatgtatgttgaggtagatgttaacagcggcccctgctatggccgtacggtctgcgacgaactgggcgtactcggtaaagcgccgaataccaaagtcggcatcactattgataccgattggttttggggtttagtcgaagagtgcgtgcggatgtaccgctaa

SEQ ID NO: 192077 - DNA, 699 bp, Klebsiella oxytoca
gtgaaagaaatccaaaatgaaaatctcaagcagcaattgataagcgactcggggtacctggaaaaattttccgtcgatgttgtgcgggatacacgattgttccacgctgtggcaggggattatattgttaaagagggggctcaacccgcgcaccttttttacctcgcacgcggccgggctaagctttacaccacatcagctaatggtcgggtctcgctgatcgacttctttggcgcaccctgctttatcggcgagatagaactcattgataaacatcacgatccgcgtggcgttcaggccatcgaagcgtgctggtgcctggcgctgcccatcgcttcattccgccctttgttgctgaatgacgtcattttcctgcgtaatctctgtatcgcgttaagccaaaaaaactaccgtaacatcgtgtcgctcacccaaaatcaatcttttccactggtgaatcgtctggcagcatttattttattaactcagcattgtgatatttatcacgaaaaacataccccggcggcggaatatatgggagtgtcgtatcgtcatttattatatgtgatcgcacaattctgtcaggaaggcctgctggttaaacagaaatccggctacgctcttggtaataagaagaaactgatcgccctcgcgcgggagatggatcctgagcataatttttctgatttattgcattaa

SEQ ID NO: 192078 - DNA, 1041 bp, Klebsiella oxytoca
atgaaacgattttcatggggaatagtagcgggcctgacggcgctggcgatatcgccgcaggcgatggcggcatccgggtggtgtcagacgaatagcgggagtgcttttcaggacagtttttcttttactgaaacatttactaatccctcgcaaaaccaggcagggatggagtttcttcgtatatatgaatggaataccgggggaacgtatcaggcgaggtgtgaatgtgatgcgaccacgcttaatacatcgactttttttaaaacgacaatacctggccttgctgcaacgcaaacgcgaaatggcttaaattattatcgtctgaatccatacctggaaatcgctagtgagctatatatcgccggaaaattaaaccagtttgtgccgacgccggtactggataagagtaacaattacattaactcattcccatgtaataccacgggtacaatttttgacaccggttcgaaagggtatatttcactctattttacccggccgttcgttggccgggtgacaatccccccgacgataatcctcaatgtttatgggacgcgaaagaaagggagctatagcgctactccgatgacccaaatcaccatgaacggttcggttacggttccgcaatcgtgtgagataaataccggtcaaccgattaacattgattttggcgatattgccgccaaccactttaaaacaataaatcagatgcccacaggattcaccccgcacacggtaaatatgacggtggcgtgcaccaacatttccgccggggtaaaaatagcgctctcattccagggcgcggccgatacccacgacagcactgcgctggcgactaccaatagcgatattgcggtgcgcattgaaaatattaccggcgtcaaaatacccgttatttcagggatgctgccggtcaattttaattacccgagccagagtggggacacgaccatgaaaatctatccgattaataccacggggcatttacccggcggaggtggatttaccgctacggcgaccattcaggcagaaattgaatag

SEQ ID NO: 192079 - DNA, 954 bp, Klebsiella oxytoca
atgattaaagttgcacctgcaggacaaaaagatgccatagagatgcgcaaagtctatgccgggtttgtcgcgcagcagattgaagcccatagcccgattatcgccctggaagcggatctgatgagctctatggcgatggatggcgtcgcgaggcagcatccgcagcacgtcatcaactgcggcattatggaagcgaacgtgatcggtaccgccgccggactatcgttgaccgggcgtaagccgtttgtccatacctttaccgctttcgccagccgccgctgcttcgaccagttgtttatggcgctggactatcagcggaacaacgtcaaggtgatcgcttctgacgccggggtgaccgcctgccataacggcggaacccatatgtcgtttgaggatatgggtattgtgcgcggcctcgcgcattcggtggtgctggaagtgaccgatgcggtgatgtttgaggatatcctgcggcagcttatcgatctcgacggtttttactgggtacgcacgatccgcaaacaggcgccgagcgtctacgcgccgggttcgacgtttacgattggcaaaggtaatgtgctgcgcgaaggtgacgacatcaccttgattgccaacgggatcatggtggcggaagcccttgaggcagcacgtcaacttgagcaggaaggggtcagcgcggcggtgattgatatgtttaccctgaagcctatcgaccgtatgctggtgaaaaattacgccgaaaaaaccgggcgtatcgtgacctgtgaaaaccacagtattcataacggactgggatcggcggtggcggaagtcctggtggagacctgcccggttccgatgcgtcgtgtgggggtgaaggagcgttatggccaggtgggaacgcaggacttcttgcagaaggagtatggcctgacggcgcatgatattgtctcggcggcgcgagagctgctgtaa

SEQ ID NO: 192080 - DNA, 444 bp, Klebsiella oxytoca
atgcttaagacatggctctctgataccaccatcactttacggcagaaggtagaaagctggcagcaggcactggacatctgtgccagaccgctgcttgaagccggagttatagaacctgaatatgtagcggcgatcattgagcagcaccgtaagctagggccttactatgtgttggctccgggcctggcaatgccgcatgcgcggccggaagaaggggcgaaaggtttaggtctctcgctgctcaaactcgaacagggcatttcctttggctctaaagacttcgacccggtcgatattattattatgctggcggcgccggataagcacagtcacattgaaacgatctctgcgctggcggaattattttccagcgatgaagatatgaataaattacatcaggccaccaccctggaggagataaaaactatcatcacgcgtttctga

SEQ ID NO: 192081 - DNA, 864 bp, Klebsiella oxytoca
atggaaagaaaagaaagaaacatatggaaactaaacaatcttcctcctctggaatattgttcaatctctcgcgctaaaaaattgttgaattgtgaaatagaagacttgcttcattggcatgatattggtgctataaccctttgtacaaaattgggtagaaccaacggtacactaaagggcgcgttccagcatgaccagggcggcaacaatctctattttctcaatgcaccaaatattgatgaattgagcattagcgaaagatcctggtcacggcattcaaaaataaacaaaattttcaagttcaatgacagtgaaccaaaacaggaagcgcaatatggcatgcctgttacccagctgaagctccgggtttccgtctctggcttatggtactgcgacaccagaaatttaaccgaggtactggaaacggccgatggcaccattactgagcagaggattagcattatatcccctgcaacaaatgtcctcttttgccacttcatacctgataaggatgagaggccaaccatcacgctcaataagctgtatatcacgtgtcaggcgattgagaaaatttacgaacataccatcagcagccgccctctcgaacttgctgaaaaaaccttaaacgtgcctgacgatcaagatatggccccctcctcaagtatcatgcaaaataaattactcatcgaatttatcaatcatataattcaatccaatccacattttggcgataacattcttaacgccacggaaaacaggaaaaataaaatttttaatattgccatggataaactcaggtctgaaggtgtggtttcaagctacggcagcattaatcttccggcatcagaatacacgttcaaatga

SEQ ID NO: 192082 - DNA, 906 bp, Klebsiella oxytoca
atgttgctgcgccacctcaattacttcattgccgtcgctgaacaaggcggttttacgcgagcggcagccatgttgcacgtttcgcaaccggctttgtcgcaacagattcgacaactggaagaaactctgggcgtacagctttttgatcgcagcgggcgcaatacccgcctgacggattcaggtaaggtgtggttaatttacgcgcgtcgggttttacaggggttggctgaagggcagcgtgcgctaaatgacgttgaagatctgcagcgtggcacgctacgtgtcgcgatgatgccgacctttaccacgtattttatggggccgctagcggctgccttttatcagcgttacccgaatattacgctggatatacaagagttagcgcaggatcggatggagacccttctgctaaatgacgaactggatgtcggtattgcttttgaaggcagcaattcgcgggatattgtatctcagccgttgttctcggaaaccctggcgctggtggtaggacgctatcatcccctggcggcggctcgctgcatagagctgaccgcgctcaatgatgagtcgctgattctactgagtagcgctttcgccacccgtgaacaaatcgatcgctactgccgccagcgtgagattcaaccgaaagtacagatggaggcaaactcgattagcgcagtgctggccgttgttgaacgcacgtcgctggcaaccctacttccggctgccattgttctggggcgcgatgatttaaccgcgattgaactcgccccatcgttgctggaaagaaccgcgtgtttgctacagcgcaagggggcctggcaaagcgccgcagcccgccaatttaggctaatggcgcatcaggctgcaacagaactgagcgctgggctttcagaactcgaataa

SEQ ID NO: 192083 - DNA, 1188 bp, Klebsiella oxytoca
atgcatctgacgcagcgcaatagcgccatgctgctggtgctggtgcttattggtataaatatgcgtccgctgctgacctctgttggccctctcctgccgcagctccttcaggtaagcggaatgagcttcacgcttgcctccctgctcaccgcgctgccggtaatggccatgggtctgctggcgctcgccggcggctggattaacgctcaatttagcgagcgacaaagtatcgccctcggcctgttaacgataatcgccggggctttgcttcgtgagctggcgccgcagagcatactactcctcagcagcgcgctccttggcggcatcggcattggtgtgattcaggcgctcattcccgcggtgataaagcgtctttttcatcgtcggacgccgcaggtgatgggactctggtcagcggcgctgatgggtggcggcggcctgggggccgcattcacaccgtggttggcgcagcatagcgctatctggtatcacgcgcttgcgtggtgggccttacccgccgccgccgcgctcctctgctggtggccgctaagccgtacattacccgctcagccgccatcagggctcccggagactctttttcgccatcgtcgggcatgggcgctcagcctctattttggtttgattaacggcggttatgccagcctgatagcctggctgcccccatactatatgcagtcgggatacagcgcgcagttcagcggcaccctgctggcgttgatgaccgtcggccagactggtggagcgcttctgctgcccattctggccagacaggaagatcgacgtaagctgctgatggcggcgttgtcattacagctcatcggcttctgcggctttatctggctaccgcagcagataccctttgtctgggctatcagctgcggtattggcttaggcggcgcgtttccgctgtgcctggtactggcgctcgatcacgccagtcaccctgccattgctggccgactggtggcttttatgcaaggagtgggctttattgttgcaggactttctccgtggttatcagggctgttgcgaagtttaagcggcaactaccagctcgactggatgctgcacgccgtttgtatcttagccttgatggtcatcacgctgcgttttgccccctcgcgctatccgcaagagtggcagcgttcgcattcagccattcgctaa

SEQ ID NO: 192084 - DNA, 774 bp, Klebsiella oxytoca
gtgaggaagttaattaccctattgttctgtctttcgatatttcatcctggtttcgcagcgtcaacgcctgacatcgaaggatactttacggatactaccaatacggtctccagtaagagcgacattatccagcgcgctgagcgtttcaaaaagcaaacagggatcgcgccgtttattctgttaaccacgcaagaaacccttttgcaggcgaaaaaaacacaactactgcaatcggcaaaacgactggctgacgaaaatcagggcttcctgctgctgattatcactaccgacagccgccagattgaactgattggcgacccgaaagcacaatcacgcctacgggacagtcacgcggccttaatcattgagaatcacaccctcgcctactggcagaatggtctgtggttccaggggctcaataccgcgctggacgtactacaggcggcgctattacagcagcccactccaccgctcacctggtatgcttcgtcggatgcgccctacaaagacgatttgcccggccatccgctcggttttctcttctgggtgctggcgtttatggccttcacatggtgtttccgcttcaccacccgctggcgctatgcgctgaagttcacgctggcaatgacggtagctaacctcttttatcaggcggtatgcctgtacttcagcagcggcggcttttacctgtataaaatcgtccccctgtgggcgataatgataggcttcagtacgtttgtagccacctggctgtggacgcgtaaacgacgctga

SEQ ID NO: 192085 - DNA, 459 bp, Klebsiella oxytoca
atgaaacaagatggtaaagtcctttattatatcttcctcagcattggcatcgtgatgatgctcatctccgccgctattttttattatcaatatcgctctaccagcaacgttatccataccaccggtattatcgttgataccgaattgcgcagaagcaaccccaacgccaaagggacaaaacgcaacaaagccacctggcgtcccgttgtcgccttccgcccgacgccggattacacgctcatttttaaatcaaagttcggaaattccctttatgaaaacagtgaaggagaaaccgtcgacgttatttaccctcctggacaaccgcatcaggccaggatccatagcccgtggatgaatttttttaaatggggttttttaggtcttattggcatcatttttactgcgggtagccagcttattcgcccttcctctaaaaagaaacggagggtagtccagtga

SEQ ID NO: 192086 - DNA, 249 bp, Klebsiella oxytoca
gtgaaagatttattgggttttgaccatctgattacacctagagtgttggtttttttatactggctacttatggtgcttatactcgttggtggcgttttttcgatgtttagcgggcaattcatcacaggttttttcggtacaatttttagtctgattggttgccgggtaatgttcgaactcatcatggtcgctttcaaaaataatgaatatctgcgtcgcattgcagagagctcagaacagtcaaagtaa

SEQ ID NO: 192087 - DNA, 390 bp, Klebsiella oxytoca
atgccttttactcgtatcacactgaatcagggttatagcgacgcgcagataacgcagatttccgacattctgcaacaaagccttgagaaagaatttgccgttccgcctcatgatcgctttcaggttttcgaaaggctacctgcgaacctgcatgtgttcgaccgccattataaaagcggtggccgcagcgacaatttcattcagttccatatcacggcaggtaaacctcgcgcattcgagcagaagaaaaacctctgccgcacgctaaatgagcagctgcatacagcgctgggtattcgcccggatgatgtcatggtgatcattcagttcaataccgccgatgagtggagtttcagcaatggactgatgctctctgaagaggggttatga

SEQ ID NO: 192088 - DNA, 3153 bp, Klebsiella oxytoca
atgaaaaatatcatccacatttcagatcttcatctttcagcaacccctacaaggggttttcaatacaaaagcgctgctgaaataattgatagattgatatttgatgttcaaggtattgagaacaatagaggcgtaaaatttgatacggttttttttacaggtgatttagcattctctggcagtgaaaaagaatatcagctatttgaaaatgaattgcttaataaaattacagacggtttatcgatcgataaagaaaacttttatatcgttccaggtaatcacgatgtcgctaggagtaatgtaaaagctttagacaaaagagttcgagaaaataatattgaagacttaaatgatatatttaacgagattgatgatggaagtgcaagttgggataggttgaaaaattactttgaatttgatgaaagatttaactctacaaaaaatgattacatattaaacgggaagcttctaaaggcaaggaaaatcacaaataagctttatctggttttttttaactcagcttggctagctcaggatgattcggataaagagaacttgtttataacgcctaagcaaattgaaaaactcatagcttctaaaatccctaaggatgctaatataattttattaactcaccaccctatagattggctcaatgcttctgacagagaccacttctcatcattcttagagaaaaaagtctctatgatgtgttttggccatatgcacatgtttaaacaaaaaaaagaagcaaactttaaagaaggtgtcacactttttttacaagcaggtactcttgatactagagaagagaattctggttactcatgtattttgttaaacaataataactcagtcagcgatggcactgtgatatatagaaaattcgataaaaaagaaaatcaatttgtaaattggttagaatatggcaataatggagagtttgattttagtacaattgataccttaacttttgattctgagaaatttgttaaagttagcgccaatttactgcgtcaggcagataaagatttattgataaacatggggtttcctgaggaaaagaaaaaaagtttaagaaagttttttacagagccaaatttttcagattttgaagttacacctcatttaaatacaaaaattaaagagacaggagagattctctcatcaaatgaaaacttgattattgtgggaggagcaaactctggaagaacttctgttctaaaatatttatttacaaaaggtttagagtcgcaaattcatagggattttgaaaacttttcattttacatagatctcaaaaatgaaaatataaattccaaagggcagtttttacaagccttaattaaccagtatttcgaagaagatataaatacttcttttgaggaaaagattaaaaggatggttcagtctggaaatgctgttatatatatagataacattgacttcccatcagcaaaatgtaaaagcagtatttacgacttcgtaagtgcgaataaaaactgtagatttatatttagttccaatttcgattattgcaatattttagatgaagcattggctaatgctggtttatcaaactataaatgtacatcattgggtgggttaaaaaggaaaaatgttcgcgacatagtttcccgctgggatgattctatagcagcgaataatcaaaactcaatatacaatgagattaatagacttattgataattcacagttgccgcacaattacttcatatatactatgcttttgactatctatgaaataaaaagtgaatttgaaggtatattgaccgaagctgatattattgaaaacttcattgagattttgcttaaaaaacactgtgttaccacaacaagagctaagccgcaatacaaagaactcctacactttctaggatatttgtcaaaagatatgtatgtcaggaaattgacaaaagtaacttataatgatgcattggaattggctttgagatttaatgctaacacaatgtatagttacatagcagatcactatatcatacccttagtagaaagcggcattataaaaaaagagcaagattatttgtttttctctcagccttcatttgcttactactctctatcatatttcatgaagcatgatgatgacctaaagaacgaaatttttcacccagaaaacatgaccgaatatgataaagttattgagtattactcagctcaaaatgcttctagttttgaaacgttagaaattatcgataaggaactgacaacacaaacaataaatttagtgagtttttttgatagtacaagaggggtaaatattaatgagtacaatctcaataatattcaagaaactccattgcttgacagcttcaaagtagacgcggcaaattttgctgaagagattgaaagattcaaggcagatcgcgataaagatgatgaaagacttgatgagttttcaccactaaaccctcgggataatgaaaatgctgagattttccgaaaagagagaaatgtcgatgataagatgaagtcgtatgcaaatacattatctttatacgcccgtgttttccgtaatacggagctatctatggatagagataaaactttagccgtttttgataaggtaattgatggttatgttttctttatgaaggcgtttcttattagtattgatgcgaattatataattcctgtattagagaagcaattaaattcttttaatgataataatagagaaataactgacgaggatatttcggaaatactggcagctttaagaatgatacttccaattgtaaggtctgcatcaccaaattatatccaatcattgattggccaaaatgtcaactctaagaaacctcgcattgaaaatataataagactggctagggataaatctattgatcctataaagaaagctcttcttacatatactttaatggatattagggatgagaatataaaggaaggtgttgttgcactgcttaaggaaagaaacagcttggtaacagaatcattgtttttaaaaatgaacatgctaataaatacaaattatgatttgcgcaatgaggatatcaggtatcttaagtcaacattgcagaatatggttgttcaggggaaagtaacacaacgacacggcttagagagttatttgaataaattaaattag

SEQ ID NO: 192089 - DNA, 1110 bp, Klebsiella oxytoca
atggaaaacacaaacatcatcacatctgaacagcaagtgccaaacaatatatctgcaaacaactccatttttaacgttcaggcactgagccagttaacggcgtttgcagaactaatgtctgcggccagcattgcgatcccggatcatctcgcaggcaaacctgccgactgcatggcaatcgttatgcagtcaatgcaatggggaatgaacccttacgctgtcgcacaaaaaacgttctttgtaggtggaaaaatcgggtacgaagcccagctcatcagcgcaatcctcagcagtacgggagccatccgcgggcgttttcattatgaatacgagggtgactggtctaaatgcacccgctcgaaagaagttacaactacaaaatccggaagaaacggcaattacgaaaagacagaacgtatacgagcctggagtgatgaagatgaagaaggcttgtatgtgcgggctggggcggtaattaaaggtgaaactgagattacttggtgtgaacccgtttatctttcaagcgtggtaattcgaaactcgccactttgggcaactaatcctaagcagcagattgcttatctcgcgacaaaatactggtctcgtatctactgccctgccgcaatcatgggttttcaggatgctgatgatcttgcctatcgcgaagagaaagttatcaatccagagcctgttcaacgcatgagtatgaaggaaatcacctctgatgttgaaacgaccaccagcgcgcaagagcctgcatctaacgtcgactctgttgctgacgaactccgagaccggattgatacagctgactcagtggaccaggccaaagccattcgtgcagacatcgaatcacagaaagctctgctgggtactgctttgtataccgaactgaagagtaaggcggtgaaacgctactaccttgttgatgcgaagaacaaagttgaggccgccataaattcactccctaacccgggggatccggaagcagaagcattattcgcgaaggcagaaagcaccttgacctcatcgcgccgccacctcggtgatgaactgtatgaccagttccgcatcaccctggacgacatgaaaccggaatacgtgggctaa

SEQ ID NO: 192090 - DNA, 3039 bp, Klebsiella oxytoca
atggaatatttttatctgataaaagcgactcaaaaatcgggtaaagctgatgccgtaatctggcgcactaataaatcagaagcccgcgctctactgcagctcgacgtcgatctggaagacgctgggatcgaaacaggccgcggcaaagactatcaaaaacctattcgcaccgatttcccggtattcaatgacctgccggcggagggtgttttcgattactcatggtgcgaacgctaccagctcggcgacgatggccgcacctgggctctgaagccaggtcaggcgcctgcggatcatcacatcgataatgccggagtatctgctgagcccgttagtggcgagctggttgatgccaatactactggtgacgcggcacaaggtgagaccgtggaaactttcggtagcgatgaataccaggacgattcgagcgcgctttttaacttggcagaactcccctttcgcgctcagctgctggcgcagtatatggccgaagaacgccacgtttatcatatcagcatgcctcaccggcaggagctgtcagttcttgaaatggacactgataacgcagccgtccaggatctgattctggccgccgagaatatccctgaaatcaaaaaatacgatatgccggcgctctggaaattcaccagtgccaataaaaaagtcttcccggaagggaagcggcatgagctcggcaagcgtatccagtttgcaaagctgtggttcgccacgaacgctatcgaccgcggcattctcaccagggaatgggctgccggtaactgcatttcttcggttttgaaaaccgatgcaggtacgaatgctggcggcggtaataaaaccgatcgcaaccctgactacacccatacccttgatacgctcgatgtagaaatagccctggccacaatgccaatggatttcgatatctacaatttcccggcatcaattcaccgccgggccaaagagatcgttcagaagaaagaaagtccgttcaaggaatggtctgcagcgctgcgcaaggttgcaggcatcctggactattcccgcgcagcgatttttgcccttatccgtggcgccaccagcgatattcaccatttcccggtaagtctgcagacctatatcaatgcgaacctgaccgagcataagcatgacgccccttctgctgagacgcttgaaaaagctggtcatgtttcatctgccgccgtcactctggacgctgtgaaaaaggctatcgatggagatgaaggtgtgcctgacctggaaactctcccaactgactttcaggtaattggcaccgaactggtgaaagaagctcaaaagaaacgtcctgacgctgatcaggttctggccgccgaacgtggcgaatatgtcgaaggtatcagtgaccccacggatccgaagtggataaccgaagacctgaccaaacccagagccccggaaattgcaaatctcggcggcggaatgttttcaattgaaggccttataacttcaccggctactaatgccaccgaagaaggaaccaccagcaatgtgcagatggaaacggctcagccggtcgaagacgaaaatgataatgcggtatcagcaggcgaaggcgctgatgagcctcctgcgcaaacaactgccgtgaacatgagcaaaatactggctgaacgctgcccggatcttaccgccgcagtgctgaatagccaggtttccgagagtgctcacagtgatgatgaggaagaggctgaacaaatagcgccagcatggccggagtatttcgagccaggtcgatatgaagacgtgccaaatgaggtctaccacgccgctaacggcatcagttccacgatggttaaagatgcgcgggtttcgctgatgtatttcgaggcgcgccacgtatccaaaactatccagaaggtacgctcccctgttcttgatatgggcaacctggtgcatgcactggcgctacagcctgatgagctggaaaaagaattcagcatcgagccggaaatcccggaaggcgctttcaccacgactgcgacgatccgcgcgtttatcgacgaatacaacaacgggcttccggttttgctcagcgcagatgacatcaagagattcctggaggaatacaacgcgaccctgcccgcccaggttcctttgggtacatcagttgaagaaaccggccagggttatatgtctttgcctgctgagttccagcgcattgaagacggtcaaaagcaaaccgctaccgcaatgaaggcatgcatcaaggaatataacgctactctgcccgcccaggtgaaaaccagcggcagccgcgatgccttactggaacagctggcaatcattaaccctgacctggttgctcaggaagcacagaaggcgcagccgctgaaagtctctggcacaaaggccgatctgattcaggccgtgaaatcggttaaaccggatgccgtgtttgccgatgagctgctggatgcatggcgcgagaacccggaaggaaaagtgctggttacccgccagcagctggctacggcactggccattcagaaagcactcctgaatcacccgaccgccggcaagttattgacgcacccgagccgtgccgtcgaggtgagctatttcggcattgatgaggaaaccgggctggaagttcgcgtgcgtcctgaccttgagatagacatgggcggcctgcgcatcggtgcggacctgaaaaccatcagcatgtggaacatcaagcaggaaggcctgcgcgccaaattgcaccgggaaatcatcgagcgcgattaccacctgagcgcggctatgtactgcgaaaccgcagcccttgaccagttcttctggatattcgtcaacaaagacgagaactaccactggatcgccatcatcgaggcatccggagaactgctggaactcggcatgctggaatatcgcaaagcaatgcgtgccatcgcgaacggtttcgacactggcgaatggccggcgccaatcactgaggattacgccgaagaactcaacgattttgatgtgcgccgcctcgaagcgctgcgcgtacaggcataa

SEQ ID NO: 192091 - DNA, 561 bp, Klebsiella oxytoca
atgctttctgaccgccttaccaaggtgcttaaaaccaggaagatgagtaagtcagaattagctagaagggttggcgtgactccgcaagctgtgaataactggttctccaggggagagttggggagagagtctgctcagcagattgcggacgtccttaaaatctcaatcgactggcttttgaatggtgatccgaatgacattttgactattgaacaagtcagaatgaaaaggctaaaacaatatgtcgagaacggctcgcttaagatagaagatgatccattctttgaagaaatcctttcaggaaagaaaccaatcaatgacaatgtcgcaaggcgtattgaacgcgacttcagtctccctttcggctctcttgattacgatccagagcgagcaccatctaatctagttggggacttatcttcgactgagatcgaacttgtacatcttttccgtcagatgccaaaatcggcgcaaaaggaaatgctgttactttttaacagcagagtgagtgagtactcgtctctttttagagaattacttgaactgaaagaacagaagtag

SEQ ID NO: 192092 - DNA, 231 bp, Klebsiella oxytoca
atgaaagctctcgacaaagccataaacattgcagggaatgccagcaagctagctgaaagtttagatgtttcagctatgacggttagtcactggaaaaatagaaattacggcgtggtaccgcaaagccgcgttctcactatcttcaaagcaaccggagtgacgccacacgaattgcgccccgatttgtacccgaaccctaccgacggattgccgcaggagcagagggtataa

SEQ ID NO: 192093 - DNA, 198 bp, Klebsiella oxytoca
atgagcaactcactgcaaattctctgcattaaagatacagagggatactggactgaaggtgaaatgtatccggcccgtgtagttgctggcgggctttctcatatctcatgcaggagcatgaaaaccacgccacaaaacgggcaggcgtggcggggatacgagcacgcgctggcggtaataattgcgagcaattattaa

SEQ ID NO: 192094 - DNA, 198 bp, Klebsiella oxytoca
gtggagaaggcaagccgcgtctttctccgtaaagagctgatgccgctgcaaaaacgactactggagcttaacggctggctgagtgaagaagtcctccgttttgagccgtacactatagatattccgtgtgaattatacaaaacagtcgacagaataaagaggggcgtgagcccctttaccgttaagcacgcaaaataa

SEQ ID NO: 192095 - DNA, 600 bp, Klebsiella oxytoca
atggcgcaacaattacacctgataaaacagacccaaggaatactgatccctgccacgcaggagaccagcgatttcttgcaatcaaaatgcaagctcggcgccgttctggaggccgactttaagcttgtccgcaatccggcgtttcaccgccgttactttgctttactcaatctcggttttgaatattgggaacctaccggcggggcgatttcgtctaatgagcgcaggcttatcacaggctacgccaaataccttgctgcatatggcgggagtgaatcggcgttacttgatgccgccgggcaatatctcgaccgaatagccgagaagcgatccggctatatcagtatttgcaaatctttcgatgcttaccgggcgtgggtcatcgttgaagccggccactatgacgccatacagctgccggacggcacgctgaaaaaacaccctcgcagcatttctttcgcaagcatggacgaatgcgagttccaggaattgtacaaagcatcgctcgatgttctctggcggtggatcctctctcgttctttcaacagcctgcaggaagctgagaacgccgccaaccagcttttaagcttcgcggggtga

SEQ ID NO: 192096 - DNA, 510 bp, Klebsiella oxytoca
atgccaccgggaacgacccgcgatagcggacgatgttcaaccgtagccagcgccggcgaatacattcagttgtcttcatgttcatgcttttaccagcccttcttttttccatatggccagcgttctgagcacaccttctgcatgcatcaggcgcagttcgtcgcgggtgtaatcggtggttctctttctgccatcaatgagatcgtggcaagcactgcaggctatagcgccctgtgtatcgtccggcttgcatccggtaccgcaggtgccagccagacggtaatgtgccagtacgctggtttccggattgccattgcagtgcccgggaatacgtaccgtgcattcgcggcctcgggccgctttgcgaaggttagccatactcacccccacatcctgttgcgccagcgagagtctggccgtggcggatttttgtcctccaccagctgcgcgctgacggtccatgtcacaaagtccgggtttaaactgcgttcgacctttacgccccgctga

SEQ ID NO: 192097 - DNA, 258 bp, Klebsiella oxytoca
atgggcaggggcctggtacgggcaatcatcatattgggcgacatgatgtgcagcaaaaaacggtttatccccgtcatacttcaagttgcatgtgcgttggctttcctcgctccctccagtcactacttgagtaagctccaggggattccctgcgtcgccgccttctcgcaactcgaattatttagggttttaatctctctgcgcggaaataatcttcttcatttccgctaccgcttcgccattgacggcgtagcgtaa

SEQ ID NO: 192098 - DNA, 1140 bp, Klebsiella oxytoca
atgaaagtttggcctgtcaaacatagcccactactgcgccagccggagcgttttatcgcccgcaatgaactgcaggcgctgattcagaaggtgacgcacaatctggtcaacattaaggacgaaagcgggcaatttttactgcggctggacgacggacgcgttatcgacaccaaaggatggaacggctgggagtggactcacggcgtcggcctgtacggtatttatcagtattatcagcagaccggcgatacggcaatgcgcgacattatcgatagctggtttaccgaccgctttgccgagggcgcaaccaccaaaaacgtcaacaccatggcgccgtttctcaccctggcataccgctacgaagagacgggcaactccgcgtatctgccctggctcgatagctgggcggagtgggcgatgaacgaaatgccgcgcactgaatctggcggcatgcagcacatcaccctggcggaagagaatcatcagcagatgtgggacgacacgttgatgatgacggttctgccgctggcgaaaatcggcaagctgcttaatcgtccggaatacgtagaggaggcggtgtatcagtttctgctgcacgtgcagaatctgctggaccgcgagaccggcctgtggttccacggctggagctacgaggggcggcataatttcgcccacgctcgctgggcgcgtgggaatagctggctgactatcgtgattccggattttctggaactggtggatttacccgagagcagcgcggtacgtcgttatctggtgcaggtgctgaatgcgcaggttgcggcgctggcccgctgtcaggacgatagcggcctgtggcatacgctgcttgacgatcccggctcctatcttgaagcgtcggcgaccgccggttttgcttatgggatcctcaaagctgtgcgcaagcgctacgtgagccaggcgtatgcggaggttgcggaaaaagcgattcgtggcatcgtgcagaatatctcaccgcaaggggagctgctgcaaacgtcgttcggtaccggaatgggttcgaatcttgatttttatcgcgacattccgctgacgtcgatgccgtatggccaggcgatggcgatcctgtgcctgacggagtatctgcggaagtatttctga

SEQ ID NO: 192099 - DNA, 1584 bp, Klebsiella oxytoca
atgaaaacacgtaaaatcggtttggttaactaccttgcctatggatcgggcgatttccttggtgcgggaacgaccgcactcacagcagcatggctgctctatttctacaccactttttgcggtctttcccctatcgaagcgacgcttatttttgccaccgccagggttctggatgcggtaatcagtccgctgatgggcttcctgacggataactttggctcgacctggctggggaaacgttttggcagacgcaagttcttcatcctgctcggtatcccctgcgtatttagctactccatcatgtgggtaggggatatggggttttggtactacctgctgacctatctgctgtttgatattgtctacaccatgattctggtgccgtatgaaacgctggtgccggaaatgaccgatgattttaaacagaaaacaaaattctccggcgcgcgtatttcaatggcgcagatgtcggcgattctggcttcgttcctgccgggcgtgctgctgactatcttcggtaaggataacgcggtttctttcttttacgcgagcctggtgttctcggtgctgtgcgcgatgatgctgaccttcgtctggttctttacctgggaacgcccgcgtgaagagtggacggaggccgcgctgcgcgccgaagaagagaaacagaacctgagcctgtctcagagtcttaaccgcctgtttattgagttaagttcgaccctgcggattaaaatattccgtcagcatctgggtatgtatctgggcggctatatcgcccaggacgtgttcaatgcggtctttacctactacgtggtatttgttctgatgcaggaagcgtcgatggcctccaacctgctcggtaccatggcaatcttccagtttatcgcggttatcgccatgatcccgctgtgcattcgcttcgggccggcgccatcgtaccgcatggtggtggtgctgttcggcctgagttcgctctcctacgcggtgttgtactacgctggcctcagcgatgtctattcgctgctgctgctgatatccgcggtggcgggcctggggcgcggcggcatcaactatgttccgtggaacacctacacctatattgccgacgtggacgaagtgatcaccggccagcgccgcgaaggcatcttcgccgggattatgaccctgacgcgtaaggcatcccaggccggcgcggtgatgctggtggggatcatcatgcagatgtcgggctttgtctccgggcagaaaacgcagccctatgaagtgagccataccattctgctgatcctcagcgtcggtaccttactggtgctggcctgcggtttcctcgtgtccctgcgctttaagctcaatctgcaaacccacagcgtcctgcgtacggaaacactgaaaatgcgtgaatcaggccgcgctcagccggaactggccagcgccgaggatcgtgaggtagtggagatgctggccgggatgccgtacgacgccctgtggggaaacaacaatattggttatctgaatcggaataaacccgccgcgccagcgctgaagcagcgttcagccatgaattcgacatataacagaggttaa

SEQ ID NO: 192100 - DNA, 1632 bp, Klebsiella oxytoca
atgaacagggcaatttcccgggtagttctgtggttttttgttttgatggcttatcctctacaggccgcggaaccacgtcaggcaccttcagcgcaagaacgagccagaacggtttatgttttccaccagccgatagtgatgcttcaggcgaagtttggcttaaccacgccggaagagcgcgtactgcgcattcgcaataccctgcgcggctttagccgtgaagacgtggcaaagcccctgactattgtcccggtgactcgatataaccaggcgggacgcctgatcgtgatgaacggcaaaccggtgatgctgctggtggaggcggatctcgacgaaggcgacgatctcaccctcgaccaggcggcatctcgtgtcttaacccggctggaagcccagcgtacggccttacgcgatcagtacgaccaccgcagtctggcgctttccgcattgaaaaccaccgttggcgtggcggcgttactggcgctctggttcgttcagtaccgctcctggcgctgggtgcgccgggtttatcggcgcaaaataatcgataataaagggcttattccccaaacctggcgacgctttttaggtgaggttgaaagccgtctgtacgcgctactgatgctactgctgggtatcaccgcgatctatgttttgctccgctgggccttcagcctgtttccctggacgcgcgtctggggcgagtccctgggcgactggtcgatacgtatcgtcagccaaatctcttactccatcgtctcagcgctgccgggactgctggtggtgcttattatctttgtgatgacctccgtcatcctgaaaatcctcaaagtggtgctaaaccaggttgccacgggacgcctgtatattcccggcctgcatccggaaacggtgggggccacgcgcaagctgattgcggtaatcgtctggctgtttgcgctctccgctgcgtatcccttcctgccgggggccaactcgctggcgtttaaaggcattagcgtcttcttcggtctgatgctcacgctggggtccgcgggggtaatgaatcacgccatgagcgggctggtgctgatttactcccgggcgctgcgcaaaggcgatgtgatccgcattgccgaaaacgaagggcgggtgaccgaagtcgggatgctggcgaccaaaattgtaacccgggaaaactacgttattacgctgcccaatgcggtagtggtcagcggcaaaattaccaaccttagcgtgcaaaaccccgacggcagcgtcaacctgacgctcaacgtgacgattggctacgacaccccgtggcggcaggtgcacagcatgctggagctggcggcgcggcgggcgaagtgcgtcgatcaatccgtcgcgccgcgggtgcgccaactggccttaatggactggtacacctcctacgagctgcaggtcaggctgctgccggttgagcagaacggtccgggtgatggcctgatggctggggcgcgcaccgagatgcacagcctgattcaggacgtatttaacgaatttaacgtgcaaattatgtcgccaaactttgtgctgcaacccaatgaaccggtgatggtgcccaaagagaaatggtttaccgctcccgcacagccgcctggagaggggtaa

SEQ ID NO: 192101 - DNA, 1086 bp, Klebsiella oxytoca
gtgaaccgttatttttctctcattccgcttgttattttaataacaacggcttgcgatcggaaagcacctcaaattaccccgctaccgcggatggttaaagtcgccgaggtggttgccatcggtgattcacagcagcgcgtattccccgcccgcattgagtccggggactccaccgatttatcatttaaacgcggcgggcagattgaatcgcttgatgtgcgtcagggagccgctattactcaggggcagacccttgcccgcctcagcgcacgggaagcgcagcagcgcgtgaatgaacggcagaccgccgctaccctcgcccagcggcagttcgatcgtttccagacgctggccggtcgccaggcgatttcaaaggcggaaatggatatccagcgggccaaccgcgacgctgccaacgccgcgctgaaaatcgcccgcgaagagctgtcgcaaatggcgttgaccgccccgttcagcggcgttgccgcttacgtcccggtacgtaaccatcaggtggttgccgccgggcagccaattgtgaccctgacgcgaaccgatctgctcgacgtggtgtttagcgttccggaaaatctctttaccgcgctcgatattcgcaacgcgcagtatcgtccggtcgtcaaaattaacgccatgccggaccgccagtttaccgctgaatataaagagcacaccggcagcagcgacagcaatacgctcacctggcaaatcatcctgaccatgccgcgaccggccgactttcccgcggtgggcggcgtgagcggaacggtgacaatcaacctggcgaacctgcccgccagcgccggtaaaaatgcggtggtggtgccggtcgaagcggtgtttaacccggacaatcgcccgcgcaatgacccccacgtctgggtcgttcagggcagcggcgaccagcttaagctggaagagagaaaagtcggcgttggtcaggtcacctctcagggcgtagtgatcaccgaagggctcagcgtcggcgagcgtgtcgtggcggcaggcgtcagcgaattgcatgcgcaacagccggttcgtatctggacgcgtgaacgaggtttgtaa

SEQ ID NO: 192102 - DNA, 3063 bp, Klebsiella oxytoca
atggatatctcccgccagtttattaacaacccgatccgcgtctggctgactattttgctgctgggcatcggggggatcttcgccctgctgaatattggccgcctggaagacccggcgtttactattaaaaccgccgtggtgatcacccattatcccggcgcgtcggcgcagcaggttgaagaagaagtcaccctgccgctcgagaacgcgctgcagcagctgccatatctcgacaacgtcagttcaatttcctccaacggcctgtcgcaaatcaccgtcaatatcgcctcacactaccactccagcgagctgccgcaaatctgggatgaactgcgccgccgtgtgggcgacgccgcccgtcagtttcctcccggggtctcctccccatttgtcaatgacgattttggcgatgtctttggcttcttctttgctatctctggcgagagctttaccaatcctgaactggttcgctacgccgagcagctgcgccgcgagctggtgctggttcccggcgtcggtaaagtcgctatcggcggggcgatccctcaacaaatcaacatcgatatctcgctggcgaaaatggccgcccgcggcatcacgctcaaccagttggcggctatcctcagccggttgaacgtggtctctaacgccggcgagattaaatccggcagcgagtcgatccgcctgcacccgacgggggaatttgccaatctcgatgagctcggcgacctgttaatcagcccgcacggttcgggaacggcgacgcggctgcgcgatatcgccacgctatcgcgcgggctgagcgaaacgcccgccagcatctaccatgccaacggccgccaggcggtcaccatgggggtatcgtttattcccggggttaacgtgattgatgttggccgcgcgctggagagcaagctggagcaaatgtcggcggaaaaaccggccgggatcagcattgacctgttctacgatcaggcggcggaagtcgcccactcggtcaacggttttatcactaacttcctgatggcgctggcgattgtagttggggtcctgctgatctttatgggcgtgcgcagcggcattattatcgccctgtcgctggcgctcaacgtgctcggcacgctgctgatcatgtatctgtggggcatcgagctgcagcgcatttcgctgggggcgctgattatcgccctcagtatgctagttgataacgccatcgtcatcgttgaaggggtgctgatcgcccgccagcaggggtctacgctgcttacagcgataaattatgtgatccgccgttcagcgctgccgctgctgggggccacggtgattgccattctcgcctttgcgccgattggcctgtcgcaggactcgaccggggaatactgtaaatcgctgttccaggtgctgctgatttcgctcatgctgagctggttctcggcgctgaccatcacgccggtgctaatcaaatggtggctgtttaaaaatcaatcacagccggtagcgcaggccaacgccaacccgtacggcgggcgcttttaccgcctgtatcagcaggctctgcgagcccttctgctgcgcaaaaccctcaccctgaccgtcatggcggcgctgttggccgccgctatctgggggtttggatcggtgcggcaaaactttttcccctcgtcaaatacgccgattttctttgtcgatctctggctcccgtacggtaccgatatcgcgaccaccgaaaagatgaccagcgatattgagaccaccattaacggccagcccggggtggtcaccaccgtggccaccgttggccagggcagcatgcggtttatcctcacctatagcggacaacggcagtacagcaactatgcgcaaatcatggtgcgcatggacgatcagcgcaatattgccgccctgacgcagcatgttgatcgctatattgcgcgcaactacccgcaggtaaacgccagtacgaaacgcgtgatgttcggcccttccggcgacagcgccattgaggtgcggattaaaggtccggaccccgaccgcctgcgcctgctcgccagccaggttggcgatattctctccgcagatccggctaccgatggtgtccggaatgactggcaaaaccgcagcaaagttatccgcccgcagtactccacctcgcttgggcgcgagctgggggtagataaacaggatattgataacgcgctggagatgaacttctccggcagccgcgcgggcttgtaccgcgagggagccgacctgctgccagtggtcgtccgccccccggccgctgagcgccaggacgcgaatcacctgaacaacgtgctggtctggagccagagccgccagcagtatattccgctcagtaacgtggttagcggttttcacctcgaatgggaagatccgcttatcctgcgccgcgaccgcagccgcgtgctgacggtgcagaccgatcccgatccgcttagcaaccagacgtcgggggatatcctgtcccgcgtgaagccgcagattgatgcgatcgctttgccgcacggctacagcattgagtggggcggggatgcggagaactccagcgaggcgcagcagggtctgttcactaccctgccgctgggttacctggtgatgtttgtgattaccgtgctgatgttcagctcactgaaaaacgcggtggcgatctggctgaccgtaccgctggcgctgattggcgtaacgccgggcttcttgcttaccggcatcccctttggctttatggcgttaatcggcttgctgagcctgagcggcatgctgatccgtaacggcatcgtgctggtagaagagattgaacagcagaagcaggagaaagggcaacaggaggccattatctatgccgccacttcgcgtctgcgcccgatcctgctgacggcgtttaccaccgtgctcggcctggcgccgctattactggacgttttcttccagagcatggcggttgttatcatgtttggtctgggttttgctactattctgacgctgctggttctgccggtgatttacgcctgtttccacaataaggacatgaagcgacaaccatga

SEQ ID NO: 192103 - DNA, 159 bp, Klebsiella oxytoca
atgcaaaaagtctttcttaacctggctacggattcggagcgtgatattaagatacaagggctgaaaagcatggggggtctgtcgcagcctgtgctcaccctcgtttgtctgggtaatgaattgatattaatgtgctatggcgttttttgtctacgatag

SEQ ID NO: 192104 - DNA, 900 bp, Klebsiella oxytoca
atgagcggtattcgtataacacaggctattgacaacaatcagattttaatagatgtaattgcttttaattctagtgttaatccctatccactcaaatgccctgatccaaattgctctgctcatttggtatatgttaaaagccacattcgtaggaatattaacaaaacgctgcatattcctgcgttctttaggctggaaagaaaattcacgcatgacaaattttgtcagtatgggacttcaggcctagatacaatttatgcaggtgattccagtcatgatatcaaccgtgcgcttgccaaaggtaataaaatattccgtatacatatactcgatgtagatgatatcgataaattaagcaaaaaagctgcagctgtgcaggcaaacccgccttctgatactacagaccgcgtttatttcaagagaggccggaaagcgccttacgtaaagaacatggacagcttacgggaaatctatgaatacggcaaagctaaccccaaccagagaaataccataaaaattgtcacgggaacaagtacagtaacgtggtctgattttttctatgaaacagctcagctagatcagttatcaacttaccttcagactgtaaaaatagctcaggttgctgtaatcatgaaagtgcatgtggcgagaacacccttggcgaagtttaatcatcgacacttcattgaaggttcgcccatgaggctgaaaggaggccctaatgtatatcctacgattcaattaggaaatgttactccgcaattatttcctttgagcagtaacgtgatggtactcggtaagtttactgttccaataaatagtaaaatgataatggatcccgtatttgatcgtgaagtcagaaccatagtttctagtgaagaacaggtgctgctcctttga

SEQ ID NO: 192105 - DNA, 834 bp, Klebsiella oxytoca
atgcaagttcttgataaaaatggtatggaactgaacgctgaatgcctggttggtgaagaagatgggatttatggcctgatacttgagtcctggggaccggcacatagaaacaaagattataatgttgccctcgattatatcattgaacgacttattgactccggggtagacaaagtcattgtgtatttggcctcatcaccagtcagaagacatataccatctgtagctgaaaggaaaatacatcctgatgagtatttttctttagtgggaagcaacccttccgatattcgccaagaaatgtgtaggtatcagaatcatttcagcagcactggtaaaaaagatacaccatcagggaacagaaccaagcgagtaatgataaatgttccaggagtcaacaatgctgaattttggaaacctatcatatacggagacatgtcagtgcttttcgagcctactgatgatgagagtattctaagtaaaagggtcagtaggctaataaagattcctttgaaagagcccgagggatttaaaacacctggaacattagaaagagttcagaaggtttatattcgggatcccgctgttaaagcttgggtattgcaaaagagtaagggcgtttgtgaaagatgtggtgaaaatgcaccgttcttaattaatggcgacaccccatatctcgaggtacatcatgtgataccgctttctttatctggtgctgacaccataagcaattgtgttgcattatgccccaattgccatcgggcattacattacagccaaaattcagaagagttgattgaggaactttatataaatataaaaaggttgcaaagatga

SEQ ID NO: 192106 - DNA, 1059 bp, Klebsiella oxytoca
atgagatttctactgagtgcgctgatgctgctgctttgcgcgcacgcgctggccgctattgatgtcatgccgtttaaagatgaggagcaggaacagcggtttcgcctgcttacggagcagcttcgctgcccgaaatgccagaacaatagcattgctgattccagttccgcgatcgcggcagatctgcggcagaaagtttttgcgctcatgcaggaagggaaaagtaacgatgatatcgtggactacatggtggcgcgctacggcaacttcgtcacctacgatccgccattaaccccgctgactattctgctgtgggtactgccggccaccgcgatcgccatcggcggttgggcgatagtggcccgttcgcgccgccgcgtcaggatcggactggaggcgttttctgccggccgggcgcctgagagcaaacccgccgggccgtgggtttatatacccggcgcggtcattgcgttggcggtaggcgcggccagctattgccataccggtcactatcagcaggtgagaatctggcagcaggcggtggaccagacgccggccctgctggcgcgggtacaggaaccaaaggcgttgccgcttgatgaagacgatttgcggcgtctggccctcgggttacgcaccagactgtggcaaaacccggacgccaacgttgaggagtggcttatgctcgggcggattggcaggatcctggacaacgccggtatggtgactcaggcttatgctcgcgcttacgcgctggcgccagagaacgatcgggcggcatttagctatgcggaggcgctgctgcgggtatcggacccacggggtgacgcgctggtgcgtcagctgatggcgcaccagcgcgttaacgcccgcctgcttaatctgtatgcgcttagtgcgttagaacaggcgcattttagcgaggcgctgacggcgtggaagacgctgctgaacttattaccgcctgacgatgcgcgtcgagcggtcattgagcgtcacattaaccagacggagcaacggttaacccatggcgatcccgccgccgaagcgccgggttaa

SEQ ID NO: 192107 - DNA, 558 bp, Klebsiella oxytoca
atgaagcgcggtatgatggtgatcccgctggtcatttttatggccattatgctgctgctggtatggcagctggcgcgtaatgcgcaaggggacgatcccgccagcctggagtcgacgctgattggccagccggtgccgctttttcgccttgaggcgttggaggatagcaagcagcattttcaggcggatgtgctgagtcagggcgaaccgctgctgcttaacgtctgggcaacctggtgcccgacgtgtcgcgcagagcatcggtatttaaatcagctttccgcgcaggggatccgcgtggttggtctgaactacaaagacgatcggctgaaagcgatagactggctgaaaacgctgggcaatccctatgcgctgagcctgtttgacggtgacggaatgcttggcctggatctcggagtctacggcgcgccggagacgtttttgatcgatgggcaggggatcattcgctaccgccacgcgggcgatcttaacgatcgggtgtgggaacgtgaattcaggccgctgtgggagaagtacggtagggaggccgcgccatga

SEQ ID NO: 192108 - DNA, 480 bp, Klebsiella oxytoca
atgaatcttcgccgcaaaaatcggctgtgggtcgccctcacgatcctcgccgggctcacgttgaccaccgcgctggtgctctacgcgctgcgctcgagtatcgacctgttctatacgcccggcgaaatcctctatggcaagcgcgaaacgcagcaacggcccgagcccggtcagcgtctgcgcgtcggcgggatggtcatgcccggcagcgtgaagcgggatccgaactcgctgcgggtgagctttagcatctatgacgccgaaggttcggtggatgtcagctacgacggcattctgccggacctgtttcgtgaagggcagggcgtggtggtgcagggcgagcttgatgaacaacgccgggtacaggcgaaagaggtgctcgccaaacacgatgagagctataccccgccggaagtggaaaaagcgatggagagaaaccatcgccggccggatagcgcctacagggatgcctcctcatga

SEQ ID NO: 192109 - DNA, 204 bp, Klebsiella oxytoca
atgaactgcgcatttgcaaactggagcgatttcctggccatgggcggctatgccttttacgtctggctggcggcggcattgaccgttatcccgctaatggcgctggtcgcgcacagcgttatacagcatcggatcatcctgcgcggcatcgtacagcagcgcgctcgtgaagcccggatgcgcgcggcgcaggaggcaagatga

SEQ ID NO: 192110 - DNA, 225 bp, Klebsiella oxytoca
atggtcaaaacaccgcttacctcagagcagaacgtgaaaaaaatacgccaggtgcgcttgtgcctgtttatctgtggcatcgtgtcactgtttaccgcgctactgaatatatttacccgctcattcaacccgctgtacgaaggcgtacagatcctgctgggggtgggctgtattgtctttggtttcacattaaccaaaaaaatcaaaaagatacttgaagaataa

SEQ ID NO: 192111 - DNA, 159 bp, Klebsiella oxytoca
atgggtaattcggcgctcaaggggggcggattgctcaaaatcagggaggagtttggcaagggcgtgacaatgaagagggccgccggagagatttttactgccgggaagttcgccacgttcaagctgcaggaccaaaagccctgctcgtacgcagcgtga

SEQ ID NO: 192112 - DNA, 351 bp, Klebsiella oxytoca
atggagtttactgcgtgcgcggttcactccagtatggactatgcatggatctaccgctctattctggagagcattgcgctgacactgaaaaataactacgacaatatgtgcaatgaaatgaatcatttcgctaaacatatcatcatcaccggcggcggctctaacagtgacctttttatgcaaatctttgctgacgtgttcaaccttccggcccaacgcaatgccatcaacggctgtgcaagtctcggggctacaatcaacacggctgttgggtcaggcttgtacccatcttacgaaacaacaattgaaaaaatggtccgggtaaaagatgtgtctatgccagttgaataa

SEQ ID NO: 192113 - DNA, 1110 bp, Klebsiella oxytoca
atgaatacattattaattactggcgcgaccggatttctgggtggagcagtgttagaaagcattcttaataaaatgaatgtgcctaatctattactgttagttcgtgctgataatagtgtagccgccgtagaacggattaaggaaaacctgcgaaaattcaatattagcgaagagagattaacggccctgacgcccggcaacattctgctgggggatctggccaatccgcagccctttctcgacgacccgcgcttgaatcaggttactcacgtgctcaactgcgccgccgtcgcctcatttggtaacaatccgcttatctggaaagtcaacgtcgaaggtacgctgcagtttgcccggcggatggctcaggtcaacagccttcagcgctttctgcacgtgggcaccgcgatgtcctgctcgccagatcccgattcgctggtagcggaaagcacggcgtttcgtgaacgcgccgagcatctggtcgagtacacacactctaaatcaacaattgaacgtctcatgcggcaggagtgcccaacgctaccgctggcgattgcccgcccctcgattgttgttggccacactcatcacggctgtcagccctccagcagcatcttctgggtgttcagcatggggctgatgctgcaaaaatttatgtgttcaatggaagatcgcatcgatgtgattcccgtcgattactgcgccgatgcgctgctgatgctgcttatcagcccgctggcgcgcggagaggtagtgcatatttcagcgggagaggaaaacagcgtaaggtttgcggatatcgataacgctatggcctccgccctagagcaggcgccggtcggcgataaatacgcccaggtcagctatgaaacgctggtcaaaatgcgccgtgagctgaagactatttttggcccctgcaacgaacggctgatgctaaaagccatgcgcctttacggcgccttcgccacgcttaacgtacgattcagcaacgacaagctgctcagcatgggcatgccgaaaccgccgcgctttaccgattacattgaccgttgcgtacagaccacgcgcgggctttctattccgcagcaaatggcggtagattttaagtag

SEQ ID NO: 192114 - DNA, 705 bp, Klebsiella oxytoca
atgaatgaaaccatagcattgcgtcctggctgcagggcgtcgacatcaacaaaggacgtggtcgtggatgacatgctggcgtcgctcaatgagctcgaacagctgcaaccggcgctgaatttgctggcacacccctcaatcgctcagggtagccatgatttctttgtccagtgttatgatgctggcgtacggcatgcgcaggcccgggcttttgaaacggtgccgacgctgcctggttcgctgtcacatgagcggcaaagatacgcgctgctgtgtgcggcggccggtcgcctggatgctctggggcaggcgctgacgcacaatcgtctgtgcgatttggccggtcagttttgtgctggcatggcggatgttgatagcgaaatccgcagcggtttctataccgtgcgtagcataccgctaccggtttaccggcggctgcagcgggataatcattcacatggcatctgcctgcagcaggcgctgctgcatctgctggcctggaaaagtgattccccctgggcgcggcagcaggcccagcggttgctctggcagggcggcgttctgggagataaaggcgagtttgcgctgataacgctggatgacgagctgcgggagcgccagtttgcgtggcccgggctgcggtcgctgctggccgtgaccgggtttctggcgaaattcccggccgggccattgtttgctgattga

SEQ ID NO: 192115 - DNA, 663 bp, Klebsiella oxytoca
atgaatagcaagcgtaaaattcagttggctgattttaatagaaaggttattttaaccacgtctaataccttatttctcaaccgcggaatagaaagtaccaccatggatgagatcgcccatgaagcgggttttagcaaaacaacgctttatacctattttgaaaataaaaaagacattctggatcatcttatcctggagggaatggagcgtttctatcaggaggtgataaaaatagccagtcggcaaaattcattccgcgagttttatcgcgagctatgccatgcgctgatcgctctccacgaaacgagcattgcctattttcccgctatcacagggcaaatcgcgaattatgaaaaaatcactaaaaacaataaagcgttgaagagtatctctatgattggtgaacagataaaccatattatcgccgcgcaaatcaccggcgccgccgaaaaaaaagagatcgggctgaatgcttccgccgcggacgtcacaatgctgttctggctctgcctgaccgggctcgtggaaaaatcctcgcatagagaatcctattttttacgtcaccttgagaaagaccgaaaatcctttctcgacttcgcttttgactcaatattattaatgatagaaaaagggaatgttagcgataatgtaaaagctggctaa

SEQ ID NO: 192116 - DNA, 606 bp, Klebsiella oxytoca
atgaatctttccttgctgatggcctactccctggcggttctggcgctggttgctacgccgggaccggtggtgttgttagtaacaggcgcggcggcgcgtgaaggctatgccagcgcggtgcggacgatgattggcggcaatctggcgtcgctgctgctgctcgccgctgctgccgcgatgctgaccggtgcgctagcggtcgaaccccgggcgctaacgctgctggcgatgatcgggtcgctgtatattatttggctggcgctggcaatgctgcgtgaagatgccgttacgcagcaggtagccaaaaagcgtagcggggtgatggctggattcgcgaccgcattaagcaatcccaaagatattctcttttttgccgctttttttccgcagtttattcatatcaccgacagtttcggctgcagtctgggggtattgacggcggtgtgggtgctgatcgacctgagcgtgctttcgctttacattctggcggttcgtcgttggttaacggcgcgttgcgccaaacgtttgacgacggtctcggcgctttttctgctgcttctggcgagctatgggttgggatataacgtgtggcagctacatctttag

SEQ ID NO: 192117 - DNA, 357 bp, Klebsiella oxytoca
atggcaatttcagccagaaaccaactggctggtacggttagcgtgactgaacgcggggcaattaacgatgaagttgagttaaccctgaaggatggcgcaaagctaattgctctcgttacatctggtagccaacaagcattgggcctcgaaccggggagagaagccatcgcgctgattaataacagagaacaatctgcctcgccgtcgcagagcatttgggtcagcatgcaccttgcgcgggtgcgttcgatcaattgctacgaaaatggcgaggtccttcaggggttcatttccggcgcttcgtttctggcgcgggaccatgctgcaaaatctgcagataccattggcctggcataa

SEQ ID NO: 192118 - DNA, 150 bp, Klebsiella oxytoca
atggaaaacgtttttaaccgtattgtagaacttattggctggattgttttgggcgtttcggccctgcttttagttatcgctcatcatattgataactaccagtccccgccttccgttgatgttgttcagacgaagccgctgtcgaaataa

SEQ ID NO: 192119 - DNA, 519 bp, Klebsiella oxytoca
atgaaaaagtgtcttattgccgttagcctggcggcggctgccttctccgcatcggtattagccgacgatggccggattaatttttacggttccatcaccgatagcgcctgcacggtggtgaataatatgagtaacccgctgtcggtcatgatggggaacgtctccagcagtgccttcaccggcgcgggctcaacggcctcgccaactaaatttaatattgccctcaaagattgccctgagtcggcgaagtccgccacggttaaattcgacggtacggcggatagcaacgtcgccacccttctggcgctaacgcaagaagccggcgtcgccaagggcgtgggtattcaattaatggataacaagaatgtcgtggtgccgttatataccgcctcgtccgcgtatccactacaggctggcgataataacctcgcattcgtcgcccgctattatgcgacggctaataccgtgagcgcaggattcgccaacgcgaccagcagttttactcttaattacaactaa

SEQ ID NO: 192120 - DNA, 690 bp, Klebsiella oxytoca
atgcataacggatatagagtctttcccctcttgcttatattactggctaacggattagcggccgcggcggaaagcggcggcgtcactattggcggtacgcggctgatctttgacggcggtaaaaaggaggcctcgctgagcgtcagcaattccgatagcgctccgtatttaattcagtcgtggattgagtctgccgataacaatccgcgtaagccgccgttcattattacgcccccgctgttccgcctcgacggcaaccagcaaaacctgctgcggatcgtcaatattggcggcctgctgccggccgatcgcgaatcgctttactggctaaacgtcaaagcaatcccgactaacaccgcccccgataacgccaatacgctgcaaatcgccgtaagaacgcgtcttaagctcatttttcgccccaaaaccctcaagggcaccccggaacaggtgacgcataagctgaaatggcgccacgcaggccgtcggctcacggtaacgaatcccacgcctttttacatgaatttcaacgaggtaacgataggtaatcatcctattaccaaagccacttttgtcgcgccaatgagctcagccacgtttgatacccccgacaaagtggtcggtcaggtgtcatggaaaatcatcagcgactttggcggcgttggagaaagccacagtcaggatcgctaa

SEQ ID NO: 192121 - DNA, 2571 bp, Klebsiella oxytoca
atgaacaaaagaacgttaagcgactcgcccttgaatttagcttgccttatcgccacccaggttgccctgattgcggcgatatgcccctctgctaacgcccgcgaccggttcaacgccgcccatctggaaaccggcgacggcggccaggccgctaccgatctctccgcctttgaggagcatggcgggcagctgcccggccgctacagggtcgatatttatgttaataacagcaaagtggatacccgcgacgttgagttccgcatgcagcaaaacgcgcaggggctgagtacattacagccctgtctgtccctgagcgacctggcgtcatggggcgtcatgacccagcgctacccggcattaggcccgaccgccgatggctgcgccaggctgtcggcgcttccccaggccagcgccgactttcgtttttcacgccagcagctgttgttgagttttccgcaatcttcgcttaacaacgccgcgcgcggctgggtcgatccggcgcgctgggatgacggtattccggcggcgctgataaattacagcgtaagcggcgctaacaatcgggagaaaaagggcggcggcgacaacggaaacgcgcagtacgttaatttgcgccccggactcaatctcggtccctggcggttgcgtaattacaccacctggaatcgcagcagccaggacagcaaaagcggtacctccacaaaatgggataccgtctatacctacgcacagcgcgatatacgtgccctgaggagccgcctgacgctgggcgacagcaccacgccctccgatattttcgacagtattccgtttcgcggcggccagctggcgtctgacgacgatatgctgccggagagcctacgcggctatgccccggtggtgcgggggatcgcccgcacccatgcccaggtcacgatccggcaaaacggctacatcatttatcagacctatgtttcgcccggtagcttcgaaatcagcgatatgtaccccactggcggttctggcgacctctacgtcaccatcaaagagtctgacggcagcgagcaaatcctcgtggtgccctacgcctcggtcccggtcctgcagcgtgacggtcgcttaaagtacgccatgaccgcgggcgtttaccgcgcctatgacaacggcatcgataaaaccccgctggctgccggtaccgcgatttacggtcttcctgccggctacaccgtttacggcggcggacagtttagcaacaggtaccaggcgttggcgctaggggtgggtaaaaacctcggccccgttggcgccgtatccgccgatgtcacccaggcatggtcacggcaaaaataccgcgcgcgtgaagagggtcagtcatggcgtattcgctacagtaaaaacgtggtgcagaccgggaccaatttcacctttgcgggatatcgctacgccaccagcggcttttgggatatgcaggacgtgctcaacacctggcgcgatggacgacgctacgctgcgccggaacgcagacgcaaccgcgcggagctcaccgtcacccaggatctctttcagattccaggcaacctcgcccttagcgcgatcctcgaagactactgggacaccaacaagcgtatggagtcctacagcgcgagctacaacagttcgtatcaaggcatcagtttcagtctgagctacagctataacattcattcagcggaacgctacggccagcgttccgggcgcgcctacgaccgcgatgggctgtttgcgctcaccatgagtattcctctggataaattattcggcggtcattcgacctacgtcagctacatgctgaataccagtaagcgggggaataccaccaataatgtgagcctgggcggcaccctgctggccgataataacctgaactggagcgtcatgcagggctatggctctcagggccaggggagtaatagcgggctcaatgccgactggcgcgcctcttacgctgagaccctcgtcggctacgcccgcgaccgctacagcgagcgctttaactacggtttgcagggtgggatcgtcgcgcatcgcaacggtatcaccttcagccagcccctcggcgaaacgatggcgctgatcgccgctcccggagcgcaaaacgtgtcggtgctcggacaatcaggggtgaaaaccgatctcttcggctacaccgtcatcccctacctcagcccctatcgcaaaaacgatctcacgctgaataccgaaaccctggccgatgacgcggagctggcgctagcgacccagacggttatccccacgcgcggcgcgctggtgaaagccagttatcaaaccagcctcgggaaacgggtattgatgaatctgcgcaaacgcaacggcgcgccggtgccgttcggcgcagcggttatcgatcccgcctccccgacggcagcaagcttcatcgtaggcgatggcgggcaggtctatctcacagggttaagagacgccggccagttgaacgttagctggagcagcgagccggatggccgatgcacggtgaattaccgcctgacgccaagcgcgggcgggattatcaacctcaatgaacagtgtctatag

SEQ ID NO: 192122 - DNA, 1005 bp, Klebsiella oxytoca
atgaaacgagtccacgtcccccttatgctggccatccttatcgcgagcgctgcccatgcagataacggctattattgccccagttccccgtccacgccgtatatccagcagcttgcgcagatcgcggtatcgcgggcgctgccggttggcagcgatattcccggcactcagcgggtgttcacctttagcggaaactgcaaagatcgccacggttgggctcccgtcacccccggccaccccattatcgcctgctattacggcagcggcgaagaagtggcgggtttccccggggtctataaaaccggggtcgaggggatcgggattgcgctacaaaatagcgccggtcggagaatcaaaggcgccggcagcgactgcgatacgcgtggggatgcgctggggtatgtctccagcgacggcaatctgacctttggctatacggttaaactggcgctggtaaaaaccggagagaccgccattagcggcacgctcgacgtcgcgcaaaccaaattcggtatgggtgcctacgataccggcctcggcatcggtagtcagggccagcaaaactttataggttatgccggagatattgtttataaagcggtaagctgcatcgtgccctcgacgctcaccgtcaccatgggcgcgatcccggtcagccaattctccggccccggcagcaccagcgtcgaacaaaacctccagatcccggtgcggtgcgatgataaggtcgccgtgaatacgtctatcagcagccagagctacctttcgccgacgctcggcgtagtggccttaagcaatgaaaccggcgtggccgaagggatcggcgtccaggtgctccataacggttcacccgtccagtttgatcagtttttcccggtcggcaccatccctgaggctggagcatcgataaccctgccgctcacctttcgctattaccagaacgcgccggcgatccatcccggccgcgccaacgcggtggcaaccttaacgatgatgtacaactga

SEQ ID NO: 192123 - DNA, 213 bp, Klebsiella oxytoca
atgatgggaccgctaccgggtggatggctgcgcctgttctactcgttcaatctggaagaccatatcccagtccaacacctcctgcgcagtatcgaccagtgtctggatctgcgtgatctactcagctaccttgcggatttctacagctccatcggacgcccctcgatcgacccagagttgatgatgcggatgctggtcattggctactgctaa

SEQ ID NO: 192124 - DNA, 906 bp, Klebsiella oxytoca
atggccggtttcgacctcaacctgatcacgactttcgtcacgctctatgaaacccagagtgtcaccgtggctgctgagcgactctgcgtgactcagccatcagtgagctatgcattggccaaactcagggaacagttcgatgacgccttattcgtacgtaaccaacaaggcatgcaacctacgcggctggctactcagctctatgagggattcaaggaagccagccgtagcatcaatgatgccgtttccgaggcacgcaaattttccccatcaacctcaaagcgacgttttcgccttgccttgtcggatttgggggaaattgctttgctgccaagagtgctcgaccgtctcaaccagatggcgccgagtatcgagcttgacatcgtgccgcttgagatcgaccaggtcgcaacatggctgaacgatgggcatatcgacgcggctatctgtagtcagatattgccgggggccggcattacccaccaaaggctgatgagcgagcaatactgttgcctggtcgatgacgctcatccacgtattggcacgcagatgaacatgcagcaatttctcgccgaaccccatgcaattgtcacccgaacatccggccatggcatggtagaagacgtcctgaaaaaaatggccgtcgagcgccgagtgcggctacgcatcccacatttttcggtactgccaaagatcatccccgggactgagatgatcactatcttgccctatcgcattgcctggagcttttgcgaatttccaggagataagccattgaaagtcgtcgatctacctttcgaggtaccatctttcgaagtgaccctgcactggcattcgcgaagtgaaaaatccacttcgctgaagtggttctgcgagcagattgaggctgcacttggtgagccttaa

SEQ ID NO: 192125 - DNA, 1590 bp, Klebsiella oxytoca
atgaaaacaattcactccgctgcatatgcgctactgcgccgccacggcatgaccaccatctttggcaaccccggctccaacgaactgccgttcctgaagagcttcccggaagactttcagtacgtactcggccttcacgaaggtgcggtggtgggcatggccgacggttatgcgctggccagcggcaagccggcgttcgtcaacctgcatgctgcggcaggcacggggaacggtatgggcgcgctgaccaactcctggtactcgcacagccccctggtgatcaccgcgggtcagcaagtgcgaccgatgatcggggtagaggccatgctggccaacgtagatgctacgcaactgcccaagccgttggtgaagtggagctacgaaccagccaacgcccaggacgtaccgcgtgccctgagccaggcgatccagtatgcgaacaccacgccgaaagcaccggtgtacctgtcgattccttacgatgactgggatcagccttcgggacccggcgtcgagcacctgatcgagcgcgacgtgcagacggcaggtacgccagacgctcggcaactgcaggtgctggtccagcaagtgcaagacgcacgcaatccggtgctggtactgggccccgatgtcgatgcgacgctgtccaacgaccacgcagtggccctggctgacaagctgcgcatgcccgtctggatcgccccgtcggcgtcgcgctgcccgttccctacccgtcaccccagcttccggggcgtgctgccagcggctatcgctggcatcagcaagaccctgcaaggccatgacctgatcatcgtggtgggtgcgccggtgttccgttatcaccagtttgcccccggtgattacctgccggtcggggcgcaactgctgcacatcacctccgatccgctagaggctgcacgagcacccatgggtcatgcgctggtcggcgacatcaaggaaaccctgcgcgtgctggccgaagaagtcgtccagcagtcccggccgtatccagaagcactcgctgcgcctgagtgtgtcaccgacgagccgcaccacctgcacccggaaacgctgttcgatgtactcgatgcagtcgccccgcacgatgccatctatgtcaaggaatcaacctcgacaaccacggcattctggcagcgcatgaacctgcgtcatccaggcagctattacttcccggcagcgggtggcctgggcttcggcctgccggccgccgttggcgtgcagctcgcccaaccgcagcgccgagttgtcgcactgatcggtgatggctctgccaactacggcatcaccgcgctctggacggccgcgcaataccgggtacccgtggtgttcatcatcctcaagaacggcacctacggtgccctgcgctggtttgccggggtgctcaaggccgaggactcccctggccttgacgttcccggcctggacttctgtgccattgccaaaggctatggggtcaaggccgtacacaccgatacccgggacagcttcaaggcggcactacgaactgcgctggacgccaatgaacccaccgtcatcgaggtgccgaccctgaccatccagcctcactga

SEQ ID NO: 192126 - DNA, 1335 bp, Klebsiella oxytoca
atgactcaacgacgtgccttggatgtcgcgggctccgctccgcttggaaaactccactataccctacttttctggtgttccttcatcatgctgttcgatggctatgacctggtcatctacggctctgtcgtgccgcaattgatggagcattgggcattgactccggtcattgccggctggatgggcagtgccgcgctgttcggcatgatgttcggcgctgtcgtcatcggcccgctggctgatcgcctgggacggcgcaaagttattctcagcgccatgacgctggccagtgtttgcacgctgggtaccgcgtgggcctgggatgcggagagtttcgcaactctgcgtttcgtcaccggcgtcgggctggggggggcgatccccaacatcgtcgcgttgatgaatgatctgacaccgaaagcacgtcgcagccgaatgaccactatcatgctcagcttctactcgatcggggcaattttttctgctctggtagccatgtttatcattcctcgctttggatgggaggcaacgtttctggtgggcggcatcccgctgctgttcctgccgtggatgtaccgccagctgcccgagtcgctgaacttcctgctgaaaaaggacaaggccgcggccagtgcgctgctcaaacgcatcgatcccgccgtcgacgctgaccaggtacgtttcgatgcgcccgtacgcacttcgagcgcggcaccgttgtcgcgtctgttcaccgaaggacgtggcgtgggtacgatgttcctgtggctggggtttggcatgtgcatgctgatggtctatgggctcaatacttggctaccgaagatcatggtcgccggtggcttcccgctgggttcgagcctgatgttcctggtgaccttgaacattggcgccaccttcggcgccctgggtggtggctggctcgccgatcgctggggctgcaagcccacgttgatactgttctttctgctggcggtgatctcactctgcacgctgggtatcaagcctggcccgctgttgctcaacgctatgttgctgatcgccggtgccaccaccatcggcaccctggccgtcatccacgccttcgctgcacagcagtacccgagcgagatccgtgcgacgggcgtgagttggtgttcggcaattggccgtttcggggccgtggctggcccggcaatgggcggcctgatgctgagcataaacctgccactgcagatcaatttcattctctgcgcggtccccggattggtggcgattttcgccattgccatgatcaaaagaagggccgttgccagcgtgggcttgaatgcccagccggcagacacccatcactga

SEQ ID NO: 192127 - DNA, 1479 bp, Klebsiella oxytoca
gtgagtcaagtcaatcacacgccgtatcgcgatcttcacatgctgccgattgccggcgcatggcgtgaaggcagtgcgccgcaatcactgcaggtcagcgatccgtacaacggagaaaccctgctgcagatcaagcaggctacccgcgatgacctggacgaagcctatcaggccgcgcagcgcgcccaggtcgagtgggcgatgataggaccggggcagcgctcggccattctgcaccgtgcggtgcagatcttcgatgagcgtcgcgaggagatcatcggctggatcatccgcgagtcgggcagtacccgcatcaaggcgcaaatcgagtggggcgctgcgcgcagcatcaccctggagtcagcctcttttccggcgcgggtgcacgggcgcattctgccgtccaacgtcccaggcaaggaaaatcgcgtttaccgagagcctctgggtgtggtgggggtgatcagcccatggaacttcccgctccacctcacccagcgttcggtggcaccggcattggccctgggcaatgccgtggtgatcaagcccgcgagcgatacccccgtgacgggcggcctgctggccgcgcgcatcttcgaggaagccggcgttccggcaggcgtgattagcgtgctggtcggctctggtgccgagattggtgatgcgttcgtcgagcatccggtacccaaattcatctccttcacgggctcgacccctgtgggcgccaacattggccgtatcgccagcggtggcaagcacctcaagcacgtggcactggagctgggcggcaacagcccgttcgtggtgctggccgatgccgacctggagcaggcggtagcagcggcggtgatgggcaagttcctgcaccaggggcagatctgcatggcgatcaaccgcatcatcgtcgaggacgcactgtatgaccgcttcgtcgagcgctatgccgaaagggtcaaggcgttgaaggtgggcgaccccagcgagccggataccgtggtcgggcctatcatcaaccgcaagcaactggacacgttgctgagcaaggtagcgcgggccagggaggagggtgcccgtccagtcgtcgaaggtgacgtgcgtgggcaactgctgccgcctcacgtgttcgccgatgtgacggaagaaatggagatcacccgcgacgaaattttcggcccgctggtcggcattcagcgcgcgcgagatgaggcccacgcgctggcgcttgcgaacgacagcgagttcgggctatctagcgccgtgttcaccgccgacctggagcgcggcgcgcgtttcgcgcgtcgaatcaaggctggcatgacccatgtgaacgacattccggtcaacgacgaggcacacgctccctttggcggtgagaagaactcggggctggggcgtttcaacggtgagtgggcaatcgaggaattcaccaccgatcactggatcagcgtgcagatgacaccacgcaaatacccgttctag

SEQ ID NO: 192128 - DNA, 909 bp, Klebsiella oxytoca
atgaaaattgcaatagtgggcgcaggggcgatgggcggactgtttggtgcgcgcctggccttggctggacaggacgtgtctttcgtggaggcgtcggagacgaccatcgaggtcatctctcgccagggcttgcgcctggagacgcctgacgtacaggaaagcgtcagggtgccgatctctcgtgcacaccaagtgacaggccacttcgacctgctggtgatctttaccaaggggtttcataccgccgccgccatcgagtcagtgcgccacctggtggggccgcagacttgggcgctttcggtgcagaacgggctgggcaatgccgagctcatcgcccgcgtggttccggccgagcgcatcatcgtcggcatgaccaacttgccggcagaccttgtcgcgcctggcgtggtgcacagccacggcgaagggcacatcaatatctggacaggcaatggtaaggacagcccgaccgtgcacgaaatcgcggcgaattttagccaggccggtttgccgtgcaaggccgatccgcaggtgcaggtgtcgatctgggagaaggtggcgttcaacgcagcgctcaattcggtttgcgcggtgacccgccggaccgtgggcgcggtcggccacgctgaagagggacggcaggtgacctcccgcatcgtcagcgaaaccgtggcggttgcacaggctgctggcgttgatgctgatcagcggcgggttatcgctgctgtcgactatgcctttcgcaatcaccagcagcacaaaccgtcgatgctgcaggatgtcgaggcaggtcgcaaaaccgagatcgatttcatcaatggcgcggtggtcgagcgtggcaagcgcctgggcgtcgccacgccagtgctggagatgctgttcagcctggtgaagttgagcgaaggctag

SEQ ID NO: 192129 - DNA, 159 bp, Klebsiella oxytoca
atgaccgaagccaagcgcaatcttatctacacctcgatgacggttggccaggtcgccgacagcctggggttcgtcgagcaggcttacttctcacggttcttcaagcgcacaacggacctgaccctgaaggcgtttcgccttcagcgccgggaaatctag

SEQ ID NO: 192130 - DNA, 123 bp, Klebsiella oxytoca
atgcttttgctcagtcccgattcagtatgcagggtgaataaaattaaaggcgacggaccgcagggggcgaataacctgctggaggctaatgactggcagcagccacagattgtgcaaccgtga

SEQ ID NO: 192131 - DNA, 354 bp, Klebsiella oxytoca
atgaaagacttaatggaattagtcataataaataatcgtaataaatcccctgacccgatgcctgttgatgaaatctctcacctgcgcgtcagaaaataccgtgccccgcaaaatgaagaaacggttgagctaccggaaagtttaaaagccttactggcttacgatcgacagcttattagcccacatgatcagccggtcattgaatggttgcaaaaaaacattgatgttaatggtattctgcactctgaaaatctggacgaggacgtgtactaccgcaacggtctggatatgaccggaaaatcaagtgaggagctaagtcctcggtggaataacgatccagtcttccggctttga

SEQ ID NO: 192132 - DNA, 282 bp, Klebsiella oxytoca
ttgattcccatcaaccatattggtgaccagggcgtctttatttatatcactgaacgtgatgagaacggtgaatatccgattgcccgtgtggacgatcaggagctatggctttcagaatcctcgctgattgagtatttacatgggatattttcaacgcaaagagaaacgaggtcggaatgggaggcccgtaaaaaaaccaacgaaatacgtgatggcgcactgctggagctagaatttatacacaacgatctctacagaaaatttgagggttgcgctgagtaa

SEQ ID NO: 192133 - DNA, 828 bp, Klebsiella oxytoca
atggcgattgtatcaggaaataatagcgctgatagaaaaggtatcccttggttcggggggattgttggcctggcggtcggtttgacgatgctctattactggtcagagtggactcactggtggccgggcaacctccctgaggagatgtcgccgtatatgctggtcaagggcattgatttgggggaagttccgctccatgcatacggcaagctgctcctgttcggctttcttctggtattcctttttcccggctacggcaagcttcccattgccgcatggatgctccataaccagccatcgggcggaacgttttttaactggatactgcgcgcctggggggtcaaatgcggtgttctggtccttgtcttctgcaatctgttctttttgcgctatgtcccttccacagcgctaagtttatatagttttattcttcaacacgtgagtatcctggcatctgttgtattaggagggctgctggtaggcgatgcctgccgactggcgcgatctgctgatgcgccattgagcgatctgcgcctgctgatggtactgatattagggtttcagctccactggcccatgcaaattaccttacttaacgctcgtaatttcgactctctgcctgcgggatgggctttcaccgccgcgctgatgatcggcgttttgctggcttttttactgactgccatactggcatggggggtgtgcaggatgttgggcgatgaaaattgccgggcctggcgtgggcagttcgcactgtttaatggaatgattattttgtgcgtaacggggaaaggggtgtttggcctggtgtcgtattacctgaaataa

SEQ ID NO: 192134 - DNA, 828 bp, Klebsiella oxytoca
atgaccgttaatcaatccccaacctcagggtacacactggttctatccgcagcggcagggctgctggtcggcttatcaatcatcttcttttggcccgagctggcgagctggtggcctgccgagctcccccgcatatatacggctctgtataatcttattgggctgggacaaacgagtgtagaaagcgttccggttgctgtttacggccagctgctgattgccggttttatactggcttttttgcaccccgggtacagtaagatgcccattgttgcgtggatgttgcataaccagccgtcgcgcagagatttcttcagctggatagttcgtagctggatcctgcagtgcggtttcctgatgactctgttctggcaagtcgggtttatgcgttatctccagggcgatacgctgctgcgtttcgtctcagttttcaattacatctgctattttgccacgctggtactggggctgacgctggttcgcgatgcctggcggctggtgaaaacgccagaaatcccggtgagcaatctgcgactgccgctcattttcgcgctagggttctatttaccgtttcaaattgttttattgctgcacggcgcacgcgaaaacgactttgtgcagttgggatggttactgtttgcaccggcgatgctcgggattctgttgtccaggctagtgaccggcggtatcgcttgtttcattcatcatctgataggcgacgcggattgtccgaaatggcgcgcgcattctgccctgtttaacggcgcagcaatattgtgcatggcgataaataccaccgtgcggattgtagtgaatctgatgaaataa

SEQ ID NO: 192135 - DNA, 882 bp, Klebsiella oxytoca
atgacgctttatacgctggaaaatggaacgctgcggctgcaggttgcggagcagggcggcgcgatcgaaggactatggtggctgcaccagggaaaatcgatccccgtactgcgcccgggacggaaaagcggcattgcggtggaatcttcttgtttccctctcgtgccgttcggtaaccgcgtcagtgggaatcgcttttgctcaccgacgggagagcatcaactgcggcccaacgttgaatgggatagccattaccttcatggcgatggctggctgaatcgctggtgctgtgctgaacaatcccccgggcagcttaagttagagtatgttcatcgtcagggcgtgtatcactacacggcgcagcagatttttactctccacgaaggcggtattgaggttgagttggttgtcactaatgatggcgattcgctgccatttggcctcggctggcatccctatttcccgttgtcgccggaaacccgcgtgcaggcgtataccaccggatactggcttgaaaaagagcactggctaaccggagagcaccaggaaagcttgccgcaggaactggatttcaatcagccagccccgctgcccgcgcattgggtaaacaatggtttttccggatgggatggcgcggcggtaatccagcagccagattcggggtatcagcttttgatgactaccgagccgcctgcgccttgctatttcgtctttgtttccgacccggcgtttgataaggggtatgcgtttgatttcttctgctttgaaccaatgagccatgcgcctgacgatcaccatcgaccgggttttggtcagttgactatgctgtcacagggtgaaagcatgcggcaaaaaatgatactgaagattcattcttgttaa

SEQ ID NO: 192136 - DNA, 720 bp, Klebsiella oxytoca
atgaaaaaaaaagatttcgtcacccaggatctactcagcaaaatctaccagcacaatgaccccggcccccgcaagctcccgcctgaacgtcggctggcggaggagtatggcgtctcgcggtttactatccgccaggcgctggaaaaactcgccgacatcggcgtcatacgcatcgtgcagggctcggggatctggataaacgagcggatgagcaacaatccgctggtctataactccatcaccgaaaagcgcttcgatcggatgtgctatcggacaatcagcctgcataaaaagcgccccgaccgcgaggagcagcagattttcggtattacggatgaggattttatctggcaattttgccgcctgcgcttcgtcgataacgtggcgctgcagattgagatatcgcgtatgccggccgccgcctttgccgatcttagccgggaggttattgagaaatccctgcagcagtatgtgctggccaagggctatcaaatttcacatttactcaccacctatcaggcggtgagcgtcagccgggagcaggctgccctgctgggttgcaaaaagggtatcccggccatgcatattaacaatcgggggattctcaacggcgggcaggtgtatgaaatcagcgatatcatcgatatcaactactcctgtacctacgttataccgcataaccgcgacaacttaatcttccgccaggcgccctcggactag

SEQ ID NO: 192137 - DNA, 1200 bp, Klebsiella oxytoca
gtgaacgctatgctaattactgatattgagtgttttatcacccgccccgatcgtcataacctggtcacggtacgcgttaccaccgacaaaggcaccgtgggccacggctgcgcgactttccaacagcgtccgctggcggtcaaaacgatggttgatgaatatcttcagccgctgctgcttggtcgtgatgccaacaatatcgaagacctctggcagatgatgaacgtcaacgcctactggcgaaacgggccggtaatgaataacgcgatcgccggcgttgatatggcgctatgggatatcaaagcccagttggcgggaatgccgctgtatcagctctttggtggtaaatcacgtgacgctattccggcgtatacccatgccagcggcgagacgccggaagcgctgtttatcgccgttgaacgtctgctggaagagggctatcgccatatccgctgccagctcggtttttacggcggaacggcgcaggagatgcacacgccggaaaacccgacgccgggagcttattacgatcaggatgagtacatcaggaatacggtagagatgttccggctgctgcgagcgcgctacggacaccgtttccatatcctccatgacgtccacgaaaggctcttcccgcagcaggcgctgcagttggcgaagcagctcgagccctatcagccgtggtttattgaggatattttagcgccgcagcagagcgcatggctggcgcagatccgccagcaaagcgcgatcccgctcgcaatgggggagctgtttaataatccggctgaatggcatgacctgattgttaagcgacagatcgattttattcgctgccacgtttcccagattggcgggattacgccagccctgaagctggcggttctctgtcaggccttcggcgtgcgcgtggcgtggcacgggccaggcgatatgacgcctattggggttgcggtcaatacccacctgaatatctacctcagcaatgccgcaatccaggagtttataccgcgttctggcgcgaccgatacggtattccccggcgcgccggttgtcaaaaacgggtttatctatccccctaaggcggcggggattggcgtcggctttaatcagcagatggcgcaggcatatccggtggtctatcgtccgcatgaatggacgcagagccgcctgcctgacggcacgatccatacgccatag

SEQ ID NO: 192138 - DNA, 1365 bp, Klebsiella oxytoca
atggagacgcaagatgcaatcagcagaattatttttctgattggcggaaaagaaaatattaataacgtctggcactgtatgacccgattacgctttgatttaattgatgataacaaagtagaaaaagaagagattaagaaactacccggcgtgctcggcgcgcagctgcagagcgatcagttccaaatcatcatcgggccgaaagtcagtagctggtatgaacgcctgctcgcggtattaggtcccgtcggcgaagaggctgcggaaaaaccccaccagcgtaaggggctggtatcgctgtttatggataccgtatcgggcgtttttggcccgatcgtgccggccattgccggagccgggatgataaaaggcctgctggccggactgatcgcgctgaaagcggtaccgcaaaatagcgataccgtgatgataatcgaccttatcgccagcggcgtattctatttcctgccctttttccttgccgtctcggcggcaaagatttttaagaccaacgagtatctggccgtcgccgttgccgcctgcctgatgtacccgacgctgattgacgccgcgaaggcgctggcggcccatcatgatggagcggtttccgcgctgtggcttctaaacgccgtcccgatccccgtattcaactacgcctccagcgtaatcccggttattttctccgtgctggcgctgaaatatatctatgcctgggtcgatcgcattatgcccgaggtgctgaaaaccgttttcacgccgacgctggcgctgtttatcggcgcgctggcggcgctggtgattattggtccggttggcatttggcttggcaaagcgctggcgtggtttattgaaggtctgttcggcatctccgcgagttttgccggactggtggtgggtgctattcgcccggtcgcgatcctgaccggaatgcatcacgccatgacgcccattgccctgcaaaacttcagcgatcgcggttacgacatgctgatgccgatgatgtttatggccaacatgtcgatagcgggcgcgacctttgctatctggcgcgtgagtaaaaaccgccagcagcgcacggttacgctgtctgcggcaatttccgcgctgctagggatcaccgagcccgcgctgtttggcgtcttaacgcgctataaaaaagcgttcgtcgcggccactgttgccagctcgctggcctcagcctttatcgctttcttcggcgtacgactgtatggctacattctgtcgagcatttttagcctgccggcttacatcggcccctactttatctttgcgctgtcgggcgtggcgatcgccatcgtattgtcgttcaccctcaccacgctgttggtaaggcaggagcgctag

SEQ ID NO: 192139 - DNA, 1668 bp, Klebsiella oxytoca
gtgaataataaaatactggtcaccgccatctctttttatatttttctaaccgcatcaacaatggcgagcttatcgattagcaataccaatcaggtcgaacaggataaggcgcgccaaagcgcactggcgccagcacagcaggagtatcaatcatcaggtacgggatcgcggaaatatcaactcgtcttcccactggaagcaacctgccgatatatcaaccacgttgaaattctttccgctgacgacaaactgacccgtagcctactcggcaatatagccctgcaagcagaaaaaaagtgtctgggtattgaaggcatacgtctactcaccacaacattgcaaaatgaactcattgcccggggatatatcacttcccttattgatgttccttcccaatctctgaacgatggtattctgagcatcactctgacctatggttatatcggtaatataagttggactgcaggcaacagcgcgacaaccagtctgtggaacgcgatacccgccaaaaccggggatattctgcagctaactgaacttgaacaagggatggctaacttacaacgtttacccggttcatcggcgcagatgaaaatcctacccggtaaaaaaaatgcggaaagcgatattcaactcacacggcatctggcaaaaaagtggcaggtaggcgcctggctggatgatgcaggaagccgtaccagcgggcgataccaggcaggtgccgcgatttatctttatgacctgacgacgctaaatgacatcctctatgtctctgtcggcggcgatgtcgagtttaatcaacataacgatggcaatcagaataatagcctctattattcttttccttttggattttggtcactcaatctttacggttcacaaagccaatatcgtcagcagtttaatggtagatactcgaccgttgaatataaaagtaaaaatgattatgccagcgcaaccttatcacgtttactttcacatacccgcaagcaaaaaacaacaattgatgcgcgtatatcaaaaagcacatcacattattattttggcggcagcgaaatcggcgttatgcgcaaacagaatcctgcctgggatattaccgcgcaccaccaacggtactttaccaacactattttagatgccagcctgggcgtacagcgtagccttccctggcttagttccacccctacgcctgaagaaaaagcaggtctgtacagtaaactttcgcgcattatccacgccgatcttcaagctttaatgaagtttgaatcaacgggggataaattcagctatgcgccgcatattaatatccaggtcagccccgatatcttgtccgcagataatcaattcaatattggtaatcgttggacagtacgtggctttgacggtgaaagaacgctttcaggaaaccagggctggtactggcgcaatgattttatttgggatatgccaactccggatcggcagctctacttaggcctggatattggccgcattacaggaaccgagcagtacgaaaatggcaaagtcatctctggcgccactgccggagtgcgcggaagcatcattgccactcagtatgatttattcataggaacgccgctggcaaaaccaaacggttttcataccgatcctgtcagcatgggattttctttacaatggaggtattaa

SEQ ID NO: 192140 - DNA, 1788 bp, Klebsiella oxytoca
atgtttaaattcaaattatcctatgttgcactagcagcagctttaagctcaagctttgtttatgccgacccgaatagttatacccatctatcaggtgccaaggttattgatattgaaaaacccaatgccgccggtgtctcacataatatgtatcgtgagtttaatgttgatagtaatggcgtcgttcttaacaatagcgccagcgatctcacccacgcgacgttgggcaatattgcgaaaaataacaatcttactaacggtagcgcttctgttattcttaatgaagtcacctcaaaccgcgcaagctcgctgaacggatttattgaagtggcgggtcaaagagctgatgttgttattgctaaccccaatggtatttcctgctcaggttgtagcttcatcaacaccaataaggcggttttaacgacagggaaagtgacactttccgatactggcgctatcgccagctataacgttaccggtggtaaactgtccatcgaaaaaaacggaatgaatgccagcaatagctacgctgttctcctcgccgatgcaatagccattaacggtgcggttaatgcgaagaacgcgatagtaggcgctggaaactttacctttgataacggctcaggtgcaatgaccccggcaggtaaatctgcgacggcgctgcagaccttattccctgaatacagtatcgacattagtaatctgggcggcatcaaagccaatagcattaccatggttggcaataatttaggttttggcgtacgaaataaaggcgcgattgttgctaactctggcctctccttgactagcttaggttcactcaccaacgaaggctctatcgccagcaacggtattatcactcagatagtatctgtagggaatttaaaaaacactggtaatatatcaacaacaaatacaactgtgatcaactcgctaagttccttaaccaataatgggactatttccacgactcgtcagctgttagccaaggcgtcagggaatatcgaaaatacaggtaccttaagcggcggtgccgcgttaaacgttacggcggatggcaacctgaaaaccacttatggatccaatctgctgtcagataaccaattagtcgtgaccgcgggtggtaacattgaaaacgggggctctaccagagctacaaacactacggtaacctttggcggagacgcccttaaagtgaccggcaatatttacggttatgataccctcctcattcaggcaaaaaaaaatgatagcctgacatccggagaaatcatcaactcaggctatatagccggtgacaacgcaactgttcaaactaaaggtaccctgacgctacaaaaaaatagtcaactgcacggttcatcaacgttggtaacaaagagctaccagctaaagaatgaaggatatattggtggacataatatcaatatcgaaaatgacgttaccaacaactatggtacgattgttggccgtgataatgttttaattaaaacctataacgatctttacaatgaaggcgaaattttaagttcaacaaacatgactttggatacacaaaatcacggtaatattactaaccgttctcacataggagctggcggcactttaaccatgtcggctaaaaaagtgattaatggcggttaccgctgcggtttcctggggttggcaacctgtggcaaaggcactatatccacgactaatctgtttttaaactcatcccataaatacgccaatgaaatgggcggcactcagcagtttaaaatcgcgaccattaacaccatcaattaa

SEQ ID NO: 192141 - DNA, 378 bp, Klebsiella oxytoca
atgaatttacattcaatgacattctcggatattgttatgtcattttttacgattttgttcttttttgcttatttaatgttaatttttcagattctgacggatctttttcgtgatgatgacttgcatatttcttttaaagtagtttggatcgttttattactcttcatccctgtcatttgctcaattatttatctattggttagggggaagggaatggcggaaagacagcgatatcatcaccataaacattcttactcagggtaccccagtgtaaggaagagtattactgaacaaataattgaagctcatgagcttaaggtctcaggcattatcactgaacgtgagtatgcagaaataaaggaaaagcttctgcggtag

SEQ ID NO: 192142 - DNA, 639 bp, Klebsiella oxytoca
atgggatccttcctccagtgcttcaggagtaaagctccagttcccgtcaacacccgcaattgcggtgcccagtacggtatcaccgtcataaattgtgaccgtggcacccgcttccgccgtgccactcagggttggcgtatcatcatccgttacgctaccgctgttcagcgtgcccgtgtcttctcctgcattatcagttacctgcagatcgctaaccgggtccactatagtgtctaccgtcagctcaaacgccggcgaactttcactgacgttcccggctttgtccgttaccgtagtactcaggctgtgggtgccttcgtccagactatctggcgtgaagctccagcgtccatcctcgccggcaaccactgtgcccaacactgtgtcgccgtcatagatcgtcaccgtggctcccgcttccgccgtgccgttcagagtgggcgtcgcatcgttggtcagatccccactctgcagctggccggtgtgctctgcaacattgtcagttacctgcggaatgctggcagcgggcgcagtggtatctatcgtcagctcaaacgccggcgaacgctcgctgacgttgccggctttgtccgtcaccgtcgcgctcaggctatgagacccctcgctcagctccggtaa

SEQ ID NO: 192143 - DNA, 255 bp, Klebsiella oxytoca
atgctgacagtgattcagactccgacagtgatacggatgctgacagcgattcggatagtgattccgattctgacagtgattccgactcggattcagattcggatagtgattccgattctgacagtgattccgactcggattcagattcagatagtgattcagatgctgacagcgacgcggatagtgattctgattctgatgctgacagcgactccgatactgataccgagctacccaccgcggcacagaacatag

SEQ ID NO: 192144 - DNA, 846 bp, Klebsiella oxytoca
atggttcagttaggtaatataaaatattctgttgacattgctgatcttctcgtaagacagggagagcatcgtgccgctttgacactcctgttaattgcaatctctgcatcttcatcaaagatgttccccgaagggactgaatccattgattgccctgcagtcaagcctggcaaaacaaaccctatgggcgataaagaaaaattcattagatttttaggaccaaggcttaggattgcaatgggtttcattggtatcccagaggatggacgacacaaagaactattcgagttttcagcagaattcccaagacctgaagaatatatatataaagaatgtcgttgcccacaaattcatgaagctggtttaccagacgctatcaggttcgtagctaataatgaaacagacttgggaccattatcaatcacattagacctaaaggaaggtttctctttcaattcaggttttttatcgcttttgaggtggagtgtagttgaagctccaattaatggtgttgaatttggtaagaaacatttcagagcaacttccgatgcctttgctagtgtagaggactttactgagaaaaaatcatctacactaggcgtttcaccaggaagaattactttaatattccagctgctcagtgaactgaaatcaattaactcccacctaaacgatgaagagttcaaagcttccttcattaaaaaacttgaaagcagaaaagatgctgcttttacattaagctcgacaggttcgccaataattagagatgggaaagtaacgaacactggtttaaatcttgttgacgaaatctttaagaactttaactttgtagacattgcgagctaa

SEQ ID NO: 192145 - DNA, 201 bp, Klebsiella oxytoca
atgctgtttttatatgaggtaacgccacctgaggacaataacgacagtgaggttaaaggtgcttacgaaatatctgcaatcaaaaaggagggttttatagcctcttttgattttgaaaaagcggaagaggccagccaggcagtggatgcctggctggcttcacaaggtgtttcaggaagttatatagttaatctcacgtaa

SEQ ID NO: 192146 - DNA, 630 bp, Klebsiella oxytoca
atgcgttatggcgacagcctgaatgcggggctattccgtcttagcggcaccgaaggggcgcctgtcacattagaccctgccaccaatatgaccttcagtttaaccgggggcatgacggcaacatatggcggcattgatccggatgatggtctggtagttgttaatctgactgcaaccgccgaaacggacacgctggaaatccgtaaccaggcattgctgacgccggtaaatcgctttaatcaactgttttctgcattgtccatgaaaatgagtgccattactgctggcgctgtgacgctgtcaaccaaactgtattactacggcaagccaacctttaccacgctactggtgagtagcgcctatcagacgtcaagggcgtttaattacctgggctccgctatcggtgcaaccaggaatatcagcgagctactgactgctgaaggcacacctttaacaacagagaaatatgttggtgtgcagacttactgtgaagtgagctatcagtatgcactcgggacactgaaggcgtcgccggctattcgcgtctcaggatacgtggggacgatgcagattaagttgccggtttactggttgcctaaagggaccgaagctatctccacatctgattaa

SEQ ID NO: 192147 - DNA, 312 bp, Klebsiella oxytoca
atgtccaccatagaagagttaagtacccagttaaccgactccggcgtgaatgcggcagagtggttacagcttatgcacgcgatcgttcatgatgacgacagcgacattcgcgacgccggaacgcttatgctccaggcattacaggagaaagcgcgcggctggttaacccatgacgacctggttctgcttctacaagggcagcgcgatattgcccgcattcgcgccaataacgcgcatatcgccatgcagaggcatcttcagtccacgctgcttcgtctgcttgatatgacgctactggcgctgctgggttga

SEQ ID NO: 192148 - DNA, 411 bp, Klebsiella oxytoca
atgtatttacagcccggagtttatcgcctggccctcgccgcagcgttgtttttgatagccgcctgcagctgggtagacggctacagcagcacggctcatcagcaactgctgatgctggaacagcttcatctgcagttcatcagcgatgcggccgccgcgccggtcaaccgacaattactcaggcaagaggatcgccagattcgtcagcaatttagcctggcgttaagcgatagcgatgcgctacggcagaataatctgctcgtgctggagaaaaattatcagcggctgtaccggcacgtagccagccaggatactgcgctaacgcccttcgaggccgggattctgacgcaacaaacggaaaatctttaccagcaggccatcagcggcgaacagcggcgttcaggaaggtga

SEQ ID NO: 192149 - DNA, 390 bp, Klebsiella oxytoca
atgaaatggactattcataatacgcttgtgtgcccgtattccggcgtggctttctcttcgatttccagcctgcgttttttaaaatttattctttggtatgaagctgacattttgttgctgccgggagagtcgatgaagctctattcgtctggcgtgttaattaacgagcagtatcacgcgataagggtttataacgttacgcgatacgacgagacgcaatgggataaattacgtgagcggccctcctgtccctaccagtctaccgccacggcggcggcgtcctgtgcttaccaggcgcactgcgcgataaagcgctgcccgaacgatttttctcgcggagcgccagagcaggcttccggacggcgcgacgtcggtcagcggatgcgctaa

SEQ ID NO: 192150 - DNA, 567 bp, Klebsiella oxytoca
atgatggaaggaaataattgccggtcattaatgaaatcgcgcttgttattcattattagcattgggtttgtatctattttcgcaagacctgccggggcctatgatgcgaatagtactgttaatttcaatgtcaccggtaagattgaagagcccgtatgcgaggtgtcgataaagccctccagtactatcgatctgggaacggtgtcctatcaaagtctgagcggaaaaccaggtgcgagtagcgctgcgaagatcgttgccattgcctttgataattgctctctcggtacggcttccgtaacgctaacgtttagcggtacctcatttagcagtacctataccgatatttatgagagtgagaacatttatggcgctaaggacgtcgggcttcagctgttaagcgcgggggatcaaaaggtcctggggccaaatgacagctatacctatgctttcatagagggttctgagcatgtttttaatatgaacgccagaatgtatacgccgaatggacgagctacgaggggaagtgtcgcttatacggtcacttttaatgtggcctataggtga

SEQ ID NO: 192151 - DNA, 1098 bp, Klebsiella oxytoca
atgaagacgtttattttattattgctgacctgtttgttaccggcttacagctgggcatgtcaatctgccgcaaatttgggtgatatcgcgttgaccaatttacccccgcagatactggttaatgccggaagctattcggcgggcaccattctgtatgattccgggcagctcactcatccagatacatctgttacagattgtcgcgggtggttatatgcacagtttgtatggaattcggagaatgcgggcacgttagttggcgataatatctactcaacttcagtacagggcgtcggtatcagagttaaagtctggttaaacatcacgggtgaatatgctggtgataaagatgattttaatgctgactacaatgttcactatatcggtgatgcggacctgtatctgggaaaaccaaacggctatggcgatgacaaggcgagcacacattatgcgccgacgtaccaggtgcagcttgtcgctacgggagggactatcgccagtaatagcacgctgacgctagccgatccgatttccagggtttcgattctcgaccttgacggaacgatggttctttcgcagctgcacgtgacgggttcgacaaaaattcagctaaccccgatggggtgcacggtaggttcgaccgccctcaatttccccatgggctcaatcagcacaaacgtctttaatctctcgaacaaggctggttttgctgagcaaacgcttatcttgtcctgtgaacccggtacaagagtaacgatgcgtattaacgcgactgaaacagatggcgatagcccggacaatagcgtgatagcgctcacccctggtaacaacgtggcgaccggcgttggcgtccaattgaatattgacggcgctccgttatccctgaataccaactaccgggtctatccttacaacagaacaacggtaactaatcccggcgcggatgccagctatctgatattcaccgatcccgataaccccggcggggcggcggcatccaatgcgttgacgtttacgacgaactattacaaaaccggatcgaaagtaacaccaggaaatgcaaatgcaagtggcacgataacctttatttatcaataa

SEQ ID NO: 192152 - DNA, 414 bp, Klebsiella oxytoca
gtgaccacaacacgacgagttctacatcatgccggctggtttgccggctttgggccgtttataccgctgccgatacttctttttttccctaagggaagctcgtttttcagcatcttcaggcatcttccggagatcgtatctcttacctggattgtcggctttctgcccgcattgttaaccggtatttttatggccgttctgtctggtaacgtttatcgccactggttttggcgtttattaacagggggaatcgcggccgttgtgataacggccatctgctgcggcacaatcggcgcctttatgccgatgtttttctatttaatcccgctgttacttctctcggcgctgctgtccggcatgattatggggctgataattccccgacttccgccgcgggtcgcgccgcatcaataa

SEQ ID NO: 192153 - DNA, 213 bp, Klebsiella oxytoca
atgccgccgcgggcttcccccggcggcattttttatgtcctgactgactacagacgtgatgtcgttcgcgaaatgcgtatgcccggtaaggtattagccgccaccgggcgttgcggcggcgagggcttagctatgcgtcagaaagcgcgccagccgctgctgcaggatttgattttcacggctcaggcgcgcgttctcgtccagcagcgttaa

SEQ ID NO: 192154 - DNA, 636 bp, Klebsiella oxytoca
atgatgaataatttacagcgtttcgaaagtctcggtgataattgtgagtttgctttctttctaagagagtcaggttatgatgaaggcagcttatttcgttggactttaataaaaaactatcatgcacttctaaagttaatcgaatctgattttgctgatttgtatgtttatgaaaatctgacgccctcctggcaggatatggtgcttgatcaacggcatgatatttgttttcatactgaaatgtatagcgataataaagatgatggctgggtctggcgttataccgaagaggaaaatgatcttatttatacgagggaaatggataagattaattacttgataaataaatttaagaacagccttgctgatgagaataaaatttttgtcgtaaaaagcaatggcaataaccttgatgatgttgtactggctttagcaaacgagttcaagaagcacggcaacagtaaaatactctatgttaaaagcgatgcgggaaattcaacgccaggtgaaataacgaaattaacggataatctctttgttggggccattgatagattcgccgactatagtcgtgcaaatgaatactcacgtgaaggctggcaggcaataattgataatgctgtaaaggttatgtga

SEQ ID NO: 192155 - DNA, 396 bp, Klebsiella oxytoca
atgcccgttcccgcgcctgtacaccggcagatcgccggtgtcattcagcgcccccggaaacccttccagccacagcttcatcttctgccggttgacgggaaccacgctcagcccctcggcgcagccgtacaactcgcgggtgttctggctgtgatgatgatgcagttcggtgtcacccggatccggatcggcatcctgtcagtcaattcaggcagtagaacttgtagcagatggtggaatgcggaatgtccgaatcaggacttgagcccgctatgtggcaaggagaaagagcagaaccggctggcggtggcgcagaagacaggtgaaatcgggcgccagatgagtgatgtgctggtgacgcagggtaagctgaacgcgcaggcggtgcagcgctga

SEQ ID NO: 192156 - DNA, 288 bp, Klebsiella oxytoca
atggaaacgccgtcctcaaccagtaattcattatatataaatgatattttatattcggaagaggataggaaaatcattttgtattttaactgtattgataataaagaaattttctcagcagaagtgaaaaaagttggggagataaaggtggtcagttctgacgagttgcacttgttcttaatgaagtttatgcctcatgaatcttcaatttttaataagttgcataaaataatatgggattacattgaaggcagggaagtaaccttcccgatccagttagttccctga

SEQ ID NO: 192157 - DNA, 462 bp, Klebsiella oxytoca
atgtcgggggtaccggagctggcgcattttctgaaatcaaccgagggcaacccggcggtcaacaccattgcgcacgcgatactgggcggcgcggttgcggcgctgcaggggaacagtgcggcagcgagtgcggccggagcggcgacgggtgagcttgcggcgcgtgccattatggcggcgatgtacccgggtaaagcggtcagtgacctgagcgaggagcagaagcagacggtcagtacgctggcaacgatatcggcggggatggccggagggatagcgggagacagtacggcttcagcagctgcgggggcgcagggcgggaagaatgcggaggaatcaaatgcacttagcccgaatgacttcggtaaaggtcttgctgattcggcccagtcggcaacatcctgggttaaatatgctcaggacaataatctttcaccgggaaaggaaccagttataaaatga

SEQ ID NO: 192158 - DNA, 384 bp, Klebsiella oxytoca
atgaattttaaaatgagttggacactggacgaaacaggtggcaataagcagatcccaaattgggatatggtattaaatcagtttaaacaaattcaggggaaaaaaggaacccttactcttgatatactgaacaatggcgatgatagcgctgaaatgcttcaggtcagagcggagaatggttattacttgataacattaggtgaaattgtcgaggatgaataccaagtaagaacgtactgggattcgtctaaacctgatacaggagtgttgattcttggagattactggccggaatctcagcttactgaagactgtgaatttgttgtaaagatcttaaaagagttttttgatactggcaacgtatcaaaagaacttcttaattga

SEQ ID NO: 192159 - DNA, 891 bp, Klebsiella oxytoca
gtgtctgataagactgagcttgagatagcgaaacagacacttaaaaacagtaaagatccggcagagcgcgagaaagcgcagcagaaatatgacgcgctgcgtgagaaggatatcgccagtgataaggaagttgttgatgcctgcggtaatggtaatgcgggaagttcagcgtgtgcaggtgcaaggctgaaagtcattgcgtcaaaagaggggtatgaagatggcccttataactcgaaatatagccaacagtatgctgatgcgtatgggcagatagtcaatctccttgatatcaccagcgttgatgcacagaatcagcagcaggtgaaagacgccatgattaactatttcatggtcaccaaaggagttgatcatcagaccgctgaaagctacaccgaaacgaagcagggtctggagatcattgcggcttcggtaacaccaattttgggttctgctgcagcaaaacaattaagtaaaatcgttgatgctagtcttaaggtcgtggcgaaaggtaatgttgatggagctaagttcattgatactaatcagggggcaaggccttccaacttagcagatgtgaataagccaacactcattgatggacgaatccaggctaaaatagataagcaaaacaagcctcttcctaacggtaatatggctacagctcatgctgaagtaggggtgatacagcaagcttttgaaaaagaaatgtctcaaggtcgtgagatgacaatgagtgtatctaaagagcctgtatgtggttattgccgcggtgatatagcagctatggctgataaagcggggctaaaatctttaacaatttatgaagaagctacaggatcagtcctctactggcagcctggcatgaaatctctcaaggttagggattaa

SEQ ID NO: 192160 - DNA, 435 bp, Klebsiella oxytoca
gtggcgcaggcggtaacgtcggcgatgcagggtctggcgggcggcaacctggcgcaagcggcgagcggggcagtgagtccgtatgtggcggaaatcattcacagccagacgacggacagcgcgacgggtaaggtgaatgtggaagccaatgcgatggcgcacgcggtgtggggagcgatagcggcggcatcgggaaataacagcgcgctggcgggggccgcgggtgcagtgagcggcgagctgctgggccgctggatagcggtggaatattatccggatgttaagacagaagagctgtcggatgagcagaagtcgacgataagcgcgctgagcacgctggcggcgggactgatggggggcttagcggaggcagcagcggggatgcagttgcgggggcgcaggccgggaagaacgcggttgagaataactatctga

SEQ ID NO: 192161 - DNA, 252 bp, Klebsiella oxytoca
atgaatacaaaatcttttttcttcatttttttctatctgttttttgcttgcaatgtagcaatgatcgtattgtttttacttttatatgttctcattagaggttatctcttattgatgtaccacatcccatttgagctggcttggagtgatttagggaagtataccaaagctgcatgtttcacagggtcattaatagctactggttgttggtggatttattatcagcattcaaaaaaaggtagatacaagtga

SEQ ID NO: 192162 - DNA, 2073 bp, Klebsiella oxytoca
atggtacaagatccgcaatcactagcccctttcttcaggcaattcgctctggacaataacaaaaaaaacgccgagtgggggcctggatatcgggaactttttggtcgagttcagcgtgaaaacccagatttcaccgatcaaactatcatggatctttggtatacacgcgacaacagggttgccagtctgcgacaaggcgggatgtcccatgaagaattccttcaaactaaagatgatctccgtgctctcaccagactcattgcctctggttgtacacttgaggtttttgaactggcgcatcaacgcttacagtctcttaaagagcaaggaaagctgaagaagttttaccgagcattgtgcagccgtacctttgcagccttctatccctcgcaaataaccagcattatcaatgagggggccttcttccgtgtttataactactgcaacaaccgcttccaactgaatttgcctaaagatggtgaatggtctccatcaaaatggttcaagcttaatctggcccttaaagaaacatttcatcgttacgttagtaacgaaccagaagatattgaactcaatatgtgcctctggcatctttatgaatctgaaattgaagaagatagtaatagctcagagaacatagaatcttctatctcaagcgatgatgatcgcggtgatgaaccgaacgacatccttcctgccaaaaacctcattctctacggtccaccgggcaccggaaagacttacaaaaccatcgaaattgccgtacgtgcttgtgagccacaagcctatgctcgccttgaaggaaaagaaaaaatcgaacgtcgtgctgagattaaaagcatgtatgacgcacttatcgccgaaaaacgtatacgcttcatcacgttccatcaaagttttggctacgaggagttcattgagggacttagagccgaaaccagtgatgatggcaatgttcgctatgatataaaacccggtgtctttaaacaaatttgcgaagatgctgctttcggtaacgcgggggcgcaattagcgcttgatgatgctatagagaagttcaaaacgcagtgtacggaaaaagacgtcattgttttaaagacgaccaacggtagtgattttagagtcacatacgccaataacaatacttttcgagtatttccttcgcaatcgaaaaatgaacaactggataaaggatatccggcatcgattgaaaatattcgtcgcctttatcagggggagaaagaaaatatttataatatttcctatgtccgcggtattcttcagtatttgatcaaagaatggcatctcccagaaacaccaggaaagcaacagataaagaaaaaacaaaattacgtcttgatcattgatgaaattaatcgtggcaatatttcaaaaatatttggcgagctcattacgttgattgaaacctcaaaacgcgcaggagaaagtgaagcactaagcgtgagccttccttactcatcgcagccattttcagtccctggtaatctttacatcataggtactatgaacaccgcggatcgttcgctgactgccttagataccgccctacgccgccgtttcgaatttcaacctctcatgcctgacgtatcgcttctaagcgatacattcatccatggcgttgatcttaaaaaattactcactacgctgaatgcacgaattcaggcactttatgacagcgaacacactctcggacacgctttttttatgccggttgtacaagagaaagataacccagctgaagcgcttaagaaattaaaacgagtgatgaagaataaaatactcccactgctggaggaatatttttataacgactggcagaaaattcgcctggtgcttggggataatcaaaaaaaagatgaatcgctacattttgttcgttcagtagaaaatcagagcgatctggcaacgcttttcgggcaaaccgctcttgatgatcttcaggaagccggtattagctatcagttatgcaaggatgacgatcaggtctgggataatccgttggcatatcaacaaatctacgctcccaatacaactacaacggtacaaagctaa

SEQ ID NO: 192163 - DNA, 942 bp, Klebsiella oxytoca
atggatattttcatccaacagtttgtcacgagcatggagactatcgttcgcaggggattaaaatatgattacttgcgtcaacgggacaaccttccatggttgagaggtaaactgttaactagcgaacaactcaaaaaaaatagcgttcatcgcgatcgcttctatgtcgaatatgacgagtatcgtatcgaacgaccagaaaaccgattgttaaaaaccgccattgataaagtttacggttacacaactaatccattgcttctgcaggctctaaaccgcctgcaggaactatttgataccatacctaaagtcgataatgttgatatcgccttcaggcaggttcatctggatcgtcatatgcagtattacgaatcaccactaaattgggcaaagctgattctgcaaggcaactcgccgcattgtatgcaaggccatgcagaagccatatctcttttgtttcccatggaagcggtatttgaagcttttgtcaccgcctggctacgccagtactgtcatactcactggcaggtgaagccgcaatcaaaatcacattatcttgctcagtatggcacctcacccatgtttcaacttcgaccagatatctggcttatcccccgcaaccgaccagagcagtcatccgtcatttgcgacatgaaatggaagctgatcgatacgaacaacaataagttcaaccttacacagagtgatttgtatcaaatgctggcctatggtgtgaaccacatgcagggctcaggggacatgcttttaatttatccacgccatgaaggattcctggcccccctcgaacacccttttgaattcaatcattcagggggaaaaacgctacgcctgtgggttgtgccattcgaagctggaaccagcctgcaaacctcaagattactcatgccagcaaagtttagcctgacagactgcggaacttaa

SEQ ID NO: 192164 - DNA, 1368 bp, Klebsiella oxytoca
atggggagtaagtggaaaacatcatttttaaccgatcattacatcattagctctggactttccaaaccagctaaagactttggtactggctatccatttttatctttcaaagatattttctataattattttctacctgattcactaacacagttagtacaaagtacagacaaagaaagagccgcttgttcagtaaaacgcggcgatgtttttcttactcgtacaagcgaaacgatgcatgaattaggcatgagttctgtagctttgaaagattatggcgatgccacgttcaatggtttttgcaaaagattacgcccaaaggaagaatctgaattagaaccagagtatgttggctattatttgcgaagccctttgtttagacaaaacatgcttgccttttcgacaatgtcaacgcgagccagtcttaataatgagatgattagccgactagaaataaattatccaggtcgaaaaatacaaaaaaaaatagctcatattttgctttctttcgataaaaaaatagcaatatcaaaagcaactaaccaaaccctggaacaaatgtcccaaaccctattcaaatcctggtttgtggatttcgatccggtgattgataacgcgctggatgcgggaaactcaatcccggaagcgctgcaatctcgcgccgaactgcgtcaaaaagtacgcaacagcgcagatttcaaaccacttccggcggatcttcgtgcattgttcccggctgaatttgaagaaacagagctgggctgggtaccgaaaggttggatactttccgatctaggaaaagaattcaacattacaatgggacaatcaccatcaggttctacatacaacgaagacggaataggacttccctttttccaagggaaaacggactttggattcagattcccatccaaacgtatttactgtactgaacctaaacggctggcaaaaagatttgatactctgctaagtgtcagagcacctgttggcgttgtaaatcaggcctcaacagaatgtataatcggcaggggcttagctgcattaagacataaatcaggaaatatcgcttttacatattattccgtaagtaatttgtctgattatttttccatttttaatggtgaaggtactgtttttggcagcataaatcaaaaagatttaaagcagcttccccaaatttgccctccagaaaaactgattaacaaatttgaagaattttcagggaaatgggaaacaatgatttctgttcattgcaatgaaattgaaagtctttctaacctccgcgacaccctgctccccaaacttatctccggcgagctgtccctggaggatctgccagatttagtaacccaaaccgaacccgcataa

SEQ ID NO: 192165 - DNA, 222 bp, Klebsiella oxytoca
atgatgaccacattaatcgcacctctttccgaccggttcgccgcgcagcaggattcacgcgccggttggccttgcccccccattcctccctttcctgaagagacgatacttcgccacgcggaggagaagcgcgcaccactcagcctatggaacaaagcgagtcgcatatggacaaaatcaaacgacgttgggttggatacgttattggtttactggtggtga

SEQ ID NO: 192166 - DNA, 309 bp, Klebsiella oxytoca
atgcagaaatcaccaaactggtttgtgaagaatataaagctaatcgtcaccgttattgcgctttatccctggttactcgttctgctgatgatgatgggcagcggcggcgcttccggaagcgccctgggagccgggctgttcattttctttgttttcattgtcctgtctatcattaaccttgtgatttcaaccgtgattatcgtggtggttaatgtctcaacgcctccgatccccaaaggctcggcaaagtattttctcgccatgaattccatctcgctgctatggctgatgcttttactggtgtcctaa

SEQ ID NO: 192167 - DNA, 156 bp, Klebsiella oxytoca
gtgattgaacgtaccgaaggttacgttcatagcactgaagaaagcgacgattttattaagcagtttcatgatctcttcctggatagcgattacgtttttgatgaattcttttttgtgatttacatcacaaaaacaagtctacgcttcatcttttaa

SEQ ID NO: 192168 - DNA, 2172 bp, Klebsiella oxytoca
atgaaaaacaaaatacctttggcattaaccctttgcagtacgatgatcgcgctaccgctgcaggccaacggaggccatcagtggcgggcaatcgcctttgggcaatccaccgacagcaatttttcctcgaatgttctgcctgaaaagattggcgtcaatgatgtcactatcgccggtaaaaaactgacgccgcaggattccgccgatctcagccagcccattaccatcgagagccggggaggtaaaattgccaacgcccacgacggactgaccttcttttatacccaactcccaaccagtcagaattttatcctgcaggctacggtgaccgtcaatcagtttggcccggaaaatggcgcgcgtcctgcggcgcaggaaggcgctggactgctggtccgcgacgtcattggcaacccacgccaagagcccctcaaggtcggctacgaagagttcccggcggcgtccaatatggtgatgaacgccattatgacccaggataaaaaagatcactcgcatattaagctgcaggctatcagccgggaagggataacccagccgtggggaaatgcgggcgcagtaatcaagcgtcaaagttacaaagagaaaatcgatattcagcaaaccccgacgtttcagcttaagctggaacgcactaacgacggatttattacctcatgggcggcaacgggcagtaatgagtgggtaagccagcgtgttcctcacgccgatctggttacccagcaggataaagaacattactacgtcggtttcttcgcctcacgtaatgccaaaataaccgtcagcaatgcttccctgacgacttccgcggcaaatacggttccctccgccccgtatgttgccaaaagctggccgccggtcatgcaaattgcctcgggaacaaaaagccaggacaaaacgtacatactacaggcgcgtaccaatagcgacgggcgcatcaccgttcgccaggatgaagtggtgatcgggcaggagaaagccgtgaaagccggtgaaatgtttacccaacctgccgttctgaaagataaaagcacattcgaagttatttttacgccggccaccagcgcaaactcgctgactcagacgctgacggtggaacagagtgccaatatcacaggcaatacgctctatgtttcacctgaggggcaaccgcaggccaaaggcacggcagagtcgccgctggatttagccaccgccgtcgaactcgttccccctggcgggcaaattatattagccgccggtaattatccgcaaactaccattccggttagcgccagcggcctgaaagacaaaattaaaaccctgaaagctggtggaaaagccgtgattcacgggctactgctggatgccggctactggcatatcaatggaatagagattacggacaagagtctgcgcatacagggtagccataacctgattgagaacgtcaccgcgtatcgtaacgatgataccggtattcaaatttcctctccggcggatgtcggacgcccgctgtgggccagctataaccgggtggtgaattctgaatcctttaataacgaagatccgggtaaaattaacgccgatggctttgcggtgaaaatgcgcgtaggggagggtaaccggctggagggctgttactcacacgataacatcgacgacggcttcgacctgttcaataagattgaggacggcgctaacggcgttgtggtgatcgagaactcaattgcccgcaataatatcagcaacggctttaagctcggtggggaagggcagccggtcgcccacgaggtccgtaacagcatcgccatcggcaatcatctggacggttttaccgacaacttcaacccgggcaagctggtagtgatcaataacgttgcggtggataaccagcgctttaactatctattccgcccaagcccatatggcgcaccggaaacgcagggtacctttagcgataacctttccctgcgcagccagccggggaaatatgacgatgccgttgtcgggaacattgatgatagtaactactttatccacggtggcagaagcatcaacgcccagggaaagagcattcacagcgccgactatcagactctgacactgccggatccgctgatgcgtgaggccgacggcagctttaacaccggtaacttccttagtcgcaactag

SEQ ID NO: 192169 - DNA, 1293 bp, Klebsiella oxytoca
atggatatttcagttacagctgcaaaacccgggcgtcgtcgctatttgacgctgataatgatctttattaccgtggtgatttgttatgttgaccgcgctaaccttgccgtggcatcggcgcatattcaggaagagtttggtattaccaaagcggaaatgggatatgtattttccgctttcgcgtggctgtatacgctttgccagattcccggcggctggttccttgaccgcgtgggctcaaggctaacctactttatcgctatttttggctggtcggtggcgacgctgcttcagggatttgccaccgggcttatgtcgttgattggcctgcgcgcaattaccgggatatttgaagcgccggcgtttccaaccaataatcgcatggtgaccagctggtttccggaacacgagcgcgcatcagccgtcggtttttacacctcaggacagtttgtcgggctggcatttctgaccccactgttaatctggattcaggaaatgctgagctggcactgggtatttatcgttaccggcgctatcgggattgtatggtcacttatttggataaaggtctatcaaccgccgcgcctgacgaaaagcatcagcaaagccgaactggattatattcgcgacggcggtggcctggtggacggcgatgcgcccgttaaaaaagaggcgcgccagccgctgaccaaagccgactggaagctggtattccatcgcaaactgataggtgtttatctgggacagtttgccgtgacctcgacactgtggttcttcctgacctggttccccaactatctgacacaggaaaaggggattacggcgctgaaagcgggctttatgaccacggttccgttccttgccgcctttgttggcgtgctgctctccggctggctggcggacaggctggtaagaaaaggcttctcgttaggcgccgcgcgtaaaaccccgattatctgcggcctgctgatctcgacctgcatcatgggcgcaaactataccaacgatccggtgtggattatggtcctgatggcgttagcgtttttcggtaacggcttcgcttcgattacctggtcgttggtctcttcgcttgcgccaatgcggcttattgggctgacgggggggatgtttaatttcgtcggcgggctgggcggtatcaccgttccgctggtagtgggctatctggctcaggactatggttttgcgcctgcgctggtttatatttccgttattgcgctggttggcgcactctcttacatcctgctggtgggggatgttaaacgagtaggctaa

SEQ ID NO: 192170 - DNA, 873 bp, Klebsiella oxytoca
atgcagcaacggcctcacttagcaaagcaaacgatcgatgagcaccagctcaataagctaaataaaacaacacagagcaaaacggataagctgtcgcatagcggtaaattggcttatatcaatgataactactgtgagattacgcgtaactacacttcattttatgggatgaacatcctgggcgtggtgcttttcttacctgttgctattttatgctttggtgctgttttattttttttctatgatgcgatatttaattatgcgcgatatgttgaaacctggcagtccagagcagacgatcaacttttaatgcatttcgcagttgttattatattttttatgacttttgttttcgcagccgtcgtaaattactttatcttcgcccctcgtcactatcccgttcgttttaatcggaaaacaggcaaggtttatgtttacgatcacgttatgtatagtattacttataaattaacttatactttctggtggtattaccctttttataagagaacaagacctgaatgcaaagagtatgactggagtcagatacaagccatcagtatatattcacgcaataagcactcatcatactccaccattcgctgtatcgtttatgactccagtattagcaccactatgatcgatgcctttaacctgatatcgaccgacgcaggtacggacgcgctattaatgcctaactacaagctgtggctatggatctgtaactatatgagtttcaacgatcggttattagacacatccgttaatacgcaagttggcatttatggccgcgaagtaaagtggcctgatgatatagataaaaaatcgaaagcgttctctttagatgagtacagaagaatctgctctgaataa

SEQ ID NO: 192171 - DNA, 750 bp, Klebsiella oxytoca
atgagcatttatgccattctgcaacaggacaaaaaagtcgtcgtcaatgaactcgccgaaaagttcggcgtcaccaaaatgaccatccgtcgcgacctgtctttctttgaaaaacaaggtattgtaaaaacaacctacggcggggcctatttgacaagcggtgccagcgtcgagcccagtttccagctcaaatcaatacagatggtcgatgacaagcatctgattggccagaaagccgccgaactggttgaggatggcgatacgattattatcgattgcggtaccacgccactggccctggcacagtttatttttgataaaaaaatcatggtgataacgaattccgttccagtagttaatctattgaaagggagaaaaaatattaaattaatcgtggcaccaggtgagtacgaggacgatacccaagggatgatctccttcagcaccgctgatttctttcgtaatatccatgccgataaggtcttcctcagtactcagggtattaacgaactgggagaactgacggtacccaaaatgaccgatgcccacgtcaagcaagcgctgatgcgtgctggaaggcaaaaaatactactggcagacagaagcaagtttggccaaacatttcttgctggccacgctcgtctggctgacctcgacctcgttatcagccagaccgacctccccaacgacaccctctctctgattaaaacgcaaaacgtacagctattgctggcagatactcactcctga

SEQ ID NO: 192172 - DNA, 2424 bp, Klebsiella oxytoca
atgaacggattactgagcttcaaacccaccaacaacgattgtgatttcaatcgtatcgccaaaaaacaagatcagatgttccaccgcgtggcgaccatttgcccggaacgcgcggagatcatcaccgaatccttcaaacgttctgagggtaaatccattgtgattcgccgggcgttagcgatggccgatattctggaaaagatgactatctatatcgaaccggacatgctgatcgtcggtaatcaggcaagcgccaattttgccgccccggtgttcccggaatactcgtttaactgggtcattgacgagctggacgagttcgataaacgttcaggcgacagctttcaggttgctgaagaaaccaaagcacgcttgcgtgtgctgcaggattattggcaggggaaaacacaccaggatgaagtgttgactaacctaccgcaaataaaccgcctggcagaaaaacagggggtactacaccgcggcggtatcagtatgtctggcgatggccatatcattccgaaccatgactttgtactggaagtcggctacggtgggatgcgtgatatcgcaaaacaacatctggcggaagaccaggacctgactgaagaacagacggatttctaccaggcggtcatcatcaccatggatgcggcgctgcattactgcaaacgcttctctctgttggcaaaagaagaggcggaaaaaaccgccgatgctaaacgccgtaacgaactactgacgatgagcgaaatgttcgctcacctgatggaaggcaaagcacaaagcttctacgaagcggtagaaaccgtctacctgactcacctgctaatgatgatcgaaagtaacggccattccttctctttcggccgttttgaccagtacatctggccgttctacgaggcggatatcaactccggaaaaatcagcaaagaaaaagcgctggagatcctgacccacttcttcatcatgaccaacagtctgaataaagtgcgcccgtggggccacacgcagtacagcggcggctacccgctctactccaacctgatggttggcggtatgaagccggacggcaccgacggtaccaacgatctctcttatttatcgctggaagccatggcattgaccggcctgccagagccaaacctgagcgtacgtttctctaaagataccccgcactcgctgatgcaggattcagcaaaactgatccgtaaaggattcggcatgccgtccatcttctgcgacgaagtggttatcccggcgatgatgactctcggcctgacggaagaagtcgcgcgtgaatatgcctcaatgggttgtgtcgaaaccgcgattccggggcgctggggccatcgagccaccgggatgacctacgtaaacttcggcaaaattcttgaactggtgatgaacaacggctgcgacccggcaactggcgtacagctggtcaaagtcaacggtaaggaaggtcgtgagattaattatgaatcttatgatgaagtctgggccgcgtggaatcagctgctggaattctactccgatctggctgttgattgtgacctggtctgcgaccgtgcgctgaaatatcacgatgccgacgcctttgcttctgccaccatcaactgctcgctggagcgcggcaaaaccctgaaaaatggcggcgctgaatatgacttcgttagctcatccaatatcggtccatcagtggttggcgacagtctggcagcggtgaaaaagctggtctttgatgacaaggtgttgacactgaagcagcttcgcgatgcgatggactgcaactttgaaggcatcgaaggcgcccgcgtgcgtaaactgtgccgtaacgcgccgaagttcggtaacgatatcgactacgttgatcacatcgtcgccgacgtattcgagtcctacctgaagctgctgccgaaatacaaaaccgaccgttacggtaagggaccgaagggctgtgggtacaccatgtccacctccaatatcacttcatatgtaccaaacggttttgacgttggcgcaactccggatggccgcctggccactctaccgctgaacgaaggcgcatcaccatgccttggcgcggacaaagaaggcccgactgcggtgatcaactccgtcgcgaaactgcctaaccagaaaatcgccggtggccagttgctgaacatgaaatttacaccgagcgcgctggaaggcgacgataatctggagaaattcactcatttcatggaagccagtcgcgagaaaaatatcttccataaccagttcaacatcatcgattcgaatcttttacgcgcggctaaagagcgcccggaagattatccgaatctgatggtccgcgttgcgggttactgcgctctgttctcgacgctgatgccggaagcgcaggacgcgattattgcccgcacagaactggcctggtag

SEQ ID NO: 192173 - DNA, 915 bp, Klebsiella oxytoca
atgagaactggcctgatttcacgcattcagcgttactcgaccaaagacggtccaggaatacgtagtaccgtatttatgcagcaatgtaatttacgctgccagtggtgtgcgaatccggagactatcagaccaggtttcaacgttttctggtttaaggaacgctgccgccagtgtggcacctgcgctaaggccgcagtcaataacaccattaccatggcgacaccgggtaacggcgtgaatatcgatcgaaaaaactgtaccaacctgctggatatggtcgatatgtgcccctatgacggttacgaaaaagtgggtaaggagatgtcctcccacgagttggccaatctgctgctgcgcgataaatcattttacgactccagccacggtggcgttactttttccggcggcgagcctgcactgcaggctgagttcgtcagggagacggctctactgttaaaagaggcggatgtgcacgtttgccttgatactgccgggcatattcgctgggagaaactgcgcccgctgattgaagcggtcgatctggtctcttacgattttaaggcctttgatgccgagacgcatctcgcctgtaccggcgtagataatcggttgatccttgaaaatgccaaagcgatcgcggcgatgggtacccccatgcttgcgcgcatggtcattgtccccacacgtaatgacgatccggaagatatccgtcaacgcctggattttatccgcaagctgggcgctgcggttcagcaggtcgatattctggaatatcacatctacggtgttggaaagtatcaaaaacttggcatgccctatcttctgaataatattcctggctgccagcgagaaatgacagagcaaataaaacattacgccgaagaaattggtctgaaagcaaccataggcggctaa

SEQ ID NO: 192174 - DNA, 738 bp, Klebsiella oxytoca
atgttaaattttatcattactgaaacctacaaagaaatgagtgagctggcggctagtcgggtagcgattgcgctagcgaaaaaaccgaatttggtgatggcattacctaccggaggaactcctgtgggccttcttgcagaaatgagtcgaatggctaaaagcgcagaggctaatttcgcacacgccagatcatttaacattgatgaatatatcccgctaaagaaggacgatccgcaaagctattactggtttttagagcactatttttatcagcacgctaatatcccttgtgaaaatacctttgcacccaacgttctggctgaagatttaaacgcagaatgcgcacgctatgagcgtgaaattcaggcgcaaggtgattttgatatcactatccttggcattggtcacgatgggcatattggttttaacgaacctcatcccactcatagccctgtctgccatattattgatcttaatgaagaaaccatagaggccaacgctcgattcttctcacgtaaagaagatgtgccgctacgggcgataacgctcggtatgggaactattctaagaagtaaagaaattgtcctgattgctaacggtaaatcaaaagcggcggtcattaaacagcttcatgagtgcactcgtgtcgacccattattccccgcctcgttcttactgatgcatccagacgtaaccattatttgcgaccgcgaggcagcatcgctcatcaacgcataa

SEQ ID NO: 192175 - DNA, 1143 bp, Klebsiella oxytoca
atgaaaatccagagtgaacgtgtttggctagcgggtggtttctatccggcgcagctgaccctggaaaatggtgttatcagcgatatcacgctggggctcagcccaaatgttgaccaggactatggctcacggcgcataataccagggttgattgacactcatgcccacggcgcctgggactatgatactaacgaagacgatcctgaggggcttcgacgctggacgtatcgtctgccggaagaaggcgtcaccgcgttttgtcccacgaccgtgaccgatgaagataccactctgtttgctgcgctggaaaatatctcgcgcgttatggatgaaggttaccagggtgcggaaattctcggcatccatctggaagggccatttcttagccagctttaccgcggcgcacagccggaaaaacagattcggccggccagcgtcagcgcgtttcaagcctttgaacgtgcagctcatgggcgaatcatcgccatcagccttgcgccagaagaagatgccgaattggcgttaacacgctattgcactcagcaaggtatcgtggtcaatctgggtcattcggatgcctccttcgaacaggctttggaagcggtcgctaatggcgcaaaaaatgtcacccatgttttcaacgggatggcgaaatatgtcaaccgtgaaccgggccttttgggcgccgcgctccgactcgacggtctttacggcgaattgatcgccgacggcatttttgtgagcctggtttctgccgctaatctctatcgcattaagaatgatgatgacgtcattatgattagcgattcaatgaaatcaaaaggttgccctcctggccgctatatgtttggtggtgaaccaatgattttaggtccggatggtgcaacccgacgtgaaaatggtgtactggtgggcagtactctacagctgaatcgcgggctctataatatggttgagggtgcgacagtaccctttgcctcagcattaaaatcctgcaccatcaaccccgccagattgttagggttagagaaccggaaaggtaaattacagcgcggattcgatgctgacatcgttatattagaagatgactatcaggttaatacaacatactgcaaaggagtcatcgcctattcagtaaattaa

SEQ ID NO: 192176 - DNA, 2016 bp, Klebsiella oxytoca
atgaatatattgggttatctccagaaggtggggcgtgcgctaatggtgccagtcgccacattgcccgcagcagcaattttaatgggtatcggatattggattgatcccaatggttggggaagttctaatgctcttgcagcgttatgtattcagtccggtgccgccattatcgataatatgggcgtactttttgccgtaggagtcgcatacggcatgtcaaaagataaagacggcgcggccgcgctggcaggatttgtgggtttcctggtattaaccacactttgctcgccagccgccgttgcaatgatccaaaaaataccggcagatcaggtacctgccgcctttagcaaaattaaaaaccagtttatcggtatcatggtgggaattatcgccgccgagctttacaatcgtttcagcagcgtcgagttaccaaaagcgctctcctttttcagcggccgccgtctggtaccgatcatcacctctttcgccatgattatcgttgccttcatactgatgtttatctggccagtggtgttcagcggcctggtgagctttggcgaacatatccagaagctaggttcactgggagctggagtctacgccttcttcaaccgccttttgatacccgttggtctgcatcacgctctcaactcggtgttctggtttgatgtagccggtattaacgatatccccaatttcctcggcggcgcacagtcgcttgcttcaggcaaagcggtactcggcattaccggccgctaccaggctggtttcttcccgatcatgatgtttggcctgccgggagctgcactggcgatttatcaatgcgcacgcccggaaaacagagccaaagtcatgggtattatgatggccggcgcctttgccgccttctttaccgggatcaccgagccactggaattctcctttatgtttgtagcgcccgtgctgtacgtcattcacgcggccctgactggcctctcggtcttcattgctgccagcatgcactggattgccggttttggcttcagcgccggtttggttgacatggtgctggcctcgcgtaacccgctggcgacgcagtggtacttgctgatcccaatgggggtggtgttcttcgctatctactatctggtcttccgtttcaccatcactaaatttaatctgatgaccccaggtcgtgaactcgccgttgccggaagcgctgctgatggtgaagatataaatgttagcgacaataaagagcaaagtgtaaccgcgctggcccgccagtacattgcgacgattggcggctccgataatctgacctctattgatgcctgcattacccgcctgcgcctgggagttaaagacgctacactggtcaacgaagcgctggcaagacgcctgggagccagtggcgtgatccgcctgaacaatacaaatgtgcagattatcgtcggatttattgcagagaaaattgccaatgagatgaaaaccgctggtcatgttgatgctgctgaagctctaccagttgccaccacgcctgttgttaacaaaccccgcactacggctggcgccattgttatcgccgaactactctctccggtaagcggtgaggtggtggaactgcaacaagtgccggacgaagcttttgccagcaaagctgtcggtgacggcatcgccatcaagcccaccagcaatatcgtcctctctcccgccgcggggacaatcgtcaaaatcttcaataccaatcacgcgttttgcctcgaaacggaaaaaggggctgagatcgtagtccacatggggctggataccgtcgcgcttgacggccagggatttaagcggttgattgaagaaggtagcgaagtggctgcggggcagccagtgcttgagatggaccttgattttctcaacgcaaacgtgcgatcgatgataagtccagtggtgtgtagcaacgttgaggactttggctgcctggaaattaaggctaaaggccaggttatcgccggacaaaccctgctttatgagattaagggataa

SEQ ID NO: 192177 - DNA, 291 bp, Klebsiella oxytoca
atggcagctcgacttctcctttatgaaagcgctctgctggcgattctttccggcatcaactggggagccagcgccatcgttgtgaagcgaaggtatgctcgctatccaggcgttgatttactcgctctgacgacctgggaaatggtgtacggcgcgttggtgatgagtgcggtggcgtggctggttccgcagtatcagcctgggttttctgggcattggtattttggccattgtgaggcgctgactgctatcagcatgaaaaaacgtgtggcgcgggtgcagagcgcatga

SEQ ID NO: 192178 - DNA, 405 bp, Klebsiella oxytoca
atgccgctatgcagacggcgcaaaccagcatcgctggttaaaagcgtggctccggttgctgagagtaaaaagaatatttcagtccctgagctgaaattatccggctatggcgatctgaaaatctacggtgacgtggaattcaatatggatgcggaaagcaaacgtggcctgctggccatgaccaatgccgacgtcggcagcgatcccacctacgataagtgggatttaaacggccgtattctgctcggttttgacggtatccataaaacggacaacagctatttagccgggttctctgtccagccgctagcggacataaccggttcgatgaacctcgacaacgcggttttcttctttagtcaggagaacgactggcaggtgaaagtagggtgttttgaggcgtaa

SEQ ID NO: 192179 - DNA, 129 bp, Klebsiella oxytoca
atggagctgcttgaagcgcggcttgccgccgctgaacgccgggcggcgttggccgaaggtcaggtgcgggatttacaggcgaagcagaatgccgctatgcagacggcgcaaaccagcatcgctggttaa

SEQ ID NO: 192180 - DNA, 966 bp, Klebsiella oxytoca
atgacctggcacgccgctctattctctggtcacccggagaagtttcatcaggtttatcagccgctctttgttgccgacatatcgtcacgcatcagcctttaccctgaattaattacgccagacaatatcgacgcccatcttgcacacttaaaaaacatcgaggttatattttccacatggggaatgttcaccctgactgaaacacagcttgataagctccctaacttaaaggttatcttttatgcggccggagcgactgagtatttttccacgccgttactcgcacgcgggataaaagtggtcagcgcctggcaggcaaacgccattcccgtcgcggagttttgcctcgcacagatcctgctgggctgtaaaggctatttccgtaatcagcgagaatatactggcccagaatttttttcagcattggcaaataatcatacggcgccgggaaactatcaggagcgcgtagcactcatcggtgctggtgcaatatcgcagaccctacagcgattattgcagccattttatcttgaagtcctgatgattccatcacggcctgaaaagcgggtttgctcccttgagcaggccttttccagcgcaatggtcatcagcaaccaccttcccaatcgggaagataatattggcgtacttaacggtgatctcttctcccttatgcgccctggcgccgtatttatcaataccggccgcggacttcaggttaacgaacaggagctgattagcgttttgcagcaacggcctgacctgacggctttgctggacgtcaccaaaccggaaccgccgcaagcaggttctctcctctattcgctaccgaatgtgcaattaaccagccatattgccggagcattaaataatgaaactcgccgtctggttcagtgtgtactggatgaatttcaacgctggctacagcatcagccactccggtacgctattacaaaaccgttatga

SEQ ID NO: 192181 - DNA, 1512 bp, Klebsiella oxytoca
atgccgctgttctataaaaaccccgtgattcatgccgattacgccgatcccgatgttattcgcacaggcgatgatttctggatggtggcttccagtttccatcaattacccggcttaccgcttctccactcacgcgatctcatccactggcaaatcgttaatcatattgttaaacgtctgccatcgccggaatatgacagcgttcagccgggaaaggggatttgggcgccttccatacgttttcatgggggcctgttctgggttttctacagtttgcccgacgagggtatttttgtttcccacgcccgggatccgttaggcgagtggagcgaaccctattgtctgaaagcttcccccggctggatagacccttgcccgttctgggacgatgatggacgagcctggctgattcacgcttttgcttttagccgcagcggggtgaaaaataagctccagctttttgaaatggcgccggatgcatcccggttgctggataacggccggatcgttgttgacggaacgccctcgcatcccactctggaaggccccaaattatataagcgcaatggcgaatactggatattcgccccggccggcggcgtcaagcgaggctggcaaacggtcatgcgtgccccgacgctatgtggtccatggcaaagtcgcgatgtcctgcatcaggggaattcgccgataaatggtcctcatcagggggcatgggttgaactggagaacggtgaaaactggtttttccactttcaggacaaaggcgtgtatggccggatagtgcatcttcagccgctttgctggggcgctgacggttggccgcaaattggccagaggcttaatgacaccggtaaaggtcagcccgtcagcctgcatcgtttacccgcattgcccgttgcgccgtgctatttacagaccagcgacgatttccggcacggccaacccggtcttcagtggcaatggcaggcaaacccccagcgccactggctcacgcctcatcagcaagggttacgcttgcgctgcgcgctaacctctggcgatatcagcctctatcgcttacctcaactgctgctgcaaaagtttcccgctgaacgttttgatgtgcagaccgcggttgaaccgatgttttttcaggatggcgatgaagcggggatcgcgatttacggtcagcgctttgccgcactgtgcgtgacgtaccgcacggcgaatttgcagctcgcgctatgccacggatggatagacgatcgcggtgaaacgcatcaacaatccattggacttgaggaggtcaccggttgcaaggagattgagctagggtttcaggtggactatgacggggtggtccattttcgttatcggcttgcgcagcgtgaatggcggcaggtgacaccgcagttttccgccggagcgggaaaatggatcggcgcgcgtatgggtatttatgcccgtagtgagcgtgaaaacgtcaaaggcagcgccatattctcaccatttatcgtgcgtttgcagtaa

SEQ ID NO: 192182 - DNA, 360 bp, Klebsiella oxytoca
atgcgccgaacggtcgagtgcatggccggtcaggagtgcgggctgctggctgagtcccatcagctccggggcaagcgtggcggccagctctgtcccgtgtgcctgcataaagtcattcagccggttgcggatactgatgcgctgtaccgcttcatgggcgcggatatagcgcccggcggcctgatttatctcccattttttgacatcaataatatcgcgcagtgtctgcattctgcccggtatacgctcatccccggccagtacctgctagcggtattcctgctctgcggccgccagttcggctttacggttcagccaggcggtttcgttcttctgacaggcttcaaaggcctgctgtag

SEQ ID NO: 192183 - DNA, 507 bp, Klebsiella oxytoca
atgggaactgtatcctatcaggttaaaaaagtcggggaactactggaacagcgcctcgctattccgtcatatcagcgcccctacaaatggcaaccaaaacacgtcaatcaactcattgatgatgtgttaacctaccgaaataaacagagctaccgccttggaacagttgtgttgcacagggataaactaaagccagcttacgcatacgagctcgatatagtggatggacagcaacgcctgctaaacttggcattgctttgctcgctgcttgataaaagtggtgagttttcagcccctctgttggaacaaaaatttacttcaagggtaagcatcaatcaagtgccgggacaacgccaccgttcagcaatttcacggccagaattatcagcagatgaacgaaatcgtttagctcacccctgccgcagcatggctgattgcgatcggccatgcttcatgccgtgccctgctgtgcgagcggaaatgacgccgacaaaccgcctgcgctga

SEQ ID NO: 192184 - DNA, 378 bp, Klebsiella oxytoca
atgcatcaccaggttcaactctccgacagcataatatccaatagccaggcattggtgaatttcgccatacagtacatttatcaaaatataaataataacatttcagtttatgatatctctgaatatctgcaggtttcccggcaatatgtgcatcgcatttttaaaaaacaaaccggagtgactgtcaacaaattcatcagcaataaaaaaattgaatatgcaataatggatatcatcctcgggattgaggataccgactcggcctaccttaaatataatttcaaaagtaaacatgcgtttgtcgaccagatccagcactatatccacaccacgcctgccttgtatagcctaccagcgctcgcagcgtataaaaaataa

SEQ ID NO: 192185 - DNA, 1695 bp, Klebsiella oxytoca
atgagcaatgataaattttcagataatgaacgattaaaacagcagagccaacttctgcgcggcacgattaaagaagatctgcataacgaattaaccggcggatttctcggcgataactttcagctgatccgctttcacggcatgtaccagcaggacgatcgcgatattcgccaggaaagaacggcgcaaatgctagaacccctgcatacggtgatgctgcgggtgcgtttacctggcgggatcatcagcccgcagcagtggctggggatcgacgagtttgcgtcgcagcatacgctttacggcagcatccgcatcaccaaccgccaggcgctgcagctgcacggcgtgctaaagcgtaatatcaagccggttcatcggctattgcatcagttgggtctcgattcgcgggcgacggcgggcgacgtcaaccgtaacgtactgtgtacttcaaatccggtggagtccgggcttcatcatcaggcttacgagtgggctaaaaagatatcggagcatctgttgccgaaaacaaacgcctatgccgaagtttggctggacggtgaaaagatcgcgcagccggaagaagagaccattctgggcaacagctatctgccgcgcaaattcaaaaccgcggtggtcattccaccgcaaaacgacgtcgatttgcacgccaacgatcttaactttatcgctatcggcgagaatggacagctgacgggcttcaatgtgcttgtaggcggcggcctggcgatgacccacggcgaccagagcacctatccgcgcctggcgacagagctggggtatattcctttgaacgctacgctggcggttgccaccgccgttgtcgccacccaaagagaccgtggaaaccgcgcaaatcgacgcaacgctaaaactaaatatactatcgatcgactcggcattgaggtatttaaagcggaagtcgagctgcgagcaggcatggcattccaaccgctgcggccttacgctttcagcagtcgcggcgatcgtatcggctgggtagaagggatcgacggtaagcaccatctcaccctgtttatccccagcggcaggttgattgataagcccggcaagcctctcaagtcgggcctggccgccatcgccgccgtccacgacggtgactttcgcttaacccccaatcaaaatatcattatcgccggcgtcagcgagcgcaaccgagctcagattgacgcactggcacagcgctattccctgattgatgacacggtatcgccgcagcgaaaaagcgcgatggcctgcgtctcctatcccacctgtccgctggcaatggccgaggccgaacgcgtgctgccggacatagtcgatcgccttgacgctatcttaatgcgtaacgggattgccgatcgggacgtgatatttcgcgtcaccggctgcccgaacggctgcggccgggcgatgctggccgaaatcggcctcgtcggccgcgccgtgggccgctatgacgtatacctcggcggcaaccgcgagggaacgcgtattcctcgcctctataaagagaaccagccacttgaagagattatccgcgaccttgacgcgttgctgagcgcctgggcgcaggcggctaaccatgatgtggcgttcggcgactttgcggtacagacggggattattcgcccggtactgaactccagcatcgacttttatctgcaggactaa

SEQ ID NO: 192186 - DNA, 717 bp, Klebsiella oxytoca
atggccaggccgttggcgattattcaaatgggcgatccgccggcgataatccgcgaggaggctggcgagcaaagccaatggttcgttcaggcgctcgccttatcccgcggggagtaccgggttattcacccggatcgccaggagcccctgcccgctatcgacacaatctgcggcgccatcatcagcggctcctgggcgatggtcaccgaccggttagcgtggagcgaggagactgcgcaatggatacgacgcgcccacgccctgaacctgccactactgggcgtgtgctatggccacctgctaatttcccacgcactgggaggcctggttgcggataacccgctggggagcgaacacgggcttcagctgatccagatcgccgaaaacagtacggccccactgctaacgacatttcccggtcgcttcgcggcctggctttctcaccggcaaaccgtgctacggccgccggatggtgccagcgtgatggctttttccgcccgtgacgcctgccagattctgcgctatagcgacacggcgtattcggtgcagttccacccggaatttacctgggatattatggccgcttgcctcaaacagcgcggagaagggttggaaatggccgagatgcccggcgaaccagtctggccacaagagctgctcaggcgcttctattatctctggtgcaaggataatgccccccgcttatgccagtcataa

SEQ ID NO: 192187 - DNA, 834 bp, Klebsiella oxytoca
atgaaaattaaaaagtccttaaataacagtatgctgcttgctgttaatgatggaaaagagattatactttttggcaaaggcattggttttaattccaagccgggcacaatggtcgacttgaaaaatgttgaacaggtatttatccctttaaatacgcttaaagcgcagcattacttgtccttgactgacacaattcccgcagttttttttgaaattacgcatgaaatagtcaagttagctcaagcgcattacaatgaaaagcttaatacagtgttgctatttacattggcagagcacttgcatttcgcggttgaacgctgtaaggcaaatgttaacattgcgaataaactcacttgggagataaaaaggtattatcagaaagaatataatataggtgagttagcaagagatatggtatctgctaaattttctgtaaatcttcctgaagatgaggctgtacatattgcttttcacattattaatgcaagttcccaatgtgatgagactaatgcgcataagcaagttgaattagtgaatagagttgccgaaattgttcgctataaacttaataaaaacattgatatcaattcaattcactacgccagatttattacacatttaaggtacttcgctgaaagagtcttaagtaataacattgaattagaagaaactgatgatttctataatgaattaattcgcttccatccaagagctatggttgttgcagaagcaattcgtgattatataaaaaataattacgctatatttattccaaacgacgagcttacctggttagggatacatatcagtaagctaagtaaatattcaatttag

SEQ ID NO: 192188 - DNA, 1461 bp, Klebsiella oxytoca
atgtcaaaatctattcttcccgagaattttttatggggtgcggccattgcagcgaatcaggcagagggagcatggaacgttgacggaaaaggcccttctgttgcagatgcagtcgcctataaggctcatttgagcacaagcgattatgccggccatatgtccgtatctgatgaaaacgttagcgatgcgcttaaaggtgagaacgataaaaattatcctaaacgcagaggtatcgatttttatcatcgctataaagaggatttatctctttttgccgaaatggggataaaggtactcagggtatcaatagcctggtcaagaatcttccctacaggtgaagatgatcaaccaaatgaaagtggtttacagttttatgaaaatatgttcactgagatgcgcagacttggcatcgaaccactcgttacgctatcacactatgaaatgccattagtattgagtgagaaatataatggctgggtccaccgaaatgttgttgatgcgtttctgcgctattcaaatgtgtgctttgaccgttacaagaatctggtccgttactggttaacattcaatgaaattgatagcattcatcggcacccctttacgactgcaggtgttcgtgaagaaaaaagcttaccaggagaaagtacacaggatatttatcaggcattgcatcatcagtttgttgcttcggcgttagcaaaaaaggactgccacgataaaatacctgatagccaggtgggatgcatgcttaccaagttaactacctatcctctgacttgtcatcctgatgacgtagaggctactctcaaaaagaatttagaaaattatttttattcggatgttcaaattaagggagaatatccaccgctaattaagcgggatctcgaattacgtaacataaagataaaaatgcagccggatgatttggatacgctacgacgctatactgtagacttcctttcattcagctattatatgtccattactgaatcagtccagcccgatgcagaacgcactgcaggaaatactatcatgggtgtaaaaaacccacatttgcctgcatctgaatggggttggcaaatagatcccgttgggctcaaaatatcgttgctggaactctatgatcgataccaaattccgttatttattgttgaaaatggattcggtgcgaaagatacagtagttgatgggaaaattcatgacgattaccgcattaattattttcgtgcgcatttcgaacagatgattgaagctgttaaagaaggtgttgatttgataggatatacaagttggggcacgattgatatcatcagtgctggaacatcgcaaatgaccaaacgctatggttttatatatgtagatcaagatgacgaggggcatggttcattgaatagattacgcaaagattccttctactggtatcgtaaggtcattgcgaccaacggaactgatttaggttaa

SEQ ID NO: 192189 - DNA, 1869 bp, Klebsiella oxytoca
atggatcatctaaatactgggcgtacaattcttgaattagtcggtggagtaggaaacatcgaacacctcgaacattgctcaaccagattacgactaagcttgtatgataactctaaagtggaggtatctgaactcaaaaaaatgcctgggataatgggggtcgtgacaaatgtgcagtgtcagattgtcattggcaaagacgttgtaaaagtgtttgatgctattaaatcattgatgggtaataactctgccgagaaacagaaacctgttatcaaaaaaaagtggagtgcctggctgattgattttgttatcagtattttccagccgctcattcctgctattgcaggtggtggtgtgctgaaatctcttctgatcatcatggacatggccggatggcttacgaaggacagttctacttataaaatcttggattgcattggaaccgcaccgatctattttttacccttacttatagcaatcactactgcgaataagcttaaagtgaattcgttagtcgcattaacagctgtgtcagtcttgttgttgcccacgtttactacattggcaaaacaaggggcaacgttaatgacgtttgatattacgaatgtctcctatgcggcacaggtatttccggcaatactttgtgtgattttctatgcacaaactgaatctctttttaatcgttacacacctaatgcgttacgcggttttttatcaccaatgttatcgctggtcacaacagttcctgtaacactacttatccttgggcctttaggttttgaaatgggctctttattaacccagctgattctttggatgcatggaaaatttgggttcatcgccacaggattactggctggcgggttaccatttattgtggctgcaggaatgcataaaccttttcttccttatgccataatgtcgatgggccaaaccggtaaagaatctttatataatccagcttccctggcacacaatatagctgaagcaggagcctgctttgcggtttctcttaaaagtaaaaataaaatgtttaaaggtactgcactttcctccggaatctcagccctctttggtattactgaacctgcactgtatggtattactttactccataggcctgtgcttatttcggtgatgataggtgcaatgatcggtggggctttcatgggatttacgatggtctcagcttacgcaatagtagctccgagccttgccagcatctcaatatttgcttccccggataatccaactagcttgatgtatgcaatcataggtgctctgatttctttcagcatggcgtttttatcaacattattcttttggaaagaaaagacggcgactctgccctctgatgaggaaaaatctagttttgaggatccagcggccatcgctacttcaaaatcagtgaatgaatatttcttcaccagtccggttgaagggaaaatcatcccgttaacggatgtaaacgacgatgtattttctgcaaaaatcatgggcgatggtatcgctatcattccatctgtcggagctctatatgcacctgccgatggcgttatagagcatgtgttcgaaagtggccatgcagcaagcatgataactgaccatggagttgaggtcatctttcatatcggaattgatacaatacaaatgaacggagcaggctttcacccgcaaattaccgatggccaacgggttaaggctggtgagctattaatcgaatttgagattgataaaatcattaaatcgggttacgacccagtcgtagtaatggttgttacaaatagcgaacgttttaagatgaaaccgtcaaccgagcaaaccgaagcaacacatcagttaaatattctttcattaaaagaggcttaa

SEQ ID NO: 192190 - DNA, 1566 bp, Klebsiella oxytoca
atgaaaaaaagagttttgtttatttttatatccgtaatatgcagcaactcacatgctcaaagcctaacaatggaagaacgcattgctatacttgaaaaaaaattgcaagaaaataccaaagaactatatgataccagggctgagttaaaaaaatacaagctcaatgatactgggtttactaaaccaatgtatgcagagaatcaggtattagtcaaaaatgtagacattactacctccgaaaaaaagaccatacaaaaagatgcggtgagtaatgatttgacgttgaaagatataagtaactttgtaaaaaatgatattggtttttcttataatggttacttccggtccggttggggaactgcaaaccatggttctccaaaggagtatgcgattggttcacttggcaggtttggcaatgaatatacatcctggtttgatttacaactaaaacaaaaagtctatgatttggatggaaaaaccgcacacgcagttgttatgctggatggtaatgtcggtgagcaatacagcaatgctgtgtttgataaaaattcagagagtaacttacagttttctgatatctatctcacaactaagggtttcctgagttttgctccagaagccgatttctgggtaggtaagcactatctgcctaaatatgagatacagatgcttgactggaaaagtatcagaactgaaagtggcgcagggctcggtatagaaaactggaaaattggcccaggaaaattcaacgttgctgttgtgcgccaggatctgaacgcacgcgcgcttgattacaaaacatcaggaaattcactacaactcaatactaacgctctggatattcgttatcgcgaaattccattatgggataaggcaacactggaactcaatggtcgctataatatggcgaataaatcagacgttgttaagtcaggagagtctgatggtcagtattatcaagtaaaagatgcatggctggcggctgcgattttaaggcagaaatttaaaactggtgggtatggagaattaacactacaggttgccgataattctattgccagttcatttgcaaaaatttcaggagcaaatccaacatatggaaatggtgactattattatgggaatcacacgaatggaaaggcattcagaattatttcccaaggagagttttatccctccgaggacactataatggcacacgctctggtttattcaaatggccatgatatattcagctatgataccggcgcccatactgattttcaaagctaccgaagtgtcatacgacctgcttatatctgggataaattcaatcaaagcggtgttgagcttggatggtttagacaagacaacaaatcacaaggacaaacatttagtgagtccggttacaaaacaacgttatatcatgcactcaaaattgatacgtcaatcttaacctcaaggccggagattcgtttctatacaacttacatcagagcaaatcagaatgaactctccaattttaaattcaatgataataagaaagaccaattttcgattggcgctcaggctgaggtgtggtggtaa

SEQ ID NO: 192191 - DNA, 288 bp, Klebsiella oxytoca
atgtttctcctgggtaggcttgtcctggccgtaacggccggcttactggcgggctgtgccgtcgggccggattatcatcgtcccgatgtactgcttttaaagcaatatcattctcagcctgccgtccagcaaagaagtgcctcgcggatggcccaggcccacgccggacttggggcggccgacctgcttcgccggagaccggatattatcgtggcagagcgtcatctcgccgcctttcatgcgcgtaccgggagtagggatgaaaagaacaggcgttctgggcgttga

SEQ ID NO: 192192 - DNA, 600 bp, Klebsiella oxytoca
atgatgttattacaactctcttccgctcaggggccggatgagtgctgcctggcggtgaaactctcgttggatcgactcataaaagaagcggcagagcagagggtttccattactctgctggaaagcgagccaggtcggcattctggcacgctccgctccgctctgctttctcttgatggcgacaatgcgtttgccttaagtgaacgctggtgcggcacgctgcaatggatttttcccagcccgttcaggccgcatcacggacgtaaaaactggtatgtcggcgtagggcgtttttcttgcgatgaacaaaagcagtccgaagagatccgctttgaaacgctgcgcgcttccggacccggcgggcagcacgtcaataagaccgactcagcggtacgcgccacgcacatggcaagcgggattagcgtcaaggtgcagtcggaacggagtcagcatgccaataaaaggctggcgcgcctgctgattgcgtggaagctggaacagcagcggcagaatgacggcgcggtgttgaagtctgaacggcgaatgttccatcatcaaattgaacgcggtaatccgctgcggacgtttagcgggcgttaa

SEQ ID NO: 192193 - DNA, 387 bp, Klebsiella oxytoca
atggcctcgccgtttggcctgttcatcaacaaccttatattccgctacgcagacgatagtagcgccaccgaggataaagcgcgggtcctgatttggcgtgagctttttgccgcgggtgaccatgagtcgcagagggcgccgtccgtcataccgttgatcttcagcgtgttgtacatcatatcggttagctcatcacgactatggccgagccccacttttccatctgcgtgtgggcaatgcgtatctatgaattattcctggcatatttttaccctgatgagaaagtcatttgtgaaaacaatgtattacgcgaacacgatgacggagtttgttatcagtgcattattgttcttctggtttaactcatgcccgaacgttatttactga

SEQ ID NO: 192194 - DNA, 141 bp, Klebsiella oxytoca
atgacggcttatcagccgctccgaattgtttattttgcaggcaacgaagtccatctctacaaatttaacccgcaggtgttgggatcgggtctgaatacaataaattttctgattaaacttttattcttcctgcgttgttaa

SEQ ID NO: 192195 - DNA, 933 bp, Klebsiella oxytoca
atgaggcgagtcatcacgctgctgctggcgtcctgctgcagttcgccgctgttggccagcgatatcgtgcaggtttcgcgctgcgttcccggctccctgcttcatgagcaccgcctggaaaaaacgcacgtggtggatgactttcacatttactacagcctgcagggcaaagatgccctgcgatatccgcaggatagtaccggcgatggcgtgccggacgtcataaaagatattggtcgtcagctacaggcggcgcaatatctctacacctcgctgctgggcctgcgctcgccgctacggcagaaaatttatgcccaggcccgacagattaacctctatctgctggcgctacctaaaggtcatggcctggccttcgatcgcgtggcggcagaaacgatgagcgatggaacggcgctgccctgcggcttaaaaattgtcctcaacgccgggctgcaacccgcgcgcaacgttacgccagcccatgaattattccatttataccagtatggttacgcggtttttaaacagaaatggtacctggagggtatggcgcgctggatggaaaatgccttcagacccgctgagaaaagaatcgcgccgtcagctgaacttcctgcttgcgagagtaacttttctcgtggctataatgcggcggccttctgggctagctacgcacagcacgctttcccggcgataatcttgccgaataaggtgctggcatatcgctatgttgatggcagcccggtgtttaaactccagtcgctgccagggggagagatgctgcggccattttttcaacagttagcgcaaagcagtgcaggtatttcccgcgaaatgaagctggctaatacccgctggactgagaaacagcagcgtgacggacagttcaacagtctgatttgccaggccctggcagataccgtaataaaatga

SEQ ID NO: 192196 - DNA, 1506 bp, Klebsiella oxytoca
gtgactcggattccgatagtgactcggactctgacagcgactcggatgctgacagcgattccgattctgacagtgattctgactctgacagcgattccgattctgacagcgattcggactctgacagtgactcggactccgacagcgactcggactctgacagcgactcggactccgacagcgattcggactctgacagtgactcggactccgacagcgactcggactctgacagcgactcggactccgacagcgactcggactctgacagcgactcggactccgacagcgactcggactctgacagcgactcggactccgacagcgactccgattcggacagtgattcagattccgacagcgactcggactctgacagtgattccgattctgacagcgattcagactccgacagcgactccgattcggacagtgattcagattccgacagcgactccgattccgacagcgactcggatagcgacagcgactcggatagcgacagcgactcggatagcgacagcgactcagattccgacagcgattcggattccgatagtgattcggactcggacagcgactcggattctgacagcgactccgattctgacagtgactcggattccgacagtgattccgactctgacagcgattctgatagcgacagcgactccgactctgacagcgattccgattccgacagcgattctgatagcgacagcgactccgactctgacagcgattcggattctgacagcgactcggattccgacagcgactcggattccgacagcgactcggattccgacagcgattccgattccgacagtgactccgattccgactctgacagcgactccgattctgacagcgactctgactccgacagtgattctgactccgacagcgactccgattctgacagtgactcggactctgacagcgactcggatagcgacagcgattcggattctgacagcgactcggactccgacagtgattcggactctgacagtgattcggactctgacagtgactccgattccgacagcgactccgattctgacagcgactctgactcggacagcgattccgactccgacagtgattcggattcagacagtgactcggattctgacagcgactcggattccgatagtgactcggattccgatagtgactcggactctgacagtgactcggattcggacagcgacagcgacagcgactctgactccgacagtgattctgactccgacagcgattccgactccgacagtgactctgattccgacagtgactccgattctgacagcgactccgattctgacagtgactcggattccgacagcgattccgattccgacagtgattctgactctgacagcgattcggactctgacagtgactcggactccgacagcgactcggattccgatagcgattccgactcggacagcgactcggatattccgcaggccaacgcggataccaataccgcactga

SEQ ID NO: 192197 - DNA, 348 bp, Klebsiella oxytoca
atggtgcgcgtgcatcccggtggcggtttccggcttcagcaccgccttgagggcgcggaaacgatcgcggatatcgttcatattcatcgctccgccggaatcgaccacgtaaatacaggtcgcgccgtaggactccatcttcaaggcctgctgcgccagctgctccggagtggtcatatggctcatcatcagaaagcccacggtgtccatgcccagttcgcgggcaaaggcgatatgctgcgcggaaacatccgcctcggtgcagtgggtcgccacccgcactacccgcgctccggcctgataggcgtttttcagatcgtgcagcgtgccgatgccgggcaacaataa

SEQ ID NO: 192198 - DNA, 471 bp, Klebsiella oxytoca
atgctgctgtcagagagtactgcttgctatcaccgacttatttattacgaccgctcaaacggcagccttgacgtcgattcttcccccctgtccggaggcaattttagtcccgaggagctatataataaaaattctcatttgcgtaagtattccgccaaagatcacgccggaaagtaccaaaacgctttattgtccgccaatgcaatttgcaaatatgttaccgaattctcttttgtggcctgctggcggcggagttttattcccctcttcccacggcgtagttcattaatcctattactatcaaagaattgtgataaatatctcacgctatgcgtcatcccgcgccaaatagcttcttttttgtacgaaaatttaacaattgcttattatttagcacattcatctgcttcatcgggaaaattactaatatcatttcgattatcagacggcaagcaccagagaatgatgtga

SEQ ID NO: 192199 - DNA, 1455 bp, Klebsiella oxytoca
atgaaactgaagaaaatatcgctctatacggcaacattattatttacctcctcagcattggctcatggctatgtagaatctccgccaagtcgggcctaccaatgtaatacagggaaaaacacggactgcggtccggtgcagtgggaaccgcaaagcgttgagcaagcaagcggttttcctgaaggcccgatgccgcctgacgggcaactggccagcgcgggtaaaaccaacttctcgcagctggatagccagagcccgacccgctggtcgaaaaccaggataaagagcggtaaaaataattttgtctggcaccattctgcgccccacagaaccgctaactggcgttattacattaccaaacaaaactgggttcaaaataagccgctgacgcgcagcgattttgaaagcaagcccttttgtcaaatcgccggtaacggcgtagcgccggcaatacaggtcacccattcctgtaatgtccccgagcgtaccggctatcaggttatttatgccgtgtgggaaattgccgatacggcaaatagtttctatcaggccattgatgtcgattttggcagcaccggcgatgacagcgcagacgaatcactctggacaacgcagctgtcaggccagctgactgggaaggatctccatgctggtgataaagtcgttgcccatttctttaacgcgagcggcgaagtttattcgttacaaacggaattaacgatcgccagcgatgcgcaggggcaaaacagccaatggtcttacgatctggcggaagccattaataccgcgcacgaaggcaagctgcgcgccggggtaaaggagggcgatggcaatattaacccgatccatggcgttaaccaggtctatgtgccgcaagacagcgcggtacaaagcgtcacgctgacctatgccgaatcgcagtcagacgatagcgcgaaagaatctctgagcattaccaacgtcagcgcaaccaaaatcgaaaacgggaaagcgacggtgacctttaacgccacggccaacggtaaaatgcaccttaccgccgccgtcagcaatcatgcgggcacggagaaagggagcattcagcaaacggtagataatcgcaccctgacgttaactattcctctaagtcacgttcaggctggccatcatatgctgcgctacaatgccagcaatgagcaaggcgccatcatcggccagggggtcattaacctgatgctggaagagagtgcgcaaccgacgccagcgcctgcgggcaagtatgactacacctttccggagcagctgaaaagctatacggcaggcacccgggttttacagcctaaagacggcaaagtgtaccaatgtcgcccactcccctacagcggctactgcgtgcagtggagccaacacgccaaccagtacgaaccgggcgtcgggtcggcctggacggcggcatggactgaagtcacccgctaa

SEQ ID NO: 192200 - DNA, 603 bp, Klebsiella oxytoca
atgaaaagaagaatattctcatacaaaatagttagggattttgggttcgccccaaaccctttccatgattactgtacgcttgcaacatgcaagccaaaaataagaaattctgcccagcccggcgatttgatttttggatgtgggagctctcacctgaatctagaagataaactcatttatgtgatgttagttgaagaaaaaatgtcattccaagaatattgggaagaccagagatttaaatataaaaaaccacatttttatagtaataagcagaatgcttttggagacaatatttatcatgttgatggcaatggtaattggactcaagaggactctcatcatagttttgaagatgggcggattaaccaagataatatggatagagacttaacgagcctccatgttttgataagtacaaattttatttacttcggcgataactttattgatgtacctattttcccaacaacaggtgagaaggtctatcccaactcacgagattatattactaattttagtgatgaaatggtgaaccaagcttatgattggtttataaattatccacatagaggttgtattggaagccctatatcttggatataa

SEQ ID NO: 192201 - DNA, 690 bp, Klebsiella oxytoca
atgagaagaaaaaaagaacatgtagccatacttaagttactatcacaacttagggattttactagtgataatgttttcaatccttatagagatatatgtagtattcatgacactgaaggagcccctaatcttcgactaagcaatctggagctctacctaacagccagtttaagtctaggaattgatgcgatctgggttgggcgagatctagggtaccggggagggcgtcgaactgggctagcattaacagatgagtttcatcttgatcttgcagctaaaagtctcaatactgattcattttacaaatcgaccaaaactatttgtgtcaaggaaagaactgcatccgaggtttggagtctaattaatcttttagataaacctccttttttatggaatattttcccatttcacccccatgaaaaaaatgattccatgtcaaacagatgccatacaaaaaaggaatttcaccaagcttcctttttttttctagagttgatgaagatttacaagttcaataaagtatttgccttagggagagatgcctcaaatgaactaaattatttaggggtgaaacatagcatagtcagacaccctagctatggtggacaaactgaatttagaaaaacaatccttttatcttctggaatgagtatagaagagagaactaaaaactatagattggatatatag

SEQ ID NO: 192202 - DNA, 1143 bp, Klebsiella oxytoca
atgattacctatagcgattatcaagaaagtgttcgtaagtcagataaactacctcccgacaatcctcgttttatagtattgggtttagtaggagaagtcggtgacttagtaagcctagtaaaaaaagagcaaagagactcattaaaagcaaatacaattgaagagcatctccatgaagaattaggtgatgtcttatggtatgtcacatcgataataaacagagaaaacttcaggattgataacatagtaaataatgcaatccagcaaataaacttaaaagaaaataacatccaaccatctacacttacaaatttaagtttaattgattccttctcgacaaacaacaacttaaagttaaacacagtagaaatatcacttcaactaactatttcccttggtagctttgtttccctctactcatcaaaaaatacaaacaaccataatgaaaaagaaattaccatttctatctttgtaagtaatctgctacggttctgcttttcaaaaaaaataagcatatcaagagcgatagactataatttaaagaaaataaacagcagatggcctgataaatacatatacccagaatcatttgatattaattacgccaattatgaaagattcccaccaaagatggtttttattttcaaggagattagtgtaagtaataaaaaatatgtaatacagcaatgtcagggggttaatataggtgatcgactaacagacaataaaaaagataaggatgattacagatttcatgacgtttttcatatatgttatgctgttcacttaggttggtcaccagtcttaagagctttattacacctgaaaagaaaaagcatttcgtcaacagatgaaaatcaggatggtgcaagagcaataattatagaagaagggatttcaaccttcattttcagcagagcaataaaacagtcattattcgaaaatgtaacacgtctcgattatgatattttaaagttcattcaagagtttgttaaaggctatgaagttgataatgcttatttatggcaatgggaaaaagcaatattagatggatacaatatattcagaaatttaaaagaaaaaaggaatggtaaaatcactgctgattttgaaaatcacattgttttttttgaagagatttaa

SEQ ID NO: 192203 - DNA, 288 bp, Klebsiella oxytoca
atgagagaattaaccgcaactgaaatcaacgctgtaagcggcgcgggctggctgcaagatgggctggcttcactgggtggtaagacaggctctgcagtatggtcactcggcagtactctgagcgttgacttacctatccttggcacaatcaatctgtcgaccatcgcgccagggcttggagaaactatcggtagtacgataggttcaacaatcggcggtgtgattgaaagcacgctagcaagcgtaccgttattcggtgggctgataaataaattgcttggcaactaa

SEQ ID NO: 192204 - DNA, 354 bp, Klebsiella oxytoca
atgattcatttaattattgaagctcgagaaaatgcgccgagctatattccgcttatccaccgccatcttcctcatctcgcgatgagcgccatcaagcagaacctgaacgcttacggttacgtcacctcatttgatgaaaacaaaatctgcgatgacattctggaagagcagaaccccattggaaattttctgaatctcgtcaaagtattaaagcatcgaggcgcgcagcttaaattcattaagcaaacgggagatgaaccgggagaggaattacccttgagccaggtcctggactatgttgaaaaaggtctcgacattgcccgtcggatagagcgagaggatgaacaggactga

SEQ ID NO: 192205 - DNA, 276 bp, Klebsiella oxytoca
atgagtgataaaggttgttccgcaattgatgttctggcactgacaataacgctcttttgtctggtccgttacccgaaagctactccgtgtatgcgccgcatgtccgcatttagggcaattcatcatgtccgtttctccgccgatgcctctgaagtcgcgttaataatacacaacatcaatattgagaaccatttattcaatattgagatcatcaattttcacttccagttcgatgctggtcgtaaatccgctgtccggatttaccgtatgcgttaa

SEQ ID NO: 192206 - DNA, 759 bp, Klebsiella oxytoca
atggagagatttaatgagataaatcttcttgccgaaatggccgaagaaaattctaagccgggtggaaatgttactgcaataaatgccttaacacgttctggattggttttattatgtggttatttcgaaggctttattcgtgaaatgtgtaaagagtttgtggatgagcttaatgacttaggtgttgcaccttcacttgttcctgtcagaatgttatcagagcatgttatctcatgctctgataaagtacgcatgaataaatgccagcctttctcggattttattgcgaaagttgaacaagccacaccgttacaattagatagtgataagttgtcctccacgaatgccaatccaactgtggatacaattgaacgtatatttaatacttttgacattccaatggtattggatgaattatctattaatgactttggtgttgatgatatgtataactttgaatctcaagtaagtgagactttgaggcgctcaattttactaaaggtagatggggatgtggctaaagagttcgatattcttaaaattattgagtccaagtgggcaccaaaaaagaaacgtagacgtgttgggtatcttaatgcgatcgatgagttgctaaaaaaaaggaataggattgcacatggagaaggctttgacacggtgactcctcaagaacttaaagaagcaaccgtgaatatttcgaaactttgtgatgggttgattagtaaattgacagcaaaaattgctgaaatgtctccttaa

SEQ ID NO: 192207 - DNA, 1149 bp, Klebsiella oxytoca
atgaatgagttaaatcaacagcaattgccggtagatccaaatgatgaattggatttagaaaacgaaattgagccttatgaacatattaaagaaagaaaagttatcatacaaccatatgattatgcagtgcgtacgcttgttgacatgataattgagggggatttaattcttgagccggattatcaaaggaaatatcagtgggatgatattaaggcttctaggtttatagagtcgattgcacttaatattcctgttccagtagtctacttggcagaggaaaaagatggtacatttagtgttattgatggacagcagcgtttaacgtcgttgtttagatttattaaagcaactgagatagaaactctttttcctgaatcaggtttgacacctcttaaacttagcgggctaaaaataatttctgagattaatggaaaagagtatctgcaattagatagggttcttcgttcaaatattgcaaaaagggctatcagatgcatagtggttcttaacgaatctgatgaagctttaaaatttgaagtgtttgagcgactaaatacaggaagcgcatctctttctgatcaagaggttcgtaactgcgtataccgtggaagttataatgaactattgaaacgtttggcccggtatgaaaaattccaagaattggtgtccttgcctgagcaggatgctaagtctatgaaagctgtcgagctagtcttaagatttatggcttacagagaattgacctctacatctgaatattccgataattattctgaatatttgaacctccatatggaagaaaatagagaaatttcattgcctagggctgagtctgtagagtctttattttatggcacagtcgatttactttatgatgtgcttggtccgggaactgcttttagaaagccaaagaaccaaactgatccgagtgaaggttttttccaaaatagaataaatggttcaatctatgaatcacaaatggtcgctttttcaagggcatacgagcatgggtggcatgaagatcttgctgctaaagcatttagtgtatttcaagttgatgggtattggaaaagtctattccaagggacatccaaaaagacatctgcaatcaatagaagtaccattctgaccgaggcgttaatggggtag

SEQ ID NO: 192208 - DNA, 189 bp, Klebsiella oxytoca
atgcaggactattttatggagtcgttgaaactccagcgcattgatttttttgtgaagcttgtagcggctagtgaatgcgatgatgaagaaaagcgactggctatccagtgggtttcggagctgaccgatgaactgatggcgaaaatccgtgctcatgagtacaaccgttcaatagatctctccagttag

SEQ ID NO: 192209 - DNA, 243 bp, Klebsiella oxytoca
atgagggacaaaatgatgcgcaaagcatgtatagaactgatagcagcaactaatgttacatgcctagtggcaggcgaactaggcacaggccgttgcctttacatggttgtggttatgcgggacatatttggtaagccaacaacagaacaatggttgaagtctttaaggctctgtgaggccaaagccttcgaactaaaatatgaagttgcacgaattcgcggtaaaggtctggcaggtttgtaa

SEQ ID NO: 192210 - DNA, 861 bp, Klebsiella oxytoca
atgagcactatcctcaaatgggcgggaaataaaaccgccgtcatgcatgagctgaaaaagcacctgcctgcaggcccgcgactggttgaacctttcgcgggttcatgcgctgtgatgatggcgacagagtatccccattatcttgtcgcggatattaattcagacctgattaatctttataagcagattgcatttgactgtgagaagttcatttcaaatgcaaaacatttctttttaggcacaaatggcgcagagtcttattacaacatccgtcagggctttaatcattcgtctgaaatcaccgatttctggaaagctgtatttttcctttatctaaatcgccatggttatcgtgggctttgtcgctataacttgagcggccattttaatgtcccttacggtaattataaaaatccgtattttcctgaaagtgaaatacgcgcttttgcagaaaaggctcaacgggcaacgtttatctgtgccagctatgacgaaactctggagctgctgcagactggtgatgttgtttattgtgatccgccatacgatggcacatttagcggttatcacactgccggttttacagaggacgatcagtatcatctggcgtctattcttgagcgccggtcatcagaaggtcatccggttatcgtgtccaacagcgacacgtccctgacccgttcgctttatcgtaattttacccgccatcgcatcactgcaaagcgcagcatgggtgtggctgccggtgatggtaaatctgcatcagaaatcatcgccacaaaatcagcaggctggtttggtgtcgatttggcgtccggtccagatatctcagtggaaactgaggtgcgggcgtggcagtga

SEQ ID NO: 192211 - DNA, 234 bp, Klebsiella oxytoca
atgcgaaatattgaaacccgtaacaccaaaatcggcccagatgatgctggccttaatctgctgctaaccgaagcgcgtaaggaagaacgccgcggccgtgctgatgtgtttgctgcccgtctggataccctggcagcccgcatcgcctcccgtcagctgacccatgcagaagctgcagagctgctgcgtgaagaggccgtgaaaatccagaacgaagcgcaggagatccactga

SEQ ID NO: 192212 - DNA, 342 bp, Klebsiella oxytoca
atggctattgaaggcgattctgcgactgttccactaagtccggggcatcggctggatggcctgaatcatattgcagagctaagggcgaaagtgttcggcttgaatatagaacctgaactggagcgttttattagcgatatgcgggaccagcgagatattaaccataaaaaaaatgagcgtgccttagccgccatattctttatggctaagattccggcggatcgtcataacgtcattatgaatgagctgacgactgacgaaaagcgggagctgataaaagcaatgaatcattttcgtgcagtggtgagcttatttccaaagcggctaaccatgccgaattaa

SEQ ID NO: 192213 - DNA, 201 bp, Klebsiella oxytoca
atgctgaccaaccaaccatcactggcatcgcttctcgttaagcaaagcccatcacctcatttcgggcatggctggatcatgggtaaagatggcaagcgctggcacccgtgccgctcgcaggatgcgctgctggctgaactgcgtactaataaacaggggaaaccatggctattgaaggcgattctgcgactgttccactaa

SEQ ID NO: 192214 - DNA, 510 bp, Klebsiella oxytoca
atgtttgattacaagatttccaaacatccacactttgacgaagcctgcagggctttcgcgctgcgtcacaacatggtgaagctggccgaacgcgcaggaatgaatgtccagactctgcgcaataagctgaacccggaccaaccgcaccaactgaccgcgccggaaatctggctgcttaccgatctgactgaggattccacgctggttgatggtttccttgcgcaaatccactgcctgccatgcgtaccgatgaacgaagtcgcccgggagaaaatgccgcactacgtactgaaagccacggcagaaatcgggcgtgtagctgccggtgccgtatccggtgaagtgcatacgtctgccggacgccgccagattgttgacagtattaactcagtcacccgcctgatggcattaaccgctgtgaccttgcaggcgcgcctgcagaccagtccggcaatgacaagcgcagttgataccgtaacgggcctcggcgcgtcgttcggtctgatctga

SEQ ID NO: 192215 - DNA, 243 bp, Klebsiella oxytoca
atgagcactgatatttcaattcgtgtaccaaaagagatggctacgcctgcagagttcgcggaatgggaaggtatctcccgtggctctgtttaccagaaaattcaccatggacagcttgccaagtacatggtcaagaaggaaaaaaacaaaggccgcgtcagtctgcgctacctgatgtacaaaacagatcaggtccgtgaatcccttggtcattccaacttccgcgtcattgttggtcagtaa

SEQ ID NO: 192216 - DNA, 633 bp, Klebsiella oxytoca
atgctgagcataaaagtaggaaccgatacgggaggcaaagcagctattgaacgactgcttgaggcttatggattcacaaccaaacaagcattaagcgaacatctgaatgtttctaaaagtactatggcaaacagagtgttacgtgacagcttccctgctgactggataatccagtgcgctctagaaaccggtgtttctttgctttggttagcaacaggacaaggaaacatgaaaggaggaaatgagtcagaaaaagaatctcataatgagaacaaaccagcaataagaccattatccaaactcattaccccctctattccgaaaggtaatctggagaatgggatactcagtgttgatgacgagattttcctcgatcgcaacatcttgcctacacgatatgaagaatcgatgttcttagaaacctcagctgattgttacctcatcgataaatcaattaagcaagtcagcaatggtttctggcttatcaatattgatggaatgattattatcgcaaaaattgcgcggatacccggtaataagattgtggttcaccaagatgaaacatccttcgaatgttctgttgatgatgtggaagttatcggacgagcagttaaggtaataaagagtatctaa

SEQ ID NO: 192217 - DNA, 900 bp, Klebsiella oxytoca
atgagaacatttcacttacttgatagaaatattgttgatttaatggagctatctaacagaaattccaatatacctgatgataaaagacagaaaaagatagcagaattaaaatctaatgatttagttggaaatattttcacaccattactttctattttagaggggaaaataaaaagagataaagatacaaatggaaggatggttgccatccccccatcccttgacgagataaagaatcagatagttaatgaagctactactgtgaaaaactttattaaaaacagtagaactgactatgattttttattagcgaacttagactacctgtcacagttactttttaataaagaggatgataaattaatagatataaaaattgaatatcttaataaattaaaggaagctgtcggaaatatcgtgccagttaaccagagagaaagtcaatatgaaaaattcaaagcaatcagcaatgaatacaaattactgaaagaacaaccgattacattatttgttttgatgtatattttcggaagcaatcagtctgctaatttcttaaaattcaaacgtcccaacttcattgcatacaatccaatatctgatataaatcatataaaagacacaattaagttaattcattccatagatcttactcaagatgtgtctattgtatttgaatctcttgactcagatattgagttcatttcttcaattataaactatacatcgagtagttcatctccaaatcctgaagatcgaacagttaatattataacaaattggactcctaactttcaaaaaattgcagaagagatccccgaaactaagggaattgataataaagaattattttttgattgctacaaagacttctatgagtatgatccaagagactacctttaa

SEQ ID NO: 192218 - DNA, 1188 bp, Klebsiella oxytoca
gtggcacggacaacacgccccctgaccaataccgaagttcttcgcgctaaagcgttagagaaggatctaacgctgcatgatggcgatgggcttttcttgatagtgaaaaccagcggaaaaaagctctggcgtttccgttatcaacgtccggcaacaaaacagcgaacaatgatggggctcggtcccttccccgccctctcgcttgccgatgcccgagggttaagagcggattaccttgccttgttagctaatggcatcgaccctcaagttcaagctgaagttgcagaggaagagctgcaaatagctctggacagtatttttttgactgtcgctgctaactggttccaactcaaaagcaaaagcgttaccccggattacgcaaaagacatttggcgctcactggagaaagatgtattccctgctattggtgagatccccgttcagcaaatcaaagcccgaacattggttgaagcacttgagccaatcaaagctcgcggggcgcttgagaccgtacgtcgactggtgcagcgcattaacgagataatgatttatgccgtaaacactggtctgattgatgccaatccagcatcaggtgttgggatggcctttgagaagcccaaaaaacaaaacatgccgacgctgcggccagaagaattgccgaagctgatgcgttctttagtcatgtcaaatctgtctgttccgactcgctgtctaatcgaatggcagctcctgacccttgtgcgcccttctgaggcctccggtgctcggtgggcagagatcgatctcgattcaaagctctggacaattccagccgaacggatgaaggcgaagcgcgagcatattgtccccctatcttctcaggcattagagattctggaagttatgaagccaattagtgctcatcgtgaacatgtttttccgagtaggaatgatccaaagcaaccaatgaatagtcagacggcaaatgctgcgttaaaacgaattggatatggggggaaattagtagcacatggtttaaggtcaatcgctagcacatatttaaacgaagaaggattagagagcgatattattgagagttgcctcgctcacattgacaagaatgaagtacggagagcatataatcgttcaacgtacctagaacgaagaaaaataacaatggaatattgggggggatttgttaaaaggtga

SEQ ID NO: 192219 - DNA, 2313 bp, Klebsiella oxytoca
atgggctatacagatgatactcagtttgagaatgaagtaaggcggattgctcggtcgcgatggcctgatgctcaatattccggagcctcttttattaatggtcgagagcgagatggggtctttgagacagaggatgttatccactacgtcgaagccacaacatctaaacgggccgataaagcaaggtctgacactaaaaaaatttttgaattgatgagcttgcaacagaagtcaggatcgatgaagggagctataggttggtttgttacaaaagatgagcctacagcagatcagcgtgaggaagtgaaaaaacatgggaaacagcaaattaaagctttgtctttttcacaattccagcaggcgcttgtggatgtctccggatatctctctgctagagcaaatcatttttttggcagtatcaaagatccaactaccggtgaaattaatacaaagattgaatatgttcctttggacttggtgaatatcgaatctgatgaaacctatgatattgaaagtatcaccgaaggtctacggaatgggaatagctatgctctgttaggcgattatggggcagggaagagcatgactttgagacaaatatatttttctttggcggaaaaatataaagtgtcaggaactcctttgttccctctttatataaatttgagagagcactctgggcaagatgatcctacagaagtaatccaaaggcatgctagaagagttgggtttgagaaggctaatactttagtaaatgcatggcgtgctggttttgttattcctatactagatggtttcgatgaaataacgtctcttggtattactgcatctagaaataagatgaaggaagctcgaaggcgatctttagaagcaataaggaagttgattgagcaaaccccctcatcagttggtgttattatcgcgggaagagagcatttctttaataataaggaggaacgatatgactctcttaagctcaggaaaaatacaatagatttaaatcttaatgaatttacttcaaagcaaatacaaaaatacttaaggaataatcatagagagggtaagcaaaaaataccatcatggatgccaacaagaccacttcttgttggttatattgtttctagaggattgttggatactcttccagaggatgaattgactctagatcatatagatggttgggattatttacttgataggatatttgagcgtgaagctaatattagccctaatcttgatggtagtacattaagaaaaattctcgaaaggttagcaacaattgtcagaagctctcctgatgggctagggccgataacgcaaaaacaaatacgtgatgcctttattgatatatgtgaaactgagccagatgatcaagcgaatctattgcttcagcggttgccgggtttaggtgtctatagaaatgaagaagactcaaggatttttgtggatgttgaattatcaggaatttgtcgcgcaagagatataactgattttgttgccaacccatatgattgtctgaatgatcaacagtggcgagacgcaatgtctctcgcaaatacatgtgcagggaatgatgcgataactaaagtttgtcgtaatcttagaaacaatagtgtcgatttgaaggtaatgattgaacaaatagtatcgatgctgaataaaacatcagggttaaatgctcttagagctgatatcgctgcagtgctatgctccttaccttgccctccagcccagaaatttattgtagaagaaggcgtttatgatggtgtggaattagtattcgaaaatacagaaggtgattttaataatattattttcaaagattgttttttcagtttgataagtattgacactcactgtaatagcgcgtcacttccagtcttcgaaggttgtgctattttaaaaatacgtggtcgagcaagcagggaagatcttcctgaatctaactttaacgatgagactgatatagaagagtttactgagtctgctgatacacaatcatctatactgaatatcggggggcttagtaaaggtgagaaaattatgctgtcgatactaaggaaattattcattcagagtttgggggggcgtgcggaatccgcattgactcgagggcttgagttgaatgataggcaattggttcctgaactaataagattactacaacaacgcagtttaattaatgttgtaaataaaggtgatggcacaattatagtgcctgttaggaaagaacttcatcgtgttagaaatattctttccgcaccaagtaatagtaatgatattttacttttggatgctaaaaaaatcaactaa

SEQ ID NO: 192220 - DNA, 1191 bp, Klebsiella oxytoca
atgagtttcgcaagcagtcgatggcccgccatgatggccggacaccgcaagtcactttatgggctggcggccctgttggcgatcctgctgattggcggcgtgctgggcgcgtccagccagctttctgggcgtgctgagccggtggcggcttatgttgtcgatcgcggcgatatcgaaaaaaccgtgctggccaccgggatcctcaaaccgtcagtgcaggtgaatgtcggggcgcaggtcaacggtcagttaaagaaattgtacgtgcgtgccggcgatcgggttacccagggccagctgctagccgaaatcgatccaacgctgcagcagagcgaattgcgtaagtctgaagcggcgctggagagcgcggtagcgcagaaacaggcgtcacagttcacgctcactcagtaccagctcgagctgaaacgccagctgcggatggatcgtgacgggtcaggaacgaaaagcaatctcgaggaagcgcaggccagggtcgatacccagaaggcgcaggtgagagtcaatatggcgcaaattgtgcaggcgcagatggcgctggaaacggcgaaagccaatcttggctatacgcggatcatcgcgccggtggacgggcaggtattgggcatcgtcaccagagagggacaaaccgtggtctcttcacagacagcgccgaccattctggttctggcgaatgtcgataccatgacggtgcaaacccgtatttcagaaacggatattttgaaagtccgtcccggtcagccgctgtggttttacgtcgtcgccgaacccaaacgccgctatcagagcgtgatgggggggctgcaggacgcgccgaacgacgccctacaggatgatagcgctcgtccgcaggggcaacaggcctctgccgtttattataacggtgtgttcagcgtgccgaaccccgatcatcggttgagaaccgcgatgacggcgcaggtatttatcatcaccgagcaggctaaaaatgtactacgcctgccggtgatggcgctggggcaaccgcagggagccaatagctatcatgtacaggtgctaaaaggcgataaggttgaacagcgtctgattcaggtaggtatcaacgaccgtcagtttgttgaagtaaaagaggggctgaaagcaggcgatcgcgtggtgatggcgcaaaatgatgcaggggtggcaaatggctga

SEQ ID NO: 192221 - DNA, 816 bp, Klebsiella oxytoca
atgatgaccctgtgctatagcctgcgtgatgcagaacgctgggcggcattttccggcgacgataatccgattcactttgacgttgccgaagcgaagcgttttggtctggaaggattatgcgtacacggtatgcgcgcgatgctggatgtaaagtcggcgatcggcgcttctctggaaaaagatgctctggcatcaggtggcctggtgttcagctgccgcctgcgcgaaccggtagcgtgtggaataccctatcagctgtcggtccgcgaaacgcgtcgtcatgagcagatgcagctcagcgggagtttgttaaacgttcagacgcaacgtaccggcatcagcagtaagctggttagttctaaagcgctagagttatcgcccgtcgtgcagtcgtatacgcttggcgaggatgcattaacggcgttgtacgatcgattcctcgccgtgaaaagcccggcggcaccgctgtggagctttctggatgcggcgttgttccgtgaactggtcaatgcgccagaaacgcttgcaaccgtacatagccttattcctcagcctgaggttgccagcctgcgcgacgtatttcgtctggtgcaggtcgtgcaaactcaccatgaggtgcatttttcgcctcagctgctgagtcaatgggaggaaagccagcacattacatcgctttattattccatccagccgacgctggtgatgggagacaagcatgccgggctgattttagtggctggcattcaggcgtggcgcctcaatgaaccgctgatttccgttacggtgacgttgaaaaccgggccgctggcggcgtag

SEQ ID NO: 192222 - DNA, 948 bp, Klebsiella oxytoca
atgagggtaacaacgcaaatcacatggcgttgtgatattcgttgtgctcattgtaatcaagaccatttaaaagttgatcttgattataaactctttgaaaactttttgagttgggttaaagataatattggcttagatgaaatcgggataacaggaggagagccatttttaaagagagaacttatagaaagcatatctgcttttgctaatgaaaataatttgccttttagcatcatcactaatgggcgctgggcaaaagaatttgatgatgtatataatgtattttctaaattacaagagatggggctgggactagtaactgtaagcacagataaatatcatcaaaaatttgtccattttgaaaacattttgaatattctgttagtttgtcaaaagttgaggcttcagactcatgtttactcaaccttagaccattcagacgatgctaacaatgaattgacctttgaatttttagcccatatagaacatgactttccgagtacagaaatatcctcaagatactctattccggtagggtattctttattaaatggaattagtgttaattctggctttgaaattagtgagttaaatctttcgtgccctcaaacggatcaattgacagtatggccaaatggtgatgttttgccttgctgttctgcgggaacacatagtaatctagtgcttgggaatattaaaacccacagtcctgaagatattcataagaaattcaaaaatgacataattttaaacctcattagagattatggtattggcgcattagtttcaactttgtctgaaatacaaagaaaatctatttcctctaaaaaatacatgtcagcatgccatctgtgtatggaaataaattcacgattggattacagagcaagcattaggtcggcaggtggaaggaattttgaccccttatcaataatatttatcgtttaa

SEQ ID NO: 192223 - DNA, 531 bp, Klebsiella oxytoca
atgaaaaaatttaacttactatctaaagatgaatgcttgaaactattgcatgccgattcatataatggatttcaaaggagcttaatctttgatgatcatgatttgatgggcttgagcgtaaagagaaaatctcactcaaaaacacttagtaacaatgatactgaagatacattatcgacgcttcacaccgcatgcgaaaattacatatcccagaaatggaatctaaaattatgcgaatggagttccccagtaataaacagatattgcgtaggtgattactatgaacctcatactgatacaaatagtggtcacgcctgccgaagagcatttagttgcgtaacatttctgaatgataacttcggtggtggtgaactttattttccacatagagacaaaatttttaatcctaaggcaggtgttagtattctttttgcagctgatgagcttcatgggtcaagcattgtccgttacggaacaaaattctctatggttcaatggattttatatccagcatttttatgtgatagttaa

SEQ ID NO: 192224 - DNA, 285 bp, Klebsiella oxytoca
atggatttagaaacaccccgcttaaagcttgaaccctatgactctcattacgaaggcttgagggtgatggataatgatgccgttgtgatgcgttatatcaccggaggtatcgttaaaacgcccgaagaaacctgggaaggtatcagaagagttcaggcacgttgggataagtacaacttctcatggtgggctatcaaagagaagtcctctggcgtgatcgttgttagctcatccgatacgatttgtaagtgcactggggcaaacccgcacctcactcttgagtga

SEQ ID NO: 192225 - DNA, 540 bp, Klebsiella oxytoca
atgcgcattgtaagtctgaatcatctcaatcattgcaatttggttacaaggtctttagcttttattgtggattcagcaaaggaaacaaggagccagacaatgatcacctcagtaattcattaccaaattgaaacttctgacagcatggctgacagccaacttcttcccatcgaggctggtttaaatgactttaatgatcaaatgaccggcatcagtgatcgtaagcctttatccgttattgtcagatgcacggaaacgggaaagattcttggggggatgcagggcagaacatctctgggtttgttgtttatcgaccttttttacctcccccctgcactacgtaataatggattaggcacaaccatcttggctcaatttgaaaacgaaggccgaaaacgaggttgtatcgctggttttttgtacacaattacttttcaagcccccgatttttacaaaaaaaatggttgggaagaatttgggcgaataaattgtttaccagaagggacaagtcgcatttttatgaaaaaatcgttttcatga

SEQ ID NO: 192226 - DNA, 693 bp, Klebsiella oxytoca
atgttgaagtcattattaaagatagtggcagtttttgcgttttcagtaagttttgccgcctatagcggtgtagttgtggactccacacggcatctttataaagagggggcgcgtgaaattaacgctaacctggaaaacaaagataatattccgtatttaataaagtcatgggttgagcctcgcgaaggcagccaaatgtctttttttatggtaacccctcctctttttcgtctggaagcaaaacagaaaaatactgtgcgtatatttcctaatgcgaacataactaacgcgcctaaagatagggaaactgtttattatttcaacgtaatgtcaatcccaccgaccagtgacgcagacacggataaaaacaaaattcaactggctgtgcgtcatagaatgcgtcttatctatcgcccaaaatccttacaggatctttcgattaaccaagaagcaaagaaattagaatggcggagaagtggtaataaaatcacgctaaaaaacacgacaccattttttatctattttaagtcaatcaaaattaataacacagaagtgagtggttccattaacaatatcgatgcattcgcaaccaaagaatttacattaccagcgggtgtaaatggctcagaaatagtatggaaagtcgcaactgacaacggaggcatgggttctgcctactcgtcatcaatttaa

SEQ ID NO: 192227 - DNA, 1014 bp, Klebsiella oxytoca
atgaaaagtcttttttttattattagcttactctgcataagctcgcatgcagtagctacctgcacgtatggtaaaactggtggcggtgcaattagcgttaacttcagtggctctgtaatcgctgattcaacattacctaatggaagcatattagcgtcagcaaggcgcggaggtgttgatcccaaaacattttcgtcatgtagcgctagtgacgtttttgttgttagaaccgttcctacagttagtccatctagcatttcaaaaattggtggcaaagtcgtatatgagacaggtatccctggtattggctttcagatctccgatattacgttaccatctgcaaactatttttcaccagcaaatatagatcagccagaagcagccaatactcattatttctctaactcatctggccaagtcatggtttggttagttaaaacaggccccataactaaaacgacgggaataaaaacctctgtttactttatggctggcccgccaaatcagactagtactggttcgtcaaatgcaactgaattattcagaatcattattgacttaactaacataaaattcaaagaaaccacatgtgaaatttccccccgaaacggaaatatagtaagactatcaaacattgatatttcagagctgaactcagtgtcagttggaagtgccgttggaaaagcaaaaagcatcacacttgatattagctgcccagactccgaagttaacaagaaatatatttactggtttagccctatatctatagcatcaactagcaccgatggattattactaaattcattatcagatggtgctcaaaatgtaggcataattttaaaaaaaggaagctctgcgataaaatttaacaatctggaagcctatcccttcaccagctcgaagagtcaagatataacgttaacggctgattactataaaatcgcccaaaatgtttcaacaggaactactggggagatcaaaacagacctagagattgtccttcaggaagaataa

SEQ ID NO: 192228 - DNA, 174 bp, Klebsiella oxytoca
gtgaattattcggcaaaacgccagtatagctgcataataattaatctcacgccttatgtcaccgttgatatcactacaaaaaagaacggcactggcggggggccgcgtaaaggcgcgccggcgcagggtttggcggaagttgtcagcgagcaggcgaaaggatataaccaatag

SEQ ID NO: 192229 - DNA, 1152 bp, Klebsiella oxytoca
atggcagtatcctcttcactgatcgccgaggccattcgctggcgacgtgattttcatgcttgccctgagctggggtatcaggaacaggaaacctcgcgccgggtggctgaactgctcgcctcgtttggcctccaggtgcatcgcgggctggcgggtaccggcgtggtcgcgaccctggagaacggccccggtccggtgattggcctgcgggccgatatggacgcgctgccgatcgccgagcagagcgatatcgattacaaatcacgcaatcctggcgtgatgcacgcctgcggccacgatggccatagcgcgatgctgctggcgacagccgcgcatctggcgcagacccgccgctttcgcggtaccgtgcactttgtttttcagcctgctgaagagaacctgggcggcgcgcggaaaatggtggaggaggggctgtttgagcgcttcccgatggatgccatatacgcgctgcacaactggccgggtatgccgctgggccaggtggcgatcggtagcggggcgatgatggcctctctcgacgcgtttgaaattactctgaccggaaaaagctgccatgcggcgatgccggagcgcggagcggacccgattgtcgccgcggcgcagttgattatggccctgcaaaccattccttcgcgccgcctgtcgccgcaggagtcgacggtggtgagcattacccagattgccggcggggaggcgatcaacgtgctgccggataaagtggtgctacgcggaaccttccgctgtctgaataaccaggtgcgcgtgcgggtcagggggctgattgaaagctatgtcgccgcccagccgcaggtatcagatgtggaaggcaaaatcgcctggtatcccggttatccggtgaccactaaccatccggccgaagcgcaaaaggtgcgcgaggtagcgaccgcgctgctgggggagtcggcggtgaactggaacggtaatccgtccatggcctcggaagattttgcctgcatgctggaggcgtgcccgggcgcctatttttggatcggcgccgatggcgagacggcgtcaaagccgctgcataacgccggatatgattttaacgatgagctgctccctcacggcgtggcgctgtggacggcgctggtggagaaactgctggcgtaa

SEQ ID NO: 192230 - DNA, 732 bp, Klebsiella oxytoca
atgcaggcgattattactgcccataaactcggcggcaaacagcgttttcgggctgccgtacatctcctgcggagttccctgctgctcgatcacgccgttgttaagcagcagaatgcgatcggaaatcgccatcgcctcattctgatcgtgggtgaccatcagcgccgaaagccccagcttgacgatcagctcgcgcaaaaagacccgcgcttcttcccgcagcttggcgtccagattcgacagcggttcatccagcaggatcaccggcgggttgtaaaccagcgccctgccgatggccacgcgctgctgctgtcctccggagagctgatgcggatggcgactgccaagatgccccagccccagctgttcaagtacggtctggacccgttgcttgatctccgcggcggcaaccttacgcagcttcagcgggtaagcgacgttttcaaacaccgttttatgcggccacagcgcataggactgaaacaccagacccaggttacgctcctcggccggaatttcgctacgcgggttgccgtcatagacgcgggattttccaatggtaataatgccgccggtcggcttctccagcccggcgaccgcccgcagcagcgtggtttttccgctgcccgatggcccgagcagcgacaccacctctccccgcttcagttccatggacacgcccttcagtaccggattatcgccataggtcagatgcaggttttctaccgataa

SEQ ID NO: 192231 - DNA, 759 bp, Klebsiella oxytoca
atgactgataaggcaacgttccgtgctgagtgccctgaatgcgtgggagaaagaaactgtatagttatcggagaaacaaagcggagttgggagagtggtgatagacgaaattcaatgcaatggggtacggaatatcgtctgttacaatgcaaaggatgtgatacggtgttttatcattcaaaatcgtgggacagtgaagatttgggctacgatcatgatgaagaaggtcaaactgttatcacctctaactatagatatgaaacctatccgagaacacttgagcaccgaccgcaatggattgaaaatatagcagccattgattaccagctttatctcttacttaatgaagtgtatcaggcctattataatgaatcttatattttagcctccattggtttaaggaccgcctttgaccgcacttcagaggttctgaacatattacctacattacctttagggaaaaaagttgaaaaacttgcagaggatggttatatcggtgaaactgagaaaagtcagttgcttatagtcactgatgcaggtaatgccgctgcacatcgcgcttggtcaccgacaaaaagcgagtttaaatctcttttaacaataacagaggactttattcgtcggtctgtacttcgcgatgatagcattatgaaaattgccggaagaatcccagctaaacaaaaacatatcggcaaagacactaatgcagtcaatgtacttcccgatctattagtacagtcttataaagaaggtgagtag

SEQ ID NO: 192232 - DNA, 201 bp, Klebsiella oxytoca
atgctgtatttatatgaagcgatactacctgaagacaataatgacggcgaggtcaaaagggcttatgaaataacgccaatcgaaaaagagggctatatagcctcttttaacttcaacaatgcggaaaaagccagccaggccattgattcctggctggcttcacgaggtgttttaagccagtatctggtcaaagccgtttaa

SEQ ID NO: 192233 - DNA, 189 bp, Klebsiella oxytoca
atgttattcagagagttaattgaagggaatgtcattcccctaccggaaggtgatgaatttactgtgacaagtgttcctgaaaaagacccggtgacaggatgcctgtttgttaacggtatattatctgacggtttcgaatcacggtattttgcgaccgaagatactctggtaacggtggttgaagagtaa

SEQ ID NO: 192234 - DNA, 189 bp, Klebsiella oxytoca
atgccggtatacacaatttcagtagaggtaaaaagccgctggtggctgccgttctacctcaagacactgactttattctgcctgatgttccagcgcgaacctgattacgaaaagacagccgcactcatcactaaatatggcatcagccagatattgaaggcggaaccagtgcgaaagaatacggagtaa

SEQ ID NO: 192235 - DNA, 330 bp, Klebsiella oxytoca
atgaaaaaagtattattggctttgattgcgattgtttcctttggtgcaggcgcgtcggaagaaatgagaatacctacagatccaaaagccacgtataccattcttgaaaaggatatgaatggcagcatggcaaccatcacaacgatgagagaggggccttcagggatatcctactcacagcgcctttatgactgcactgcgtggaccgtgaaatatcttggtgatggagacacgctggagcagatgaaagcatccaagcctgacgaagacatgtctcaaatagttgataattcaatagcgtattatataggccaacgggcctgtaaataa

SEQ ID NO: 192236 - DNA, 273 bp, Klebsiella oxytoca
atggccgcaaacatcaagaagatacatcttaaacttcctggcgataagccgtggcctccagagtactcgctgagccagagaacctgcgataattatttggtttacgctaagcatctttataatgacgaacactaccagatagtagccataatcagccctaatgcacatgatcagattgattcattactgccatcgattattaagcttgtagaagatacattctctgaacttcctcaagatgaacttgataagctagagacatacaatgcctaa

SEQ ID NO: 192237 - DNA, 222 bp, Klebsiella oxytoca
atgatttatcccttcgatgcatcctatgcacagaaagtgctgagaattcattacaaatatgcggatgtaattgttcgaaaaagagaaaggcttgccgccagaactgctgggctaattgctcatgaccgaatgctgacgacgtctgacaaagacatttctaatgcggcgcatcgtagagaactctcgctaaacactctgcagatagaggccagggcggcttaa

SEQ ID NO: 192238 - DNA, 441 bp, Klebsiella oxytoca
atggctaaagacggaaaacacgtaattcatgcggggggcattttccctaatccgcaattgaatcgtgaaggtgcggcggcggcagataccaaaccaggcacagttgggttcttcgataacaccacgaagaaatttactgcgtcggttgatggtaatgaggacgccattctgtatgtcgccaactacgactatctgcgctgtaaaacggtggatgacactatcgctgccggggactgggtggtggcgatgcatcctactcctagtgtgttctttaacgtccctgcggcagcaggcacctatacgaaaggccaacctctctcgatcgctaatggtcgtgtgaaggcaaaagctactggcgaatcaacccgtgcttatgtcgaagaggatcgctctaccaccattgcgacagcaggcgatctcctgcgcgttgtcattaagtaa

SEQ ID NO: 192239 - DNA, 519 bp, Klebsiella oxytoca
atgccatcaaaattcgaacaactctcagagcatttaaacgaatatgccgcagcatacagacaatattgggatgatttagagactataattatcagacttgagggtgagttagtttcatattttggcatccctcataacaatatcgttagcgatagttccgataaatttcataatagatatataactgtaggagctaaaggggatacatctcagtttagtgtccgtgaagtaagggatgtgaaagagctaaaaagaagccaatccgacaggaagatttattttgcaattttagtaaaaattgaaattaatcaagaaaatagcgtaagttatgtaaacaatttttttgccgcggaagtctgtatctctgataagcattttgttttcaaactttcacctgacttaggtgacgatattgttatcaatacgccaagagcagttgcaaaaacggtttctttagaaaaagtatgcaaagctatttatgaatcaatcatgaataaatacgacccatcttcattgtag

SEQ ID NO: 192240 - DNA, 687 bp, Klebsiella oxytoca
atggctacttgggagtgtcccttttgtggtcggttatctgttttaaataaaatagaaagaaaatataacagtttctttgttgaggctgacacaaagcaaggaaacttgcttgttcaatcttgggtgcatgtttgccctaatcctgattgtaaagaatatacctacatgtcagagatcggaaccgcagtttttgaagggaaccgctatgttgccaaggagccgattgaatgttggtataaccgccctcaaggaattgtaaaggctttccccgattacattccgcaagtaatcctgtcggattacagagaagccaccttaatcagagatttatctccaaaggcttctgcaacactagctaggcgctgtcttcagggtatgattcgagacttttggggcgtcaaaggtaagagtctatttgaagaaattagggcaatagaagagaaagttgatgctgatacttggcatgcaatagatgctatcagaagcattggcaacattggtgctcacatggaaaaggatatagatgtgatcatagatgttgatggtgatgaggcggggttgttaattagcctgatagagacactgcttagtgactggtacgtagaaagagaaaatagacgattacgctcgcaaaaaatcattgcagttgcagcagaaaaaaaagagcttaagcaaaataagctatga

SEQ ID NO: 192241 - DNA, 459 bp, Klebsiella oxytoca
atgagtcgcctaactgccatcgccagcgctgtgattatctgcctgatggtaatccttgggtggctggctaatcactactacgacaacgccaccaagttcaaagagcagctcgataaagccactgaaaagctcagtatggcgaacgccaccatcactgacatgcagaaccggcagcgtgacattgctgcactggatgccaaatacaccggagaactggcagatgctaaagccactatcgatcagcttgaacgtgatgttgcttctggcaagcgtaggttgcagctcaacgccagatgtaccgcgaacggagcgaccagcaccatcggcgtgggcgatgcttccgccccccgacttactgactccgctgaacgggattatttcaccctcagagagcgaatcgtcaccatcacagggcaagtgagttacctgcagggttacatcagaagccagtgccagtaa

SEQ ID NO: 192242 - DNA, 450 bp, Klebsiella oxytoca
atgcaaaccagccctgaaggaattgcactgataaaagggtttgaaggctgccggctgaccgcttaccccgatccgggaactggtggtgccccatggacaattggctatggttggacccttcccgtcgacggtataccggtaaggccgggaatgactatcgatcaaagcacagccgaccgattacttaaaacaggtctggtgagctacgaaaacgatgtactgaaactcgttaaagtgaagctgagccagaatcaatttgatgccctggtatcgttcgcctataacgtcggctcccgcgcattatcaacttccacgctgctgaaaaagctcaactctggcgacataaaaggcgcagctgatgagttccttcgctggaataagtccggcggaaaagttatggcggggctcacgaaacgccgaaaggctgagcgtgaggtgttcttgtcatga

SEQ ID NO: 192243 - DNA, 321 bp, Klebsiella oxytoca
atgaaaacgcctctgccacccgtattgcgtgccgccctgtatcgccgcgccgtggcctgtgcctggctgaccctgtgcgaacgccagcaccgctatcctcacctcaccctcgacgcgctggaaagtgccatcgccgccgagctggagggcttctacctgcgccagcatggcgaggaaaaaggccgtctgattgcctgtgcgctgctggaagatttgatgcaggccgggccgctgaaagccgccccgtcgctgtccttcctcggactcgccgtgatggatgagctctgcgcccgccatctgacatcgcctgtactgcactga

SEQ ID NO: 192244 - DNA, 165 bp, Klebsiella oxytoca
atgtgcctcaccccacatacctttctaaaaatgcttattacactattgacgagcagattctcataccatcatttatggcatttactggaagtggatttattgacctgcgaacgtctctcattgatgattgtgttgttatcaggaatgaagattttcctggtttaa

SEQ ID NO: 192245 - DNA, 228 bp, Klebsiella oxytoca
atgaaacagcccgccatcaccgtcaaagacctcgaatgcctggagcacctgcgtaacgtcggccagttcgtcggcgagctgatgcaggtgcaggactgtacttccctgcgtcgtgacccgactcagcagttacagctcacctccgtgatttacctgatgaccgcccagctcgacggcgtggtcgaacgctgcaaccaccgctggttcaccggggagggcaacgtatga

SEQ ID NO: 192246 - DNA, 321 bp, Klebsiella oxytoca
atgaaaacgcctctgccacccgtattgcgtgccgccctgtatcgccgcgccgtggcctgtgcctggctgaccctgtgcgaacgccagcaccgctatcctcacctcaccctcgacgcgctggaaagtgccatcgccgccgagctggagggcttctacctgcgccagcatggcgaggaaaaaggccgtctgattgcctgtgcattactggaagatttgatgcaggccgggccgctgaaagccgccccgtcgctgtccttcctcgggctcgccgtgatggatgagctctgcgcccgccatatcacatcgcctgtactgcactga

SEQ ID NO: 192247 - DNA, 321 bp, Klebsiella oxytoca; identical to SEQ ID NO: 192246

SEQ ID NO: 192248 - DNA, 267 bp, Klebsiella oxytoca
atgcacaccgctttttcttccccgtcttctgcccctgccgcgccgctgatgccggtttctgatgccgttcacgagcgctttattcgcctgcccgaagtgatgcatctgtgcgggctgtcccgctccacgatttacgatctcatcagccgggaggctttcccgaaacaaatctccctcggcgggaaaaacgtggcgtgggcgcagtcggaaatcaccgggtggatggccgaccgtatcgccgaacgcaaccggggctatgacgcatga

SEQ ID NO: 192249 - DNA, 222 bp, Klebsiella oxytoca
atgcgccgaacggtcgagcgcatggccggtcaggagtgcgggctgctggctgagtcccatcagctccggggcaagcgtggccgccagctctgtcccgtgcgcctgcataaagtcattcagccggttgcggatactgatgcgctgtaccgcttcatgggagcggatatagcgcccggcggcctgatttatctcccattttttgacatcgataatgtcgcgtaa

SEQ ID NO: 192250 - DNA, 222 bp, Klebsiella oxytoca
atgcgccgaacggtcgagcgcatggccggtcaggagtgcgggctgctggctgagtcccatcagctccggggcaagcgtggcggcgagctctgtcccgtgcgcctgcataaagtcattcagccggttgcggatactgatgcgctgtaccgcttcatgggcgcggatatagcgcccggcggcctgatttatctcccattttttgacatcgataatgtcgcgtaa

SEQ ID NO: 192251 - DNA, 1125 bp, Klebsiella oxytoca
atgacggcatacggaacggagtttttctcaatgaacgatgtaaaccgactcaggatccttcaggatgttatcgaccgccgtcttaccacacgtcttgcagcaaaccggcttgagatatctgacagacactgccgacggttgctggagcgctatcgtgaacatgggccgctttcacttgttaaccgtcgtcgtggccagcctggcaaccggcaactcatgccgggcctcgctgaacgagcactacgtattatccgcgaacgctacgctgattttggcccgactttagcctgtgagaagctcgccgaggttcatgggctgtatctggccaaagagacagtacgcaagctgatgacacaggctggtttatggatcccccgcaagttacggccgcctcgtgtgcatcagccacgaccgcgtcgggcctgcaccggagaactcatccagattgatggctgtgagcatcgctggttcgaggatcgtggtccggcctgcacgttactcgtttacgttgatgatgcgaccagccggctgatgcagcttctgttcgtcagttctgagtccactttcacctattttgaagccacccggggctatctggagcgttacggtaagcctctggcattctacagcgacaaggccagtgtcttcaggatcaacaacaagcaggccatcggcggagatggccagactcagtttggccgtgccatgaacgagctgaacatcaccggtatctgtgccaataccagttctgccaaaggccgtgttgagcgggcccaccttacgttgcaggatcgcctcgtcaaggagctgcggctccgcggtatcagtacacccgaggctgcaaacgcctttgccgaagagttcatggctgactacaaccaccggatagaggcagcaagattacgcagttttgatcagaactcagttgaccatcccgggattctgctcatggcccattcagcgcagttatccctcctggataaagttaacccgcattttaaatctggtcggcgtctggttaaacaaagagtcacattgctcctgcggatttgcagtcgtcagttccggcgtcttctgtcgcgttaccgtgaatctggcccgctttgtatggctaaccgctgttga

SEQ ID NO: 192252 - DNA, 309 bp, Klebsiella oxytoca
gtgtccattagcctgattaaactgctgcacggttttgaaagctcggtattactcgtcgccgcgctgaaatatattacggccaacttcaacccgctgctttcggccacggtttatttaatcggcttccagttttcgaaaagctttagctctattttcctttctaccggcatcggtcatatgtaccagagcatgggctttaccagcagctatatcgtgctcggcggtatcgccctgtgctttaccctgatttcatttattacgctggacaaagcgcgcgcttttgccccgcagccggcgcccgcgcattaa

SEQ ID NO: 192253 - DNA, 240 bp, Klebsiella oxytoca
atggcaaagaaagcacgcagaaacagcacgtcgcaagggtacgcaggaatgacgatggcgcagtttttccacagccacatccggccagacaaaagcaatgccactgattatgcgagtcttcggcatagccttcacgacgccgtaaaaccagtctctgaaggggtggtgtgcatgcaactgactcgcaatcaacgccgactggcgagaaaactcggaattgaaatgaaagaggttgaataa

SEQ ID NO: 192254 - DNA, 831 bp, Klebsiella oxytoca
atgaatatgaagtctgtcaacggcgttctcatgatgggtagcagtgaaatcgcagtggttaccgataaagaacctaagcatgttgttcgcgacatcaaaacaatgctggaacaactgggtatctatggtccaaatctggacgataatgattttaaaggttttttcatttcatataaggattactgcggacgtaccgttattgatgaaatctggctaaacgaagacctttcgatgacgctcattactggttatgacccaaagcgccggctggctcttattgagcagtggcaggacatgaagcgcgaattatctcaaccgcgcatcgctgctcagcccgtacagccggagatcggaattaaccctgattttacagccctgacccgcacggtcgcagaagccaccgctgcaggggtaatgaaaagcatcctggaaactactggcattcaggccgtcgtacatatcagcgcaacggtctccaccccgtcgacagtagctcttgtcgatcatgtaggtcatgccgcccaaacggcgcaggaggaaaccaaagaaccggagtatgtgccggtgcacaaagtttcctgggctaccggattatctgatcccacctgccgccggctggtcaccttctccgaccttccgaactgtcatatcgatggcgttcgcgggctttgtgtacatcgcgaatttttcatggctgcagtcgaggtcctgattaaggaatctactccaccagccaaaggtcgcaaacgctggcatcatccggagttcggcggctttgagctgcgtaaagatctggcggaggttttcggggagggtcatcacggtgaatag

SEQ ID NO: 192255 - DNA, 225 bp, Klebsiella oxytoca
atgaaaatcgaatatcaggactacggatccgttgcaaatattgtggtcaccagcacggtgtttgaattccgccggcacaaccgggcggttgatgtagcgttgcttctcacgactgaaatgaccagccagagaagcggtattttcattatgaaaacgctcttaagcggaaagacacatcacgcgctgcgggcctataaacatctgatcagggaggctaagcgatga

SEQ ID NO: 192256 - DNA, 384 bp, Klebsiella oxytoca
atgagtaatatcactgatctggcgcagcgtgtgcgccattgggctgacatggccgcactgacaagtgagcgcgcgtcttgcttgagcgtagaacacctggaagaaatcgctaatacgctggagtccatcgcctccaccgttggccgaggtgaggtattggttactgtggccggttttactggctgtggtaagggcgcgattgctggcgaaattgagattgccttgaaggctatcggggtgccagtaacgtgggttaatggtgatgccgaaaaacggatgactgcagccgactggctaactgctatcgagatgtataagcccaccgtgcgaattgctgaggtaaatattcctcgcgccgcagacatcaaggtcgaggcgaagtga

SEQ ID NO: 192257 - DNA, 171 bp, Klebsiella oxytoca
atgactaccttttaccaattgactgccaccagcctgcacggccagcccatctcaatggctgactatgctggcaagctcgttctggtagtcaataccgccagccactgtggctcacgccacaatatgcagggctggaagcgctctacgcgaaatacgctgcccatgggctga

SEQ ID NO: 192258 - DNA, 378 bp, Klebsiella oxytoca
atgctggagttctcacacacccagcaaggaaatctaatggaccagttttatattcacgttcgtctatttgaagctacagccgaacagaccaaaaaatttgaagagtttatgcttctctttctttaccagaaaacaatcaaagactctgacgatagtttttgcagactgactccagaaggatacatcctcaaaagcacattgaactgccaacaaattgttgatcaaacatttgcaattgctaatagtgctggtgttaatgcgaatatctttgtctgtaaatttgaacaatgtgcattgttacttccgtcagctcacttagttggcaacgatttcgtttatcacgatctgacgccgaagcccatcaagttcgattcttaa

SEQ ID NO: 192259 - DNA, 1407 bp, Klebsiella oxytoca
atggggaataatgaatgggtgagtactacgcttggcgagctagttgacacatttggaggatctgttcaaacaggtccttttggcagccaattacacgcagccgattatgtaagtgaaggcattccttccgttatgcctaaaaacattagaattgaagaaattgatgtagaagatattgcaagaattagcttaagcgatgctgaacgattaaaaaaatatcaattagcagaaggtgatatagtatatagccgtcgtggtgatgtagaaaaatgtgcgctagtaacaaaaaatgaaaccaactggttatgcggtaccggttgccttagaattagaataccaaaaaacaaatcgataactccttattttttacatgcttttttatctacaccagttactcgagaatgggtttctcgtcatgcaattggtgcgacaatgcctaatcttaatacatctatattaagaaatgtccctatagttgtaccaccttttgattcaatgaattttattggggcaatgtggataaaattaaacagaaaaataatattaaatagaaaaattaaccaaaccctggaacaaatgtcacaaaccctgttcaaatcctggtttgtggatttcgacccggtgattgataacgcgctggatgtgggaaacccaatcccggaagcgctgcaatctcgcgccgaactgcgtcaaaaagttcgcaatagtgcagatttcaaaccacttccggcggatattcgtgctctattcccggctgaatttgaagaaacggagatgggttgggtaccaaaaggttggatgctggagtctgtagcaaaatccataaatataaatcccggtgtaaaattacctcaaaatacagttgcaaagtatgttgatatgaagtccttacccactcaagggtattcgatctcagatgttattgaaaaaccatatgctggcggtgccaagtttcaaaaaaatgacacattatttgctcgaattacaccttgtttagaaaatggtaaaacgggattcgtagatttcttagatgaaaaagaaactgcatttggttctaccgaatttattgtgatgcgaggcactacgaaagtacattattcgtatgtagcttgtttagcccgagaaaataatttcagatcacacgcgatacaaaacatggttggctcatcaggtcgccaacgagtacagaatagctgctttgatagtttttatatttcgataccgacaccttctgtaatgagtttatttgccggaaaggtcagtagttattttgataaaatgtattgctgtaatgtggaaaacaaatctctaaccgccctccgcgacaccttgctccccaaactcatctccggcgagctgtccctggaggatctgccagatttagccaaccaaaccgaacccgcataa

SEQ ID NO: 192260 - DNA, 153 bp, Klebsiella oxytoca
atgatcaagccggatgggggctggctgcagaagcggtcatgtccaaaagcgctgctactggcgtatcccctaaagaagggcgcgatgtgcgtagacttcattatggaacggatcgccgatatatcaagaaatcagcggataaaatgtgaataa

SEQ ID NO: 192261 - DNA, 2157 bp, Klebsiella oxytoca
atgattcatttgccaggctggcgcaatattccctccgccagaacgctgtccatcatgattgtcctcgccgggatcggcttaatcgtgtccattgtttcgcttctttatctcacccaacacctgatcggcctgaaagcaaacgaaattgataagcatcgttccgtgttatcggtggatggggcggtgcagacctcggtgaaccgcgtgctgtcgctggtgatggataacgctatctgggatgatgcggtgcatcagacctatgccgacaggctcgatccgcaatggctctacaactcatggggatcgggttttaaaatcaataatctctatgacggcactttcgtactcgaccagcactatcgggtgctgtggggatcgtttcgcagtgagagctttaccgagcaggatacccaattcctcggcaacggttttcgttcgcttatctcgcagcatgccgcagcgctgcgcagcggtaaaagcgcttatgccggcatcacgcgaacccgagccggtattgcgtttattggtattggcctgattcgcccgacggcagggcggctacaggtgcatgatgatacgcgtcgctatctggtgatcacccgccatatcaactcgcaaatgcttgagcgcctgggcgacacgtttcagattcgcaacctgcacgtcacgccaggcggcggtgaatacagtattccgttgcgcacccaggccggggagatcgtgggttacctgagctggcagccggggcttcccggcgcggaagccgcgcgggcggcctccgacagtatgcggctgattgccgccgtggcggctgggctgatcctgctgtttattctcttcagctacctcgggctttacaagctggcgcgcggcgaaaagctggcgcgcgacagtgccatgaccgactggctgagccgcctgccaaaccgacgggcgctgatcgaacgccttaaccaggtgtgcgaaacctcccaacaccaaatgcaaagcgtggtatttatcgatctcgacggctttaaggatgttaatgataactatggccatgacgttggcgatgcgctgataattcatatcgctaaagaacttcgggagcgcgttccgcctgaagggatgctggcgcgtatgggcggcgatgagttcgcgatgacggtaagcggcgaacaggcggtaaatcaggcgctggcttttgcctgggcggtactggaactgttaaaagcgcccgttatcctcaacgagcgaaaaatttatatcagcgccagtatcggtatcgccagcggcctcccggcaagctgctccagcaccgagctttttcgccgcgctgatattgccatgtaccattcgaagaaaaccggcaaagggcgcacgacctggtatgacgaagcgctcagcgacgcgcggcagtatcagctgaatatcgaaaatggcattcgtcagggactggagaacgaagagtttgatgtctggtatcagccgattgtcaacgccgatacgctggttatggaaggcgtggaagcgctgctgcgctggccgcggcgtcctcagggggcactgccgccggatgcgtttatcggtatcgccgaaagtagcggtttgatctacgcgcttggccagtttgtgcttgaacgcgcctgtagcgaactgcagccactggacgatctgctgctgtcggtgaatatctccccggcgcagttccgcgatccggagtttgagtcgcgggtggtgcaggtgctgggccgctgtcatttcccggcccgtcggttacagctcgaagtcacggagagctacgttctggagaatcccgagcgggcgaagtcggccattgagaacttaagggcgcttggcatcgcggtggcgctcgatgattttggcaccggctattccagcatcggctatttacgcagcttcagcttcgacagtcttaaaatcgacaaatccctggccgggctggtggatgtggatacccaggcggcggagctggtgcgcgggaccgtccgtattgccggagcgttaggcatcacggtggtggcggagggcgttgagaatcagcaacagctggcgctgctgcggcgggcgggatgtgacagattgcagggtttcttcttcagcgagccgatgcccgtcgcgtcgttattgcagctgcgccagcagcaaggctga

SEQ ID NO: 192262 - DNA, 396 bp, Klebsiella oxytoca
atgtctaacactaacgccaattttgagatgaacgggatcctgttagggcaagaagtccgtaaatgtaaaactcctcaggagaagattgccattatccagcagacgatggagccaggcatgaatgtctcccacgtcgcccgcctgcacggtattcagcccggcctgctgttcaagtggaagaagcagtaccaggaaggcagcctcaccgccgttgctgccggagaagaagtcgtgcctgcctctgaactcacagctgcgctgaagcaggttcgggaacttcagcgtctgctgggcaagaagacgatggaagttgagatcctcaaagaagcggtggagtacggccagtcgcgaaaatggatagcgcacgcgcccttgttgccaaaggacggggaatag

SEQ ID NO: 192263 - DNA, 291 bp, Klebsiella oxytoca
atggatagcgcacgcgcccttgttgccaaaggacggggaatagccctggtcagccgcaccatgggtgtgtcgcgtgcgcagctgtcactgcgaattaaccgttctgtcgactggcaggacagacgctgtaaccggcgtaatgacgaagcagacgctgaaatactgtcggatattctcgacatcatcagcgatatgcccagttacggctatcgtcgtgtgtggggtatcctgcgtaagcaacgcctcacagaggggctcccccggtcaatgccaaacggctttacagggtaa

SEQ ID NO: 192264 - DNA, 198 bp, Klebsiella oxytoca
atgggaaacaccccgagttctggttatgggaaataccccaggttagtttttcgtatccacgatagtgaacaccagacgaccgtcgtcattctgcgtcattgccgctttaagtggtgtgttagcgttaatcttcttcagggctgggttgatgaaggtccgcttcatctctgcgaagttattgcgttgctattcaggtaa

SEQ ID NO: 192265 - DNA, 741 bp, Klebsiella oxytoca
atgttgaataaagtgtcacaaattaatttggccaaaatactggctgaaaaatttaacgaaggtgactggcaggagctgtttgctgttacagattgtgaagacgttccggaaggactaaatcaattctaccggcatgttcactgggacaaccctgagctgaaaggggtagccatctcagccatagaaagcactctggccagggacgctgataatctttctaagatctgggcgctggataatgttcaacgctttatcagcattgccaatactgagttattcaatgaaataaagaacattgtgaatcagaacgggcaaagaaatgtttcggcagcaccagtgaaaaatgtaaatgaaaacatttaccaggccttagaagatgcggaagtgttgcttaaaaataatgggccacaccgggcatatgatcgtgttcatacagctcttcatgcttcattaagacaaatgtgtgccaaccatggaattgcgaccaatagtacaaatgataatgttccaggcttgctttccctgataactgcacatctcaaagacctgcctgatgatggaagaaatgaagatgtttttaaaatgttgagatcatctgccgcaatacttcatgggatcaataacctgcgtaacaattacagcatggcccaccctactgaaactttgcttaatgaagccgatgcgcgttttgccataaatctggttcgttccattatgacttatattgatgaattgctttaa

SEQ ID NO: 192266 - DNA, 381 bp, Klebsiella oxytoca
atgggaagtttatctaaagcattactcatatcgcttatatacactgcgatagtgataattcttgatgcagttgccatctactatttcaagctgagcgccccgatcattgtcgtagtgacgacgtttttgatgttctgcatattagcgtttgaatacgtggatgcgacaaagcgctcagaacggaactttgctgagcgccgtaagaatcaggcgcagggggcggcattttcgatgatgtgggataccctggattcagacgctaaacaacgtttttaccaaaaagtcgatgaggggcgagaatccagcgagtttaagtccagataccagctattacagaacgaaattctatattgggacaaagagatagaacggctacggtaa

SEQ ID NO: 192267 - DNA, 495 bp, Klebsiella oxytoca
gtgattccgactccgacagtgattcggattctgacagcgactctgactccgatagtgattcggattctgacagcgactctgactccgacagtgattcggattctgacagtgactcggattccgacagcgattcggactccgacagcgactctgactccgacagcgattcggattctgacagtgattcggattctgacagtgactcggattccgacagcgattcggactccgacagcgactctgactccgacagcgattcggattctgacagtgattcggattctgacagtgactcggattccgacagcgattcggactccgacagcgactctgactccgacagcgattcggattctgacagtgattcggattctgacagtgactcggattccgacagcgattcggactccgacagcgactcggattccgacagcgatatcgaggccatccccgatagcaacagcccggacgttgtcgcgctggaaggtaacctga

SEQ ID NO: 192268 - DNA, 330 bp, Klebsiella oxytoca
gtgattagctgggcgctgattatggcgctgccttttatgctggtggcctcgtggataacccggccagcgtcatggggcgctatatcgccttccgcctggatcgcgctcggctatgtgtcgctctttagcatgcttatcggctttattttctggtacaaagggctcgccgctggcggtatcgccgccgtcggccagctccagctattacagccgttcttcgggcttggcctggcggcggcgcttttgcatgaaaccgtcagcccattgatgctggccgtgacgctgggcgtgattctgtgcgttatcggttcgcgcaaatttggcagctag

SEQ ID NO: 192269 - DNA, 516 bp, Klebsiella oxytoca
gtggccagctatgcgccggaaagcacggtttatatcaccggtttttcgaaaaacgtcgccaccggactgcgcgtggggacggttgtctgcccgtcccgctatcggccggagattgagcgcgctatacgggccaccacgtggaacaccccttcgctggtgagttcgctgatctgcgcctggattgaagacggcacggtggcgcgttttgaagcgcagaaacgccaggatgcgcggcggcggcagggggttgcccgtgaggttctcggcgcgcttcccttcgtcagccatccggattcgtattttgtctggctgcctctgggcgaggagagtcgggccgatcggctggcgaaaacgctgatggagcgccatatttccgtgtcgaccgccgagcctttttgcgttacagcgaacgttccgcaggcgatccgcatcgccctcggctccgttcccttcgatagcctgcgcgcggcgctagtccaggttcgcgaagccgtggagtatgagcaatatcgctag

SEQ ID NO: 192270 - DNA, 648 bp, Klebsiella oxytoca
atgcagcagctctatctttatatactgattgccagcctgaccattgccagccccgggccaggagtgcttctgacgctgaccaacaccctgaattataatctgcgtaatgcaatggcggggattatcggcgtggcggtggggatgggcgtcatatcgattattgctgccagcagcgttggcgtgatgattaccacctctcagctgacgctgttgatagtcaagggggttggggcggcctatctgatctatctgggcgtaaagctctttcgctcggtgccccgcgcgctgaatcaacctctctcttctgccgattcaacgatgccttccgccagccagcggtttcgtcagggagtactggtgtcgttgtttaaccccaaacccattgtgttttttatggcgctgtttccccagtttattcatccgcagcagccctttattccgcagttcagcgtgctgtcgataaccttctgtattctggtggttgtcattcattcactctacggccttttcgcacacagcgtaaaaacgaaaatgtcgtccgggaatgcctttgttaagctgaataaaaccggtggcatcgtgtttgtgtgttttgccgtcggtcttattgtttccgccgttcatccttatttgtcgctatcatcgtga

SEQ ID NO: 192271 - DNA, 1467 bp, Klebsiella oxytoca
atgatccgacacctgttacacgttgatttcgacccgcgccgcggtttgcaggagcaggtgcgcgagacgctgattaacgccattctgggcggcattttttccgccgacacgccgctcccctcctgccgccagctggccagccagctgcgggtctcgcgcaacaccacggcgctggtttttgaagggctggttaacgagggatacctcgtgagtcgcccgcgcagcggttattacctgcatccggattaccagcacgccagccccgcttcggcgccggaagctgcaccgcaggacgagggttctgcaccacgctggggcacgcggctgcaaatcacccccagccagcaggagtcgattctgaaaccggccggctggatgaactaccgctatccgtttatctacggccagccggatacccgccagttcccgctggcgacctggcgctcggcggcaaactggctgcacggcggggtgcgcgacccggagtgggtggtggatcacatcgatcgcgacgtgccgatgctgattgagcagatccgcacccgggtgctgcccaaacgcggcattgtcgcctcgccggacgagattctgattaccctcggttcgcaaaacgcgctgtacctgctgacgcgcctgctgatgtcatccagcacgcgcgttggcgtggagaatccctgctttcgcgaggctattaacacctttctgcttgccgataccgatatcgtgccgcatccggtggatgaacaggggatcgtcctcaacgacgccccctgcgattactactacgtcacccccggacaccaggtgccaaccggggtggcgatgagcaaagcgcggcgcgaccagctgctggagcatgccgctcgccatgatgcggtgattattgaggacgattacgactctgaaagtaactttatgctcaacccgctgccggcgctgaaggccagcgatcgctgcggaagagtgatctacgtgagcagcctgtcaaaagcgctatcgccgggcctgcggctgggctttatggtcgctgacccggatctgattgacgaagcccgggcgctgcggcggctggtgtatcgtcatccgccgaccaatattcagtatcagatggcccatttcctcgcccagggccactatgaaacccacctgcggcgctaccattacgactctgcccagcgctgggaccgtctcaacaacgcgctacagcagcatctgccggagtgccgcatcatccccggcagcgaacacgccaacgcgttctggctggccacgccggagcaaatcaacacccagcagctgacctggcgcgccgcccacgccggggtgctgattgagcccggcgcgcggcattttctcagcgacgcgccgccggctaatttcttccggatggggttccacgccattcaccctgacgccatcgaacagggcgtggaggtactgcgcggccagctggcgcagatgggctga

SEQ ID NO: 192272 - DNA, 852 bp, Klebsiella oxytoca
atgaaaaaatcattaggttcaatttgtctgggtgccatcatggcgatggccttttcttatcacgcagccgccgcggatcttccggaaatagaaaaatccggcaccctgaaagtcgcaaccgaagatgattacgcgccttttaactttatgaataacggccaggcggatggcttcaacaaagatatgctcgatgaattacgcaaatacgcgaaattcaacgtcgaccagagcattttgccgtggaccggattactggcggcggtttctaccgggcaatacgatatggccttaaccggcgcggtaattaccgacgatcgtctcaaggtctttgatttcacgccgccgtgggcgtcagcgcagcactattttgtcaaacgcgcgggcgataattcattgaacaccattgccgaactgagcgggaaaaaggtgggcgtgcaggcgggcagcgcgctgctggcaaggctgccggaactgaaagcgatgctggagaaaaccggcggtaagctggggccggtggtggagtatccctcctacccggaagcctacgccgatcttgccaacaaacgcctggactacgtgattaacgtggttatctcggtcaacgacctggcgaaggccaagccgaaggtgttcgccaaaggtctggcggtatccggcccgggctatatggcctggccgatccccaaaaactcgccgcagctgctggcctatatgaccaagtttatgaaccacatgaaggagaccggcaagctcgcggaactccagaaaaagtggtttggcgaaacctatgacgatcttccgaacgtgccaatcaccagcccggaacagttccataaattggccggtctgtaa

SEQ ID NO: 192273 - DNA, 642 bp, Klebsiella oxytoca
atggatgcaatttcctggcagttactgattgaaggcgcatggacgaccctctggatttcggccatcgccattgcctttggggtggtgattggcctgctaattgcgctggtgcgcatgctgcgcattccggttatcgatcagctgctggtggtctatatcagcctcgcccgcgcgacgccgctggtcacgctggtgctgttcctgtttctttctctgccgaccgtcgggattaacctcgacaaaaacgtagcagcgatagtggcgctgacgctcaatacctcggcctttaacgccgaaatctggcgcaacgcctttcgcacttttccccgcgaacagcgggaagcggcggagtcggtcgggatgcgccgctgggcctacttccgctacatcatgctgccgcagatgtggattgaaagcctgcccgcgctggttaacgagatgtcgttcctgattaagggcagtccggccattgcggtgattggcgtggtggatttgacgcgcgtcaccaaccggatttcttcggtcacctatgaaccgctttcgccaatcctggcggcgggtctgctgtacgtggtgattattggcctgctgctgaaactgcagggaatggccgagcgtaaagcgaagcgtctggcacgataa

SEQ ID NO: 192274 - DNA, 666 bp, Klebsiella oxytoca
atgaatcagtgggccgttatctggtcggtgcgcgacagctttattgccggtttactcgccacccttgagctttttattaccgcggcaattgctggattaattatcggcgttgtcctgtgctatttaagcgaatatcaaaagaaaacccttaaccggcttattattgcctttgtcagcttaatgcgggcgattccctttttgatcctcgcctatttgctctattacgggctgccgcaagtggggattagtatggagccctggaccgccggcttaattgccttaattatctaccacggcgcctatttctttgagattttgcgcagccagcggcgggtattttccggtggctatatcgaggcggcggtcgcgcaggggttttcgcgctacaaaatattccgccgcattattctgcccaatattctctcttccgcgctcccgctgatggggaaccagctgattatctgcctgaaagataccgctttcctcagcattatcaccgtccaggagataaccgctgcggctaacagcgtgcaggccacctattttatcccgtttaacgcttttatcgtcgcgattgggctctactgggcgatcagcatcctggtggagctgctgattaaacgcctgagcgcctggggagtcagaagaggaatgagtcatgtctga

SEQ ID NO: 192275 - DNA, 762 bp, Klebsiella oxytoca
atgtctgatactactgctgtaagcgtcaaaaacgtctctaaacagtttgataacgtggaagttctgcgtgatatcaacctgacggtagaaaaggggaccgtggtgagcattctcggctcgtcggggtcgggtaaatcgacgctgctgcgctgcatgaactggctggaacagccggatcgcggcgagatccgcatcagcggccagcggctggggattgatgagcataatggccgcgcgatgtcccatcgccagctgtcgaaaatccgcgagcgggtaggcatggtgtttcagagctttaacctgtggccgcacctgacggtgcagcagaacgtcagcgaagcgctgctgcacgtgaaggggatgaagcgtgatgaagcgaaagctatcgccatgcagcagctggagaaagtggggatggcgcataaagccgacgtttacccgattacgctctccggcggacagaagcagcgggtggcgattgcccgttcgctggcgatgtcgccggaggtgattctgtttgatgagccgacgtcggcgctggaccccgagctggtcaacgaggtgctgggggtaatgaaggcgctggccgccgagggctacacgatggtggtggtgacccacgagatggattttgcgcgccaggtctcggatgaggtggtgtttctagagaaggggttgttgattgagaaagcgccgccggagaagtttttcaccaacccggattccgagcgcgtcaggcagtttttgcagagcagtcggtaa

SEQ ID NO: 192276 - DNA, 483 bp, Klebsiella oxytoca
atgacagagcaaaccattctcgacatgtgctgtggctcccgcatgttctggttcgacaaacaggacccgcgtgcagtattcgccgacattcgctccgagcagcacaccctgtgcgacgggcgcagcctggttatcagcccggacattatcgccgacttccgcgcgctgccgttcgctgatgcctctttccccattgtcgtgtttgacccgcctcacctggagcgcgttggcgaaaacgcctggatgggtaagaaatacgggcgcctgaacaaagacacctggcgcgatgaccttcgagtcgggttcaaagaggcgttccgtgtgctgcggccacacggcgtactcattttcaaatggaacgaaacccagataccggttagccagattctggccctaaccaacgagaagccggccatctggcaacgcaccgggaaagcggacaaaacgcactgggtaattttcgtgaagggggccgacaaatga

SEQ ID NO: 192277 - DNA, 222 bp, Klebsiella oxytoca
atgacgccagaagaaaaagaaaacgctctccgtgcccaggctcgtcgctgcgcagaagagctaaccaaagcgatgagcgtaaagcctaaaccgaagtggaacgctgtatgcccccccatccttcgcaagcactacgagaaggtcgggccgatgggtgtcagcctggtgaaatttgtcagtgttattggccgcatgaatgggcggtatggagtggaatcatga

SEQ ID NO: 192278 - DNA, 1263 bp, Klebsiella oxytoca
atgtctctgaacgacgctaaaatccgtagcttaaaaccatccgcaaaacccttcaaagtttctgattctcatggactctaccttttagtcaatccaggcggttcacgtctctggtatctcaaatatcgtatcaatggtaaagaatctcgcctcggcttaggtgcctatcccgatgtttctctggcttacgctcgtcagcaacgtgatggtatacgcaagctgctaacgcagaatatcaatccatcacaacaacgtatcgcagagaaagctgcccgctcaccggaaaaaacatttaagcacgttgcattgagctggcataaaagcaacagaacatggtctgagaaccacgcctcccgtctgcttgccagcatgaacaatcatatatttcctgtgattggacacttgccagtagctgaactgaaacctcgtcactttatcgacctgctgaaaggcattgagcaaaaaggtctgctggaagtcgcagcacgtacccggcagcatatgtgcaacatcatgcggcatgcggtgcatcaggggatgattgagagcaatccagcatcgaatctcgaaggtatcatcgcagcaccggttaaacgacactaccccgcccttccccttgaacgactacccgaattgttgagtcgcattgatggctatcatcagggacgggaattaacccggctggctgtttctcttaccctgcatgtctttattcgctccagcgaactgcggtttgcccgctggacggagataagtttcacaaataaaatctggacgatccccgccacacgagaaccgctcccaggcgtccgctattccagcaggggggcgaaaatgcgcacgccgcacattgtgccgctgtcacaacagaccatcgacatactgaagcagataagagaaatctccggtgatcaggagttgctgttccccagcatccataatccatccagaccaatgagtgaaaatacggttaataaggcgctgcggctgatggaatataatactaaagaggatgtctgcggccacggattccgggcaatggcctgtagtgccctgatagaatcaggtctctggtcacaggatgcagttgagcgtcagatgagccatcaggagcgcaatagcgttcgggcagcctacatccacaaggcggagcatctggaagcccgtaaggcgatgatgcagtggtggtcagattatctggacaggtgcagagaggaattcgtgccatcctatattttgggccatcagcagtccaaagtctga

SEQ ID NO: 192279 - DNA, 489 bp, Klebsiella oxytoca
ttggcgggcagggtctgtttcgtcctgtgtgtgtggcccgaacaggccaaacgggttactgtccatgcccagattttgacgctcatgcagcgtcttcccggcggaggtcggcggcgaggtgtcggcttctttctcattaccccctttcaatgcactgaaaagacgatcgccgccggatgccagggcgatcaccagcgccagactcagcaggctgacggtcagcgtgcggcgaccggatgccttgcgaaaacgggtcacttccggctggccgggcggtgttctttgctccggctcctgatacgccattgccgcacgggcgcgttcgcgggcttccgcttcccgctctgcggtagttttttccggcttgtccggcacaggtttatcggtcatcttgcctccagcgtaacggacggtgaaacggtgtcactgcgggttatcgcgatgcgcccgaacccgtcgttttcgatccctaccaccgaggtgccgtaa

SEQ ID NO: 192280 - DNA, 141 bp, Klebsiella oxytoca
atgtttttttgcataagccagtgctttacctttagtacctgtattctttgggatattgataagatcgtagctttttttatcttttatccagttagctactacctccgcagtgctatctgtcgagccatcatttattattag

SEQ ID NO: 192281 - DNA, 348 bp, Klebsiella oxytoca
atggttgaaggcgatcgggagcttctggcgcaggcgttgggtaatctcgttgataatgctatcgatttcacgccttccgcaggggaaatcctgcttgatgctgaagagcgtgatggcggcgtgctgttaaccgtatgcgatacgggatgcggtattcccgactacgccctggggcgtatttttgaacgtttctattctctgcctcgtgaaaatgggcaaaaaagcagtggcctggggctggcgtttgttcgtgaagtcgcgcgcctgcatcagggggatatccagctggttaatcgccctgaaggcggcgcgtgcgctttgctgagacttcacgctcacttcacatag

SEQ ID NO: 192282 - DNA, 267 bp, Klebsiella oxytoca; identical to SEQ ID NO: 180228

SEQ ID NO: 192283 - DNA, 456 bp, Klebsiella oxytoca
atgcagagcagaaccgtttaccactggcagagccggcgggatgatcgggcgataaccctgcgtatccgggaaatagcggaaacccggatccgctacggttgcccgcgtattcatattcagctgcggcgggaaggctggcctgttaaccacaagaaaacacaccggatttactgtccggaaggcctcaacctgcgtagaaaacgcccgcgcaggcatgtcagtgcagcacatcgtcagcaacgtccggtcctgaccggtgtcgatcagtgctggagtatggatttcgtgtcggataacctgtttaacggacgacgtttccgggcgctgactgtagtggataattttagtcgggagtgtgtggcgatccatgccggaaagtcgctgaaaggtgaggatgtggtcggtgtgatggaagggttgcgggtgctgggcaagcgcctgccggtacgtatttag

SEQ ID NO: 192284 - DNA, 2583 bp, Klebsiella oxytoca
atgagttccattcgtaagacaaaattcacacccttgaatccaataactatcattgaaaatgatagtattatatgtcttaatataaaagatattgtacctgaaagagttggtcttaaggcgtttggattatgttctataccaaaacaatggactcctcctttttttgttatatcaagcaataatccagaaaatattaattgcttagatgctattctacataaatatggattttcacccgaaacgaaattgatggttcgttcaagtggtattgatgagtcaattgatgatcggggttcactcgaatctcaagtatgcaatactgataatattctttcaactatcaataaattaaaatcagtattaacttcaagatacaaccaactagatattaaaacgatccattgggttatacaactctatcttacacctcagatgaaagggcatctttcaaatgaacgaaggttgagtaaagttcctcgtgattggaccaccgaaatagaagttgatggtgagttctctgctgaacggaagtccttatctatacgtgcatggagagactccagaattccagagatatccgaacttacttgtgaatatagaattcattacgctgatagtttaaagacagttgctgtatgggcttataacatgacatctcgtcttcattttgaatgggtttgggacgggaaaaaaatgtatatagtccaagcagatgagtgtgattcggtagataaaggggttgatcctaccaaactggtcaaagactatattacggataaagtaagcgagcatttgaggttatttagctcagtaactgaggatgattataaagagtataaaaaacttgaaaatgctaaattatatagagagttaggttataaaggtactgatttttatattttaaaagatgctcagacgctttctaaattattaaatgattcacaatgtactgctgagctgataaatgatttagatattttaacaaagcaacctttggtaataagaactgatgggatactcataccttcaaagcaccgtcaaatgttacctagaagtgatgaattgcgcagtacaaaggatgctgtaaaatggttaatggaggtttttagggaaaaaatattaagtttaggcataaaagatagtgggttatgtcttatcgcacaccattttatacctgcatctgcttctgcatggtgtttagctcaccctgataaacgaaaggtcagaatagagtctttatggggaattccagaaggattatactggtatcctcatgatgtatatgatgtggatacaaaattgtcgactatattaccttcttctgaaaaagtcggtaagtttattattcgcgaacgcctaagatataaagataaattcatcgctccaaataatgaaggtcaatgggttctccaccaaacatctaaacgttttgattggaaagctactatcagtaagcaggagtggattaatgagattgcttggacttcaaggattatagcgaataaattaaaccagtctgtagtaataatgtggtttattgatgtgaataataatgcatcatcaagaccggtgattccttggtaccatgagctttgggattcatcgcaaaccataccaaaggcagcgccaaaaaataaaaatattggagatgatcttttctctattaaaactagagatgattggagtatattgaaaaatgcagactttaaaacacataaaatatctaggatattaatagaaccttctgagccggagcttgttagagatcctgaatttgctaaagaacttgccgaattagctattagagaaaatattgttgttgaattggctggagggattctttcacacgcttattatttattgaataaagcgggctgcaagttagagtgtgcggatttatacgcggcggaagatgaggagattgagtataataaacttgtaagagataaaatccctgaattcattaattctcaaggggaagatgttagattaattaaattaaaaaatgaagcattgatttctgcaatgaaaagaaaggttgtagaggagtctcttgaggtcttcgatgcaaaaacaagtgatgaaataattgaagaaattgctgatctgcgtgagataattaacgcattaactaaggagcttagaatatctaatagggatatagaacgagtaaggaaagcgaaaaaaattaagagaggaggatttgataacggtgtaatgcttggaaaaactgctttaagtccctctttgagcctgtctgatgagactagagtagactttgaggaccaaactaggaaatatgagcaaacaattagtaaatcagagtttttgccaccacatcctaatgattttcattcagataagcgttacgataataatggtgtttttgagaggcagttaaggttttcattacctatgtatggtgatgactttagtaccccaaatagcgttatcacccttgaaaataatgatggtaaagatagcaaatatatatttacactccagatggagcgctctgagggtgttatgaagtgtaagattaggattataaatgccccagctcaattatctttggatttttaa

SEQ ID NO: 192285 - DNA, 570 bp, Klebsiella oxytoca
atgagcagtgatgaaaataattcagcttcaagtacattttctgcctctacagataatatcaatcatgatggacgtaaagagcttgattggcagagtagatggccgaaggaagcaattcaacatatatgttttgatgctatatttgttggcttggttcttctatttacattactaatgatatttttagtatggcgagggactgcattttcaatattggctggtgattgtcaaacttgcagtgtaaaaagatttaatcaattcgcattgttttatctggggggggtgctcggagggacaatgttcggtataaaatacctttataaagtagttgcacgaggatattggaatttagatagacggttgtggcgtatttttactcctttcttggcaggagttttggctctcgcaattggttcattaatcgattctggaatgctgggccttagtatgaggtcatcatcatcaacgttttatctttctttgggttttatttctggctactttgccgatagtgctttagcgaaaatgcaggaagtagcaaatactgtatttggtacagataaaaagtaa

SEQ ID NO: 192286 - DNA, 672 bp, Klebsiella oxytoca
atggtccatatccctagtaaaaattcacaagcgacttcatgtaaatgccgattttgtgagattgtaaataaaaatgtcagtgtggacattgatagtccatggctctttgacgagaattacgctgcgctcgtatcattgggatccttagttcctgggtggacattggtttgcccaaaaaaacacacgtttaatctgcaatgtaactatctcaaagaggatttttgggaattcacttcaaaagtcgtaaatgatgtagagcaactttatggcaaagttaccattttcgaacatggttcaactgaagagaattcacaaactagttgtggaactgctcatgcgcatctccacgttgtaccgttgagtttttcattaatgaatagtgctaaattgttttctgaagagttcgaatggtcagaatgtaaaatcgaagatataaaagaaagagctcatggacaagaatacttgtttgtagctgataactataatgctaaaaattcaattgggaatatttgtattttaaaaaatgaggtctctcaatttttcagaaaagttatcgctaaagagttgggtgttgctgaaaaatataactataaagaattcaaaatgagcgcactaagtaaccaatcgtttgaagcgttactaaaaactcaaaatcaaagtgctgttttttga

SEQ ID NO: 192287 - DNA, 1692 bp, Klebsiella oxytoca
atgattaaagaaatcagttttaagaagttcaaaaaaatttcaaatgtcaatttttcatttgaaaatcatgtgaacataatttctgggactaatgggacctgtaaaacaacactgcttcatttaattagcaacgggtttcagatgccgcttttacgttcaactaactattctaataataattgccttaaggtaattaaagcaataaataaaatagcaaatcctaaaatggaagctattgtaagggaatctaaaaattacacagatccagcagaaggaactaaaggaaacttattttctataaagtattttgatgagagtattcttaatttccgtaaacataactctaaaaatccggatgaggcacaaagatatgctatcaagccactatatccgagaggagaaccgaaacaatcacttccctctaaaccagttttataccttgggttgtcaaggttatttccgataggtgaaactaaggatggtgacctcacatcaatatcattgaatcttcctgaggaatacatagaaattatttcaaagatttataaggattttttaggcattaatataacaaatattgaatcaaaaaatattggtgatttcaaatcaggcccttcttttgataccgataatccggaaattgactcaaatactatatcttcaggtgaggacaacctttttataataataaaagcgttagtaagtttacgatactattttgaatcattaattgagtctaatgacagtaaggaaagtgtattattaattgacgaatttgatgcaactttacacccatctttgcaaatcagactacttgataagatctatgaatatgctaagtcttttaaaattcaagtgtttttcacaactcatagtttgactttattagagcatgcattctttaaaaaatatcatgttatatatctgattaataatataactaaagtattattaatggaagaaccaaatattttaaaaataacgatgcatttaaaaacacaaactaaggatgaaacctatacgcgaaataaaattcccatctttaccgaggataaggaagctagattcctgttcaaagaaatatttgattattggatcagtaaaaacagtaagttagcgattgttcaaaattattttcatcttgtcgattgttcaattggcgccgataatttaaaaactatcttttctgatccacatttaaaagaaacatctttaaaatctatatgtgttttggatggtgatcatggttccgagctaggtaaaggagtagtctctttgcctgggggcaaagcaccagaagaatttatttttgaacattgtgaaaaaacgtttgatgaggatgatgcatctttttgggagaatgaagatattttaaataatggcttcaccaaagatttatatattatagtaattaggcctaagatattatctattggagagaaaattcaagaaaaaaaagaccgtggagaatcagtctctggtttgaaaagacggttaaacaaagatgtattcaatgcccatattgatttttttagaatgataacaagaaactggctggataaagaggaaaaccaacctacacttgctttctattataaaggattgcagactttgtttttcaaagcgacggccacagcaggagttgataggaaattatgggattttgattatgctgaaattttcaaaaaataa

SEQ ID NO: 192288 - DNA, 852 bp, Klebsiella oxytoca
atgtctagaccgtctaattttaatacgcctctccgttatccgggaggtaaggcaaagttctcacatcatatcgagcaaatcatacaacataatgatcttgctggcggttgttatgctgagccgtatgccggtggtgcgggagtagcgcttgggctactaataaaaggtgttgtgaaagatatttatataaatgacattgatcctgctatttatgcgttttggttttcagtaataaatcataatgaaaaattatgtgaaatgattgaagaaacaccagtaacgattgaaaattggtatattcaacgtgatgtactgttaaacagtaataataaaaatataatcgatactgcattctcaacattcttcatgaatagaactaatcgctctggtatccttaaagcgggtgtaattggcggtaaatcacaaagtggtaaatggaagttagatgctcgttataataaacatgacctcattaagagaatcaaattaattaatacatttaaagataatattcatgtatccaaccttgatgcaattgatttccttaccgagaagctaacattatttcctaataatacccttatttatttagatccaccctactatgtgaaaggttcagagctttatagaaatttttatcaacatgaagaccatgtgagaattgccaagacgcttgctgaaatagaattaccttgggtcgtatcgtatgataatgtaagtgaaataaaagagatatataaatcattccgaatggccgattattgcttaagttacacggcacaagataagaaaaaaggctcagaagttattatatataatgatgggctgatcgctcctgaaattaggaattga

SEQ ID NO: 192289 - DNA, 138 bp, Klebsiella oxytoca
atgatgcaacagaactggcatcccgcccacattattgcggcgctgaaaaagcggggaacgtcgctgtcagcgcttgcctggcgtcctctacgctggcaaatgggcttaaccgccgctggcccaaaggcgaaagattga

SEQ ID NO: 192290 - DNA, 462 bp, Klebsiella oxytoca
atggctactaccccaatccagacacatccgttacttgctgttcccttcaatgctgccacggatttcaccgtactcgctggtcactgcgaaaaattcgccgaaaccctgattgaaagcaacgatcccacactgaaaatggcgctctgtagcagactcaatgcctgtctgacgctgctccagcccacgttgttagaacccattcctccccatcttattgaaagcctgaccgttgacactctccctgcaaattcacctcgtttcgagcctgaatgcacagagctctgtcactactgtctctctctgacactgatgctggcagggcaaggcttttactctgaaatggagaaacaccttagcggcctgctgtatgaactgatcaattatttcgtcgcggagatgaaagccccgcgctggctacgcacatctgagggcgtgaaatttatcggcgaggtgacggcatga

SEQ ID NO: 192291 - DNA, 522 bp, Klebsiella oxytoca
atgtcgcctgtaacatttctcggggttccaatcccggcacctgaatttgcaggtacgggcaaaagataccgctttcagtcaaaaacggcaagagaaagtcgtggaatagagatcgcagattgttataaatataagcattggtcactaaagtatcatcttcatcaatttttcggagggagtccgttgaatattacagaacaacagattgtaaagctggggccaccagtagggaaagcagatgcttatttaccactggaactgatggaaccacaaacatttgcgctattttgttgtgagctcatcaaaaaacggctgaaaatcgaaaacggcgagatagttgatgccatgacgattggcatttccggccaatcacagtttggggcagatatttttacgcatcgccagcacggcaatcaggatgtttattcgttatacgaagtaaaacggtgtaaaaaattcacaaaaagtcattatattcccactgtcaagcgttttaatgaacatcgggaaaatggcaggtga

SEQ ID NO: 192292 - DNA, 6165 bp, Klebsiella oxytoca
atgagtgaccgaagaccagaaaagcgatttagtaacagccccctaagtgccgcccacagggggtacgtctaccaagatttggtcacggcgtatctattcatctgttgccttgttcgccgagacaagaagataacagttgatcgcaaaaccgttgaagacgatcgttttgatgatatcgaggtcattgcgaatgggtgtaaattacgtagacaacttaaatcaagtgaaaatataactaggccattaactttcgatgattttgataaaaagaattcatcgttacggtttgatcgattggtcaacacatttctctcctcagaagatgatactgctacagaagaatatcgcctctgtgcaacatggcagtatcctgattctgacgaccctgttgttgaattacttataccagctgatagtgctggtactttcgatggatactccacggagctatactatttagaccctgataaggtctggccgaaaagttcttccccagtatttaaaccattggtgagtattcctggaggggaagctgtacctaatcgcaatgatgtaattgctttttgcgagcggtttattattgaaattgcatttcctgctgcttcccttgatcttgaacatcccggtcctctcgaaaatttactattaaaaatgcttgtggagcatgttggtataggtcgctatccaaatgatgaacgccgcgtggaagatgtggcggcactggcagtccatattgctaatgttgcaaggacaagaggagaatcattatcgccatcccttatagcgcaacgtttatcactccgtaccgactttggtcgtattgctcaagcattccctttagacagagctgttttattcgagcgaaagtcattacagaaacaactctttgaggcagcacaacaacaaggggtttatcttgttcttgctggtccaggagccggtaaatcatggtctttgacgcagttgtcagaagaactggtacaacaggattttattgtagctcgccactattgttttttggaaccaggggatgaactggttgaacgaagaattacaacaaacgttttcttcgctaatttgctggctgaattgcatgaatcctgtcaaaaaaatgcaatccctatacaacaggttttttcttcaggtattcatgagctcgaacagaccttaggtgaaatctctgcctctggaagacatactgtgatcattgttgatgggctggatcatattgcacgtgttcgtgatgcatcattagacctcagtgataatgaaacagatattgttgaacaattggcaacgcttgaattaccagaacgagtaacgctaattatcggctcgcaaccaggaaaacatcttgagccattacgggaagtatacaactctaatttaaacgaatacgttgttgaatcttggtcattcgaagaggtcagggaactagctataaaacttgggttaggtactgcactagcagagattaacctacaagaaaaagaaaatgacgtaatacaaatacttctccagcgctcggaaggtaatcctctatatactcgctacctttgttttggtctgatggatggtctcttatctggtgcaattactgaaccgtttgaatggctcataggggtacccgacctaaatggcaatattaaacattactacgggcacctgtattcgtcggcaggcaaacaagcccaggctattgctgatcttatgggggtgatggatttctcagtaactgaaagtgaattatgtgaaattgtcggtccattacttagaggatatgtttccgcagcactacagatcttacgtcctgtcctaacccaggcaactactcagggcggcatgaggatatttcatgaaagttttcgacgtttcatgattgatgagctggttcgtcagggcagacaagttgctgatattttatatcccgttgcggtatggttggaaaggcgaggtttttttgttgatgctaaaagttatcgctttttgctaccaattatgaggcgagctggaagagataacgaaattctgacatacgtttcagcatcatttgtacgcgacagtgtcgctcatggccatccttctgaggctattcagaaaaatattatgcttgcgacggatgtagctgctcgtactcttaattggcctgcattggtccgctatgctgaattgtccagagcacttaattcttgctttgaggatgggaataatgattggcaagagtattggcggacttactactctatttatggggctgatgcattagccgagaggttgttgttcgatggtcgtccaacactaactcaaaaagaaggtttgctggcctgtcagttagttgattccaagggtgttgccgcgccctggcaagaatacttagctattacaacagaaatagaagatagactcgattattcggatactgagtctcatggcgacgttcgttgtaataatgaagaagaagccctcgcaaccatttacggtgcgttacggttagggcggtatagacaagttatccgacatgttttttggaatctatgtcactcaggaatatttttttcgccccgtttcttacgtaatttagctcaacaacttgctcagtttacgtccccagacttagtcgaaagaatttgccatagaggggatcctgcttataccggatgctacagattatcagacagatctgtctgcctcttatttcttggtctttctgatttttaccggaatataaaagcagtagatgacagtcggcgttatgctgagatggctttatgtcgggctgttactccaatagaaactatgtggtgtgttgatgctggggcttcaagtgaacgcgcacttgatatagtacgtaatgagctgaaggttgaaacaacaccagcaaatgagcgttattcaccagaggctgaagttgtacatcaatgggtggcatcagtacgtctgaaagctcgcgatgtggattgtgaaaggtttttccagcttcaacgacttagtctggtgggagacggctggtatcgctgttggttgaggtttgttcttgctgttgcattggctgaagcggctgcggtgaacaatgaatcatacgatattctagccgcttttgaagaattaactaaggacacaagaccattcgttggtagccccagagcctgcgatctctattcgatacatcccattatcaaagcgagtctcgttcgtgcacttaaacttctcaaaactcgtgaggagtgggaaaaagcactaagtattatttctatggttcgtaatgatacgacaacatatctggatcgagatgaaaatagtccgctttcaggagatgtattgtattcattttttctcgcacacactgtaaagcccgagattgcagatttaatcattaaaaagctagaagatgagcttgaatctatggaagcaaatggtacttattacagtgtacatgcgttagaacgaatgaagttggctcaactttatgcgaaaacgtcccccttagaggcaatccagcactggcaacaggccattgtatttttattaggctatggttttcgaaaagatattacattgtttgatatcatcgaatgtgttcctgcgttaagacttcattcaagagaatcagcgataagtgcattgattcgtctccgcccactactaagtgcagtactttgtcataccgatcatagaacgacaaaacatgcccctaatgcatggttctgtgcactgttgcaagttgacgaagttcaggcaatcgaattacttaatcgtactctaatgtatgaacgaggtgttttttcttggacaagtatagaagcgcagaaggagacattacgtcaagtggctgaccgggggggggcaattttattgaatgcactatggtcaacattattggttgatattgactatgagaatgccggagaagcagtagtaaaagagaggctgtcctctgtccaacgcttacttacagaatatccggcttatgttcaggaacgattcactgttctttgtgcagaagtatttaatgattcttctaactaccaattaagcgcggttgggcctttgcggcagtttgccgaagagcatagtttgcatatgccagcttacaaactacatgaaacgaataaaaatagaaaaactcatcgaagagaatatatcggagatacatctccgattacctctatagctttacgcattccagtatttccgccagcaccaaaatttgtcgagctgctaacgatattacgaaagctttcaaaatcaactctttctcgtgctgaatatcaagagtctgtttcactaccattaagttatataatgacggaaatggtacaaagaggagaagaagatcaggctctgcgtctactctatttttttgttcacgaacgttcttattggtcgctggaaagtattacgccggtattgtgtctggcggagtgtctggataattctggacatgaaaaattggctgttgttgcttatacgcttgctttcacttcggcaagaggagggcggggatggctcaattttggtgatgacacacaatctgcacctctccgtcgggctctggagatggataaaaagctggcactgcaaacgctggcacaggaaaccctccgacggctaaatatggacggctattatgggttatcccgtcacctgattgaaaggatagctgactggggcgatcatgaactggcagtgaatgcctgggaagaggccttcgccattattgaaagccgattaccgctacccggtcaaattcatgtgtttgaaaaacttgaacttcaggctacccctgaatggtctttggatgaatcactttgtgtgcttttactcacgaatacaggtaatgcggtcatctccagacgaatagcagccctgtcaggtattgctcgattggtaaaagagagaacagaactcttttataaccctctaaaatactatctgatgcataacagtagtgtttcctcactacaatccatactacagattcttaacgaaacgctggcagatgtaactgctttggttcaaaggctcaaagagccattaagggattatgctcaaagtccttcattaagtttgtcactgttggccaagcttcttttatcgcgtatcaaagaaacatcatttaacgcgaaatcagctatgttattggcaacaggcacaccttcaaataaagccatggaattagtttcctttgccgatgaaagctatttattgaatatttttcaagaagtatggcctgagttacctacccttatggctaccagaatggaatcatatattactggtgatgccgctttaagtgttttccagcattttatgaagaaacgatacgaactcaaatatgaacgaggaaattacgtaaaaccttcggctcgaactttgctatggcattctgaattatttcttgccatttttgatgacgttttgaccgaattcccggcacaactctggcgtaagggattgtgggaagcagacatagaacgtggcatcttgggacaaattctgccttttatgcctcttcatctggctatggacgccagtcggatccccagaccagactggccgttatatgaaagtaaacaatataaactggcagaaattacacggatctctaatgaagacctaacatgggggggatggataagattagggctgtttgaacaatgctattttcgggcagatggtaaagattatggccccatggacaggaaaacggtgcaatgtgctgcgattgttaggacaaatcctgatgggatggttcctccgaaagtatcgcctttaggcagtgatgatgccttagtttggtgggaagacattgattggatggaggcaatgcaggctcgagcaaagccacaatttgttaagctggataaagtcaaagattggttggatgatgtctttgtcctgcttcctcctgcggctctgaaatatgatgcacaattgaaatcatctcattacgcggggccgctatgctggtacgatgagaatgaccaaccggtcgttgtattacgaacatggcgagttaagggaaaaggtactggtgacatagatgcccacgtaattatcggcgctgatttaattatgcatcccaaactggaaaaggtattgcatacggcatacggcggaccgcttaaagagcttaattctgttcactgcgaaaccatttcgtag

SEQ ID NO: 192293 - DNA, 858 bp, Klebsiella oxytoca
atggagatgttgggaaattttcttttacaaacgattacatctactgctttcagtctggtatttctggctggtgttggatggctttttagaacctggattggaaaccgaattcatttaaatattaaaaatcaatacgataataaattagagagacttaaggctgaacttaaaactgaaggcgatgctcatcttacagatatgaaggcagaattagatcgacaatcgaacatattaaaaattgctgctgcgtctttctctgaggtacaaaaagcaacaatttcaagaaaaattgatgcagtcgatattctttggaaggggataatcgactttcgcaaaaaatttcctggagttgtctcttttacggacatactcactgatgaagaaatgaaaaatttctatactgacccacgattacataaatattcacatgaattggagcaatttgatatgacatgtttaatcaatgctagctctgaagaagttaagttggtaaggccacatattggtgaatttgtgtgggcgctttactctacttactgcactattctgatgcgttccatttatttattgaaggcaggaaaggatgagccatccaaagtggcatggcattgcgatgctaatattgaaaagttaattttagttgcttttggtgaagagcgttcttctgagtttaaaaaactccactggggaagatatcaatggcttcataaccagtttgattcgtcattatttaaagcgattgatactcttctaactggtaaaagtttcagtgatgcagctttacatgaagcacaattgatggagcgtcaaattagtgccagtagatcaaatgagctcaagatttcacatcctctttaa

SEQ ID NO: 192294 - DNA, 126 bp, Klebsiella oxytoca
atggctcctctgactgggatcgcctttgccattaactggctgaagattaagctaaatcagaaatctagtcttgtcaagaccaccagaatgaccactatttatattgtatatctagaatggtgctaa

SEQ ID NO: 192295 - DNA, 1719 bp, Klebsiella oxytoca
atgacgacgaataactatttcagaggtgatgcagtgaaaaaggtttggctaaaccgttatcccgcggacgttcctgcggagataaaccctgaccgctatcaatccctggttgaactgtttgaacacgccgtccgccgctatgccgatcagccggcctttatcaatatgggcgaggtgatgacctaccgtaagctggaggagcgcagtcgggcgttcgccgcttatctacaggaagggttaggactgcaaaaaggcgaccgcgtcgccctgatgatgcctaacctgctgcagtatccggtggcgctgtttggtattctacgcgccggcatgatcgtggtgaacgttaatccgctctacaccccgcgcgaactggagcaccagctcaacgacagcggcgccgccgccattgtgatcgtttccaacttcgcgcataccctggaaaaggtggttgataaaacccaggtcaagcacgtgatcttaacccgcatgggcgatcagctttccacggcgaaagggacgctggttaactttgtggtgaagtacatcaaacggctggtaccaaaatatcatctgccggacgccatctcgtttcgcagcgcgctgcagcacggctaccgtatgcagtacattaagccggaaatcgtctctcaggatctcgcttttctccagtacaccggcgggaccaccggcgtggcgaagggggcgatgctgacccatcgtaatatgctggcgaaccttgagcaggtcaacggcacctacgggccgctgctgcaccgcggtaaagagctggttgttaccgcgctaccgctgtaccacatttttgccctgaccatgaactgtctgctgtttatagagctgggcgggcagaacctgctgatcaccaatccgcgcgatattccaggcctggtcaaagagctggcgaaatatcccttcaccgcgatgaccggggtcaacaccctgtttaacgcgctgctcaataacaaagagtttcagcagctcgatttctcttcactgcatctctccgccggcggcggaatgccggtacagcaggtggtggcggagcgctgggttaagctgaccgggcaatatctgctggaaggctatggcctgacggagtgcgcgccgctggtgagcgtcaatccgcacgatatcgactatcacagcggcagtatcggcctgccggtgccctccaccgaagcgaagctggtggatgatgacgataatgaagtcgcgccgggagaaccgggagagctgtgcgtgaaagggccgcaggtgatgctgggctactggcagcgtccggacgcgaccgctgaaattatcaaggacggctggctgcataccggcgatatcgcggtgatggatgaagagggcttcctgcgtatcgtcgatcgcaaaaaagatatgattcttgtctcgggcttcaacgtctatccgaatgaaatcgaagatgtggtgatgcagcacgccggggttcaggaagtggccgcggtcggcgtgccgtccggcagcagcggtgaagcggtgaagattttcgtggtcaagaaagatccggcgctgacggaagagatgctgatcgctttctgccgtcgccagctaaccggctacaaggtgccgaagctggtggagtttcgcgatgagctgccgaaatccaacgtcgggaaaattttacgtcgagaactgcgtgacgaagcccgtgctaaagtagacaataaagcctga

SEQ ID NO: 192296 - DNA, 324 bp, Klebsiella oxytoca
atggcaacgaccctcacccctgacgtcgtacccgatttttcccactgcgagttttattcatcggttgaagcgcgcgcaatccacctgtgtggcgaatggatggcccaggccggattcgtcaacggcatgccggtgaaaattcgcgttatgaaagattgtatcgtgattaccccgcaaaatacccgcgagctttggggctgccttgaaggtatgagtgcgagctatattaaccggcgaaaagtaaaaacatggctgcagacctttccggggtcgctcaatgataccggggatattccactaattaagcggcgtaagcgcttctga

SEQ ID NO: 192297 - DNA, 1074 bp, Klebsiella oxytoca
atgattatcaccatggagtttttaatggcaggagcaactcaaagaggtgctcataaaaggcggcaagtcgaattgctaggtgaagaatggcctcccactaaggggtggaagaaaaagataattggtaaagaaatctctgatgaagttgcagaagaatttattcgactgggaggcggcgatattgctactgaggtggataatacaaatataaatggatactggtttaattcccgagcccctgttgatatatacctttatatccttgcactgtctaatgagtgcttttatgttgggctaactgcaaatatcaagaaaagaatggaggagcatttttccgggagaggtgcggaatggactcaattaaatactcctcttcgacttatgcatgcggtgaatactggaactcaaaacgcacgtgaagcagaaatgatggaaagtgaagcaacagttataatgatgcttcaacacggtatcaataaagtcagaggaggatattatactcaaactgagataaaatcagttgaaatgcaattgcgtgctcacggagcgtgggaacgtataaggcaggccgagcttggaaaaaaaccttttaattatgagcttagttggagtgatgctctggagcatttccttaatgtcgccttgaactattatgatgaaggctctcctgagcatatgcatgaaactgtatttgcaactttattcaccttaacgcgctatccctactggaatgaggattttgcgccatgtttaagctggaaattttggaataaaaagggaattcttcccgtcttattgtcttttaaacatgctcgtgctatcggcagcaaattgccttcagcttataatgtccttgctgcagccttaaacagaggtaaaaatgggaaatatcctttaagacgattgtttctgctgggctggaaagcttttcaaccgccgacaacagaccagcaagctaagacagttatccgattcatctcttatcttgatgaaaatacagaatttgaacgccaatatgatgcatttgtttcaatccttttccctgagatgagaacaactttacggcagccatag

SEQ ID NO: 192298 - DNA, 246 bp, Klebsiella oxytoca
atgactgcaacaacgcaaccgctaacacaacagtgccgcgatagttttaccctggcacggcattgggtcatcgcagccaatgtcattttcctgtttgcaagcgcacatatccgggagccgctggagcggggaacgcccctgaaaaaaaggcggtgggccggtgatatttgctgcgcgcttttccctcactatctgctacgggacagcatactgcgtcgtatgctgccttgccgttcttttcgttaa

SEQ ID NO: 192299 - DNA, 258 bp, Klebsiella oxytoca
atgccagcagcagtgatgttcgtgctcattgccagaatcagcagttcacccgttgaggccctatacgtcacgctgtctgtagtggcgctgttaattaaatcaatatgcgccccgctcagtgacccgtcgcgggtacggataatgcgggtcgtgtcagttggcaatgcacccgggagagaaactttgaaacccaccgccacgccgttaccgatagtggtgagcgatgaggccaccgttggagatatggtgaaatcctga

SEQ ID NO: 192300 - DNA, 477 bp, Klebsiella oxytoca
gtggcaacagtttcatacccggatatgctgccgcttcctcagcgcgcagaccagaacatgacgcaggatacggcgtggcagacaacgacgccggcggtcggccccgtcatcttcacgccgctaacaaccgacctgaaatcgacctggtctctgcagtggaaattcacgctgcagcaggccgagcgctttaaatcgtggctccgctcaccgacgtactgcgaccgtggccgtaactggttccagatgcggattgatctcggcgatacgcagggcgtgcagctgcagaccctgcatttcatcagtatgccggtacagaccagcaaaaacggcaatatcgtcacctggaccgccagcgtcatctgtaacggtatcgaggacatcaccgaggactacgacgactggatcgtcgaggcgccagagaactacggctactggctggattacctggttactgctgttatgccgagggctgattaa

SEQ ID NO: 192301 - DNA, 615 bp, Klebsiella oxytoca
atggtaagtcgtttttatatgttcattttagctgctatttttttgctaactggttgtgataacaaaccggatgccccgtttggattcaaatgggggcaaactatccaacagacaatagatcaaaaacttgcaggcacaaaagtcaataacacagggtttgtcggttttataagtgctgacaccgcaccaaaacctgcatcttttgaaggtcgatattttcttggttttatggggggactcgggttaacaagcgtctcattctcaactcctgtagatgctaatgggtacttttttaaccaaggaaggaaagtttacggtgatatgtctcagaagcttgagcaaaaatatggtagcccagttgaaattaaagaaaaggtaagccgtgatggggcagatttctatgaatgcataaaagatgagtcgtgcggcacatggcaaagaaagtatcagaaagatggcatgacaatcaccttaaacgttgaaccttcaccaggacggttaatggatgcaatgtcaaaagggtatgtaagtgtgcggtatgagtttgtgtcaaaagaagaactggataaagaagtaaagagatataaagataaaaaagaatccaacaatttctga

SEQ ID NO: 192302 - DNA, 162 bp, Klebsiella oxytoca
atgtcggacaaaaccagtggtgggaaaatcgacgacgatgcctggtatggtgatgccgttgataggccagaaacacaccacgttggcgctattcattacgatattgaaatggatgtggcgcatctcattgctgagcagcgtgaatctgagcggagggggtag

SEQ ID NO: 192303 - DNA, 489 bp, Klebsiella oxytoca
atgaattcatcaaaacaaattgatgtcaattttctccatgaatgcttctcctatgacgccgacacggggaatatatattggaagttccgcccgagcagtcatttcaaaaatgagtcagcctgtcaaaactggaataacaggtacgcgggtaataaggctggtactgttgacgcgaaagggtatcgagttattaagctactaggaacgccacataaggcccatagaataatttgggcattatcgcacggccagtaccctgaaggttttatcgatcacatcaacggaatgactgatgacaatcggcttggcaacctccgcgtagtagattttgtcaccaatgcgcaaaactcgaaaaccgcaaaaaacaacacaagcggctctcaaggtgtttggctggataaagaaactggcaagtggagggcttccattgtccacttaggtaaaagagtcagccttgggtcgcatttgacgcgcgaagatgccgattag

SEQ ID NO: 192304 - DNA, 384 bp, Klebsiella oxytoca
atggctgtagtgcagataacggcggcgcaggttaaacagcaattgtctgcgctcggctataccaccgtccctgacttcatgatcgatgcctacctgtgcaagatggcgaagattgaaccctgcctggttgcggccggttacgacgattgcgatctggtgctgattcaggtctacgctgtcacgttgatggctctgacagcctatacgcagcggattaagtcacagggcgctccgtccggtgcctctcgttcgtttgactacagcgacagcgttctcaacatgcgcgatgctctactggccctggacacgtctggctgcacgtcagatttaccaatcgatgtcgggcagaaagttgggttgtttatcgttgttggtgggtgctga

SEQ ID NO: 192305 - DNA, 630 bp, Klebsiella oxytoca
atggctaaaagaaatgacaattctggtttcctttatcactggataaaagcaacaccttttatgaaaagcaacaatctcgattactcaactgcatttgaagtcctaatcaacatcataaaggatggggtaatcagagcaggcctgacaatggaggccggtggtcatgaatgcatctgttttacagaatcaaccaagtattccattagagatgatacctcgaaatatcaaccatttggatttgagatctctaagcgaagactgttttctgccggagggcgacctgttatctactcaccaatagctgaaaagaaactcttagatccgagtattcaatggcgtttcatgccgtttgatctggacgaaaggtcggaaagctctccttttggcattgacttcacttgggagcgagagtggcgtctcaatgagccggaattatctttagatgctgtaaacagaatatttgtcccaaatgatcgttactggaaattgcttatagacaggactaacgacatcgtaagtgagagcatcagtgaagatacttcagattactactatggatatccccaccctagcgtggaagattacattgattctatccacgaaaggattgatgttttaagaatagactga

SEQ ID NO: 192306 - DNA, 471 bp, Klebsiella oxytoca
gtgattggcgagctggtaaagcgttactggctgcagctgattgtggtaacggtaatcggtgggctggcgttcttcgcgaaccactaccatgacaacgccaccaagttcaaagagcagcgcgataaagccactgaacaactcagcatggcgaaagacaccattactgacatgcagaaccggcagcgtgacgttgcagcgctggatgccaaatacaccggagaactggcagatgctaaagccactatcgatcagcttgagcatgatgttgcttctggcaagcgtcggctgcagctcaacgccagatgtcccgcgaacggaacgaccgcaaccggcggcatgggcgatgcttccggcccccgacttacagactccgctgaacgggattatttcaccctcagagagcgaatcagcaccatcaccaggcaagtgagctacctgcaggaatatatccgcacgcagtgtttgaaataa

SEQ ID NO: 192307 - DNA, 597 bp, Klebsiella oxytoca
atggcgcaaacactgcaatttgagaagagttatcaaaacgtactgattcccgcagagccgggaaccagcgaatacctgcaacttatcccggtagggcaactgctttgcggtgagttccgcaagccccggaattacgcattccacaagaagttcttcaagcttctgactctcgggtatcactactggaccccttccggtggtctcattgagcccgcggagcgtaccctcatatccgggtttatcgacttcctttcatccgacttcgatcagcgcgctgcgctccagaacgccgcggagatgtatctctcctctgtcggtatttctcgttcccgcgatatggcgctgctgaaacacttcgaatcattccgcgagtgggcaaccattcaggctggcttttacgacgaataccagatgcctgacggtagccgtcgccgtgtcgcaaagtcgatctccttcgccagcatggacgacagccagtttaacggcgtctacaaatcagtgctgaatgtgctctggaactacattctgcgtcgcaaattccactcgccggctgaggctgaaaacgccgccagtcagctgctgagctttgcggggtga

SEQ ID NO: 192308 - DNA, 303 bp, Klebsiella oxytoca
gtgactatagccatcgatcgacttaaagaagttacaagggtctttggccgcaggcatatcgcctaccagatggccagagagttgctggagatatatcgcggtaacggcccgtcagtgtggaatgtgttgagcgatttccctcctgaagtgaatggaaaatatcttgtcattaccagctacggggatatcagaacagcttgctatgactgtgagtcgggggaatggcgggcatcagatggcgtcattaccggcattatcaagtggatggatttgccagcctacccgcaggagccaaaaccatga

SEQ ID NO: 192309 - DNA, 438 bp, Klebsiella oxytoca
atgaccagcaaattagccagagagtggttacagcatcaaatttcagcaatcgaagccgttggtattactgatagtaacacattggccgcattcaagttggcgctggccgcaatggacagcgagccggtggcggtagttgagccgagtgattacgttacggcagcgcaacttgttggtgaggggccagccaggaaagcggtgcatgagctatacgaaggggctttacggattggcgacaagctctatcgccacgcgcagccagcgccggtagtgcaatgcgttccgcttggagattctccatatgatgttccatacagcatgccatcaaaccttcgggaattgattgctgaagagatagggattctttttagcgatgatgatgctcaaggtgtgtggattgcatgccgccgcgccgccatgctcagcggagataagtaa

SEQ ID NO: 192310 - DNA, 441 bp, Klebsiella oxytoca
atgactgatatcaccgaactggcgctgattaccatcaaaaatcagatcaaaagctttgacacggtagtgctgagagagaatgaagccctcgcgctggtagaggcgctggagaaggcgcaacagcggattgatgagctctatcaggccatttccgcacagaaagaaacgatcaccagactggcgaaagaaagcaaccgtctttttgatgaccgagtaagcatcaaccgagcgtggaccgaatccgaaaccaacaatgctgtgttgcgtgaccgcatcgccgagctggagtcccgcaccgtgaagctgaccgatatcaatgagttcctggcagaggttcacgataaaacgataaatctggcctttcggctactagctgaaggtgtgcgtgctggtgatgtcgccgctatgcgcgccgcaggcatcaagtgggaggccgagtga

SEQ ID NO: 192311 - DNA, 390 bp, Klebsiella oxytoca
gtgctgaactggtggaagcagcagccgtttgacctgcagattcccgaacatcttggtaactgcgttttctgtatcaaaaagggactaaacaaagtggctcttgccatgcgcgatgagccggaaatgctggcccagttccgcgcagtaatttcctctcctgatgtccgggttgtcgaacgccggcaacaggaaaacaaaatcatgtaccgcgaggggcagtcactggatggcgtagaggcaatgtacgctggttatgaacgtgatgatatcgcaagaacagtgcgcagcagcggcgggtatgaatcaggctcctgcacagaaagttgcgaggcgttcattgttgataacggacagcttgacctatttgcagaacaggagcgtgcagcatga

SEQ ID NO: 192312 - DNA, 204 bp, Klebsiella oxytoca
atgacgatgttgatcgcgagctgcgcgaaagatttacccgccccggtagtcgttgatacggcctgcaactgggtgagggtcatctacctgaccgaccacgatatcgacgtgctggataagcagaccaagcgcgacattctggcgcacaacaaatcagtgctggtgaactgcccgcaacaaaccgacaaggctactaatagctaa

SEQ ID NO: 192313 - DNA, 1239 bp, Klebsiella oxytoca
atgaaactgcatgaaatgaagcaaaaacgtaacaccatcgccaaagatatgcgcgcactccatgacaaaattggtgatacgccctggactgatgagcagcgtacccagtggaacgctgcaaaatcagagcttgattcccttgatgagcgtattgctcgcgaagaggaactgcgccgccaggatcaggactatattgaagaaaatgagcaggagcagcgccagcagcaaagccagaaccagggcacaccagaagcacagggcgaagcgcgccgggctcaggcgtttgataaatacttacgccaggggttttctgagctgtcagcagaagaacgtcaggctgtaaaagagcatcgtgctcagggggtatctcctgacgagaagggcgggtataccgtcccgacgcaaatgctgaacaaaatcgtcgatgctatgaaagcatacggcggtattgccagcgttgctcaaatcctgagcacgtccaacgggcaggatattacttggtccacctctgatggcacctctgaagagggtgaacttctggcagaaaactcggcagcttctgaaggtgatgcgacctttggaactgctgtacttggggccaaaaaactttcttcaaaaatcattcgcgtatccaacgaactgctgcaggatagcggggtagatattgaagcctacctggctggacgaattgcccaacgcattggccgcggcgaagcaaagtatctgatccagggtactggtgccggcacgcctactcaacccaagggtcttgcagcatccgttactggcaccgtgaatactgcatcagcaactgcgttcacctggaaagagatgaatgcgttgcgccatgctgtcgatcctgcctatcgcactgctccacaaattcgctgggcctttaacgataaaacccttcaggtagtggaagagatggaggacaaccaggggcgtcctctttggttaccttctattatcggtggtgcccccgccaccgttctgaacgtgccctatgtagtagatcaggggatcgccgatcttggtgccgggaataaattcatctatttcggtgattttaaccgcttcatcgttcgtcgcgtcacctacatgacattgaaacggctggtggagcgttacgcagaatatgaccagactgcgttcctggcattccatcgttttgactgcgtactggaagacacggcagctatcaaagcgctggttggtaaaccggcatctggcggctaa

SEQ ID NO: 192314 - DNA, 339 bp, Klebsiella oxytoca
atgcaggcaggacgattacggcaccgggtcaccattcaaaacttcacaacttccagaacgccttccggtcagccggttgaaaaatgggaagatgggaaaaccatctgggccgaggttaaggggataagcggtcgtgagctgttagccgctggcgtagagcatgctgatgcgacaatccgggtctgggtgcgttatcgcagggatatttcagcaacatcccgattgaaggtgcgcaccggcccgtttaaaggcgcagttcttaacgttaccgggcctccggttcctgatatcaaaggtacccggctggaaattctctgcaaacaggggaccgaaaaatga

SEQ ID NO: 192315 - DNA, 450 bp, Klebsiella oxytoca
atgattgatgtgaatctggatttttccggtttgcaggatatcgcccgagacctgcaaaccctcagcaaagccgaaaacaacaaagtcctccgggattcgacccgcgccggggccgaagttctccggcaggaagtgattgacagggctcctgagaaaaccgggaagctgaagaaaaacgttgttgtcgtcacccagaaaagccgccgtcgcggtgaaatctcctcgggggtgcatattcatggtgttaatccgcgaacgggaaacagcgacaacaccatgaaggccagcaacaagcggaatgctttttactggcgctttgtcgaacttgggactgctacggctccggcacatccctttgtgcgtcctgcgtttgatacccggcaggaagaagccgcacaggcagcaatgaaccgaatgaacaaggcgattgatgaggtgctggcgaaatga

SEQ ID NO: 192316 - DNA, 567 bp, Klebsiella oxytoca
atgagtttttttcgattttttgcaaacatgctgggagtggggcgagttactgcgatgaaggacgacggcggaacccagtcagtgcagtatcagactccgcttgaggtcgccagcgctcaccggcttgcagagtttgggttttcctctggactgcccgttggaacagatgtgatgctggtgttcctgggggctaatcgctccaaccctgtcgttatcgcctcgaaccaccagggattccgccattcagatctgaaccccggcgaaacggtgatgtacaaccagtgggggctgcatatccagctgacggagcacggcattagcgtcgatgcaaagggccaggacgtcacagttaataacgcaaaaaacctaactgccacagcgacagaacaggtgaaactcattacgcctaaattactggttaccggtgatgttattgataactgtgaaaccaacgacaaaacgctgaaacaactacgggacgcgtataacgatcacgctcacgaagtgaaaggggtcgaacaaggtaacgacaccgtaaccagcgagaagccgggggaacaggtatga

SEQ ID NO: 192317 - DNA, 255 bp, Klebsiella oxytoca
atgcctgttaatacattgattaaaaccatcacaattccaaactcgatagcaggagagcataaattcgaaatttatcaggaagaaaatggaaatttttatgctgatatctacggaaaaaacaatgatggtttttgggtgatgattaaggactattacttttttaccagagccgacatcatccaagatgctgttgatagttgcgtgaagtatgtcaccaatcgtgagattgatttaaaagcaatcaagaaccgataa

SEQ ID NO: 192318 - DNA, 1896 bp, Klebsiella oxytoca
atgtctcagcgatataaactctatcgtcgaaccagcggcatttatgttgtccgcattagcgttccccaacgttttcgtcgatacgcaggacagtgtgagattcacacttcaacaggcactcacgatcttcatgaagcaaagcagaagtccgcgctcctgttggcggtctggtatcagaccttacaagagtatgaacaattggattatcgaactttaagtgactgcgccccgctgcttgctggtgagggtatgatctcgctttctaactttgcggagtcaatcgagttgcctgtatcgcagttgattcaggcggtgatgaatcgcaatctcccggtattctggctggcaacggggcaggctggattttatgttgagtctctctctgaggccgagttagatcctcttgatggcagctacgtgctgaactatggcgaagagcagggtattgagggagttgccaaaggttatctgcaactcaccgcgcagccagcgcatttgcgtaacatcatcagcgacagttattcagaggtttcggtatttaaaactgccggaagcgaagctaaaggcgggtggtttttcacttcctgttgtccagtaattaagcccgataatctgttaatcaataaaatccacgcagaaagcctacggcttgcctggctggctaagacaacaccaccagccacgattgcttctgctatcgttttacctgctactgccaatgagcatgttaaccgtaagaattatagtaacaatctctcgtggttacgtgataaatatctaacatacagacgcgaccataaagctgctgaaacggtgctcaatgctcaccgagacttctttgatttaatgattgaagttatgggggatatccggcttgaatatttcgatcgggatttcctacgtgcttatgaaagcaagctccgcaccatccctgccaatcgtaatttaatgaagattaaatacggcgttaaaacgctggatgaactcatagttaagtcggcagagcatggtgataagctgatgacaggtgagtcagtcaggaagtatataaacggtctctacggttcgatgaagtgggctgtagctgagggaatacttctaaagtctccatgtgttgacttcttccctcctgaagataaaaccgagagagagcaagataaagttgatgtttttgaaccgcatgaactacaagccatattctcgttaccgcaatatgtttcaggaactggtaagagaaataaacatgggcgttttcatcaatatcagccttattactattggatgcctttgcttgcattatttacgggggctagagttaacgaattagctcagctaaggcttgatgacattcaggaagatgacggtatttactttttcaaccttgatgttgatggagaaactgataaaaaactgaagaatgccaacgcgcgtcgtgagattcctattcactcaatgctgattaaattggggcttatcgaatatgtaaaagcattgaggggtgccggctatgaacatctattccctgaaattacaccgaatacagttaaggggcatggtaaagccgtctccggatggttcaatgaatcggttcttaagaataaattgaaacttgaaagggatagaaccaagtcttttcattcttttcgccattcagtatcaacatacctcaaagagaaaggggtcaattcggaactacgtgcccagttagcaggacatgtgcgcggaaaaacggaaacagaagttcgctatagtaaagatctcaagccgattcacatggttgagatcgtagagaagattgacttttcgttgcctgagatcgctaggttcaacatacccgatggtttggatgctgtcagagatgcgctgcgaagaaagcgtggtaaacaaacaggctga

SEQ ID NO: 192319 - DNA, 342 bp, Klebsiella oxytoca
atgtgttttattgacccgagcaccatgcatgaaaggttacaatgtcaggtcgtaacaatccgtgtaactagtttatcggtcagttcagcagacactttataccgccgccatgggatcgatgttgtttcgtttggcaactcgcttcatgacccggattgctactacctcattcgcgcctttgacagcgctgaaaaaatggctgcggctctcagtgctttttacgcaagcgatgactggcacagcggtccacgcgaaaacatcgttggcagcatagggaccagcattaaaacagtgatgaatctaccaactaaaaacgtggaagggctgcgggtgcaatcgtag

SEQ ID NO: 192320 - DNA, 531 bp, Klebsiella oxytoca
atgaataaaaaggttatttttttgttgctgtccattatctcctctccaggtttcgccgttagcatacctgacccggttccttcagatgcttgccattttctttcaggaatgccattcattaaaactccgtcaacctataaaccatatgctgaaggcagcgaagactatacgtgcggaacaccctattttgagatagaaacgccgaatagtggcgacactatgaacaataacattgcttactacgtatcaggtaatcaggacaaaacaaagaaattgatgctcatgcttaatatgaataatcaagatccaaatgccgccaaaattgcccgaagttattttataaacggttcatttgaaataatgaaaaagatgtttcctcattctcccggaaaagttgccgacattgttggtttactcggtgatgggaaagacggtgaatggagcgtcgatgggtggaaagtctcttcagtaaaaaaagtctggcctactggtagaggttatgaacttcgtttcatcgtgacatctggctga

SEQ ID NO: 192321 - DNA, 1017 bp, Klebsiella oxytoca
atgaagagtcaagaacacaagtctgtcgaagcagaccgcaaatcctttaaggtttcagccgggatcgactggctggacataatgatcagcttctctaggctgacccagcatcgctacgttcaggaagaattacttaaaatcaccggattaaaactctgggttgaaccctgcggcctacgtatctcaaagttgacatcatgcgaacaccggcccggtaactacgtcaaaccgtgggtaaaacccatgataagcagcactaacgatgtttttcggattcgcttccgtgatctactggcaaaccattgtggcgagctggaagcggcactcgaccagttacaaaaccgtttcccatttgcatatgagccgcaaattatgggggtcgaagtcttctgcgatttcaggcacaaagcccagtcgattaccgctacaagtgcgatgacctatcgacttcaaaacgccctgttcagcacgggaaccaaagcccgacaatacaatcccgtgactaaacgcaatgttttccttgatgttcatggcgctcgtatcaatcctgaatggaacttgagaacgggtaacaagtgggacagcatctcatggcaggtctatcacaagctcactgacgacggtcagacattacctgtagaagagcaacgcgctcgtgttgaagtcacgttaaaaggtgctgcgctcactcactactctcttcaccgccttaacgacatacaacgctttcgatttgaaaccctcgctcacctgttcaaatttcgcaaaccaatcgagcctgaaatgatggctaacggtgatatgttcaggtttaccgctatcaacgcagttcgtaaggtgaacgacgcaacagccgagcgcggattgcattctttcaataacatcggacgtagggataaacgtagctggatgatggtcaacggtgacaagcgcctgcggaaagaaagctctcatctggcggttgttagcgatctgcaaaacgccgtcaagggcgccttacgccgtctccacgtttga

SEQ ID NO: 192322 - DNA, 501 bp, Klebsiella oxytoca
atgaagcgtagacactggataagcatcgaaacacacaaaaagttctatagggctcgcagtgagtttgcggactggacggatagggagtggaaacacccggtttcctgctttcttttgcaggtctggggattcttgatgtttgttattcttggactgacctctctgcttttgggtgttggttcacataaaaatgccttcccggaattatatctgaacgatgaaaagcgtggaccaattcgctttaagtattccttgacctcattcgtagagggcaagggctggattttgtttgtagtgttcgcacttttgttcgcctcagtcgccgatgcattcaacccattctatttaacatcgtcccttatctactacgtaatcaatggggtagcactatttgctggatggtggggtggggtatttgtttatttaaggttagttagttggatgagagaacgcaccatttggctatcagaatggcagcgtagataccctgacgacaagtag

SEQ ID NO: 192323 - DNA, 561 bp, Klebsiella oxytoca
atggcgattttcggctacgggcgtgtctctactgctcagcaggatacggagaaccagaggttggagcttgagcaagctggttggacgtttgacttttggtttactgatgtcgttagcggtaaaacccctgctatgcagcgcaaagcattctcagagttgctgggcaaaatcagggacgatgaaacgctggttgtagccaaacttgaccgtttggggcgtgatgctattgatgtgcttcaaacggtccgggtgctatctgatcgcggcatcagggtgatagtccaccagcttgggaatactgatctcacctccgctgccgggaagctgttattgtcaatgctggcggctgtagctgagatggagcgagatttgctgattgagcgcactcaggcggggctatcacgggctaaagccgaaggtaagaagttggggagaccctctaaaatcgcaccagaagcccgtagaacgattgtggataaaatgagtagcggaactagtatcagtgcgttagcccgtgaatatggcgtatccagagctacgattgctgctttggggcgttag

SEQ ID NO: 192324 - DNA, 777 bp, Klebsiella oxytoca
atgacactttttatggctggcaacaatgcggctgagcgcttcgtagttggagataagtttccttcgattattaagctatgggaaatgattgtgaataatcctcatcaagtaattgatgaatattccaccatttggatggggtttgatggggagaatcataactatttcaatgaggtgcgtgagcactataatgaaactcaaaatccagtcgccctgctttatttagtatgccgatgtgtaaaaaatgccgttcgcttcaatgcgaaagggaaatttacacaatcagcggataagcgcagaaaaggtatggcaccggaaaagatgtcattggccattgaaggcgcttcaaaattattaaaaggccgcgttgagtttcgtgtgggggattggaagacaacctcgcaagacgctgagagccaagatttcgtttatatggatcccccgtatttagggacttccgttggcagagataagcgttaccacgaacaacttgaggttgactctcttgtttctggattagaactattaaatgaaagaaatattcgatttgcactttcatatgatggtatgacaggtgataaagaatatggacctgctctgccagaacatttatcaatgtctcgtttgctaataaatgcaggtcagtcaagtcaggcaacattaaatggtctgaaggcagagacagtagagagcctttatctttcttcaaatataaaggctccaacaaaaacaaggcttaacttgagaaatacaagtcaagaagaattattttcttaa

SEQ ID NO: 192325 - DNA, 759 bp, Klebsiella oxytoca
atggacaagaaccgtttcatatggtttccttgtcctatgaacatacacagcgttgatccccgcattctggcactgtgcgagagggtcactagaaaacgtgccaagacagtaatcgaccatattatagaacatggtttcattactacagaggacttacaagaaacatacggctacgaccatcctccaagagcggtaagagatgtaagagaggaaggaattcctattgaaacattcaaaaccgtaagcaataggactgggagagcgattgcagcttatcgttttgatagccccgacaacattaaaaatggacgcattggtgggcgtaaagctttttcaaaagcctttaaagatgctttgatttttaaatatgattcacgtgatgccattactggcgctcaagtagagcaacgctatttacaaatagatcatcgcgttccatatcaggtagcaggtgattcacaacatgacgagactaatcttgacgcatacatgctacttgacgcttcaagccaaagagcaaaatcatttacatgtgaatcctgcgataattggataagaatacaagaccctaacatttgtatgagctgctattgggcatttccagaaggttattcacatgttgcgatgaaccctgtcagacaattgaatatcacgtggtccggtgaagaggaagttaatgcttatgaagaattaaagtctaaagctgaagcagagggccttgatattaagaccctcttgattcgccttttaagaaaataa

SEQ ID NO: 192326 - DNA, 498 bp, Klebsiella oxytoca
atgacgggagcagactttttattaccgattgcagcgggagccgcgattagctgggccagttatagtgtagttgcccatgctgtatcaaagcagcacatcagcacgctacgcgcaactgtatggggtgctctgggcactctctcattggtgctgggcgtatgcgccttttctgctgtaggtgctgagcatcagacagcacgaaaagatatcgtatgtgcagatgacaacccggaatgctatgcgaaaacgcaccataacccggtcagggagtgcaaacaggtaatagacaagaaagcgacgtttcgccatgtgtggcaggaaagtgaagcgcagccgattttcggaacttacttgtggcatgatgaagaaaagaaaatgattcaagcacttggacatcaggctagcgccattaacagtctggaaatgctaacaccgcttcagtattattgcgtttttaacgccaacactggggaaattatagccgcttcttttgaatga

SEQ ID NO: 192327 - DNA, 387 bp, Klebsiella oxytoca
ttgaactggtggaagcagcagccgtttgacctgcagattcctgagcatcttggtaactgcgttttctgtatcaaaaagggtctgaacaaagtggctcttgctatgcgcgatgagcctgaaatgctggcccagtttcgcgcagtaatttcctctcccgatgtccgggtagtcgatcgccgacaacaggaaaataaaatcatgtaccgagaggggcagtcacttgatggcgtcgaggcaatgtacgccgcttacgaacgtgatgatatcgcaagaacagtgcgcagcagtggtgggtatgagtccggttcatgctctgaaagttgcgagccgttcattgttgataacggacaacttgacctatttgcagagcaggagcgtgcagcatga

SEQ ID NO: 192328 - DNA, 324 bp, Klebsiella oxytoca; identical to SEQ ID NO: 179492

SEQ ID NO: 192329 - DNA, 729 bp, Klebsiella oxytoca; identical to SEQ ID NO: 179493

SEQ ID NO: 192330 - DNA, 2001 bp, Klebsiella oxytoca; identical to SEQ ID NO: 179495

SEQ ID NO: 192331 - DNA, 249 bp, Klebsiella oxytoca; identical to SEQ ID NO: 179496

SEQ ID NO: 192332 - DNA, 2595 bp, Klebsiella oxytoca
atgccgattccgacagcgattcggattctgacagtgattcagattccgacagcgattcggattcggacagcgactcggactctgacagcgatgctgactctgacagcgactcggactctgacagcgattctgactccgacagtgactcggattctgacagtgactccgactctgacagcgattcggattctgacagcgattcggactctgacagcgatgccgattcagacagcgattcggattctgacagtgattccgactctgacagcgattcggattcggacagcgactcggactccgacagtgattccgactctgacagcgactcggattcggacagcgattcggactctgacagtgattctgattctgacagtgattccgattcggacagcgactcggactccgacagtgactcggattccgacagcgactcggattcggacagcgattcggattccgacagcgactcggactctgacagtgattcggatagtgacagcgattctgactcggacagcgattcggactctgacagcgatgccgattccgacagtgattcggattctgacagcgattcggattccgacagcgattcggattctgacagcgattcggacgctgacagtgactcggattcggactccgacagtgactcggattcagacagcgattcggactcggacagcgactcggactctgactctgacagtgactcggactccgacagtgactcggattctgacagcgactcggactccgacagtgactccgattctgacagcgactctgactctgacagcgactccgattccgacagcgattcggattcggacagcgattcggactcggacagcgactcggactccgacagcgattccgactctgacagtgattcggattcggacagcgattcggactctgacagcgatgccgattccgacagtgattcggattctgacagcgattcggattctgacagcgattccgactctgacagcgattcggactctgacagtgactcggattccgactccgacagcgactccgactctgacagcgattcggattctgacagcgactcggactctgacagcgactccgattccgacagtgattcggactccgacagcgattccgactccgacagtgattcggactccgacagtgattccgactcggacagcgatgctgactccgacagcgactccgattccgacagcgattcggactccgactccgacagcgactcggattccgacagcgattcggactctgacagcgactcggactccgacagcgattcggactctgacagcgattcggactccgacagtgactcggattctgacagtgactccgattcagacagcgactccgattcagacagcgactcggactctgactctgactccgacagcgattcggactccgacagtgactcggattctgacagtgactccgattcagacagcgactccgattcagacagcgactcggactctgactctgactccgacagcgattcggactccgacagtgactcggattctgacagtgactccgattcagacagcgactccgattcagacagcgactctgactctgactctgactccgacagcgattcggattcggacagcgattcggactctgacagcgatgccgattccgacagcgattcggattcggacagcgattcggactctgacagcgatgccgattccgacagcgattcggattcggacagcgattcggactctgacagcgatgccgattccgacagcgattcggattcggacagcgattcggactctgacagcgatgccgattccgacagtgattcggattctgacagcgattcggattctgacagcgattcggattctgacagcgattccgattctgacagcgactccgattccgactccgacagcgatgctgactccgacagcgattccgattctgacagcgactcggactcggatagtgactcggattccgacagcgatgctgactctgacagcgattcggactctgacagcgactcggattccgacagcgatgccgattccgacagcgattcggactccgacagtgattcggattctgacagcgactcggactccgacagcgattccgactctgacagtgattcggattcggacagcgattcggactctgacagcgatgccgattccgacagtgattcggattctgacagcgattcggattctgacagcgattcggattctgacagcgattccgattctgacagtgactcggattccgacagcgactcggattccgacagtgattcggattctgacagtgactcggattctgacagcgattctgattcggacagcgactcggactctgacagcgactcggattcagacagtgattctgactcggacagtgactccgactctgacagcgactcggattccgacagcgatgccgactctgacagtgattcggattcggacagcgattcggactctgacagcgactccgattccgacagcgactcggactctgacagcgattcggatatcccgcaggccaatgcggataccaataccgcgctga

SEQ ID NO: 192333 - DNA, 471 bp, Klebsiella oxytoca
atgccgaactgcgctctgctcccgggggcggcgcaagcgcctgcccgggctacaggtccaccgccgtctgccataccgtcgcccggacagatgcgcagcatcgcctccgggaaattatgccgaactgcgctctgctcccgggggcggcgcaagcgcctgcccgggctacaggtccaccgccgtctgccataccgtcgcccggacagatgcgcagcatcgcctccgggaaattatgccgaactgcgctctgctcccgggggcggcgcaagcgcctgcccgggctacaggtccaccgccgtctgccataccgtagcccggacagatgcgcagcatcgcctccgggaaattatgccgcactgcgctttgctcccgggggcggcgcaaagctcctgcccgggctacaggtccaccgccgtctgcgaacccgtcgcccggggaagggccgcaatcagatctccggggtatttttaa

SEQ ID NO: 192334 - DNA, 408 bp, Klebsiella oxytoca
atgaatacaataaatacacaaattctcatttcaagtatacgagaacatgcacgggcggataacattcttggtttttctctgtatcactatgactacggcaagctcaccattgttggtagcagtgatttcagctattaccatactattgagatcattgcggaaaacccagatttcgtccatggagtgaccgaatggcactgtgatcctgacgaggtgtttattgatttatgcgtggtttccgagcataaaaacgcttctcatggtaaaaaactgcttttcctcaatggagaagacatctgcttttcagtagtcgcagaaaatatctgcgtaaatttcgataccgttttctattatccacgagaaagcttattacccggacaacgaattgcgcactgggttaaagcgtaa

SEQ ID NO: 192335 - DNA, 390 bp, Klebsiella oxytoca
atgcaaaccaaatcatcctccctcatgcgggcggcatcgtcacgtccgtctcccgttgatgtctggcaggctctgctgaccagcctgctggcacaacactatagcctcacgcttagcgatacgccgttcagtgatgaacaggtgattcagcaacatatcgacgcgggtatctcgctggccgatgccctgaattttattgtagagaagtacgaactggtccgtactgaccggccaggcttcagcatcatagagcagtctccgtttattacggccattgatattctccgggccagaaaggttacagggctgatgaaccgtggcacgtataaagaggtgacggctattaccagaggacaacatccgcaggccaacgcttcaggcaagcgatga

SEQ ID NO: 192336 - DNA, 684 bp, Klebsiella oxytoca
atgaaattagcgagtcgttttggccgcgtgaatcagatacgccgtgaccgtcctttaacccgcgaagagctgatgagccacgtccccagcgtgttcagcgaagaaaagcatgaatcccgcagtaaccgttacacgtatatcccgaccatcaccctcctcgacagtctgcagcgcgaaggatttgaacccttctttgcttgtcagacccgcgtacgcgaccagcgcaggcgtgagcacacaaaacatatgctgcgcctgcggcgtgccggacagctcaacgggcaccaggtgcccgaaattatcctcctcaacagccatgacggctcatccagctatcagatgctgcctgggctatttcgtggcgtctgtaccaacgggctggtctgcgggcagtcattcggggaagtacgggtgccgcataaaggggatgtggtggaaaaagtcattgaaggggcttacgaggtgctgggcatttttggccgtgtggaggagaagcgcgatgcgatgcagtccctgatattaccgccacccgcacagcaggtactggcgcaggccgcgctggcgtatcgctttggtgaagaccaccagccggtgactgcctcccaggtgctcaccccccccgccgctatgaagaccgcagcgatgacctctggaccgtttaccagcgcgtgcaggagaacctga

SEQ ID NO: 192337 - DNA, 318 bp, Klebsiella oxytoca
atgaaagggaatttaaagtacattcttgccattttgttgatggctttttttcctgccgctggcggtgagttttgttgtctttattcttacatcagcaatcccttatttaggtttttcttatccgttgctgattgtggcgacgataattggcctggcgatccgttcaagccaaaagccctggcgcaggagaaagaagtgcagttaatgataacccccgtggtgcaaacgcaaaccctggtggagtggtttatcagcccgcagggccagactctggcgcagagtctgggctatctaccgctctatccggtaacggaataa

SEQ ID NO: 192338 - DNA, 2556 bp, Klebsiella oxytoca
atgtactatctaacggtagatgctccagatattccaagtgtacattttgatgaaacgaatattcttggtagtgtgaatatcacaacaggttctaagtctgactattttaatacaatggacagtacttatacaaacccaagtaatgactattcacaagatattatccgttatccaagtgatgctattagtaacgcatccattgctaaagatggttatattatcaagaaggatttaaactatctttgggtacaggataaagatcagcttgctattcttagtaacattgaattacttaaatctaagtacattacgaacacgattactttcaatacctatgtaacagatttaaaagtatatgatgtgtttacaattgattttaaagaagctggatttagtaataacaagtacagatgtattcaacgtactgtaccaatgactgttgataaagcgggtattattcagattacagcaatttcgtatgatgatggtatctatcaaggaaaagatccggggcaattcccacaggatggattgaccaatctacctaatccaacatacgtacaaccgccaactaacctacaggctcaacgcttaggggctacggcatcaggtaacacagtattgcttacatgggatttaagccaggatacaacggtacgtggttacaagattcgctataaacgcagtgattccggtgtttggatcaacatcggtaacgtagggcagtactcaacaagttttgagatattaaatcttctatatggtgttcaatacgattttgctattgaagcgtataacacattaggttattcatcggatttagtagctatctataatcaaacgccacaagttattttcgcattaccgaagatcactaaccttgatatggttaatgatgatgttggtctaaaccagacttatgctcaagattttattttccgttgggatgatcagaataacttagctgttaatggtaaaacctttgctgatttcttcaaatactatgaaatccgtgtgtatgaccgttatcgcaattacatcaagtcatattacaccactacaagcaactggacgtactcatattcaatgaataccagtgatggccttagccgttaccgtgtgtttgggatcatcgctcatggttggggtacaggtatctatagtgaagaagttcagattgaagttagtaacccgcagcacccacagttgttagggatcaaccttaagagtggttatgattccgtgtttatcgactggacagaatcaaacgtaccggattatgcgggaatagttcttcaaatcgcacttgatgaagggtttagctcaggctcgaagtactttagcagtgctaaccgctattcagcatcgtttggtattgaagatggctcatggttcgcacgtgtagcagcctatgacgtgttcggacaggatgaattggtatggtcgcctactatcggttttaaccaaaacacgaaagtaccgtacagcaaattgaacgaagatgttattgatagcctacttaacagtgatacggctactggcattgttgagaaacagatcgtagatgaacttggttcacgctggcagctacaggtgtcaaacaacggtaacgtaacgggcattgccttagcagcagatgaaaaaacatcagtgtttaccgttatggcagatcgctttagcatcatcagtacagacagtgccaagctatcagatagggtatatccgtttgtggttcaggggggtaagacttacatcaactcagcggtaatagcatcagcgagcatcaatgaggctatgataaataacctttccgtttcccgtgcgaaaattcaggatgccgcaatagacaatacgaaaatcgccaatgccgcaatccgtaacgcccacattatggacggcgtgatcgactcagcgaagattagccagcagatacaatccagtaattgggatggtgtgaatggttgggctatcaataaaaatggtaatgcctggtttggtaacgtatctgtacgtggaaatatacaggcaacatctggtgtactgaataacgttactatcaatgaaaactgtaacattcttggtactctaagtgccgcacgtatcgtaggtgatatttgccgtccacaatcaacgggtatcaaccctgtaccgtttatctttggttcacgtactgtttcaggtgggcaggccgctaataatcctgtcgctaaccaacactatatagcgttgcgtatacgtggtgaagatttcccacgttattttgatagtgatttatcaattggtttaacctcatatgaacgtcaatacttctatattcgtatgggtggtgatggaattggtttaactaatctctattattatgatgctggtaacggtggtagttctacatctttcagattgaattctatatatgtaccgcctgtaggtcgtggtaactggaattatatatatgtaatgtgtacaacatcacgtagtggtattgcttcacttaatgttcccgctaactggtcatcattcttatatcgtgctggtgatcagcctttatataatgcgtga

SEQ ID NO: 192339 - DNA, 270 bp, Klebsiella oxytoca
atgggtatgggaacaattcttgctttggttattagtggtttggtactgatatatactatttttcgtgacaatacaaaagatactaatgacttactaagccgtgtgtctgatattgaaacaaccattgcggtacaggatagtaacattacacgtctaagcgatgaacaagacaagatgaaggaaactttgagaaaccttgaaattcaaattcacgaattggatatcaaacttgaaaggattattactattcttgaacaatcaaagcagtaa

SEQ ID NO: 192340 - DNA, 447 bp, Klebsiella oxytoca
atggatataaaaacacgactaatagattatgagggatcacgagcatatcaaacacgtatggggtactttagaaataacaagtattatccatataatgatagtgaaggattcttaaccgtaggattcgggcataaagtactacaaggtgacaatttcaataatggtattactgaggtagaagcatttcacctacttgataaagatattgctttagcagaaagccagctaagtaaactaaaccttatcattcctaaagattggcaagacttcatgatcatcatgatttttcaacttggattatctggaacgatgaagtttaaaaaaatgattcaagcactacgtgattccaactacaccgaagcagttaaacaagcaaaagatagtttatggtatcgtcagacaccaaatagagttaatgcgatgatcgcacaattaaccaacaaataa

SEQ ID NO: 192341 - DNA, 432 bp, Klebsiella oxytoca
atggaagcatggcaatacaacgaagattggagtgaagaagaattaactaacggtagttatgtaggattcgtgtatttgttccaatttgaagataacacaagctacgtaggcagcaaacagatgtacaagagagttaaggacattaagaaactaaaagataattcaatagaaaacggatggcgtgagtacagttccagttcaaagatagttaattccaagattgaagaaggattaaatttcactcgtactatcttgtgggctttcccttcgatgaaagaaacactttttgtagaaacagcattaatcattaatgaaggactaaaaacgggaaatctaaaccttgcagtaatgcataaggcgagattaccgagtgggggagatgcggtacgtatccgtggaatccttcaatcattatatgaaatactaaattaa

SEQ ID NO: 192342 - DNA, 609 bp, Klebsiella oxytoca
atggattggagaaacagcaatagccctaatgatatgaagcgattcataaacaggaatagcccaaagataggacaagaatttaagaaagaattaagtaatcgtatgcgtatagttacacagcacattcaaaggaagattgatagtgatgtagcgggtggtggtgtcgcatttactggaaagagtatgtactttaactttagaaagataagtgagttcaagacaataaaccaaatcattctactaccaaatcaagcatcatatctaaagtacattcttgatccagcgtataagaatgttaatgaaggtaagattgcaccgcttccgaatgccaagctaactaaacaaggtaacattacacagctacgttcaagaaccaagagtaataaatacaaaaaggtgaagagtaagaacggtaatacgtacttaatcgacactaccaagaaatcctctaaacgtaatcctaaactggcacgtgaaaagagggtgattggttactatggttccgttggtagaaaaccattgtttgatttctatgatgaaaccgagaagcaagtaatagaacaattaagaacattacgcggtacgtttgattaccgttggaggaggtaa

SEQ ID NO: 192343 - DNA, 303 bp, Klebsiella oxytoca
atgttaagtattatcattgatcttatcaaatcagggattagcctttttactaagaataaaaccgaagttgctaagtcacaagacgaacttgaaacagagaaaacgaatgaagcacaggaaacaaaccgtgaagagatcaaagctggtagaggctggagatcattcttaggatatgcctgtactttcattcttgtatataactatatcttagtgcctattctagactactttggtattgttttattctctttcccactatctgacattatcagaatcatcgttttgttgcttagtggtaactaa

SEQ ID NO: 192344 - DNA, 798 bp, Klebsiella oxytoca
atggttgccactatgaaatttaaaacaacagctaatgttattattaagtttgttagagagggttttttatctattttatcattcttctttggtgtcattttagtactttgctttgttaaaactgataaattatctgactctataagtgctttagcaaatgttgttatggcatttgcggctataatgggtttagtgtttgctaaaacatggaagcgtgatgctactaaggataaagttattgatagatgcgtaaaaattctatctgtacatctattagatattaagaagaattttgtaccagctttacatatcagcgtgtttaatgtttggttttcttcattcgtaaagaaagatgttactacatataaagatgtgcgttccatgaaaaaaatggcttctaactatgtaggtctgataaaaaaagaaagtgaaatatatactgaatttgtatctgaacttgagtacttaaaaattttatcatgggatgttaagaaagaacatattgaagaagtagataaaattagaacgtacatgagaggtataatcgctaaggatcaagagctattagctcttatcaatatagtttttggtatgtggaatcttaacgtttataatgatgatgaaagtaaagcctttaccgaacttccattcaatttatcaagagatccaagggtggagatggcattaaagctaataccagagatgacgcgagaaagagagaatttacaagcactcattgaagatatgcttagtaaacaattgaatgttttttcatttattgaacaagtgggacactaa

SEQ ID NO: 192345 - DNA, 342 bp, Klebsiella oxytoca
atgaatcttttggctttcataccgctttttgttgctttcgctttctatcttttggggccgtatttcggttttacggcggtgcaatcactcggttacctttcattagtctatacgcttgcagctggatttaatttagtaaaagggaaatatcagttagcaaaaatcggtaagcaaacaattgatgttttcacatgtactagtattgctgttagcttaagtgctataggactaggtgtttatactcgtacgattgatcaacatgacaccttagtatacttaataattatattcatgtttgtctggttagtagctaaagagtacaaaaataaaaaagccccgtaa

SEQ ID NO: 192346 - DNA, 210 bp, Klebsiella oxytoca
atgacagaagaacaatttgaacgggattacccaagagatcagtacaactacgtacgaaccaatttcagaacgaagggatcgcatggacaaactgaaatagagtcatttgatatcgtttctatcgccactggtgaaacagttctacaagctacccgtactgaacatacgaacctgaaaggattggacactactgtagattgggattggtaa

SEQ ID NO: 192347 - DNA, 840 bp, Klebsiella oxytoca
atggactatcaggtaatcgcccttgatctggacggcactttattgacgccagaaaaaactattttaccagcctcatcaactgccctacagaatgcccgtaaatcaggggcaaaggttgtcatagttaccggacggcactttgtagccatccatcctttttatcaggcattagcactgaatacaccagctatatgttgtaacggtgctttattgtacgattacgccgaaaaaagagttattgcctcagacccattacaaccagaacaagctactcaattagtaaacctacttgatagttacaatgttcatagtctgatgtatgccgatgatgccatgttttatcaaaatccaacggggcatattatccgtacagaaaattgggctaaatctcttccagagtcacaacgtccagtattcaaaaaagtaccctctctgagtgaagcctcgcaaaatgttgatgctatatggaaattcgcccttactgattctgatactgaaaaactacatcgctttggtcagatagtagagcatgagcttggccttgcttgtgaatggtcttggcacgatcaagtggacatagcacaagccggaaacagtaagggtaaacgcttggcacaatgggtagaatcgcaaggcttatctatgagccaggttatggcctttggtgataatttcaacgatctaagtatgctggagactgctggcctgggtgttgctatgggtaacgctgttgatgaagtgaaagcgtgtgctgatttagtaataggtaacaatacggaaactggaattgctgatgtagtaaatcagtacttcgcaagcataaaagaagagataatttag

SEQ ID NO: 192348 - DNA, 222 bp, Klebsiella oxytoca
atgacctcacgcgtgattgccctggatttagacggcacgctcttaaccggcaaaaagaccatcctccccgcctcgctcgacgcgctggctcgcgccaaagatgctggataccagatcattgtcgtcaccggacgacatcacgtcgctatccatcctttttatcaggcactggctctcgatacacctgcaatttgctgcaatggtacttatttgagtgtgtga

SEQ ID NO: 192349 - DNA, 156 bp, Klebsiella oxytoca
ttgacgcaaaaggcccagatgctgatatccgccaacttctcgttgaggcacaaaaaaaacttaactcttacgaaacaggttggcattcaggcactccaaacccgcaagatgttcatgatctacaagcaaagattcaagatgcgatatctgcgatga

SEQ ID NO: 192350 - DNA, 378 bp, Klebsiella oxytoca; identical to SEQ ID NO: 24225

SEQ ID NO: 192351 - DNA, 183 bp, Klebsiella oxytoca
atgaggtcttttgaggtagagttaaatatcatgcagataaccaaacacaacctgcgaaatatattaaccttacttttacatcacagcttttatatcacagcctttatatcaacaccaataaacacattagcccgcaaacactttatttacttcacaaccgaaactctatgtgatttaagataa

SEQ ID NO: 192352 - DNA, 1761 bp, Klebsiella oxytoca
atggatgacttaactctgcgttattttgacgccgaaatgcgttacctgcgtgaagcaggtgaagaattcgcccgcgcccatcctgaccgggcagcggccttaaatctcgacaaagcgggcgcgcgcgacccgtatgtggaacgcctgtttgaaggcttcgcctttctgatgggccgcctgcgggaaaagctcgacgacgatctgccggaactgaccggcggtctggtcagcatgatctggccacattacctgcgtaccattccttcgctctccattgtcgaattcaccgcggactggcatgaactgaaagaacctctacgaatagaaaagggctttggcatactttcgcagcctattggcgaaaagcgcacccgttgccattacaccactacgcaaccgttgaccctgctccccttgtcgcttgtccgggcggggatgtcgacggaagcggacgggcgctcgcttatccgcctgcgctttgagtgcagctcgctggcagactggagccgcatcgatgtaagccgcgtcccgctgtatctgaatgccgatgcgccgctggcctgcgctctgcatgaggcgctgacgctccgggtggcgaaaacgtatgttcgcctccccggcaatgccgaacgctggccgctggatgcccgttttgccgtctgcggtttcagtcaggatgaggcgctactgccggagagcggcagcttcagcggttatcagctgttgctggagtatttttccttccgggaaaaatttatgtcggtgtcgctgcgcggcctggaaaatgtgaatttccctgaggttctggcgtggtttgaaattgatatcgtgctggagaaacagtggccgcacgaatatgcgctgtcggagaaaaatctgcgcctgcattgcgcgccggtgattaatctgttccctctggagtccgatccgctgcacctggactcgttgcagaccgaatatctgctgcgcccgatgcgtatccaggatgggcataccgagatttattccgtggattcggtcacttcctcgcgccattccggccatcagacgtatgtgccctttaccagcttccgtcacaaagggggcatgctgcgccatgatgcgccggaatattactatcatacgcgggtgaagcccggtccttccggactgcacgacacctggctgatgctcggcggcgaggcgtttgataaccacagcgtacctgagcatgaaaagctatcgctcagcctgaccggcactaatggtcaactgccgcgccgggcgctacagagcgcgctgctggatacggtggtgaaatccaccgccacgcctatccaggtgcgcaatctttgcgccccgacgctgccgtgctatccgccggatcgcgaccgatttcactggcgagtactgagtcatctcggcagcagcttcctgtggatgatggataacgccgacgtgctgcgcggcgcgctggccctctatgactggaccgataacgagatgaatcgccgccgcctggaggcgattgtcgatgtcaggcacagcgaggtggaacgttttgcgcagggccattttctgcgcggcgtacagattgaggtgaccctcgacagcagcggcttcgccgggcacggcgatatctgcctgtttggcgaaatgctgaaccgctttttcgcgctctataccgatattcatctgttcaaccatctgattctgatactacaacctgggggagaacgtctcgaatggcaggagaaccacaaccgccgtattcccggctga

SEQ ID NO: 192353 - DNA, 930 bp, Klebsiella oxytoca
atgccttatgatctatcgtcacgattagttataggtcttgcatcaagtgcgctttttgatttggatgagtcagatgaaatatttcgaactcaaggggaagatgaatacagaaagtttcaacgggaaaatcaagatgtactcttagggaaaggtgtcgcatttcctttcattaggcgtcttttaactttgaataaaattaacccaagcaatcctcccgtagaagttattcttttatcaaggaatgatccagatactggattgagggtaatgaattcaatcgaaagttacggattaggcattactagggctgttttccttcaaggtcaatctccccataaatatattccggcattggatattgagttatttctctccgcaaattctcaagatgttaatcaggctgtaatggccggatatcctgcaggtcagattcttaaggggaatattaaggatgatgttcaggatcatgagctcagaattgcattcgactttgatggagttatagcagatgattctgcggaagctgtataccaaaaaagccatgtgcttgcggattttcataattatgaagagacacatgtaaatgaaacgcataaccctgggccgctaaaagacttccttcaacgtatatctagtattcagaagatggaggaggatttagaaaaagaagaccctacctacaggcgtattttacgtatttcaattgtaacagctagaaatgcaccatcgcataaaagaatgattaatactatgagaacctggggtattaatgtaaatgaagcattctttatgggtggggtagaaaagaataaaattcttgaaattatgcagccacatatgttctttgatgaccaacgtcttcatcttgaaccctcagcatctgttttaccttctgtacatataccgtttggagtaacaaacaaaaagtaa

SEQ ID NO: 192354 - DNA, 1734 bp, Klebsiella oxytoca
atggcggtggaaaaactgattgtcgaccatatcgacacctggaccacggcgcggcaaacccgctccaccgccgggcgcggcagctcggggaagattgacctgtacggtattaagaagctgcgcgagctgatcctggagctagcggtgcgcggcaagctggtgccgcaggatccgaacgatgaaccggcgtcggagctgctgaaacgcattgcggcggaaaaagccgagctggtgaagcaggggaaaattaaaaaacagaagccgctgccggagattagcgaggaagagaaaccgtttgagctgccggaggggtgggagtgggtacgattgggaaccttatttaactcaatccagagtggaggaactccaagtaaaatcaaccctgcattttggggaggggatataccttgggccagcgtaaaagacctaggctcttctcaatatatttcggaaacccaggactatatcacagaggcaggtttgttatctggtagtaaattagctgattctggagatgtattaatttgcacccgaatgggactaggaaaaattgctattacttcttgcccaatagcattcaatcaagatttaaaagcagtaaagctcacaagtcatattattcctgattttttctttaatacttattccactgtaaaaataaaaggtacaggaacaacagtagaaggaatcaagcaagaacaactagtcaattacatcactggattccctccattcaatgaacaaaataaaattgtcgttaaagttaaggagttgatgtccctctgcgaccaactggaacagtactccctgtccagtctggacgcccatcaacagctggttgaaaacctgctaaccacgctaaccgacagccagaacgccgatgaactggccgtaaactgggcgcgtatcagcaagcatttcgacacgctgtttaccaccgaagccagtattgacgccttaaaacaaaccattctgcaactggcggtgatgggcaaactggtgccgcaggatccgaacgacgaaccggcttctgaactgctcaaacgtattgcgcaggaaaaagcgcaactggtgaaagatgggaaaattaaaaaacagaaattgataccaccaattagtaataaagatacttatcctgctttaccttcagcctgggaatgggcccgattaacagatttagtgtatttaataactgatggagctcatcacacacctacctatactcaagcaggtattccgttcatttctgtaaaagacattagttccgggtatattaattttgatgatacaaagttcatatcacatgaacaacataaggaattaattaaaagatgccatccccagcagggggatttattactcactaaaattggcaccactggaatccctgtaatcatcgatacagataaggagttcagtatattcgtaagtgttgctcttataaaattcccgaataaactgataaaccctaactatctgaaattactaatttcatctccttttgtgaaaaaacaatcagaagaaggaacacaaggtgttggtaacaaaaaccttgttcttaaaacaatatctatgtttacacttatgattcctcctttaggggagcaagcccgtatagttgatcaggtagaaaggttgcatgtatattgtgataaattaattaatggcatcaaatccgcccagcaaacccagctccacctggccgacgccctcaccgacgccgccataaattaa

SEQ ID NO: 192355 - DNA, 318 bp, Klebsiella oxytoca
atgctagccagcctttttgatcctgtagcccgaataagatcgtcgtcgcaattctgccacatccccggctcgcgctgcgctcagccgggctacgggtttaccatcgtctgcggacaagtcgcccggataagacgtttacgtcgcaatccgggaataatgaaaaatttaagccagctgcttcgtttctgcatccttgctgctgttcagcgccagcgagaccgccagcgtctgagccagacacagggacgccacctgcgaacggaaaccatcaacctgcgcctcgcgcacgacaaagcagacgtcgctgaaggccgctag

SEQ ID NO: 192356 - DNA, 1809 bp, Klebsiella oxytoca
atgacttcattttctacacactgccaagaagtagtaaaagaatatgtgcagacggtaatgattatcgatgatggcgcaggtttaaatagtgaaccacttccagttactattactgacactccattagcatccaatccattcatggctgattttatacaagccccacctcctgagcaaatatctaatcctgagccatctaaagttttccatagactagatacactagaactaactaatgcattttttgaaaaaggaatcgttgcagggatttaccaacctaaaattgataattcccaacaaccagaagaatttgcagaacaagcacgttcagcatgtgaaaaagcagatattatcatactcgattggatactcaaggaccgtaattctgtttatagcaaggcaatagttaaagagattctccaaagcgattttatgggaggtggtcgaattagggccatcatgatatacactggagaatctaagcttaatagcttgagagatgaactttgtgattatttgagcgattatgaattgaacaaagatgtcgattttgaaatacgtgcaaaaaatctcataatttctttttataataagaatcatgaaggctatgctttttctccagatagagctgttagagagtcggaaattccgaaagtggcgttaagctcttttgctattttagttcaaggattaactccaatcttcgctatgaaatcagccgcaactataaggaaaaacacagggcgaattatttctcgttttgatagtaacttagacactgcttatttagcccatcgtgtacttctacctgaaccccaggattctgaagtctttatgcttgaaaactttgtttcatatacaagaaacatcttagcaatttcccgtgttgacaatttaaccctcggtgataagccaattgaattttggattaaagagaacaatgataaacttgataaaaaaatcaaaaacgagcaaggtgaatatagcttagaacttgatgagttaatccagttagctcaaattggattttccaaaaaattgtattcaatattagaaaataagaaagaagaaatatgcaaaccatttaaagatactagtaacacaccttctttaaatgccataaaaatatttaatagcgatcaatctgacgttattgaatcatcgatcgaattatcgatattatcgtcattcagaagaacttttaaagatattgctggtgctaatgaaactccatacctgacccaaggctctcttatatactcgaaaacaaaagacttatttcttctatgtatcacaccgaaatgtgacactgttagaattgaaaaagaacaaaagttttccttcgttgtattgaatgaggcgccaggaaaaaaatttgatatcatcatccccgaaaatagatttgtaaatgctaataaagataaattccgaaacaaattgcgagaacagatagtatactctttgattgattatcgtgacctagatgataaggatgagataaaattaaaactcaatgaacagctcaaaactatcaatagcaaggagtatagtggttatatttatttacgtactacacctaaatttcacgaattagaacatattaatttcgagagtgatgataaaaaaagaataccatctaacaatagaggtcatgacttaattgagttctgggattctgaatttaatgaatacatatggataggcgatctgcatgacctcaatacaatttatcgagttggtaatctagtatcaaacttgaataggacaggtactgatgaagttgaatggttaagacgtcactatcaataa

SEQ ID NO: 192357 - DNA, 3036 bp, Klebsiella oxytoca
gtggcccagatgaaagtaagtgcaagaactgtcgatatgctaggaaggcagcagattgcaggcatccctacagctatccacgaactgtttaaaaatgcacatgacgcatatgcttcaaatgtagaaatagacttttttgagtcccaaaatttactcaccttaagagatgatgggatagggatgacaaaagaggactttatcggaaaatggttaacaatcggtacatccagcaagcttggcatcaacagaaaacccgtattcattcctgaaggtatggacgaacgccctttgatgggtgaaaaagggataggaaggcttgcgatagcttctattggacgtctagtgcttgttcttagcagggccattcgagataacggaatgcacgaaatggtcgctgccctagttcactggactcaattcgaaatacctgaaattaatttgtcagatatagtaataccagttaaaacttttgctccagaaaagcttccaaatcaagatgatataaaatcaatgtctaccgaaattatagataatcttgataaattagaaagcaaagtctctaaagaaatatatgatattatcaagaatgatttggattcttttgtattctctccagatgtactattcagtaatttgcaaaatataacagtaaataactgggataaatccaatatccataacgaagacagtattgattataaaaaaaatccgatactggatggttttcatcatggtacacactttgtaattatgccttgtgatccagctctagagctggacataaaagaagacgaaaacaatactactgaacttcaaaaaattcttgtcggttttgcaaattcactaaatgataagtctgagcaattaatggctacaaagttccgtattcactcagggatcaccgagccaaaggaactaattgaagatggtttctttactccagaagatgctctcagcactgaccactatgtagaaggtgaatttgacgacttcggacagtttaaaggagctgttacagtttatcgaggagaaccagtaaatcatattatcaactggaatgagaaccttggagcaaaaactcgttgcggtagatttaagataaaattttcatacttacaaggcgaagctagtgatagcacggtaccaccacaagtatatgctgaaataaaagcaaaattaagtatgtatgggggggtttatctttataaagatggcattcgggtattgccttatggtaaaccggaatttgatttcctaagaatcgaagaaagaagaacaaagcgtgcttcaactgctttcttttcctacagatggatgtttggtgcaattgaaatcggacacgacaataactcgatgctaattgaaaaggcagggcgtgaaggtttaatagaaaatattgcataccgtgaatttaaaagcattttaaataatttcttcgatcagttagcagcagattttttccgtgaaaactccattaacgatcgtttttgggagataaaggaattatttaaaaaccaagcaaaacaacagaaaaactccttagacaaaagaaaaaaaagtgttagttcaaaaaaattaaacttccaaaatgaactcgagagctttttcttaaactttgataaaaacatatataccaataaagctgaaactattctaaacgaaataaaacatcggatattgtccagcagagataattggactactccacaaaaatataactttatatatgagatcacaagggatgcaagaagtaaaaccagtgaattcagtaaatcgattaaaattacgaaaccaaatattggtttaaataaaacattactaaagcaatgggaaagccatcttattttaagagaaaaaattaatgaagaaattattgaaccggtaagattgcaccttgatgagctgatacgtaattatatgagcactcattctctatcatttagtaaaagagaaaaaataactgaaacgatagatgatgaaagaaaaaatcttaatggtactattagtagctttaagaaagaaataaaggatagtgttaatatattagacgactctatcaaagaaaaagttagagcgaaaactttagaattcactaatacgattaactctgtcatgagtgaaatcaatacaatttctttagatactattcctgatgataaagcaaatgacatgattgcttcatgggagaaacaattggatactgtatccaataaaactgaggaatatttcaataagctgaaggaatctgttgatattatcataactgacttacagggcgatgaagttacctctattgatactctagttgctttagaaactgaaaatgagcaagttaaagactctctgaatcagtatttcgattttgcacaattaggcatgtcgatcggtataattcaacatgaattcagcagtacaattaggtccgttagacaaagcataataatgttaaaaccttgggcggaaaaaaacccaaatttaaatactatatttttcaatattagccatagtttttcacatttagatggctatctcaaaatgttcactcccctgaatagaaggctttacaggtcaaaagttgaactaagtgggaaggaaatagagcgatacttaaaagatatatttgatattagaatgaagagacataacatatctttaatgactactgatgaattttccaatgtagttaaagaagtgtatccatcgacattccttcctgtatttattaatgtcatagataatgctatttattggttgaatactcaacgagaatcagataatccagacaaaaaaataatattagctactcaagaaaatgcactaactatttctaataatggcccagccattccgactattgatagagaaaggatttttgagtttagtttttcccgtaaagattctggaagagggatgggactgtatatatccaaagaaaccttaaatcgagatggttttgatattagattaattgatggagatgtcaatgaatctccttgctttgttattgataatttagatgcaggagtttcagaatga

SEQ ID NO: 192358 - DNA, 1050 bp, Klebsiella oxytoca
ttgagacttaatgatgtaattactgactgcatcaggctcaaattaagtggagctgcaacagataatgttattcaatgctttggtggcaatatactgagaaaagaaaagccagttttggcaattgaagtttcgagcaaagaaatattgctttggatgatgcaaggagcaacgaatgtacatgtttatatcagcgctggtacttttcatgtaaatgcaatgtatgcaccaactgtccgctttccagcagccagaatttattttatgaaatcaaaaaaccttttctggtttggccatattggtgtttatctcgaacaaaacggaatcaaactcactccagtagatgatgccagtttctcaaagctcattgatgaaacggggtatatacaacgttataagccgtggtacgaaaaaaggaaagctgactcgagattattcgatggtctactaggagggcggcttaagaatactgctgtagatcaagctatatggctgtcctctgatggaaagtgcttagtttgcggtgaaaaagccgatcgcatggcgaccagtactgtttggggaaagtcagggatgatgattggtatgcatctgtgtttgacacatgaagaggaatctcagaagcaatcaattcttctcaattatctctcgaatcatttgggtggaatagttatgttctcaaatatgcgtccactaactactgaagaaatgcttaagcagacctgcgaaatacttaaagtaaatttcaaatgcactatcatgaaagttgtaggggaaactgtaaccgcccgaagacagtcggggatcaccgtagtaatcagacaccaatctccctcgaattatgcctatataataatgacccctgaaggaaaacagttgtctagggtcgattcagccgatcatcatatagtaccttacggccctgatcatgtacattctgatctgcgtaaatctacaaaaaatgtcgtcgagacaagctttacatacggacatatttgtctagatatgaaactacttttaaagctgatccaagaggctgaagataaattataa

SEQ ID NO: 192359 - DNA, 882 bp, Klebsiella oxytoca
atgcagttaattaggccaatgaatttaaatatatgttggtggaatacaaagttaaccccccctgcagggagtaagattaatgcagctttaaataaagaactcaatgataaggttgaggaaataatctcttacctctgtcgtgaaaggccactacacttaatacttctttgtgaagtatataagaaggatgaagcattaataaagaaagtagcggctgataacgaattggaatatattatgatagccgaacatgttaaaggcgtgtactatgactttgcaatattatacgaaaaaactagaattaaaataaataaaatagaacacattgatgaacagaatagctttgaacaacaattacgaataggtgtaactattgaagctgattttgatggtgaacatgtcattatttttttatctcactggaacagtgatatgtttaatggggatgttaaaaagtcacattgtgccggtatgcttagagataaagtaaatgcaaaatttagaaatggacatgagcatattattttaatcggagactataatagtcagccatttgacaaagaaataatctcaactcttgaaaccactaaagaccttgaaattgtaataaagagaccacgcgtactgtataatcctttctggagaaacttagatagtagaagccaaaatcattcattttctggtagctatatcctaaaaaatgacgcgtatgacaaatggaaaacatttgatcagatgatgttttcgtctaagtttatcaatggaaaatcctggcttttggatgtttactctccagaaatacacaatgaattcaaaaacatatcattcaatttcattgatgtgttcgatcatataccaatctacgggagattgcataaatga

SEQ ID NO: 192360 - DNA, 438 bp, Klebsiella oxytoca
atgacagaaagaaatcttaatatatcagaattgataagggctaatatcgcaaaagccaaagaaataataagtgcaagagataaagcagtaagcttattatttaatgcatttgatgaaataaatgaagcactcggaagaaatttagagttcaccgcatcgaacgttattgataatgacggtgatgaaattacaagggtatcagtttccaacaagaatagcagatatagcgaaaatttgctttggtactattttaattcggaaaaaatattccctgcgatgttcagttatcaaaacataattacagcaagatgcgagagcattgaagatgttgtggagtttattaaacggcttgttacagatgagaatttcatgattaaagtagttactatttcaagtatgaacaatagtgaggatgattctcaggatattccattttaa

SEQ ID NO: 192361 - DNA, 1374 bp, Klebsiella oxytoca
atgattgttgaagcgacagaactcttaagtgcttttgtaaaagaagaacaagataaacttgaaagcatcaacatgccacatatgccaacgttggggaaagcctacgaggagattacaaaacacggtattaaccaatcattttcaatccctaaggggttgaatctctctgttgttagcggattcatccgcgtcggggaagagcaactaccaaatcagatagattgcatgttggtgaaaggcaagggggataaatatggattaacggatgaatatatatatgatatagaaaatgtattagcaatatttgaagtaaagaaaactctcaacaaagatgattttatcgatgcatatgaacatttagctatcctaagaaagaaatatagcgaatttttttcgggaaaaatggatgctatggagttgaggccaaatataaatgtggcttcggaaattttttcaaaaataacaggtgtaagtggaccaagtagctacgatgacattttttatttagataaggaaagtcaagtgttgttttactcgttagtaattgaacaattggcgccagtgacaattattcacgggtatgggggatataaatcagagaaaggcctgagagatgtctttctggattatttagatgaagataattatttaaaaaatcttacaaagaaaaagaaaaaagaggaagaaaaaaaagcagattcaattaacatgattagaggcataaatagtattccgactctaataactgcaaacgagttttcgttagtgaaaacaaatggtcttccttattccttttcaaaagaaaagaataaaagtgactgggcagttatagcttcgggaagagataacccacttaggattatgcttgaattaatttggagtaaaatatctattcagttcgatataagtatgccatggggcaatgatgatcatgtcgaaggattagccccattactttatgctaaggtttttaaaaaagatgagttattaggttggtactataggtcattcgagctttcctcgaaaaaattaaaatcgtttctaccttcaaaatatgagccgctaagaatttctaatggagcaatacatttagttcgtaaattgccattaatgcctgatggatatatagtaaatgatgaaaatagagttatgtttgatacaaaaggatttgatcttgatggggtggttgcggagctaatatctacatcatattttgcacttaacggtagtaatttgctcacaattcatcatacaacatatgtatgcgattttgatgagtatggtttcatagatagtcaatttcagcggctaaagtcatggtgtgataataatgaagataatgcaggaattattcattgcgtcattttaagttga

SEQ ID NO: 192362 - DNA, 690 bp, Klebsiella oxytoca
atggaccctaagaagctatttattgatgaccgtatgaagggcatttgcgcctattgcggtggtacgccaaattcacgtgaccacgtaccgtcaaaggtcttgttggatgagccatatccgaagaacttacccgttgtggaatcatgtgcctcctgcaatcaggggttctcggcagccgaagagtacattgcttgtctgatcgagtgcgtgatgcacggcactacgattcctaacgaaaagtttcggccgaagatatttgccacccttaatgctagaccatcgattgcaagtagaattgagaatggaaaacaagctgatcgtcacggaaatctattttggcagccagaagaaggaagtattaaagaggttgttctaaaacttgcccgtggacatattgcttatgaacttggcattcaacgcattgatgaaccagcatttatagatattttcccgttgcctagcatgactaaagaacaattagaaatgtttttctcgttaagctcaagtcatctgtatccagagattggtagccgagcgtttgtaagtgtgctctcaggtaatgtcagcgcttttgagaattggttagtcgtgcagaacggacgatatcaatatgccataggtcagtccgatggtgattgggtaaagataataataaatggctacttagcttgccatgtagtatgggactaa

SEQ ID NO: 192363 - DNA, 603 bp, Klebsiella oxytoca
atgaggttttttcaggaaggagcatttaattggcgtagtctgcaggatctacctaatgcctcattcgtatgtggctactgcaatattaatgtttcatctgtaaaaggatacaaactaggacagcatggtgacggaagtggttcacaggttggcgctgtatatgtttgcccaaattgtggtggtccagtttttttcactccagatagccaacagcttccatcccctgctcttggaaattcagtacaacatgtacccgctcatctaactgagctttatgaagaagcgcggcgcagtactggcgagggttgttataccggtgcggttttactttgtagaaaaatgctaatgaatatcgcagtcgctcagggggcgaaagaaggactaaaatttatcgagtacgttacttacctttccgataatggatacacgccaccaaatggaaaacattgggttgaccatatacgaaaaaaaggcaatgaagccacgcatgaaataacggtaatgagcgaaaacgatgccaaagagctaatcgtgtttattgaaatgcttctccggtttatttttgaatttccaagtatggtgcctaacaaaagtagtttttag

SEQ ID NO: 192364 - DNA, 648 bp, Klebsiella oxytoca
atggggacatggggtacaacaaacgcatcattcaagtcgttctttagcgatagaatcggctataaatccgggcttgcgcttgacaataatgaaataattcaactcttagataaaaatgatccactacttgatatcttcaccaatcataaagaggaactgtgtcgaatcagaacaaaccacattgaagacactttccagaaagttttgtatcgcctaggcgtcacgccatatgatttcattggtcatgcgccaacattactcgatatagaatttaggagtgaaccgagtaagtacaagctattcaaacaggtattaagctatcttggagagtcgcactttgataaagaaaaacactcaatattcatggatttcgatgaggaccaatactataaaaatattcaagtgcaatttggaagtgaagcactgaatattgcacgacggctcgttgagttgacgaaagacagtgaagaggctagtccctggaactggctttcagcaagagtttttgattgggaatcaccacttgagcttagagacttatttgagagtgaatcattagacgcgatgtacggaacctttatagatcaaagatacttgaactatttatcaattaatactgacaagctcgatttaatgcattggcggtaa

SEQ ID NO: 192365 - DNA, 1059 bp, Klebsiella oxytoca
ttgaatctgagcaaagatggctatccacagggtccgttgttacgtgcagtatgggagtgttgtgatgagctctatgagaaactaggtcgagctccctcccgacaggaattttataacgaaattgacaaacgcgaaccacatcgcataggtattagtacacattctcgccaatggggagagtggatgcgccatcataatttctcaacatatgtagctagtgtgccgggtattatccctgaagaaatgcactctccacaatatctccgtgtatggtatgccgtgacacaactcggttcagcctctgccgctgatattgtcaagtggatccataatagcaacgcccctttgaaagagaccgagattcgcattcagctggatgcattaactgttaatagcaattcccgacatcgatatcttggtagtcgtactaacgctcgtagtgacttgggtaacccatgcgacttgttatttcgtacgggaaacctacgaaatacacgatatgaactatatacccaggaactgcacggtacatgggacattggcgaagatggtagaacaccgattcagatagctgttccaagaccatgtgatcgactagtggttgaggcaagagatgaactattcactgaattaccagtggatgaaggtgactttcgtctgaaggctctacgtgaagttattgttcgggaagggcaacccgtatttagacgaaagctcattgaagcttatgagggcaaatgtgcggttacaggttgttcgatccaggtgttgcttgaggctgcccatatcaccccctatgcaggtgcctggcatactcgagctcagcatggactgttactcaaaacagacattcatactctttttgaccgtggtttgctttggattgataccgactttaaaataagaatatcagaacggctagacgggacagaatatgcagagttgaatggtcgatgcctaatgttaccaaaagataaaaaaaactggccattaacaactcatttgataaatcatcggcaatattggaatgaaaaacataatgacgatgaacgcacatag

SEQ ID NO: 192366 - DNA, 1329 bp, Klebsiella oxytoca
atggctatagccttagttgttgttaactttggtatgttatttagagatttgggcactaatgtaagtttaattcaacgtaaagccatcgacgatagtataattcatactgtctttagtttgaatataattcttggtttaattgtttgtctactaattgttgttgtctcacctttaatggctagttattttgcattgccaaaattattttctgtgttatttttgctatcgttgacattcccaatttctgcattttcttctactcatatagctttattttccagagaatcgaaatttggtcttatcgctaaaattgaaattacagcggcattgatttcactggtaattgcacttgtgttggcttatttaggatatggtgtttatagtcttgtttcacaggctttatcgttgagtttaattactactattttgttttgttatttttcatcatggaaacctaaacgatttttttcgatagatgctgctgttttcagagaaatattatcatttagtgggaatttatcattatttaactttgttaattacttttcaagaaatgctgatacctttctaattggaaaatttatgaatgccacaacactaggtatttataatatggcatatcgcattatgctatttcctctgcaaagtttaacttttgtggtcaatcgttcacttcttcctatcattagcaggtatcaggatgatgtcattttaattagaactatctatttaaactgtgtttttgttatacttttgttagttatgcctttgatgattggtcttgctttattaagtgggccattgatttatttttgtctaggaacaaaatggcttatggctgctgatttattagtttggttagcacctacagcaataattcagtcattgttaagcagcacaggtacgattttcaccgcaatgggtgacacaaaaattttattcaggcttggtattctaggtgctgcccttcaggtaggggcatttttaattggtgtgaattatgatattgtaacttttgttaagctatatttttactctaatgtactcaatcttttccctgtgatgttttttgtattacgcataatagattgttctttttggttttttttaaagaaaatctatattgtggttatatgtacggctattatgtatttgtcgattgattcttttaggctgttttatcatggctataatggttctaatagtgatctaattaactttatccttcaaatattaatcggcattgttagttatgctgcttcaatcatattgttatcctcagatgtgcgaagatttgtttataaaatacttcaaaagtctagctcttaa

SEQ ID NO: 192367 - DNA, 786 bp, Klebsiella oxytoca
atgcaacataatatcaagagttcttcattattaattgtaaataacggaccaactgaaattaaggattccagttatttatctgctttatcttttgaaaatgttttccttgaaaatcatgttgaaaacattcccctttctattctttataatgacttctttgaacgttttgaagatacggttgaaggatttattcttcttgatgatgatactgaacttacagatgatttctttgaggcgttaagtaatttaaatgaggaaatactattaccaaaaattaaatcatataatgatggggttgtatattatccgagagtgaaccgtattaccgctttagataatttcaaatttcttgttaaggattttgaagtatactctataggctctggtttaaccattcctatatcagtgttaaagctattctatattgaaaaggtgacaccatttgatacttcatatgctctatatggagtcgattctagtttcttcaagcggattaaagtactgtcgcgaaaatacccagatctaacttttttatcctcttgtaaaattaatcatggtttgtcaggtagtgagaagaaattcagtgattttagatttcaagaagttttgtgggatagggcgatcactttaaggagatatcctactttatttgggttgtacttgtatataaaatgtttttataagtgcttgagattattccgctggaaatatttccatatccttctcaagggactaattacagggactcatccgagagtaaaaaaattctaccagtgtaaaaattaa

SEQ ID NO: 192368 - DNA, 405 bp, Klebsiella oxytoca
atgggctgggagcttcacatagtaagaacggaacattggttcgatagcgcaagtgctccaatcagtaatgaagaatggctccagcttgttaatgatgataaagaactctccatagataacaagaatggtgatttttttgctacatggagtgggcattgtgaactctatgaaccttggcttgactggagtgatggaaggatttcaacaaaacatcctgacgaagccctttactgtaaaatgttgcagatagctgagaagctacatgcggtagttgttgatgaggatgatcacaaatattcactaccaagtgaccttatgaatccgtcatggctgaattcatcaccaacctacaaaaaacaatccttatggggaaagttaatttcaaaagtaaaaactatattttaa

SEQ ID NO: 192369 - DNA, 750 bp, Klebsiella oxytoca
atgattataaatgacatttttaaaatatctgaaacaatcacatccccatttcactatatattcaagaggaaactttcatgttacttatatcagaagaatattattaaaattctcggtgatgtcaatcatgtcaaactacgagggtggtataatccatgtgatttgatgaatgccagagaatttagaggaatgattaattcgctttttcaacacagtgattatcatttttccactatggatatagctgctgcaattaatattgcaacaggtcattattctgataatgaatttaacaagttcagccatgagattattgatttctcatatcacatatcacatgaaataaagcaatcaataattaaaaataaagtaattcgagatggtttggttgattatgggaaaaacattagcttaattgatatcaaatcagaacggacagcaattgaatgcctatttaaggataaaaaagagttgtttcgacattacttttccacgttcaatgatactatctataatcatagcattcagatttggcatcaaggcaatgataatacgtggattgactggaccgaaaaaaattctatacgcataaacattaacccctataaaattcgagagggtttctttttaatcggatttgactatcgtgatgtcacaaatgataaaaggttgaatgttgccagtaataaagatggatatgaatactttaataaatgcttgaaaaatagttcacgtgtatgggtgcagtaa

SEQ ID NO: 192370 - DNA, 468 bp, Klebsiella oxytoca
atgagaaaagtaaaaacagataacagtgatctaatccagtatttagatacaatcaaagaactaaaaaatcacatttcgatagaagaatacagaaatgaatatcgtagactacgttctgataatgttcctttgattaaagcccaaaagttcaaatctgcgcataccgaactacgccgtctggacaggaagaaaaaatctatgcttgataaatttatcgatgagcttaaccctgttaaccaagcttccgcttttgcctctaaaaacattgataagcttgaaacgtatagcctatatagaagaaatctccttgagaaaagcgatgaagaaataattgccttagtcataaaacagcgtacaggagtcgctctggagttccagcgttcaattgaacaaagccttgagcaactcgctcatatctcgccagagttcgaaccatcaagccaaaagcgcaggaaaatgtctcgttaa

SEQ ID NO: 192371 - DNA, 807 bp, Klebsiella oxytoca
atgattgagttagaatcaatattaaacatagaaaatgaccttgattataaagttcactttgctgtttataactatgaagaagaaccgcttgatacattccttagagataaagatgaatggcaagggtggaatgaatggcggaatggtagggatgatttcaacaggcagtttattttcagtttgatacgattctatccccaaaacaataggtggttgtttggagggatatatgaagtactggaacgcaaccctgatagatacagaattagattagtagataaacataaaggtttaataggtagattattaatagactatccaggtcctggagcacgtggtagatcctttcgttttgaaaatcactactttaagatgaaagtggcagaaatatttgagagtgaatatagtggtgaaacatttcgtggttttgatcaaattcagcactcatttgaaacgttagagcatatcattaaaaaacaaaaaatggactggaagcgagctttattgaacgtcaaaggtgtctatctaattgttgataaatctaatggtaaaaaatatgttggctcagcatatggtgagcaaggaatttggtcgagatgggaaaactatgtacatacagggcatggttggaatgaagggttatcattactgataagggaaaccggtatagaatatgctagaaggaattttcagttttcaatattagatttttactctatgagaacagatgatcaaatcattatagatagagagacatactggaaacgggttttatgctcaagagagtttggttacaacaggaattag

SEQ ID NO: 192372 - DNA, 471 bp, Klebsiella oxytoca
atggcaagaaaagaaacaatacacaataatcaaatgatccagaatgaactacgtttcatttgctttaattcactatctagtgaagcaaaagaagtaatgcgtgggataatccaggaaagtacttttctaggtaaacaccgtgtaccggaagaagatgtatttgcgatagtaaagaatgctcctgaattcagtgaagtgatggtatttgaacatctaaaactattcagacagaataaaaatcaaaactatccagatagtaaatcatcgcgtgaaaagtacaaacgcatagcaaccctagtatcacaggcgtttgaagtactagtaaaggaagggaaatcccttaatagaatgaagcaatacaaaccaaagaaaaccgtaactgaagaacatgtagcactagttgaactgctaaaagatgaaggtgcggatcttattaccttaattgaacgactagtagcaatgaataagtaa

SEQ ID NO: 192373 - DNA, 474 bp, Klebsiella oxytoca
atgaaaatctggaaagaaacaaaatatgaatattatgtagtaagtaatgaaggtgaagtattcaatactaagacagaaacactactaaagctaaccccttcaaaatctaatgggtactacaaagtatcactatctgttaaaggtggtaatagtagaactgtagaagtacatcgactaatcgcagaaacttttattgaacgtgatgaatcattgaaattagttgttgatcatattgatggtaatcccctaaacaatcacgtggataacctacaatggattacacaaaaagagaatatggcaaaagcgaaaaataaacgtagctggaatagattcaccgaagaagaaaaagtacaaattattgatgcgtggaatactggaaagtactcatacattgggattacatctcacttcaatcaactatggaaccgtaatactacacgacatagttacacaagaattatcaaaaaagcataa

SEQ ID NO: 192374 - DNA, 174 bp, Klebsiella oxytoca
atgaagaaaaataaatctaaggatagaaaagataacgtaataaccgcacgtttatctaattcacaggttgaagtactaaagaaattgattgatgaaggtaaggtatcaaaaggtactctatcttctgctgtaggttacttaattgatcagtacattgtactaaacagtaagtaa

SEQ ID NO: 192375 - DNA, 198 bp, Klebsiella oxytoca; identical to SEQ ID NO: 171904

SEQ ID NO: 192376 - DNA, 1815 bp, Klebsiella oxytoca
atgaaaaaagtctttgtgtatcaccgtgttagctccgatcagcagcttgacgggtcaggcatcgcacgccaagcagaactattagaaggctacttagagcgtactggcatttgtgcggaaatggatgatccagccccagtagtactatcggatcaaggtgtctcagcctttaagggtttaaacatctcagagggtgagttaggggcatggatggaacaagtacgtaatggtatgtgggatagttctatattggtagtggaatctatagaccgctttagccgccagaacccgtttgatgtgatgggttacatcaatgctctaatggcacacaacgtagctattcatgatgtaatggctaacatagttatcagccgtagtaattctaaagatctaccttttgtgatgatgaatgctcaacgggcatatgatgaatctaagtataaaagtgatcgtattcgtaaaggttgggcgaagaaacgcgaacacgcatttaacaaaggtactattgtaactaataagcgtcctcaatggatcgaagtagaaaatgataagtatgtacttaatcataaagcggcagtagttaaagagattttttctctttatcaaactggcatgggatgtccaactattgctaaacaacttcaaacgaaagaaggtgagcaatataaatttaatcgtccgtggactggtgaacttgttcataagattcttactaatcgacgtgtaactggtaagattttcatttcagaaatcatccgtaaccatgatgatattgaaaatccagtaactcagaaaaagtacgatatggacgtgtaccctgtagtgattaatgaagaagaatttgaattagtacaggaattgctaaagtctcgtcgtcctaatgctggacgtgttaccgtgaagaaagacggacaggaagaagtactgattaaaagtaatttgtttagtggtatcgctcgttgtactgaatgcggcgggccaatgtatcataatgtggttcgtgctaaacgtacaccaaagaaaggcgatccaaaaatcgaggaatatagatacattcgttgcctcaatgaacgtgatggactttgcgaaaataaagctatgacctatgaaacggtagaacgttttgtagtagaacatttgttagggatggatcttagtactgtaataaaagaacacgaattcaatcctgaaatagaagtattgcgtatccagattgatcaagttaaggatcagattactaactatgaaaatggtattgaacgccgtaaaagtgctggtaaacctatatcttttgatatgcgtgaagaactcgatgatgctaaatcagcgttagagagattgttagcacgacaggcttcattagctacagtacaagtagatgtgccagtactacaggatgttaacgttactgaattgtatgatgtgaataatgtagatatacgtacacgttatgagaatgaactaaacaaaattgtttctaatattcgtctcaagcgtaatggtaaatcttacactattgatattaattataagcagaacgagctaaaaagacatgtactttttgttgagaataagaagaaagaacaaacgttaatcagtgaggtgatcattgaagatgtagatggtgctaagttctattataccccttcattcatgatcatgcttaaagatggtgaaatccgttttcagcagactaacgaagatctttcaatcattgattactcgctattgctgaactatatagatgctgtagatcggaatgatgcggtaggtgtttggatgcgtaatcaattcaattttctgacttctaactaa

SEQ ID NO: 192377 - DNA, 1203 bp, Klebsiella oxytoca
atgcccggtcctcaatgtgtaggtgttagaatgactgttaaagctattgatttgtttgcaggtgctggtggtttcactctttcggctgttgaagctggtgtagacgtgattgctgcagtcgagtttgataagtcagcagcagaaacctatcgtaaaaacttcattgaagggaaaaaaagaaaaattgaacttaggtccggtccccaaaaaggggatatcaataatattacaccactggaactaagacaaagcttagaactcgaacgtggagaactagacatcatactaggtggtccaccatgccaaggtttttctacacatcgaattaagaatgcgggtgttgatgaccctcggaatgctttattgctgaaatatttcgaatttgtgcatgaatttcaaccaaaagtttttttagttgaaaatgtgactggtttattgtggaaacgccacgaaaaatatttgcagcaatttatcactttagctcagaataatcattatatattaaaattcagtaatataattaacgctgtagattatggtgttcctcaaaatcgtaaaagagtatttatcttcggcatccatgaagatcttgataacagcacaataaaattcccgccaaaaccgacacattattcacctacctcaggtatggaacctcattggataccagcatcttcagtatttgaagatattcctaacaatataaaaaaacgatatgtcgaagaatattttgttggtaaatgcaatctctctgaggaagaaggatataatattttaaataatctccctattggagcacctgtggcagaaaatgaaatattcatgcatcccacaccgaaattgatagaaagatttatggatactcctctaaatggaagtagagttgatgccggagaaaagcatcttttgaaatgccactctaatggatatgaaggacataaagacgtttatggaagaataatgatacataaaccaagcaatactattactactggttgtaataatccatcaaaaggaagatttgttcacccttggaaaaaccatggtataactctacgtcatgccgctcgtctgcaaacttttcctgactggtttgaatttactggaagttcaacacaccaagcaaaacagattggtaatgcagtcccgcctaagctagggaaaattcttattagttcaatatgtcaaatactaaaggaataa

SEQ ID NO: 192378 - DNA, 783 bp, Klebsiella oxytoca
atgaaccttgccgaagaagagttgttagaagttgcatggtacttgtcaaagtatggatacaagaagccacctgtagcgctgggagttgaaaaatggaaagacgcggttgcgctattttatcctcggtttggggcgggaaaatcgttcacggagttttataatagtcttaaaaatcatcgtgatcactatgatgcctggatgagcaatgtacgtattggctggcgcaacgaaggtggaacaccacgaggtctcccctcagcatcacaaagagtgttgcagaggatgagcttgttgtctgatgctcaggttgaacaaaatattctaactaagcttacagatataactgatatccaagaaaagtacgatattgaattaatagttaaagatcaatcaattgatgaaaccacaaaagaacgcctgattgcagctagacttggccaaggggtttttagacagaaatgcttaaaacttttccctgcttgtgctgtgacaggatatacattccctccattgcttcgggcaagccatatcaagccttggtctgcatgtgaaagtgccaaggaacgtcttgatccttacaatggcattgtactagctgcacatatcgatgctcttttcgataaaggttggatttcgttcagtaacgatggttacattttactcagtaaagagcttgatgaaactaccgtaaagcaactttctttagctggtcgtaaaatcaaaaaattcccttcattttcacatggttaccttgagtggcatagagaacacctattaagataa

SEQ ID NO: 192379 - DNA, 498 bp, Klebsiella oxytoca
atggacagcaacactcaaggattcacttcatactggcgtaataccttggctgatgctgagtctgggaaaggggcatttgagagaaaagatgaagcttcattcgcaaaacttattaattacataacgggaaggttaaatgagaggattgttcaatcgttctttgaaggtggagacgaagaagtcaagacagttgaggtgctattacggccactagtatggatccgtcagttaaaacatggcaaagagcggactgctggtgctcttggtattgttacacctttggttaccgcagctctccttaaccgcgaaggctttttattccctacatcgcctgccaccattccccgtgacctgctcgaacctctccctaaaggaaccttttctattggtgagatggcggaatatgacaagtacaaaaccacgcatgattcaattacttttggtcccagtaatgaggatgagctgcgtgtggagactgatgatcaacgagtggaatga

SEQ ID NO: 192380 - DNA, 213 bp, Klebsiella oxytoca
atgcatgtcaataacatgagcggttttcttttggatgaagtaaatctacgcgctttgaaaataataaaagcaggcaataaatggcctgcttttatgctgggtaatatatttgtttttattaattcttctgagattgtatcaatttttatttcattgtcttcgggtatagttaataaaattaacgactttatttttattaataatttttcatga

SEQ ID NO: 192381 - DNA, 819 bp, Klebsiella oxytoca
atgaccggggatctgaaccttggcggtaagagcatcaaaaatatccaagacataacggcatcgggaacaaccagcaccggtagtttgaaaacaacaggaaacgctgctatcggatcagatcttgctgttggtggaacctcaacgcttaacgggcaggtgaacatcaacaataacctgaaagtaaaatctgatacctatctcaacacactttctacaaccgggctggctaagttcggaggacgtatagcaaccaacggactcaatccaaacgatctaccgtcaggatgggctggaggtgttcgcacttatgatttgtatgcgtctggaacggtcggggccggaaccgggaaaacggttaatgcttatatgaacagcgcaggtaatatttttgcgtcaggcaatcttacagccggaacgataaaatccaatggaacaattgaatcagccgggaggataaaggtcggtgagtatcttcatttgaacggtcaggcaacgctgaatgcgaaatgtacgcctaatggtttagtgggccgagacagctcaggtaaggttttatcctgtatcagtggtaagtggcaaacagcaagtggtaatggtttaaaaggtatttttattacgattacagaccaagtatcaggatataaatgtgtgataccaaatagcgatacgggtggatgttcttgttcaggatcaccatatagctcgaagtacggttatttatctggaacattaatcgctcaatatgatgaacaacgttgtagtggtggtaagagtgatcaccgttatagtaattacagaaggttatatgcatgtcaataa

SEQ ID NO: 192382 - DNA, 1788 bp, Klebsiella oxytoca
atggggcgtaatgaacgttggcacaacaggccagtaaacgtacctattgataactatggtacgctcgacttttctgataacgcctcagatgctgaattgtggttctgtcaagcatgtaaactactatgggatatcacaggcgagcgtatctattacttagcatggcagaattcactaattacttgtattggttattctgatattgataagtacgatatgttctttcgtaaaagtactattgctattacgccgtttacagatggtatctcatatgattatttctatccgagtgatcaagtagcatcatattcacgtgattcagatggctatattgtcattaatcaaagtgcctcagcacaaacaacacttgaacaacaatctatatggttcaagtttaataatagttcatcatttcatgttgaatatagtggtgttgattcaacaggtaagccgttgagccttgctgtagcaatgacagttaataaaacaaaaacagaagatggtgctattagataccgttgtggtttacccgtcactaatactgataatagtattatttcaatggatattccaatgaaccattttaccagaattgctaaacctgatggtggacagtacttaaccgcagatatgcgtatgttatctgactatggggataatacagtaacttcacttcaatatgtttccggtatcgctggaacgtactatgacaacgtgatttctactactatggattctgacggtagttctacagttggtttctggatctttgatgatgaaacacaggacttaaacagcttcacatacagaacatatgctgatgattttaatatccgtattgttgatgatcttggttggcgttggtgggctatgctaccagcaagtaacggggcatgggtaacacaaacgtttaatgtactggatttcaaattgagttcatatcaaccggatcatggggaaggtgatgaacagcccggacaaccaacactaacaggacgtgaagagtttacattattacttgataccgatccggttgatggtgtctcagggcgtattgattggtattgtgttaacgatttgccagtactttataatgatggtggtacaggggattattcagtactggtttctcttactttcaacgatagtaccagtagtggatatacagcacgtttaggtgattgtgtaatccgtaattacatgcttgatagtctttcgtatactccagggctaataccattcagtaacatcacagatccatatgctcaactgtattccggttggcgtggtctaccatatccaggttatcaactacccgctatatggtgtttcaaaggtactacaattgatcaaacaagactaaataatagtattaagttcttatgtgatgctcaagattggtttactaataaattccatcctactttacctggtccgtgtgctcaggcttatgtatggaaccgtcaggacgcattagcgtattcaccagatggaaagccggatcaatttattatgcagcactggtacgaagaagcatggtcaggttatgaacctcgtgcgttctttggtggttgtgatgtagtacacgaaatatacctacgcggtgattatgctattccacagaacattattacgtactgtcaaaactggatgaaatacttgaagtggttcatgaaaaataatgatggtcacgcaccaaccgcaattggagcaccagtaacagaaactacgaaatcacgtgttaccacaccatcaaaatcaccgttaactacatctgaacttacataa

SEQ ID NO: 192383 - DNA, 492 bp, Klebsiella oxytoca
atgccgcaaatatataaaggaatattaaacatggcttttaattctatttttgtaggcaataatgtcaaagtggaaatcgcaactgctcctactggtggtggtcaggcaactacctttactgttgttgaagaagttggtgcttttccatcagcggcaggtgctgaatctaacgtagttagtgtaaacactttcggtcaacaatacgctaagaaattgcttggttctcgttcagtaccggatctaactctaactgttaactggaaaccaggtgcgacaggtcaagaaatgcttgcggcagcagcagcagcacaaaccctaattcaagttaaagtaacttatttccagaacattgatgatcaagatggtgcggcttattacagcatcgtaaacggttatgtaagttcagatgtagttaacggtgattttgatggtgtggtaacacgtgatttcgtagtttctgttactggtgctccaattgcggttggtgcgtga

SEQ ID NO: 192384 - DNA, 645 bp, Klebsiella oxytoca
atgtcaattccaagtaatgtactaactaatgcggatcttatcgcgtactggaatcttacacgaggcgataacaaaaccgttctaacagaaaaagaactctatcaatgtggggttatggttaagttgatcgatattcttccagcaactggaagtaacatatatctaacagatgctatagccgatcagaactataatggaattaattataagtccgtacctgattttcttgattcatcatttgctaactatgttgaaaagaaccaaatcaataataacggtacttcattaaaagtaagtaacgtaagccaggattatctatctatggcgttacgtggtttatggaatgatgccaaagttaatatctggatgggtatagttaacccagctacagggggtattctatatgcctatcgtatgtttagtggttacattgattactttagttcagacttcaacaacacagcaggtaataccactaatgaaacaacagtaaatctaaattcattgtggaagaagttagaccaaacacaacgcctgttatccagtacatcagtacaccaatcattacacactggtgataagttctttgacctaattggcatactaaatagttcagaacaattctggaagagtagcaagaaataa

SEQ ID NO: 192385 - DNA, 417 bp, Klebsiella oxytoca
gtggctgaacgggatactgacgttgagcgccagcatctggtcgcggccctgctgccaggcgtttctggtcaggctgtagctcagggtccagttgatatcgtcgacggcggcgttaagcccggcctggagctgctggtcggccttaccggtgccccagtaggtctggtggctaccgctcagatagagcgtggcggtacgccccagctgctgggtgacgctgagctgtaccctgccgcgcttgttgtacgcgaggttgtagtaatcggtgaacttcggtttcacttcaatcacgccgtcctgggtctcgacgttgtagccgctcatccggttataggtggtgtcggcgaagctgaaatagccgcgcgtcgagtagcggtagcccaccagctgaatgttggtgccggtatccgtcagtga

SEQ ID NO: 192386 - DNA, 651 bp, Klebsiella oxytoca
atgattctcgaagatcagagcggtattggtatccgcgttggcttgcgggatatccgagtcgctatccgaatccgaatcgctgtcagagtcggaatcactgtcagagtcagaatcgctgtcggagtccgaatcgctgtcagagtccgagtcgctgtcggagtccgaatcgctgtcggagtcggagtcgctgtcagagtccgagtcgctgtcagagtccgagtcgctgtcagagtccgaatccgagtcactgtcggagtccgagtcgctgtcagaatcggaatcgctgtcggagtcagaatcgctgtcggagtcagaatcgctgtcgctatccgagtcactgtcggagtcggaatcgctgtcagagtccgaatcactgtccgaatcggaatcgctgtcagagtccgaatcgctgtcagagtccgaatcgctgtcggagtccgagtcgctgtcggagtccgaatcgctgtcagagtccgagtcgctgtcggagtccgagtcgctgtcagagtccgaatcactgtccgaatccgaatcgctgtcggagtcggaatcgctgtcggaatcggagtcgctgtcagaatcggaatcgctgtcagagtccgagtcgctgtcggagtccgaatcgctgtcagagtccgagtcgctgtctga

SEQ ID NO: 192387 - DNA, 1740 bp, Klebsiella oxytoca
  misc_feature (1565)..(1574): n is a, c, g, or t
atgactaagattctaaacagtaagccagtggcagcagccgcagccgctacgagtaagcagggtatacaggccgttcaggaataccagcaacagtaccaacaacagattcagaagaattcttctatctatggtgctcagatggtggaagaacaacagaagcaacaagaggctaataataagacctttgaaaaccttttagcaaatcttgatgccgcacataatcttttagccaaacaacaagagcagtataacaagggttcagataaaagcgttattgattcagcgttaaaaccttatctatcagccaagcaaaagacacaagcacagattgatactcttgatgcgactcacaaacaattacgagcaacgattaaagattccttagcacgtgcttataaaggtgatgaagcggcaatgaatgccgatttagctaaacttgacaaaggttataaagctaaccgtgagaagttagtaaaaagcctaacagccgatgaagataaagcacgtgaagataaagctaagaaagatgaagcagcatccaaagcagctaaggccgcacaagataagattaatgaacaaactaaaagagcaaaagcactattagagcaaaccttatcacagatcggtactaacgaagctcagatacgtattacacgtttcaactatgaacaagatgaaattgaaaaacgtatcagaacagcaggtaaattagctggtaaaagtgaaactgaaattacaacaatgttagatcagcaatataaaagccgttctaccaagtataaatctatggttgatgaaatgcttgctgaaactgaccgtttgaaacaagcacaaaacattgccgcaattgccagtgatcctaataccacaccagacgcaaaagccaaagcagcagcagcgggtaaaacatggacaggagacacagcaagtcagggattaggatataagaacccgttagacttctcaccagatccaacacaggtacagcaagtaaacactgaacagcaagagaaccaggatggggctaaagctctatacgatgccaaagtaattgggttccaggagtaccaggatcagctaacagcgattcaggccaacgccgatatgaaacgtggtcgattaaccgcagacgcactatctaatactttgggtatgtgggctactggtgcgggtgatgtgggaactatcatggctggggtgttcggtgagtcatcagcagcggctaaggcagcttttgccgtaagtaaaggtattgccattgctcaggcagtgatcaacatccagcagggcatatccgaggctatcaaacttgggtggcctatgggaatcgcagcaggtctacaggtagccgcacagggtgctcaactggttagtactatcaaaggtacaactattcagggtcaagcccatgatggttgggattctctaccaagtaccggtacttacaatcttgaaaagggtgaacgtgtagttggtaaatcgttgaaccaggatctaactaagtatctcaataatcaagatagtggcggtactggtgatattaaaattgacgcaccgttaattannnnnnnnnnatcaatagtaatggtcaaatttccgattcagatttccaaaagatgtgtgataaacacgccgatactattgtacaggcaacacgtaaatctcagaagaataacgtataaataccatacagcccacatggattgcgggctaactattaaaggaataataatatgttaa

SEQ ID NO: 192388 - DNA, 555 bp, Klebsiella oxytoca
atgaatcagcttgcgaagcagtacgggtatagcgagagcacagtacgagaatggaaagcacagggtatgccaattggtgaaggtactgaagaagctgatacacgagcatggatagtacagcacgtaataaacccactacgtaataccgatacacgcgaacaaatagatcaagaacgtctacgtaaactaaaagcagaagcggcattatctgaacttgaattacagatgaaacatggaactgtagttagtactgaatatcttgaacaagtactaactgaatacctatttcaagttaaaacagcaatgagagcaatcccttctaaaacatacttagagttattcgcacagacagacgcaaaagatttacgagatatattaaaacaacatattgatagtactttattccagctaggaagcatggaatttgaactacccacggatgaagaaatattagaagatggaaacgaacaagaagaaattaacgcaagtactaatgaaagtactgccgacgatacagccaccgaagatacagaaaacaagccaatggatcagtaa

SEQ ID NO: 192389 - DNA, 678 bp, Klebsiella oxytoca
ttgaataagggaattaattacctgatctctcaaaatgttgattttgtgtttacatttgatcaggattctcacattccttcagattttttcgaaaagatgcaatcctttatatatgatcataaagccgatgctgtctgccctatttttttcgaccgcaattcagaaacctattctgtgttcgtaacttttaataaatggaattatgatattgttgagtcgggagttataacatctacagcaattacatctggtatggggatttctgcaaaagtctggaacgagatggaaggaatgcgagaagattatattatcgatcatgtcgatacctattattgtcttgaattatgtaggaaaggcgttgacatttttataaatagagatatttgtttaaatcatgcgattggcgagagaacgaaacataaattattaggtgtgacgtttaagccgaatcaccattcagcactacgtaaatattacattattcgaaatggtctacactcatctttagattttttaaaagattatccatcttatttttacctaaatttcctaaggactgtgcatgagtttgtttgtgttattttttatgaaaaagacaaacgtaagaaattaaaactaatgttattaggactttatcatggttttgttgggaaattagggccatatcttggaaaataa

SEQ ID NO: 192390 - DNA, 1053 bp, Klebsiella oxytoca
atgttgggtatcactaaccttgatggttctaacggcactcaacttgtaatgagcaaaactggtacgccagtactgaacattcgtaacttctcaacagcaagtaacggggcatggtacaaggtctacaccagtgccgataaaccaacgttaacagaacttggtgcggcagccgctaccgatctcagtaactacgtaccaatcacacgtactgtcaatggtaaagcacttacagctaacattactttggtagcagcagatattagtgatgtttactctaagacctacattgattcaaacgtagttccgaaagtattccagttaaacggacacgcactatcaggaacggcgttgaacttagtagccgctgatattcttgatgtgtattcacagacacaggttaataatacctttgtagctaaaacagttactgttaacggattgccattaagtagcaatatcacactaacggcatcacaactaactgatatggcatcattggcatttagtaatagtacatatgtgcctaagacgttcttaatcaataacaagccattatctggtactaacattcaattggtagcagcagatattagtgatgtatattcccgtactgaaagtaacggattgtttgcgttacgtatcactacgattaacggttatactctaaacagtaacgtaacgttgaactataacgatgttggaacatattctaaagcacagattgatgctaaagatgccgcactacaagcaaaaattgataccaaagttactatcactcaagaccttcttacaataaataacgtagaagatactttagaacttgatatgtctgatggtaagcgtgttttcaaagcaacactaaccgcagcagtaacacagctaagtgtaatcaacgccagtggaagcaacttaaatagccaaactattactatgtgtttaacacagggaacaggggcaaataaaatttcatggccttctaatgttatttggtcttatggtcgtgaaccattaggtggatcggggaacgctacaccacggaagaatgccatgtga

SEQ ID NO: 192391 - DNA, 1392 bp, Klebsiella oxytoca
  misc_feature (227)..(264): n is a, c, g, or t
  misc_feature (1055)..(1064): n is a, c, g, or t
gtggttctattggatgaggtgagtaatgtttctattactgaagaaggttcaccaataaaactagctgaagcacgtactagtactttcggtgatgatgctcttgtagttatttccagtactccactatataaagatgatctaattaacagtgaatataacctatctgataaacgccgttggtttgttactcacacttgcggtcatgaatatacttttgaatgggaacnnnnnnnnnnnnnnnnnnnnnnnnnnnnnnnnnnnnnncttgagaatggtagagcaataccagacagtacaactacccgtttaatttgtcctcattgtcaggaagagatagacgagcatacacgccaccaaatgatcgataacggtcgatggatagctactagtactgatggtgatccgggtgtagttggctatcaaatatcacgtatgtattccccattgaatactattactgaaatggttagtaagttttccgatgctctttataatttcaatcttcaaacattttataataatgaattgggattaccctatgaagatgagtacgcaaaagaactagatatacttcgattggaatcattacgtgaagatgaatttaatctacataaaatacctgaaagtactttaggcataacaatagcagtagaccaacaattagatcgcctggaagctactatattaggctttgatgaaaagaaaatttatgtacttggtcatgaattcttctatggtcatgactgtacaaagattgaatctcaagcatggaaggacttagatcagttttgccgtcaagatttccgaagtgttgacggtcgcatagtacctacacttgccgtattcgttgatagttcgaacggtaacgctacagatacagttaagaagtttaccgcacgttgggctaagtaccatccaatcaagggcagtagcagtactacaagtgacttattcaaacagagtacacaagccggatataaactacagatcctaaatgttcatgaacaaaagaatagtattcgtaaacttttaaacttgatgcttagtactgaagnnnnnnnnnnaattcaattacgcttttccagtactctaccatcagattactttgaacaactatcctctgaagaactaaaacctgctggtggtaaattagtatggcgattaaagaaagggcagaagagaaacgaggctctagattgtctggtctatggaatgatcgcaatcgtatattcccaatcacaattaggtacgcaaccgtttagaaaactacgcgaacataaagccaaatcattaccacaaaagataaataaaccagaagaatcacaacctacccaaagtaccagacgttctaggcgtactggtgtgggttcaaactggtttggaaaaacgtaa

SEQ ID NO: 192392 - DNA, 204 bp, Klebsiella oxytoca
atgttgaacagcaatctcaaactctctaaatactcccctagcatttactatatcattattttcctcttgtttatttccaaaaataaacaatgcaataccaccaagaggaatcattctctgtctatactcctcccaaagttcttgaatatctttccccttactgacagtttgaggaaatggtctaactataagctgttcttctga

SEQ ID NO: 192393 - DNA, 258 bp, Klebsiella oxytoca
atgctgaccatgataagcgtattgctgaaaattatgtgtttgatgaagtgttggggatccgtgtttcacgtactgagtttgaaaaacgcgccaaatttaacagtggtcaaaaaccaacacaatctggattctctggcaacggatcagatggtagcgaaaccgttcgtttcccaagtcgtccgaagcaagaacaacaggtggatgttgatagaaacatggatctcaccccatccataccacaagaacaaaggcgattga

SEQ ID NO: 192394 - DNA, 228 bp, Klebsiella oxytoca
atgatgattattcatttatttgtgccaatttttatgaaatcttttctgatggaagaaagaaaaaacattaccctcgaaaaaaatcctttgatgcgtcagttaatgatattctttatgacaatatctgttcaaaccaagtttttactagaacagattatcttagaagcattggtgggtttgatgttagggctaagcgatttcaggattgggatacatggctacggttag

SEQ ID NO: 192395 - DNA, 1077 bp, Klebsiella oxytoca
atggctaatgtagaaaacaaactggtacaagagatgatcgaagccttggagagtttgctagaaggcaaagttaccttgctccgtgagggctccttcgctcgtgatgacggtattgattacgtattttcggtcgatactgagcacggaaagtggattgtgcctgtagaaacaagaaagcaagcctatcctagggacattatgcatgcgctgtgggggtttaagattttttataaagagtataagcatgcaacaaatgttgtccctatgtttgttgcagatttgattagtgagggtgcaagagagttcctgagagaaaacaaaatcgggtattacgagcttggagggacacttttcattaaacacaaacatatcttaattgatgtccaaaggcctcgaaagaaaaatgcgagctctggtgtaattgatctatttagtgatgcccgtgaaatggtcgttcatgcattactacaatcacatgggcaatggttttctggggaggagcttagtgctctgtccggcacttcttcctacacagtttctggggttctaaaggagctcgaacgaagagagtggatagaaaagacgagtgaaggtggtcgggctcaacgccgcagactaattcaacctggcaacctacttgattcttgggtagatgctatcaagcttcgtaagaaaaagaaattttacggctacttttttgcatccgacccagtggactgcgtcaaaaaaatcgagcaaagagttagaaaaagcaacgaaaaattggactgggctctaacaggcgcactggcagcgaatcatgcttcgccattgctcacaggtgtgaatgtggcagaaatcatcgtgccggttgataaggttgatatgttcgcagaatcgactggtatcaaatacgctgaaaaaggttataacgttatagttaatgaatgggcgccagccgggatgcaatttataaaagatgataatgaaggcttcccagtcgccagtgacttcattcaatatctgtcccttctagatggaaagggccgaaatgcggaacttgctgagcaatttcgtcgggaaattttggagatttaa

SEQ ID NO: 192396 - DNA, 918 bp, Klebsiella oxytoca
atggctgtcgacagcaaaccaaaagatagaactgggtactcagctattaacacggaaatgtgtgagcgcgttttagtcacgttgctaaccacctttgggacaatgaaggggactttacgtttggttggtggccttgtgccccgataccttactccggagcaacctcctgacgtgcctgctcattacggcacgtctgatgttgatgtggtattgaatctacaggttatagcagagggtgagaactatgcctctttgcataaccagcttgtagagagaggatttagaaaacattctgacaaaaactcctggcgttgggagttcccaattcccggtggcgacgcgatttttgtcgagtttttacaaggaagcaccgacgcagctagcggaggcagtcacgttaaaatagatgatgaaggtgtagacgctctcgttattccgtacgctgaaatggcacatgattggtattgcgaaaaggaaatttcagcagagttatttggtgaacacggagttggatcagcaggcataactttcgaaactattcgctttgccgatgaagtagcgttcatcattttgaaagcaatttcattctcaaatcgtaacgaaccaaaggatgctgccgatttaattcatgtcatgcgttatgcaggtggacctcaggtaattgcagaaaagtttcttcaacacatgaaaagcggtttgcatcaggaggccattaatgccgggttgcatcatctacagagaaattttgccgagggtaacgaaggggttgagggctatagactaactggttgtatacgttatgcgcaatttatgcatggatctgacgcgtcccttgaacacgagagactgcaggatcagcgatatgccgctgggttggtaacggaagtattgcgtctcatcaaagagggtagtgaatag

SEQ ID NO: 192397 - DNA, 1191 bp, Klebsiella oxytoca
atgacattagaagatgaaattcgtatttacctcaatatgtgtcacgggaatgcatggcggatctctgcccctaccccccccgatgaaccagctctagtgagtgcatttctgagcaacgagacatatctaggactcagagacatacttcgaaaatacgtatcaccgtcaactaaggttctcgtacggggaatatttactcatcagacacctaaggttttaataaaaggtaaaacaaagtctgttgaaatcggcgacttgttgattgttcatcagcacttctcatctccattaaagccagccagtggtcgcgctattctttttcaggcgaagaaaacgagaacttcacgtaccgggtctttagcaaatggtaccgaagaaatacagtttgaactttatcaatcatggccagagtttacaggggaaacgcgcttggatcggcagccagataaagttactccatcctggaattttcaaaatccgagtgttaacgcacaatcagcaacagaaggggcggaatatttgacgatttttaagggacatgcctactgcaccccatttaccaatccttgtcagtggacagcaaccatcagtaatggccctgacttcagattcgtgaaaaagaactatcccaacgcatcaacttggtcctcggggatttgcccgccagtaccgagtcccgctaaaaaagggatcgattgcaaaacagatttcagtaacacgttttgtgattttcttcttgggaaaaaaggaagatcttttcagcccggggtggtttcaccgacatctgaccactggtctctttttatcaatcaaatgctgtcctttgccttttccgacaagagcgattatgtctataagctcgcgagtcaaggagtcgtcgattcgcgcctccgcggtcaaaatctgaattatctctcgggggtacccatgctctttcatgcctcatgggaagagatgtatgaatttgttgcggcagctgctgggcatacagagttgacgaacttcgtattaacaaacgagatcctgaaacacatagaattaggatcatatatacgagggagagacgcggctgatgttccccctgtaaacagattacaagactcaccaagcaatttaccaaacggtcatgttccactgttactggtcatgactcacgggccggatgaaacaccttttaattcccagaaatga

SEQ ID NO: 192398 - DNA, 1008 bp, Klebsiella oxytoca
atgtcgtttaccattctcccttggtctgagctagcaccacgatacgatgggactattttgctgggcaacggcgcaagcatcgccgtcagtcctcgttttgcatatggatctctgcttgaatgcgtcacacaaagagagagtctggaggcggatgtacgcaaactttttgatttttttaatactaaagatttcgaacttattctgcgtattgtttggcaggcgtctaacgtcaataaatctttagacattgaggatgcccgtacccatgaggcgtacgtccggatacgtgaatgccttattcaggctgtgcgagatgtgcatcctgagcatgatgaagttgatgaacaactgccatatatttacgagtttctgaaaagattcaataaggttatttcgcttaactatgatctgatcgtttactggacaatgacatatggtttagatatcaacgatcatcatcgatttaaggactgctttcttgccagaggtcgttttgagcaggattggcaacggttaagaggaatgcttggaaatgaacaatctaacacgcttgttttttacccacatggcagcctcatattgtgtcgaaatcgtatcgaacaggagagtaaaattcatattcagaatgcgggcttacttgaatcgattctgaaacgttggcaaagcgaggaggtcgttccgctgtttgtgagcgaaggaacgcatgaacaaaaagtaaactctattcagagcagtttctatctttcaacggtttaccgggaagttctcgtcgaacagtgtgaaaatcttgtgattctaggctggggcataggcgaacatgatgtacatctgctaaaacgaatggctggagcgggcataaagcgagtcgcggtatccgttttcagaaaagaccaggcgtattgcaatagagccaatcaattaatcaaagataaccttgggcaaaatattctgatagagttttttgacagtgaaagtccgagctgctggaataagccacccgaaatttga

SEQ ID NO: 192399 - DNA, 1218 bp, Klebsiella oxytoca
atgagcactaaagccgtcacgagccacaatcatttaacggaacctaatgaggcgggattcactttctatgagtttttcgcgggggggggtatggccagggcagggttgggaaaacagtggcaatgcctgttcgccaacgatatggacccgataaaagcatcgacctacatcgacaactggggcgacgaacatttcgacatacgcgatgtacgcgaaattgcacccgatgaactgccgctccacgctgatttaagctgggcctcatttccctgtcaagatttatcactggccggcaacggcttgggaattggcgaaagagattccagcgcggatgaaaccacccgttcaggcgcggtatggccgttcctcgatttaataagcaggctcggcgaggaaaaccgtaagccgccgattcttgttcttgaaaatgttcttgggttgctgacgctggatcaagggagccatttcgccgcgatatgccatcaattaagtaaaacgggctaccgatatggtgcaataatcattgatgcaaagtactttcttccacagtccaggccccgcgtatttcttgtggcgattagtcgtcatatttccattcccgaatatttggtttcagaagaacctttgtcgcaatggcattcaccttcactccttcgcgcctgcgatgctctatcgaagcaagatcgcaatgactggatctggtggtcgcctggcaatatgccagacgctagaacgaaggagctggacgacttaatcgattttgaagacgaaaatgcgctatggcattctgttgatgaaacacaacggcttatcagtatgatggcaccggcaaacatggcgcgcctggcgaacgctcaggcatccggcgcaacaataataggcagcctttatttacgcatgcgcaaagaaaaaggtgtaaacaggcaacggaccgaaattacgttctcgaccgttcttggttgccttagaacgccaaaaggtggagcttctcgtcctcgtattattgttgtcaagaataatcaggtgaaaacgcgtttgttgtcggttaaggaagcggcagcattaatgggtttgccagatgattttatcctcccggcggcgtatcagtcggcgtttaaagtgatcggcgacggcctcgccgttccttctgtccgtttcctggccgaacgtattctggagccactggtgatggccgtcagaattaataatacccactga

SEQ ID NO: 192400 - DNA, 2559 bp, Klebsiella oxytoca
atgaactggacgtcaccggttacgctcgatggctgggaaagtaaactgattgattattttcttcggtttggtgctgacgacgatgcgcaggatattcgctggtttgaagttacgccggagacgctcgcggcagcattcgccgacagcggcgttagcgcggatgatgttgaggaagcgtttcgaacctgcatgtcgaaaatacgtgagctgccgcagcgccttgcaggcggcatgatggaaaagtcaactcgtcgttcgcccggatattttacttatctggtcatgacgttacttattagcagtaaattcgacgtacaggaaaaacgcaatgattttcgcctgaaactacagagctggttgcagaccacgcatagttttcagaacttatccggcgtcaacaagatgtgggaggcattaaccgaatggcttgaccaacgtattcaggaaggcgagccctacaggcgtcttgtcctgccgccgcgggatggctgggtccagatcggtcacacactgcgattggcattcccgaataaagccgatctacgcctaatgagagaatgtcttgaaagctatccacaagctggcgcgaacccgcgccagctaattgaatactttcaaatcgttattcagagatacggtgtttctcctgcgctgaaagaggcttttgccgaattcagcgacgcttggttgttgggtcatcgcgcgctgttcgatatgcctttctggcacctgcgccaacgagcagtccagctatcttcctgtgtaacaccgcatcaggccatcattgatatgtacgtcgatttcgatggctcgcggtgctatttcagtgtcgcagacaagagcgacgaaagagtttttcatcctacattatccgaagctcttatcgcccacgacgcagagagtagcgaaaatctggggaaggcgacgcaggttggcttactctttttttacgagataggacacggacgctggagagctaaatcgtcacccgacgtagactcccaacagtttcatatcgctttatccagtaaacattctgtacagatgagcaagcgcctgaatgaatatatttcagaggacgagtggattttaacgtcgcagccgctgagcagggtttcagcggctgatttattccgattaatacgatcctcttcggctaatcaggatgatgtcgttacacgccctcagctatacggaggaatacgcgtccctggcggatggctgggattaccggcatttttgccttatgttgagtcagatacgcggcgctacaaaatatattcaaccgtgaatgatgaagcaggaaccaatatttctgtaatagatggtcggctgaattcttctgagccgcttaacggtgaatttttcatcgagccagtccttaaggcgggtgaacaaacgccgctctggcggcgtcgcgcgcgttttttcacccgctccataccgcaccctactttaggtgaaagcgcaagataccggtttgaactgctttgcgattggttgacgtcttcactaaaggcaccggcgtttaatttcgaaggattgtttgagtgggaagatagcgaagcgtgttgcgatcacctcctcgaagcgatttacgcgagtggagccagcggctgggaagaagctgaattaatcgagcttctcaagtctgtgaccggtgatctcaacgtatggcatttgattcgttgtttacatcatgcgggtctgatcgagccgcgcttgcggccaggctggaaaggtcgggtatggacattagttaaaccttcattgttttatattcgcaatggagaaaatagtctgattgttgtggaaggcgcagtctgcgccagtctgatggatgattttcaaaaagcggtcgctgggctgggtggaaatagttttcgtcgttgcggtgtaagcctctggtcgccgcctgtatttggagcagcactagctaatcctcttgcgttatcccaacgtatgggatggccgcttatcgaagcaccgtcgtcatccgatacaacaccactttcactggtctcaacggagcgcacagctgaactacacgagccagcggctgtctggaactggcgttcaggaagatttcagcagcatggttctgaggataaagagtctgcttcgctgtcatatcataatcaccctggcgggcgagatcatgatatttatcgggttgtttccggaaaaaaaacaatacattatctttctagaactgcagctattatcgctgctggcgcaaaaaaccggcaacccgtgtttaaacgcatcaccaaaaatcatctgctatgtcttatcactgattgcggtctgcctgacgcgcttgccgcgggaatacggcgtcacacactcagaaacggaggcccaacggattctggttatgtttatcctgtcgatgacgcctctttcctctggctgaaatcgctgcttccgggatgtttttcttccctcgcgccggacggcgagaaggaagcaagcaatttggtttcctccgctcgccattccggcgggaaaatacgtctgacatggcgagacgggcgactcatgctgggtccgagataa

SEQ ID NO: 192401 - DNA, 2091 bp, Klebsiella oxytoca
atgagtgaaattccatggtatcttggtcaatatgaccgcagaaattaccagtcgtacttcaaagttgtcgcgcaggaaacccaagatggctggagtgtgatcgacaatcctaagaagaaatttcctcgtacaggggaagtcgagtttaacggaactgaccttttacaatttcgcccgcaagaatgggctgcctttcaggtgggtccaggtcctcgaaacaagactcaggcgaaacacacccgtcgtatttatccttattatgatttatcttccgggcaatcactgctggaggcgcgtcgtagattaagtttcgatggcataacggcagacggcgaaccgggattatgggctatccgcttcgggtccgatgcgcttattctggctaatctggcggaatcgaaatcaggcagccttatcctgtccagaaatcagaacgtttacgaatatgatttcaatgaaaacggcgtaattatcgtatccggtatatctgaaagcgaaaatttgttttatatgcccgatgccgatgcatcaccaacccaggtccatgactggacgccggataagcaatacatcgaaaacgttattcgactactttcctgcgctgattcaacagccgcggtagcttcgtggcttcgggtgcatacaaacgagcaaaatggggaattaacatccggcaccgaagcgcttctggctgccgctcaaacgctccgggctggagagctggcgaagaaactggaagaagaggattcactggctcgtcaatttactgaagcggtgttgaaggaccagcatatcacccgccttctcgaccatcagataaaaaacattgcgaaagaagagcgagtcgcattgcgcgccgaacagcataaggcgctcgagaaagagttttctattgaacgacggcgacgtcgtgaagttattgaaacggaaatggccgtttttgagaagacaagtaaaagcgagatcgaagagaagctcgcacaattacggcagctcgaagaagaaaaattacacattgattttgcagaaaagcaagcggatatagaacaaacgctcaaacaggaaaaagcgtatctcgaaagcgaaattagccgtctgaaagacgccaacgctgatttatgcgctcagaacgaaaaccagcgtcagatactggcttctttgacctgtgaacatgaagactgtttggcatctttaacagatatcgaagaacataccgctcaggcgcaaattgaactcgaaaaaatagatatcgccattgctgagaaggctcgtcgtatggcttactcagccatccccgaagtacgcctcccggtgcaagcgagagtcgtaacttgcgaagagttcggttataccgtcagagagaacaagctactgacgtctgacggaaagatactcatgacgcaatttctggcgttgatgttggccggcgagtgtccattgctatatggcccggagacacaagacttccttgctattgccgaatcgctgatttcttcaggccgctccatccgacagatcgccgatccaacgatgatttcttgtgaagatctttgggttcgtgcgggaaataatatggcaacgccgctttatcagggtttattgttgagcgaagcctcttgtcctcgaacgattctcgccgtcattgaacgtgtcgaatgttccgctgcgcgtttctggctgccaacgctgaaagaccgattacacggcggcgatttgcccagacgctttctgatttgcggcaccattgagaacgaagattgtgaagaagcggagaaaatgaaggaacaacatcttcgcctacggatggaaaacgtcgtcattcagaatgcgattgcgctgtcccctttgcacctttccccggaaaatcatagtgaactggatcctggcatagcatcgcaaggttcactcccggataaactcgctatcacggataaaatgtcagccggacgtttggatctggtaaataccctacgggcgatgcgaacggcacatgaagtcgcgccgtttgatgatgaaaacaaagcgatacatcagaagcagttagtcgatttatacgctgatttgcagaataacgagctgtacgcccaataa

SEQ ID NO: 192402 - DNA, 5844 bp, Klebsiella oxytoca
atgttagatccaattggcggttttcgccgcattcaggacttcttcatttcatatatagaaaccagctttcgaattgccgatccttcagtcgcggactcaagacgcaatctcttgaatagcagcggggaatttgccgcagagccctacattgaacctgttttacggtatgagtcttcggataaaacgcttgaagctttggccgagatggacagcgggccgctgaatagcttgtcttccaaaggccgtaaagcgttcgtcgaactagcgttatccggcctgttcgattctaaacctggcgacgaagtctggccgcgtcgttcggtccatgcgccctatagccaccagactcaaatgctagagcgcggtattcgccccggctgccccggcattgtgacatcgggaacaggttcgggaaaaacggaaagttttatgttgccgatactggctgcattatcgaatgaggctgtcaactgggccaagccttgcgatggctatctgcaaaatcggtggtggaatggcgaaaaaacaaactggatttctcgtcgcgaaggagaaagacgccctgcagcggtcagggcgatggtgctttacccaatgaacgctctggttgaagatcaaatggcgcgtttgcgtaaaacactagattccgacgatgcgcgagaggtcatggagcagcgtttcgccggaaacaagatcttcttcgggcaatataccagcgccacaccgattaccggctactctaaccatcctcgtctttccggcatcagttcggaaaaaagccgccgggctcgtaatcttgaaaaattacgtaaggcgttgaaacgaattgatagcgatcagcaggctgcgcgcgcattcgacgaaaaagtaaacgcttcggaaaagacccgatatatatttccttctacagacggcggggaaatgatgtctcgctgggatatgcaggcagccccgcctgacgttcttgtcactaacgcctcaatgctaggggcaatgctttcgcgcgaagtcgaagacggtatttttgatgctacgcgcgaatggttgatgaataacaacgatgcgtacttctatctggtattcgacgagctgcatttaatgcgcggttccgctggaaccgaaaccgcaatgttgattaagtcgctgattatcagacttgggcttgacgatccgaaacatcgctacaaactgcgtttgctggcgtcttccgcatcgctgccgatggatggagctgatggagaacaatcacggaaataccttcgagatctctttgcgccctttggcacttgccgcgattctctggatcccggtagcgataagcctgatttctggcgtaactgcgtcattcagggaaaaccttatataccgttgaagccagaaggaaaaatcgccgtgcggccttttgccgcattaatgcgggttgcccttgagaatcagggaaatgtcattcgcaatttgaatatgacggacgcgctgagtcaggctttgtctgatgtattcctagctctgagcgtgaatgcgcaaaatgatatgcaaggcattaaacaagcggcggaaaaagcggctgcgctattgaccaacgcttgtatagaagaagacggcgagttgccacgagcaatgcctccaggacttatcatagataagatttttctgaaggaagactcggataaaccagatgaattggaattagcattacgcgggttaatgctggtgcgcgcgctgccggaatgcggagtggtttgcgagaagcccgccaacgtcacaccagcttttcgcgtgcatacattcgtcagaaatattgaaggtttctttgcctccgtatcggcgggagagcaaaaggcgaaattcgcagacttttgcctagagcgagggctgtcgcatgcgccatcaacaccagccggaaaacgtggtcgccgtttgttcgaaatgttgtattgtgaagcgtgtggcgagttactgatcggggggcagaagggacagaatcacggtaaaatcatcgaattattaccttcagcgacaaatctggaaaatcttccagaacgccctagcgctgaatattacgatgatatgacactggatgagttcgcggttttctggcctgtcgatatagctgatcgaccgccggtaggttgcgaaaaaggttgggatgtctgggaaaaagcggcgcttaatcctgttacaggcatagtgaccactggtcaggaaacatcaacgacgaatactgacgtagttcgcgggtatatctatttccagaatcaggttaagcctaaaaaaggtgagccgccgaagaaaccctctgcgcaacctttctgctgccctagctgcggtattgactattccagccggcctgccagcaatcgttccagatcgcccattcgcgcatttcgtaccggtgtaacgaaatcatcccaactggtagcaacggagctatttgaattactgcatgcgatcggcgcagaagcaaagagtattgttttctcagacagtcgacaggatgcggcatcaatggcgctggaaatcgaacggctgcacttgcgcgatctacgcagggaaatattgatcgcagcgtccagggcgatgattaacgaggccgaaagcgggtacatttcagacaaggatattgaagaaaggaaagccaaagctaaacaatctggagactacgatgagtatgccaaactagataaccttcaaaaaagccaagtcggaattaccgagctttgtaaatatcgacgggtaaaaatagacaaattgctggagtctgaaggcggctcaatcggaagaatcacatctgagctagtcggactgggaatatcaccctataaataccgttctaattcagatgagaatgatagcgctgtttggcatgctaatttcattaaagacgaggaatcggttagattcagtgaaagacttccttctcatgaactaatgaaaataaagacgaaaatatcttacgatcaatctgaactgatagatgacgttatcttcgccaatacttttttcgcgctggaagaaacaggactggcatacccatgtatctcagataaagatgacacgccggaaattgatgcttggctaagggttttttccggtgcctatcgtgttaaagagaataaatatttcgatgcaagccgtactcgtgattggtatgttgggaaagatgttgaaaaagagaaaattaagcgagtcgcgagagttttattcggtgataacaactatcaagatgggttgacgcgtatattaaagcagtttactgatttgaaacatccagcaggattaattagtatcggcaagttgtttcttaaagttgctaaacctggcgataattactggcaatgcggtaattgtgggcgaattcacttacatttaggattcaaacattgtacccgttgcgtaaacccgctcgacattaaacccagcggagttgtcgaagagctatgggaagaaaattttcttggtaaacgcattgtacgtggagagcgagacggagttaaacgtttccggctgaacgtcgaagaattgacgggacaaacggatgatttctccgatcgtctgcgtaagttcaagggtattttcgtcgataagatgagtgaacttgaaaagctagatgcggaaatagatatgcttgctgttaccacgacaatggaagttggaattgatatcggttcacttcagtctgtttatcaggcgaacatgccgcctcaacggtttaactaccagcagcgcgtcggtcgagctgggcgacgcggtcaagctttttctttcgttatcacattttgtcgcggacgtactcatgatgcttactatttcgcccatcctcatgcgatcaccggtgatccaccgccgccgccctttctggcggtagatcacgatgccattccattaagacttatgcggaaagtatggcttagagctgcatttaatcttttacgcgaagaggatcataaaaacggaacaactttccctggagataagctcgttcctcctgatattcatggcgaatatgtttctacgcatgattactatcatagcgatgaaacaaattgggctgaacgattgctgggagcattgaaagcgactcagaatatacatgatcgttttattgaagcagcaacattcgctccagagcaaaaacaacgtctttattccgcattaaatgcggaaagagtaattgatgaaatcgctgaactgaatgcttatgtccctgaagaagatatggggctcgctcgtttcctggccgaacacggtaaactgccgatgtatggaatgccgacacgggtgcgcaacctttatttgggattgcgtaaaacaaaaggtctaaatgctcaagaagaatacgaatggtcgacgatggatcgagatcttgatctcgcagttttcgaatatgctcccggttctgtattgattaaggataagaaaaagcatgaggtaataggctttacaggcaattaccaggaaccacaggtcaaaaataaccgaatatcggatctatcgacggtaggctcctggcaagagtcatgcagccatgtagcaatttgcccggcatgtggctccgccaagctggagttacataagcctggcagcgatattaattgcgaggattgccgcgctcctattagtcctgacgaattcaggctttatatcacgcccaccgcttttcgcacggatttcaaacccaaagacgatatagatagttttatccgcatgtcgttgaaaaccacggcgacagtgttgcatgaaggcgttccaacaaaatgcgattctttcactgtgcaacgcggcgaagtgaccatcctgcgcctcaacgatggtcctattaatggagaaaaggaaggtgaacgatttactgtcgacttggtaaccgatcaaaaagcaccgatgcccttttctacatattgttcgtcagttaaaggcgagcaggctatcgattcaggatggctggaatcgcacaataacccgcgctggcagtttagcggcaagaaaaaaagttttgggcttatatcgagcaaagagaccgaatcgcttcatcttgaactaacgaaattcgatactcgccttaatctgaatatggtcgccagatacggagagtacatgaatttgcctacgcgcgccgcggctatcagcgcaacccagatattgacgcataaagcagcgctctatctggatgtttcgccagatgaatttgaaatacttgaaccccgactacatcttggtaaacccatattgcaaatcgccgacgcgttaatcaacggttcaggattatgcagacggcttgccgaaccagcaactgctaacggcttacctttgatagtcaaattattacatgagattctcgaagagaaaaacgactggccgatggttgattttctaaaaaatgatcacccgactcagtgcaaaaccgcgtgttacaagtgcatacagcgctatggcaaccgtcagtatcacggcttgttggactggcgtttaggtatggcctatttacgagcgatggttatgcctgaattcgcatgcggcctgaactccgtcgactggaaccaaccggaaatgaaaggctggcgagaaagagcgtttgagttagcggaagacgtcgaggcgctacgaccaggaacaatcaaattgtcaaaagagcattcattacctgttcttatcgaaatacaggacggaaaagagctttggcgagcggccgtaacgcatccattatggcaatggagagacgccgaacgtgatgcccttatcaacacttttggattggttgatgggaagtcgccgctacgattcatcgatacatttgaactggaaagacgaccactgcgtgcgctgacgaatcttaaaaaattgcagtag

SEQ ID NO: 192403 - DNA, 834 bp, Klebsiella oxytoca
atgcttgtttttgataaaaacggtactgaactgaacgcagagtgcacagtagatgaagaagatggggtttatggcctaatccttgagtcttggggaccagcacacagaaacaaagactacaatattgccctcgattgtatcattgagcgactgatcaattccgatgtagataatgtcgttgtatatcttgcctcatcgacagccagaaagcatatgccgtccataactgaaagaaaaatccatcctggtgaatacttttctctagtaggtaatagccctcgagatattcgccaagaaatgtgtagttatcaagctcatttcagtagcacaggtagaaaagaagttccttctggtaacaggaccaaacgaataatgataagtgttcctaaagtcaacagtggcgaattttgggaacaaataatacatggagaatcatcagatctcttgcaacctacagatgatgagaacgttctgaatacaagagttagcaaattaataaaaaaacctctgagtaagcccaaaggatataaagtaccaagcgcggtagagcgacttcaaaaggtctatgttagagatcctgcggtgaaagcttggatcttgcagcaaagtaagggtgtttgtgaaaactgtggtgcaaaggcaccgttttatttaaacgatggtagcccatacctggaagtacatcacgtgatacctctatcttcaggaggtgctgataccacaagcaactgcgttgcactttgtcccaattgccatagggccttgcactacagtcaaaatgcgaaagaactagtcgagatgctttacattaatacagatagattgcagaagtga

SEQ ID NO: 192404 - DNA, 1710 bp, Klebsiella oxytoca
atgaacaacgctgaacaactctttctgaacgagctggataacaaattctggaaggccgctgataagctacgtgccaacatggatgccgccaactacaagcacgtggtgctaggacttatctttctgaaatatgtctccgatgcatttgagactcgtcagcaggagctgctcaccctgttccgcgatgtcggcaatccggacaacatctacgccatgtcacgcgacgattacgactccgatgaggattacgcgcaggcgatagttgatgagctggaagtagaagattactacaaagaaaagaacattttctgggttccgaaagcggcgcgctgggacacgctgaaaaacaaagccatgctgccgaccggtaccgtgctgtgggtggacgaaaccaccgggcaggaggtgaagctgcgctccgtctcctggctggtggataacgcgttagatgaaatcgaaaaaaccaacccgaagctgaaaggcattctgaaccgcatcagccagtatcagttgggcaatgaagtgttaaccggtctgattaacaccttctctgacgccaacttcagcaatccggaatataacggtgagaaactgagcttaaagagcaaagatattctcggccacgtatacgaatatttcctcggtcagttcgcgctggcggaaggtaaacagggcggccagtattacacgccaaaaagtatcgtcaccctgattgttgaaatgctgcaaccgtataacgggcgggtgtatgacccggcgatgggttccggcgggttctttgtttccagcgaccgctttattgaagagcacgcgggcgagaagcagtacaacgccgccgagcagaagcgcaatatctctgtttacggccaggagtccaacccgaccacctggaagctggcggcaatgaatatggcgatccggggtatcgactttaacttcggcagcaaaaacgccgacaccctgctggacgaccagcacccggatctgcgcgctgacttcgtgatggcgaacccgccattcaacatgaaggagtggtggaacgccaagctggaaaacgacgttcgctggaaatacggcacaccgccgcagggcaacgccaactttgcgtggatgcagcacatgatccaccacctcgcgccaaaaggttcgatggcgctgctgctggcgaacggttcgatgagctccaacaccaacaacgaaggcgaaatccgccgtaacctgattgaagcggatctggtggaatgtatggtggcgctgccagggcaactgtttaccaacacccaaatcccggcctgtatctggttcctgaccaaagataaatccggtggcaacggcaaagcgcaccgtaaaggtgaagtgttgtttatcgatgcccgccagattggctatatgaaagaccgcgtgctgcgtgatttcagccgcgaggatattgccaaaattgctgagaccttccatgcctggcagacggataaagagtacgaagacgaagccggattctgtttctcggcaacgcttgaagacatccagaaaaacgactttgtgcttactccagggcgttatgttggtgccgccgagcaggacgaagatgatgaaccctttgccgagaagatggcacgactgactgcgcagctgaaagagcagttggaagagagcacgaagctggaagcacagattaaggcgaatctgggggggctgggttatgagttctaa

SEQ ID NO: 192405 - DNA, 1044 bp, Klebsiella oxytoca
ttgctgagtaagccagcaaaacatcttatcgatgctcgtttaaatacaactgttcaaaagactctgaatttaaaggatattagagaattaggaatccctattcctccgaagcatgaacgagatgtgatcaccaaaatcatttcggctattgaacaaaagaccatcgtaaactcggataccaaccaaaccctcgaacaaatggcgcaagccctgttcaaaagctggtttgtagattttgaaccggtaaaagccaaaatcgcagcgctggaagcgggcggttcgcaggaagaatccacacttgcggccatgacggcgatttccgggaaagaggctgatgcgctggtggtttttgagcgtgaacaccctgagcaatatgcagagttaaaagccacggcagaactgtttccgtctgtgatgcaggatagtgagatgggggcgattccagaaggttgggctttggggacattaagtgacattgcaatttttgccaacggtaaagtggacgtttcttctctgacaccggctacatatgtttctactgagaatatgcttgaaaatcgagccggtatttctagcgcttcttcattaccctctgtaaacagcgttcctaattttagacgtggacatgttctgatttccaatattcgcccttatttcaaaaaaatttggttagctcggttcgagggaggccgttcggcggacgtgttagcctttgaagcaagagactctgttaccgtggagtacatttacaatttgctttatcaagaatcgttctttgattttatgatgctgacttctaaaggtgtgaaaatgcctagaggagataaaaaagcgataatgggttggcagtgtatttgccctgagaagaaaatctcacacgctttttcaaaggctgttggtaactattattcatttattgaaagcaatcatgctcagaataagactttaacccaactccgcgatacccttctccccaaactcctctccggcgaaatcaccctgcccgaagcagagcaggcagtaagcgaggcggaaaatgtataa

SEQ ID NO: 192406 - DNA, 1182 bp, Klebsiella oxytoca
atgtataaagtcgatacgccgaccaatagcttgcactccttgcaagaagtgtcgttcagcagcctcggctttcgcgagcgcgatcatttgcaggagtggctggcgaaaaatccgcagacgctgaccaaaaaagacgacaaagaagacgaactgctgattatccagaaagagttcgccggctttgacgacaccaaagagcgcctcgatctgcttgcactcgataaaaaaggcaacctggtgatcatcgagaacaaactcgatgactccgggcgcgacgtagtctggcaggcgctgaaatacgccggatactgcgccaacctgcgtcaggagagcgtggtggagatcttccagctctatctggatcagtacgatcccagcgagaaccgccaggcagcagacgtcatcgccgagtttataggctgggaaagcctgaaagaaggggtgctcaaccgtaaaggcacccagcgggtcatcatggtcgcggccaatttccgcaaagaggtcaccaataccgcgctgtggctgatgcagtttggtatccgcgcccagtgcttcaaagtgaccccttaccgttttggtgaagacgtgtttgtcgatatccgccaggttatcccaaccccggaagcggagtcatacatgatcggcatggcgcagaaagaggcggaagagcagtcaacctccagcagtagcgaactgcaacagcgtcattatctgcgccgcgaattctggacgatggcgctggaaaaattacgcaccagcccctgtacactgtttaacaaccgtgccccctcaaccgatcactggctggccgccgggtcgggcgtcagcggcgtgccgtttgagctgatcttttcccagaaagacgctcgcgtgcagctcaatatttcgcgcggggatgcgctggaaaacacctggttatttgaacgcctgcaggaacgcaaaacgcacattgaatcgctgtttggcgagccgctcgactggcgattgctgccagagcgaaaaagctgccagatcgtctgctcaaaggcgtttgacggcggcaataaagagatctggcctgccattatcaactggatgatggatagcatgaaccgtctggaaaaagcgatccgcccgagcctgctggaactggcgattgagctgaaacagaccggtatgatcaccgagggagaggaagagtaa

SEQ ID NO: 192407 - DNA, 3132 bp, Klebsiella oxytoca
atgctgagcgaagacgatttagagcagcaatgcctgaaatggtttgctgaacaggactgggaagtgctgcacgggccagatatcgcaccggatggagacaacccgctgcgtgcttcatttcatgatgtgtttctgcgcccggtgatgctggagcagctgcaaaccatcaacccccatctccctgttaccgtgctggaagaggtgatactgcgtattacccaccccgaaagcccggatctggtcgtcagcaataaagcctttcatcacctgctgctcaatggcgtacccgttgaatataagcatgaagacaaggtgattcacgacaacgcgctgttaatggatttcaaccatccagacaacaaccgctttatggtggtgaaccaagtcgccattcagggaacaaaacaggtgcgtcgcccggatgtcattggctatatcaatggcctgccggtagcggtgctcgaactcaaaagtcccattgatgctaacgccgatatctgggcggcgtttaaccagctacagacctataaaaatgaactgagcgacctgtttatctgcaacgaagcgctggtggtgagtgacgggcagaatgcgcgtatcggctcgctgactgccgatgaagagcgctttctgccatggaaaaccgtggctaacgaagatgataaaccgcagtttgactggcagttacaaaccgtcgtgaagggcttctttaaccgtgcgcttctgctcgattacattcgttattttgtgctgtttgagtctgacggtaaacggctgatcaagaaaattgccgcctatcaccagttccacgcggtgcgtgaagcggttgcggccacgattgtggcgtctaccggcaaacacctgccgctgcgcagcaacattacccccggcagtaaaaaagcgggcgtggtgtggcatacccagggctctggcaaaagtatctctatgtgctgctacgccggaaagctgctgcaacaggcggagatgaacaacccgaccatcgtggtggtgaccgaccgtaacgatctggatgggcagctttacgccaccttctgccaggcgcaggatttgctgaaacagatgccgttacaggctaacgaccgcgacgagctgcgcgagttgctcaatgctcgtgaatccggcggcatcatctttaccaccgtgcagaagtttgcgccgctggacaacgagcggagccatccggcactcaatcagcgcagcaatatcgtggtgatttccgatgaagcgcaccgtagccagtatggcctgagtgccacgctggaccgtgaaaccggggtctataaatacggctatgcaaagcacatgcgcgatgcactgccgaacgcgtcgtttatgggcttcaccggtacgccgattgcctctgaagataaagatacccgtgccgtgttcggtgattacgtctcgatatacgacattcaggatgcggtggatgatggcgcgacagtacctatctactacgaatcccgtctggcaaaactcgatctgaatcatgaggaactggaaacgctctccgaccaggtagatgagctggtggaagatgaagagacggaccagcaagagaaaaccaaaggtgactggagccgtctggaaaaactggtgggatctgagccacgtatcaaacaggtagctgcggatctggttcagcattttgaaacgcgcaacgcggccatgaacggtaaagcgatgattgtcgccatgagccgtgatatctgtgtgaagctctatgatgccatcgtcgcaatccgtccggactggcacagtacagatgtcgaacaaggtgccatcaaagtcatcatgacgggctcggcatctgataaagaccatctccagccgcatatatacaacaagcagaccaaaaagcgtcttgaagcccgttttaaagatttgaacgatccgctgaagttggtgattgtccgcgatatgtggctgaccgggtttgatgcgccgtgttgccacaccatgtatatcgataaaccgatgcgcggccataacctgatgcaggccattgcgcgcgttaaccgcgtgttccaggataaacccggcgggctggtggtggattacattggcattgccaacgagctgaagcaggctctgaaaacgtacactgactcgaaagggaaagggcagaccacggtagatgcgcgggaagccttagccattctgttggaaaaaatcgatgtcattcatgggatgttcgcatcctcagcaggaaaacccggctttagctacgaaggattttctcgcgatccattagcatttttacgcgatgccgtgaactacattttgggtctggatgacggtaaaaaacgctacctcgacgtttcactggcgatgagcaaagcctggtcactctgtaacacccttgatgaagctgagcccttacaggaggagttcgcgtttctttctgccgtcagagtggggcttatcaaacttgatccgaaggcaaaatttagccagtcagaaaaaaactccctgttgagcaagattctcgataacgccgttgttgcaaccggcgttgaggatgtgtttgctctggcggggttagataaacccaatattgggctgctgtcggatgagttcttggaagaagtgcgggaaatgccacagcgtaatctggcggtggaactgctggaaaaactgctaaatgacggcatccatgctcgttctggtaataacgtggtgcagcagaaaaaatactctgaccgcctgaaagccgttttgctgaaatacaataaccgggcgattgaaaccgcgcaggtgattgaagagcttatccagatggcgaaagcgttccaggaagcgatggcgcgtgatgaagcgctggggctaaacccggacgaaatcgcgttctacgatgcactggcggaaaacgatagcgcggtacgagagctgggcgatgatgtccttaagaaactggctatcgaagtcacgttaaaattgcgtcaatccacaactgtagactggcaggtacgagaaagcgtgcgtgcgaggttacgtattctggtgcgccagacactacgcaaatataagtatccgccggataaaacaccgggtacggtggagctgattttaaaacaggctgaggttatctcgaatcattggacggtatag

SEQ ID NO: 192408 - DNA, 843 bp, Klebsiella oxytoca
gtgagtagaaacccatgggaagttcctgaatggcatgctctaggccgagaagcatcattagtctgtcatctcattggatcaggtgcaacagctataggtagggccaattacgctgacaagatgggagaatattacactgcgttctttggactttcagttgggttagaaaggctttcaaagttaatattggttgcgcattatgctattgagaaccaaggaagaatgcctgatgagaaagttgtgagaaaatttggacacaaactaatcgacttgaccaatgaggttgagaatatttccaaaaaaatggaactattacttgaatataaaatgcctacaggaaaaattcctcacaagatacttgaatgtttagattcatttgctgatgctcggagaggaaggtatgcaaattttgcttcattaggtaacccctctttaaccagtgatgaacctattaacaagtggtggggagaagtagctgagtgcatactagaaaaacattattacggtacaactgctcaaagacgtgttgaaggggatgctgaattaatcgatgctatgatgtcacgttttacaatggtattgcatacagatgagaccggaaatattatgcaagatgttaagtcttcctcaacacgtactggccaaaacgttatcgtacaaaagtggggaagatactattctctaactatcgctcgatggcttgcaacaattttatctgagctttctcagatcgcttgctataaatataatatcgaaggtttttttggtctgaatgaacatttttatagttacactgttgacgatagtttcttaaaaaccagaaagatatggcctctaaaataa

SEQ ID NO: 192409 - DNA, 2142 bp, Klebsiella oxytoca
atggatgttgaaatcagtcactgtaacaatattgattacgcccgtatcatactttcagaaaataagctaaacattaaatttgcaccaaatggtactggcaagagtaccgtttctcgcgcgatactacatagcgttgttggcgatatacaaagtcttaatgcccttcttccctttaagcttcgtgcatcaaatccgtcaaatttcataccaagtgtgcgcggtgcagaaattattcgcgaagtgatgtgttttgatgaaaagtatgtttcacagttcaccttccagcctaacgagttaattagcaacagctttgacatttttatcaaaactgaagcttacagtcagaccgagagcgagatagaagctatggtcatggcaattcggcaagagtttaccaataacaatgaactggaattattcattacccatcttcaagaacttagtggtgcttttaagctaactagcaggggtctttcgagagcctctacaggtatgagaggactgtctggcggtaataagcttcaacacatccctccagggcttgaagggtatcaaccatttatacaaagcgcacgtaacgtagagtggattgaatggcaaactaaaggatatgaaaacttctcagaactttcagacgattgctgccctttttgtacaggcaattcacacgataaaattgaacaaatacgtaaagttagtgatgaatacgacaaagctgttattaaaaacctcgttgttattatcaatgccattgaaaaacttggtgagtattttcatgacgatgctcgggctcgcctcaaggaaataacaactttacagggcggacttgaacagcgacatgaagactatcttctaacaattaagcgacagacagacagcctcctgactttactaaactctttgaaaattcttaatagtttttcattcgaagatggaagcaatgtgcgagcttctttagcagcctatcgactggacctgcagtttttttctgaacttcagtccgacagaactaagcaaatagttgatcgtctcaatgcttctctagatacacttatggctcaagctggtcagcttcagggaaaaatcaacatacagcgtgccggtatgaacaggttgatattgaagcacatgaccgatatcaatacattcctttcatatgcaggatataggtatcaagtagacatatctggtgacggttctgagtgtagactaaaactgcgacacgttgatcatgagcatcaccttagtggcgggagccaacacctcagttatggcgaacgcaatgcctttgcgatcgttctgtttatgtatgagtgtctagcacgtaaacccgatcttataatattagatgatcccatatcatcgttcgataagaataaaaaatttgccatccttgagatgctttttcgtcggaatacaggggaatgcttaaaaaacctcacagtattaatgttgacacatgatgtagaacccattattgatacgctgaaatcagtccgacagatgtttaataatcaggttatggcatcatacttacgttatagcgcaggaattattacagaattgccaatccgcgagagcgatataatgacttttgcgcaaatctgcaaggctgtaactgaatcaaactgtgacgacctgataaaactgatttaccttcgccgacattatgagatcattgacgagcgtggcgacgcatatcaggtactctcaaatctttttcaccgtcgagctgaacccatcgattcacgtgaggaggtagaggacggtgctggttatcctaaaatggatttagttaagttgcaaataggctgcgataccatcgctgaacgtatttctggttttgactacgcaaaaatacttgagatggtgacaactcctgactatataagagccctttatcaaaactgtaggaccgggtatgaaaaactacaagttttcaggctattagaaccagaaattgataaccgagtgattcgtaagtttatcaatgagacttatcacatcgaaaacgaattcatttgccagctcgacccagtaaggtttgatctgatccctgagtacgtaattttagaatgtgacaaactccttaccacacctttctcatccgcaaatgatgagacagagcaggagatagcttag

SEQ ID NO: 192410 - DNA, 501 bp, Klebsiella oxytoca
atgagccactttgatgatctgtgtcagttaagttctgcggttgaagaaaagaagaaagatgtagaacgcctcattaagcgcgaagcagcaagattagtgtctttttataaggagtggctggagcttcctgccgaatactggctcgatgaacgcggagagcgtcgcccctatgttgatgttggtatcattgggagcgatggaacctttcaggctgcacgcatcagtgagttaccaatgcaaactgatggcacattgcatatgattctgcgtaccgctacaggtagtgacagagctttaccagttgttccggtaccggttaatttgcaagttatgtcggcagatgagcaagagattgatgttgctatcagtgttaataacgaaagacccattaaggtcttcgttactgccactgatgattacacttattcggaggtggcgatgaagattaaaagccatatccaaaaagctattcagagcaattatccagcatccttcatgtga

SEQ ID NO: 192411 - DNA, 861 bp, Klebsiella oxytoca
atgatatctttacgagatgcacttggggaagacgattggcttagtagcatgatgttattatttagaaacgaaatgcataagcataatatacttattatcgtagaaggcattactgatattaagttcttcaatgcctatcgcctcaataatcgatttatctatgaatcacctgaaaatggcaagcgtgaagtaatttctgctgtaaaccaactgcgacaagctggtaatgatgcagtgtatggcatctgtgatgcagattttgatggcttatctggcattagccataatggtgttttttttactgatgctcatgatttagaaatgatgttagtgaaaggaggtgtggtcgataaatttataatgacacacacagaccggaaattgatccagggtaatttagccgaggttttttgtcgcgatgttaaaataaatatcctttgtgcttgttatcgacttgggcttcttaaatggtttaattatcttaatcatagcaaacttaatttcaagggtatgaattacagagagtttattaatataaataaaacagaagttattgttgatgacatggaatatattagatatgtcctttctagaagtagagctgttgctgagcaattaaatgtaggtgttttacttgagggaatgcgtaagcttgagttgatgtcgcctgagcatttttccatttgtaatggacatgactttacctgcattcttaaaatgatgtatgaaactgatatttcagttaatagaaatatgcgactggatgagattgataattatttgcgtctttgttatgatcaaccaacatttaaaacaacaaggttgcatacatctctaaatcaattattggccttacactaa

SEQ ID NO: 192412 - DNA, 1248 bp, Klebsiella oxytoca
atgaatttaatcaaactggaaatacataaactttttgggcttcttgattatgaaatcccattagataaagatgaaataaccatgcttaccggtcctaacggttatggtaagacaatgattcttaagatcattaacagtattttatcgaataagcttaatatattatgtaagttaaagttcgaaagtatttttttacactttcagggaggtggtgtatctattcagcatggtgataagaataatgccttgaatttggagcattacgatagtgattcaaatattttcgctgttgaatttcttgaattggacacagaattagttaaaaaaaatgatttggttatttttcattggaactctgaagagactgagcggacctataaaaacgtaaaagaaaaacaactaagttctgaatttttaagttttttaacatcagatgaaatagtttcctttatacgcgctgatagacttcaggcggaagaagggagtgaaagtgttatagattcatgtgcctctaaacttagaaatctaatggaaactgctcaggatgaatctgcagcattaagtcaaaaattagacgccacatttcccattagactctttgaacgtctagaacaacaaaaaagattttcctctacaaatattcaagcacgtttgagcggtattcaagataaacggcgtaattatatgcattatggattgattcattctgaagataatttaatgccagataaaagcacttcgctaaatagtagcaatgaatatttaggtgttcttgatctttatatagaagatgcattagggaagctttcgccttttcaaattttgcatcagaaaattgatctttttgaatcaattcttaaagagaaaatacttgcttttaaaaatgtagttattgatagagaaaacggtttttattttcgaagcttaagtggagatgtagttgaacgaaactcgctttcatcaggtgaacaaaaccaaatagttcttttattcaatttgatttttgatctggccactcaaaaagtgattctaatcgatgagccagaaatatctttgcacgtcgcttggcagcaaacatttttggattctttgaagaaaattcaaaaaataaatgagtatgaaaaagttataattgctactcattcacctcaggtaatcagtaaaaactggccattaacatatgatctttttgagattctaaaaaataaagatagtctgcataatgaagtagaaggacgtgctgaatga

SEQ ID NO: 192413 - DNA, 1158 bp, Klebsiella oxytoca; identical to SEQ ID NO: 182134

SEQ ID NO: 192414 - DNA, 1383 bp, Klebsiella oxytoca
atgtcctcacatccgatagattttcttttacttggtaacaattttggcacaccagaaatgcgggaaatctggtcagagcaaaatcgcctgacacagcaaataaatgtcgaagttgcgctggcattagccgaaggtgaactgggtgtaatcccgcaacaggccgcgctgaccattgcggagctggccgatgccggcaagctgaatattgaggatatcgccgcttctggctcgcagatgaagcattccctgatgccggtgctcagcgcactacaacagcaatgtggtgacgcaggggaatacattcattacggcgcgaccacgcaggatatcgtcgataccgccaccgttttacagctggcgcaaaccctgaaagcgatcgtccgtgacagtaccgccgtggcgaatgtgctgaaatctctggcgtgcgagcatcagtacacgctgatggctggccgcacccacggcatgcaggcgctgccgaccacatttggttttaaagtcgccgtctggctggatgaatttatccgccatctcgaccgcctggacgccatcacgccgcgcctgctgaccggcaatatcagcggagcgatcagtacctacgccgcactgggcgaagcgggtccggaagttgaacgccgcacactggcgcgcctgaaccttaatacgccgaatatcggctggcaggccgcgcgtgaccgcttttctgaatacgcctcggtggcggtgctgatcagcggcacgctgggcaaaattggcaacgaactttacaacctgatgcgcaccgaaattaatgaaatcgaagaaccattcagcagtggaaaaatcggctccaccaccatgccgcacaaacgcaatcctgcagccctcgaaggtctcgccagcctgacccaaccgttgttgcacagcgcatctctgatttatcagtcaatgcacgtggagcatgaacgtgatgcgatgagctggcgcgccgagtggatcacactgccggaaatctcgatttatctctctgcccagctgcaaaatgcccaagcgattctctccggcctgacggtcaataaagcccgtatgctggcgaatttacagatgcaggacggcctgctgctgtccgaaaaagtgatgtttgaggtcggtaaaaaactcggcaaacaaactgcacatcatctggtgtatgactgtgccatgcaggcgtttgaaaaacggcaatcatttaaaactgttctgcttgcgcatccggtgctggcagccagtattactgaacaggatcttgactactggttagatccggctcattacaccggctgcgccgcgcaaaaagtcgatgacgtcatccgttttgccgtgcagtccggtcatctgagttctcctgaggagcacgggttatga

SEQ ID NO: 192415 - DNA, 894 bp, Klebsiella oxytoca
atgctcaaagaaaacttcaacgaactgcaaatctttcttgtggtagcgagagagcgaagttttaccaaagcagcgggcaaattgggcgtttctcagtctgcactcagccacgcgatgaaagcactagaggaaaggctcaatatccgccttctgacccgcacgacccgaagcgttgcccccacagaagccggtgagagaattattgcctgccttgaaccgcgtatcgccgatcttgagcaggagctggaatcgcttgtgcaacttaatggcaccgcctccggcaatatccgtttatctgccggggagcatgccgcgcgaagtctggtatggccgaagttaaaacctttcctcagggaatatccggaaattaatctcgaactggtggttgataacggctttgtcgatattgttgagaggcgttttgatgccgggatccgcctgggcgaaagcgtggataaggacatgattgcggtaagaattggaccggacatgagaatggccgtagtgggagcaccatcttatttcgctgcaaatcctgtacctgaaacgccgcacgagctacaaaatcatcggtgtatcaatatgcgcctgccgactgccgggggactgtaccactgggagtttgagaaggaagggaaaccgttacgggtcagggttgaggggcaggtaacgtttaatctgcaggcggaaaggattgatgcggctttatctggctttggcatcgcctgtatacctgaggacagggtgctggattatataaagtcaggagagcttattcaggttctgcaggactggtgtccgtctttccccggatattatctttactacccgagccgtaagcagcatccgcccgcttttgcgctgatgatcgatgcacttcgctactcggaataa

SEQ ID NO: 192416 - DNA, 990 bp, Klebsiella oxytoca
atgcaaaaacgttatctgggtaaatcccgactcgaagtctccgcacttgggctcggttgcatgggcttaagccacggctacggcccggcgaccgatacccgacaggctatcgagctcatccgcgctgcggttgaacgtggcgtcaccttcttcgataccgccgaagtgtatggcccctttcttaatgaagaggtggtcggtgaagccttaaaaccatttcgtgaccgcgtggtcatcgccactaagtttggttttacttttggcgacgacaacaagcagcagattttaaacagccgtccggagcatatccgtgaagcggtggaaggatcattacgccgtcttaagactgatgtcattgatctgctgtatcaacatcgtgtcgacccggatgtccccattgaagatgtagcgggtacagtgaaagagctgatcgcggaaggcaaagtcaaacatttcggtctgtccgaagcgggtgcgcaaaccattcgtcgggcacatgctgtacaaccagtcactgcactgcaaagcgaatattccatgtggtggcgcgagcctgagcaggagatcttgccgttgctggaggaactggatattggttttgtacccttcagcccattaggcaagggcttcctgacgggatcgattaagccaggaacgacttttggcaaggatgattaccgcagcaccgtgccgcgtttcgccgaacaggcgattgaagccaatgaaaagcttgtctcattgctgggtgaactggcggcagagaaaggcgtgacgtctgcgcaaatcgcgctggcatggctgctggcacaaaaaccgtggattgttcctatccccggcaccactaagctgcaccggctggaggaaaacctgggggctgttgacatcattctttcgcaggatgattcgcatcaaataacccaggcgcttgaaacgattaaaatcgtcggcgaacgttactctcctgagcatcaggctcgagtaggccgttaa

SEQ ID NO: 192417 - DNA, 1785 bp, Klebsiella oxytoca
atgtatttatcaaaactcggtatccgcaactttagaaattttgaggcggctgatattcccctggcaggtaatgttgtgttattaggggaaaatcgtgtcggtaaaagtaatctgcttttcgcaattcgactggttattgatcccactctgcctgattcagccaggcagcttaagctgtcagatttctgggatggctgcgaccttgaatcaaaccctcaaattgaggtgcaccttgaattcgccgatttcgacagtgatccttccctctcagctctgttgaccgattttcgcatcgcagaggatcctagcgtagcaaggttgagctacatttttcgtaaaaaggaagaagtcgatggggctccacgttcgggtgaggactgtgagtttattgtttttggcggaggtcaggaatcgcgagccattcctggacgcgtcaggcggcggatctccattgatatgctggacgcgttacgcgatgcagaagcacaacttgcttcctggcgaaactctccgctacgccccttattggaagatgcattctcttcactgagccgagccgatttggatcgcgtagcaactgagcttcaggcagcaacggaaaccatggagaagttcccatcaattaaggggctcgaagattctctgcgtggtggcattcttgacctggctggaactgctcacgatttagatgcccgcctccgttttgcacctgctgacccgctcagattgatgcgttctatctctatgttcattgatgatggaaagagaggcattattgaagcgagcttaggttctgcgaacgtggctctgatatcactcaagctagcagagtttgcatggcgacgtgaaaagaatgaacgtaatttctccctgctttgtattgaagaacccgaagcacaccttcacccacagcttcagcgcgctgtttttgacaaactcttcaataatgccgacaaagatcagtctttgattgtaacgagccattctcccacgctggcaaccattgctcctcttcgttccgtagttcgtatttgcagggatctagaggggcgatcgcgagctttttccctagccgaattgccagtaaccagtgaagaactcgacgacattgaacgatatctaacagcaaccagatcggaactgctttttgctaatggggtgatatttgttgaaggcgatgctgaggaggttttgcttccagggttcgcacaggcgatggggatcaatctcgaccagcttgggattacagtatgtaacgttgcgggagttaattttgaaccttacgtaaaactggcggccagcctcggactgtctttttcagtcataactgactgggacccactggatggtacgaaacaaccgatgggtaaaacacgttcaattggtatctggcaagcatacagtgatgtatcggaagatctggaaaaactaacgcccgggaatattaattggctcaataatcgttcttatgaagagtgtaagcctgcatttgaaaagattggcatttttttaaacgatcagacatttgaagtcgctgtggccaatacgacaggcctcaaagaagcgctgcttgatatcctcgatgaacagggatttggtgtgttacgttcatcaaggattacttcatggcgtgacggtttagttccagacccgatgcaacttctcgcgatgatatctgacataggtaaaggacggttggctgccaagctgaagcaaaaagcacctgggcttgcgccgccggagtatattgcttcagctattcaatatgtggtgtcgaatgtttga

SEQ ID NO: 192418 - DNA, 1782 bp, Klebsiella oxytoca
atgtttgaccggcgcgcactttcagaggctctgaatgagctattgccgaacagagagcagtacgctgcggtaacataccccggccactgcgtagttattgctgggccaggcagcgggaaaaccaaaacacttacgaccgccatggcacgtgccctgattgaagaggtcgctgacccccgaggcgtggcctgtattacttacaacaatgaatgcgcttctgaacttgaaggacgtctggcatgctttaacgtcattggcgatgatcggaactttattggtaccgtgcatagctttgcattaaatcaggttttaatcccctactcacgatgtataccgggtttgctgccggatgattttcgtgtggcgaccagagatgagagtcgcgcggctgttgaagtgacttaccaggctagattcggatctgtcggagatcctcatgcacggtggaaatttgcagaagagaaacgacgccgggatgtgaaccgactcctaccggcttggcggaataacaatccggagctggcagattttattgaaggttatgaggcagaacttcggcgcttaggactgattgacttcgatgatatgccactcatcgcttttcgtattattagcgagcatgaatgggtacgtaatgctatccggtcgcgctatcctgttttgtttgtagatgaatatcaggatctggggcacgctcttcatgagctggttctgctgctgtgctttaacggtggaatacgattatttgcggtcggtgatgcagatcagtccatttacggatttaatggtgcaaatccagggctactggatagtcttgtttcacgggcagatgtaagaccgttccgtcttcgcttcaactatcgatctggcgcgaaaattatcagggcatcactaggggcgctgggggaagaccgcgattatgttggccccgatggtaatccagagggagagttaggattccatgggattaatggcgattatgacgcacaggcgcattttatcgctcatgatctaattccctcgttgtttgaaagagggtttcagcctgaacgcatcggggttctttaccgggcagcctggcttggcgataaagttgcagatgagttcaaggccagaaatattgccataatacgtgctgacagtaatgctctcattaagcgcaattctcgtcttgcccgtttcatagaagcctgcagtcagtgggtaatagggggatggaaagaagcctctcctccatttaacctgttactgggtcaggcgctcttttttgtttatggccgccgcgcaagccgtgctgaagaacaattactgaccgtacagctcatcacatttttacgaaacggaattgataaagcggaaagtgctcacgagtggctgagacgtttaaatgatgagattatcaccggctggatgggtatctcacagaacactcagcaggaatgggatgtcatctctgagttactgaaacgaaccgatcccctcaggggactggatgtggctctggatgtattcgctgggaaagtagaaggaactgggcgcatcacccttagcactcttcatagtgcaaaaggccgagaatttgatgtagccataatgtttggggtaaataaatatgacttcccgagtaagcgagatctagcttcagataatgcccttcgcgaggcccgtcgcctcttttatgtaggcgtcacccgtccccgaaaagagctgcacatggtttatgaaaagggtaaacattcaccttggattgccgaactgtatcatcgcagccagcagatatag

SEQ ID NO: 192419 - DNA, 426 bp, Klebsiella oxytoca
atgactgcgattaatcaatttgctgcaaattttggtctggactgggcagataaaaaacacgatatctttgttcagtttaaaaacggtgaacgcgtgttccatgtgattaagcatacagcagaagcgcttgatgtctggcttaccaagttacaccagaaggtaaaaggcaggatcgctatagctctcgaactgaagaaggggcccgtggtatatgctcttcagaaatatctctttatcaacgttttccctgtccacgctttgtccctggctcgttaccggcaagctttctcgcccagcggcgctaaagatgatccgcaggatgccgagctggcattagagttaatgctacgctatccccaaaagataaaagccattgaacccgataatgcggatattctcagcatagtacaggggaggagggagtga

SEQ ID NO: 192420 - DNA, 2958 bp, Klebsiella oxytoca
atgaacattgagataagcgccacggatcagaaattttcaatactcttattggggctaagtatgagcagagaaaaggctttcgaaaaattcaaggaagtgcaggaacggtatattgctcgaaaagatactctttttgaagcaaatgaagctgaaagccgcttactggtgatagatgagatcctaaatatactgggttggaataaagaagaatttacgccggaagcgtattgcagaacagcggggtatgccgattatatactgagtacggaaagaacgcctcgccttgtggttgaagccaaaaaaatcggcgtgaccttcggactccccaaaaacaccttaactttgaacgaatactctgtcgcctatcttaaaaaagcattcaataagaaaatctctgaggtgatcgatcaggcacaaagatactgtgtcgaaaaagcggttcaatatgcattgatcacaaatggtgcagagtggtttgtttgctcaatgctgccaaaggcaggtaaaacaactgattcgatgaaaggcgtttattttgggaatatctttggtgaagagttttcgtttgatctcatgtataacctcatctctagggagagcacagaaaagaataatctggacagctatctctcagaactgaatcatgtaccgtcagaagtgtgttacatgctaaaagatcatgttcatgattttatttgggatagtaacaaagacaatcaatggattgatgatttttatgaaaactttttctcccagataacagagaaaaatcagcgaaaaatgctggagcactgctttgtcagtgactctaagttggatcagtttaaaggagaaataaaaagagcgttaaaagattcaaaacccagttttcttccgaatgatgcgttagatctctcaccttctgaagggaaagatttcatcctggagcatcatactggtaaagttatcatcattactggtgccgttggatgtggaaagaccactctggtgactaaatgtttagtagaagcaagacagcaaaagaacatatatgcaaccccaatcatcatagatttgataaatgacgtatcaaaacatagtattgatgtgaaaaatatcgtattcaattatctgcatgacaagataaaaaacgagtatgaaagcgagtttacattagatgcactgcgtatcacatttgcgcatgaaattaaagtgttaaaaaatggcccctacaaggatatattttccaaaaatccagaaatgtttatggtgaaagaagctgaactactggataaggaaagcgctaaccggcagagtctagtattaaaaatattccaaaagcgtgtcaaggaaaataaaaccgttattattgtgattgataatgtcgaccgagcttctgaatcgtttcaagaggaaatttatgctttatctcatttaataacccaagcatcgggtgcaacagtcatcatcacgctcagggagttcaccttttttaagaataaagataaaggctttctggacgttaggccagaagacaagatcattcatctcaaatcaccggactttaacaaactaatttcgactaggataaagtatattaaagaatgtctgagtgaagactttaggattagagactggagaaaaaaatatcagcttcaagatttcttgggtaaaatgaatttctacgctgatgtgctgaggaaaaatcttcaactgtcgaatgagagtatgcccattctggaaatattatcttccgtgtcttggcataatatcagaaacttttaccaattgattaaacacctacactaccaattaggaaacgagtcagcatggcgtaaaaaggatgttatctccacgctcacctaccatcccgatcacacggaaaaagcatatataccgaatgtttacctgccctatcagaacgtaaaccagtgctacttcctgaagttaagaatactctattttctgaatgatgcagtttcccccggcgaaattgcaaaaggaattagccttgaaagaataatccggttcgcatcactttatggttataaaaaagactggattagcaaagcaattgagagttcggttaaagaaaggattattgaatgtattgaactaccctctgacagcgacttcaacatagagtacaccgttagctcggcccatacgtttcgtatatcgcctttaggcacttgtttgatactcgatatctgccatacatcaatttacctgtctttaacatctctttatttgcctttccatgaaaaaaagccctataacgaagcaaaacaagaactcactagactgattaatgcgatttataatgataagagtattaacaccaatcatgaaattattgatctggtcgaagaaagtcaaataccagttataatatcaaaatatctgtcatcagagtatttaagagaaaaactgactttatcattactgaaaactcaaacagacgtactcttgacggaaaaaagtataagccgactggtggcatcgttcagtcgtaacataggtaacaacgatgagtttaccgctaaccgtgacaaaagagatcacggtaatttatccttcgatttcggagatggaattgaaaaagacagcgcatccggtgaagagatagaaatcccgccttcattcaagccattatctcttgaaagtgtcatgtcctgcggaagtgagtatatccctcttatctttgtcgccctggtgatacgatcctatcttggttttgagaccagtattggaactcagattacagaaacaattaacgatcacatagtaaatgatgacaataaaaaatatacaaataatgtttcacgcgcgctgcgttctaactctctaatcaaacagaaatggttgctgattaggacggatttgcatcctaagttcaggaagttttcactgagcagcacttggcagtcagaatggattgaaatattcagtgaagaaccgccagaaatcgaaatttga

SEQ ID NO: 192421 - DNA, 657 bp, Klebsiella oxytoca
atgacccagataagaattgggttagcatgtgttttaattttatggtctcttgaagatatacttaatcgtaataaaatcggattcatatcaaagatagctttggctactttttttcattattcagctattgtttcaatattattttattttttttcaggtgagggtataaataagagattttatgcaatattgcctattttggggcttgttatatatattgtatcaaataccggccttggtgacattcagtctcttctggtatacttaccctcattccttgagggaaaaggaacaacatacattgacctgcaatctcagggggtgtatagagaaaacaatttaattataatgaacgttggaggagtaatctccttttgcttcttactacttcttctgtggaaaggcgatttaacggtaaagctaaacataattctacttaagatattatccttccagctttttattggtcttattctttcctttaattcggaaatatcaaatagattttatacgctaattggttttattacggttccattattatttccagctgtaattgattgcttcaaacctcgttggtttggttatctcttagtgatgctttacgctgcaagacaattttattctagtattgtcggtgttttcttatcctattga

SEQ ID NO: 192422 - DNA, 1533 bp, Klebsiella oxytoca
atgtctgtaaatactgaaaccgcccccgcgcaggggcagaccgctgtactggaaaaagagagcgtttacgcctccctgtttgacaaaatcaacctgaccccggcgtcccgcctgggcgatattaacgactttctggatgatgccgcgctgtccgacgccccggcgggcgaacgactgacggcggcgatgaaggtgtttatggactgcatccgtcagtccggaaagaccgtggagaagctcgacaagaccctgattgaccaccatatcgcggagctggactatcaaatcagccgccagctggacgcggtgatgcaccatcctgagttccagaaggtggaatccctgtggcgcggcctgaagcagctggtggacagcactgactaccgccagaacgtcaaaaccgaaattctggacgtctccaaagacgatctgcgccaggacttcgaagacgcgccggagctgattcagagcggtctctactggcacacctacaccgccgagtatgacaccccgggcggcgagccgattggctcggtgatctccgcgtatgagttcgacgccagcccgcaggacgtggcgctgctgcgcaacatctccggcgtctccgccgcggcgcatatgccgtttatcggcgccgtgggtccggccttctttctgaaagagtccatggaagaggtctccgccatcaaggatatcggcaactacttcgaccgcgccgagtacatcaaatggaaatccttccgcgacaccgacgacgcgcgctatatcggcctggtgatgccgcgcgtgctgggccgcctgccgtatggtccggacaccgtgccggtgcgcagcttcaactacgtcgagcaggtgaaaggtccggaccacgagaaatacctgtggaccagcgcctcgttctccttcgcgtccaacatggtgaaaagctttattaataacggctggtgcgtgcagatccgtggcccgcaggcgggcggagcggtgaaagatctgccgatccacctctacgatctgggcaccggcaaccaggtgaagatcccgtcggaggtgatgatcccggaaacccgcgagtttgagttcgccagcctcggctttatcccgctgtcgtactataaaaaccgcgactacgcctgcttcttctcggccaactccgcccagaagccggcgctgtacgacaccgccgacgccaccgccaacagccgcatcaacgcgcgcctgccgtatatctttctgctgtcgcgcattgcgcactacctgaagctcgttcagcgtgaaaacatcggtaccaccaaggatcgccgcctgctggagctggagctcaacacctgggtgcgcggtctggtgacggagatgaccgacccgggcgacgagctgcaggcctcacacccgctgcgcgacgcgaaggtggtggtggaagatatcgaggacaatccgggcttcttccgggtgaagctgtacgcggtgccgcacttccaggtggaaggtatggacgtgaacctgtctctggtcagccagatgccaaaggcgaaataa

SEQ ID NO: 192423 - DNA, 381 bp, Klebsiella oxytoca
atggcattctaccataaacagagttatcccgaaaaaaatggtttgtatgagaataacattttacttagaaagcataatgatgagattattagaaaagtaatggagtcatggtgggagcagttgaataactggtccaaaagagatcagttaagtttatgctatgtattctggagtaatagtttttcgccgcagattttaaaagaaagctctagaatttctaacgatttttttgacattgagctccattctaactacaaaaaaatgccatttctaaaacgaatatttgtattgattgatatgaaaaagcataaaaatatcggctttaaaattggttatgtactaatcacactccttagaaaaataaaaaatgggcataggtaa

SEQ ID NO: 192424 - DNA, 183 bp, Klebsiella oxytoca
atggaacaaactcaagacctgtacaaagccaggggttatagcgacgatctactgcccaaagtagcctcgcagcgtaactggaaaacatttaactattttaccttatggatgggctccgtacacaacgtacctaattatgtgatggtgggtggttttttttattctcgggctgtcaacgtttag

SEQ ID NO: 192425 - DNA, 210 bp, Klebsiella oxytoca
atgttttattgcccttttttatttttggtgtttaaccatttttttatcgccaagcctgaaaaatactatcttatccgcattgttttttgttgttttattgtaaattttgaccatatggtctactttttcaatccctacccggcgattttacaaacatcctcctccgcaagcgttttcccgggcgagttaggtgatctttttgcccgttaa

SEQ ID NO: 192426 - DNA, 294 bp, Klebsiella oxytoca
atgagagagaaactgacagataaatataacgccaccgtttccgggtatgttcctgcggcggctggctggtacctgagagagcagaacaatgcaggaaaaaacgtttatcacccggtgatggcatggcgcgaatgttccggtgttgggccacttaaagacggagtgctgatcccggtgttacctgttggtatgacaggcaaagcagcaaacgaaatcagcggcgatgtgatatacgtgctcgatgcgtatttaactccgaatggtgatggttcttttagtgatcgaggtctttaa

SEQ ID NO: 192427 - DNA, 2133 bp, Klebsiella oxytoca
gtgaaaaatgcaccaaacgttaaaaacctgccaaaggataaatttgtcgaggctgttatttttgccggggccgatgcttactctcacgcgaaaggctgggaagaaggtatggggcagaagatagccggggattctacgccgccggtttacctcgggccgaagcaactggcagatctggataacctgcgcgtaatcgataaggggcggcgtgctgcgcgtgtctacatggcgggtgatattgagccgatgctgataaacgccatagctgaaaagttggcgctggcagacgtgcaggatgcgaagttatacaaaggtatcccagaccagcagccggaagactggcgcgactatttgaccaggctgcgtggtcaggccgaacgcggcgagagtctggttggcgagatcaaccgggcgaaggggaatcgtgcgcctgctgatgaactggccccgcgcgttgaatcccgcgcaggtggcctgtattgggtaacgcccaaaattgacaggcagtccggagaggttatccgcccgggggaatggatatgcgaccagatgggcacagtcgggatcggcaacgatggcagcgaagcctatctgattattgagatggtgccggagggcacagaaaaaatcatccatgaggccatgccacgcaacgaaatcggcatgcctgctggctggtcgcgtctgcgcggacgtggtgttgccatcaccaccagcgcccatttgcttaataagctggctgagtatctccagcgtcagggggagcgaaccatgtgggaagttacatccacagcaggatggcactgcggggcttatgttatgcctgatggcgaggttattggggagccggagcgacctgttgcattttgcggtggttcggcggcaatcaggggctatgtcgtgcgcggcacagcagcagagtggcgggataacgtggcttccctgatgcgtggtaatcactcgatgatgctgggggctcttgtcggtctggctgctccgcttaattctctggcaggcggcagctgctttggtattcacctttttgcgcagtcgtcagcaggtaaaactaccaccgttgaagcggctaccagcctgtatggtgaccccgacatgcttaagctgtcgtgggatgccacccggcacggcctgacggtagaggctgcggcaaggaacgatggttttattcccatagacgagataggccagggcgggaaagtgacggaaatagcgcaatcggcctacagcctgtttaacggcgtaggccgcattcaggggcgtaaggaagggggaaaccgtgcggtgatgcgctggaaaattgcggcgctcagtaccggggaagaagattttgaaaccttcctgcttaaaggtggtattacccccaaagccgggcaactggtgcgcctgttgagtgtaccgtttatcgatacgacggattttaacggctatgacgacggtgacgaacatgcacgggcgataaagcgcctttcttccggctattgcggcgctgccgggcgtgagtgggttcgctggcttgccggaaacaaagaagcagctatcagcaccaccattgaaaaagaaaacgtgtggctgagtcgtctgccggaaggggcatcttcacaggttcggcgtgtggcttcacgttttgcgatgctggatgcagcgggggatctggcacaggcaatcaccggctggacacctgaggaatgccaggctgcaacgaagcaggcatttgatgactggttacaggatttcgggctggagaaccgggaaaaatatcaggttgtcagccgtgcgcgtgattttattcagcgccatgccctgagccgttttcagccttacacctttggtaaaagcaacggtgacatggacaggcagtatgccgcccgaatcagcaaccttgccgggtatctggtgaacggtcgacgggatgatggccggccggaataccacatcattcctaccgtgtttgatgaagaaattctgtgcggtatcagtcgtaattttggctgtaaggcgctggaggatgccgggatgatggtctgcgcagaatcaggccgatggacgacaaaaacggtcaaggtcaacggtacacagcagcgtttcatcgtactgactgaccagccagaggaatag

SEQ ID NO: 192428 - DNA, 867 bp, Klebsiella oxytoca
atgaataaactgtttaagttaaaaaactggttaactctggaggaaacatccagacgcttaacaagttcatttcaagaggatttttctgaggctgattgtttgcagttggcattagatggacatataaaaatttcagcattgattgaaaaatccaagttcggaatattatgcaaagaaggtgatacaaataacattctgtctgattttgttggttttatgaaaaacaatagtggttttccaaatgatatacttaaaactgccgaagataatattccacttgaaatgaaaatttgtaggttcggaaacgtatttagaatacctaccggagtttatgatttacctatgataggtgctgaacgccttgacgtgcttcacatctgctcccagtttcagggccgggagccagctgctttcatttgcctcgaaggtccttttctaaataataatgatggattcataaatgtagttgagccttttaatgaggagagtgttgagtggaaagtagattttggtgtaaaaagcggtttgtttaatatggttacaaatgagttcattgatgagaataactaccataaagcattttatccagctgatggtctaagagatgttgagtttgtatttcgccgggaaaatattgaggcttttgaagatagacaagttgatgtctctgaaaataattctgtatccctaaatggttgccttgatgtaattggagctatgctggattctttaaaaaacacatcttcaaaaagtaggcgatggactcaggatgcacttaagaccgaaatggttgaaaggagcaattctctcagcccaaggagcattgataattatttctctttggctaataagacatataaatcataa

SEQ ID NO: 192429 - DNA, 1101 bp, Klebsiella oxytoca
atgttcgatgatgatgactcagatcaagaagttccgaagcaacgtgagctcagtcaggatgtgctggcattgatcaacaatggtttggagtttttggataaggccaggatggagttagaaagctctaaactgaaattttctattgtcagtttttggaccgcggttgaaattttattgaaggtaccattggctcatgagcactggtcattggtatgcagtccgaagaaaccaataaaaaaacaggcttatcttgctggcgattttcaatcagtaacctatgaagaaacccgggaaagattgaaggacgtacttgaaaaccctcttgataaagaaacgaatgatgcctttgataaagttagaaagcatcgtaaccgagttgtacatttcttccatccaactttcagtgctgctgaagaacatacaatactcaaagaacaagcagacgcttggttcgctcttaaccgattattaagggacgattggaaaattatcttccgagctaaccataattttaagttggctttaaacgaaacgcgcctgataagagggagtgaattttacgctaaaatacggcttaagcaagttaagccagaactcgaacaaattgctaaacaagacattcagataggtaactgcacggaatgccatcaggatgcgacagtaactgaaacgataatcattagtaatgaaaatcgtaagcttgaagttacacggtgtaaggtatgcacaagttcagtacgaaaaattactttagcttgcccaagttgtgaagtaattaatgtactacctgaaggtgatgaagaattcgaatgtaaagattgtggatactcatctgaaagatatgaattgcttgatgaggagcttttttacagtttggatcagcaagagttttcggattttcctgctggatgtacaaattgtatgaaacctgacagcgtttgtatcttcggagaagggtttttatgtgtcgaatgtttgaattattataaaaagatgtctcaatgcaaatattgtgaacatcttagcaaccaggttcctttaaatagtcgtgcctacggatgtgaattttgtgatggtcctcaaaattatattggtgactaa

SEQ ID NO: 192430 - DNA, 159 bp, Klebsiella oxytoca
atgccgttgattgccttgcctgaaacgattagtctaatatttctgaatctggatctttttctaaacatttttaatttgttactttctctctatatggctatttatatgttttcatggagtgtttttttgggtaggccctttgagggtatttcattatag

SEQ ID NO: 192431 - DNA, 2562 bp, Klebsiella oxytoca
atgagtacactagagaatcttgacgcccacaccccgatgatgcagcagtatctcaagctgaaagcccagcacccggagattctgctgttttaccggatgggtgatttttacgaactgttctatgacgatgcgaaacgcgcatcgcagctgctggatatctcgctgacgaagcgcggcgcttccgcgggcgaaccgattccgatggccgggatcccccatcacgcggttgagaactatctggctaagctggttaatcagggcgagtcggtggccatttgcgaacagattggcgatccggcaaccaccaaagggccggttgaacgcaaagtcgtccgcattgtgacaccgggcaccatcagcgatgaagcgctgctgcaggaacgccaggacaatctgctggccgccatctggcaggacagtaaaggttttggctacgccaccctcgatatcagctccggacgttttcgcctgagcgaacccgctgaccgcgaaacgatggcggcggagcttcagcgcaccaaccccgccgagctgctgtacgcggaggattttgccgagtcgtcgctgattgagggccgccgcggcctgcgccgccgtccgctgtgggaatttgaaatcgacaccgcgcgccagcagctcaatctccagttcggcacgcgcgatctggttggtttcggcgttgaaaacgccccgcgcggcctgtgcgccgccggctgcctgctgcagtacgtcaaagacacccagcgcacgtcattgccgcatatccgctccatcacgatggagcgccagcaggacagcatcattatggatgcggccacgcgccgcaatctggagatcacccagaacctggccggcggctttgataatacgctggcctcagtgctcgactgcaccgtgacccccatgggcagccgtatgcttaagcgctggctgcatatgccggcgcgcgacaccgccgtgctggtagagcgccagcagaccatcggcgcgctgcaggaacattacaccgagctgcagccggtactgcgccaggtcggcgacctcgaacgtattctggcgcgcctggcgctgcgcaccgcccgccctcgagatttagcgcgtatgcgtcacgctttccagcagctgccggcactgcgcgcgatgctgggggacgtcgactgtgcgccagtacagcggctccgggaaaagatgggggaatttagcgagctgcgtgaactgctggaacgggcgattatcgatgcgccgccggtactggttcgcgacggcggcgttatcgcccccggctataacgcggaactcgatgagtggcgcggcctggccgatggcgcgaccgattacctcgacagactggaagttcgcgagcgcgagcgtctggggctggacacgctgaaggtaggctacaacgccgtccacggctactacatccagattagccgcggtcagagccagcatgcgccgatccactacgtccgtcgccagaccctcaagaacgccgagcgctatattattcctgagctgaaggagtatgaagacaaagtgctgacctccaaagggaaggcgctggcgctggaaaagcagctgtacgatgaacttttcgatatgctgctgccgcatcttggcgacctgcagcagagcgccagcgcgctggcggagctcgatgtgctggtgaacctcgccgagcgcgcggagaccctcaactactgctgcccgacctttagcgataagccgggtattcgtatcagcgaaggccgccatccggtggttgagcaggttctgaaagagccgttcatcgctaacccgctgcacctcgccccgcagcggagaatgctgattatcaccggcccgaatatgggcggtaaaagtacctatatgcgtcagaccgcgctgatcgccctgctggcgtatatcggcagctacgttccggcggaaaaagtcgatatcggccccatcgatcgtattttcacccgcgtcggcgcggcggatgacctggccagcggccgctcaacctttatggtagagatgaccgaaaccgccaatattctgcataacgccaccgagcatagcctggtgctgatggatgaaatcggtcgtggcacctcgacctacgatggtctgtcgctggcgtgggcctgcgcggaaaatctggcgaacaagattaaagccctgaccctgtttgccacccactacttcgagctgacccagctgccggagaaaatggaaggcgtggccaacgtccatcttgatgctctggagcacggcgacaccatcgccttcatgcacagcgtgcaggatggcgcggccagtaagagctacggtctggcggttgccgcgctggccggtgtgccgaaagaggtgattaaacgcgcgcggcagaagctgcgcgagctggaaagcattgcgccgagcgctgccgccacacaggtggacggtacccagatgtcgctgctttccgctccggaagagacctcgcccgcggttgaagcgctggagaatcttgacccggattcgctgactccgcgccaggcgctggagtggatctatcgcctgaagagcctggtgtag

SEQ ID NO: 192432 - DNA, 1434 bp, Klebsiella oxytoca
atgattactgtacaaattgccggagcgggtgcaggaaaaacgcatgggcttgcgtcacaaattgctgcgaagttagctgaagctgaaaccaataaaaagattcatgctttaacgtatacaaatactgcacgagataaaataaaatccgcattaaaaatgcatactgatggtgctcgagtcaatgtggataccgttcactctttccttcttaatgaaattatatttccatatgcatactacatattaggtgagaaatacaagtccatttcattggaacaattaccagaaaacccaagatataagaataatcgcattagtactttaaagaaaagaggtattatccatgttgaaaatgtatataccttagcaaaacaaatactagacaaaaccaacgccaagaacacgagcaaaaattcaaaagcaaaagtagattttgtccatggcttactacaaaatctaatttcatcaatatttatagacgaagtccaagacttagatgaagattgtttaagagtatttcacgtacttggcagcattggtatctatgtttatatgattggagatcctaaacaagccataaaacacccaaactctttcaataactatatagaagagttaaaaaaggaagatagtaatattgtgtttgagaacataaacaatataactagacgcgtaccaaattcatcattaagaatatcaaattatttctgctatgcagatcaacaacaaactaacattactgactatgaaggaagctttcattatatttataatgactgcatgaattttgaaaatgctattcaacagtgtatattgaatgacaagctagttataataaatcaaaaaaacaaattttacagcactaaccttgaaagagataacattatcccctatgaattagcaacaattcttgaggacgggccaaaaagaaataatagagaccctaaaatatatgttgattctattttgatagatttaacaaaaagaattaaacaataccctgatacgccatgcaatcaaatagctaaccatattattaagattcataatttatcctctcttctaggtggttataaaaatggatttgcactcttttattcatttacagaaagccttctcaataaagatgctactactaactatatagtaaaaagtatagaggctgttaaaggattggatagtgatattgtattctttatattatccaattcttttactcaatatttatgcgatgaacatatcgacaaggaaaaccattttaataaagagtggaaaaaattatatgttgcattaactagaagcaaggataaacttattttcgttttggataaaaggtttgtcaaagcggaaaacctagagaaatatgaagctttctttaagtctaaaaatattatcatgattaacgacgggaccgaatgccttggttggctgtag

SEQ ID NO: 192433 - DNA, 1836 bp, Klebsiella oxytoca
atggacatagtattatcaaaattaagtttgttgtataacatttgctatgtctatctcatctctttgtgttggaaaggagtcaatgtgtacattaatgaagttaaaattaaaaactatcgttgctttgagaaattcatcacaaaattgaatccattcacattaataataggagagaataactcgggtaaaaccaattttctcaaagccctatccttaccacttactatgggaaacttagacttctcacaaaaaagacttgtcatagctgattttaatagtgtatccgtggaaaattgtctcaaacaggcttttaattattatagattgacagcagaagagcagcgagaagaaaaaaacttcaaccccttaattgattcgattccgataatcgaggtggaagttaatttttgctgccctcaaaatagctatgaaatagccctaattaatagttttctaactgaaaaagatcaaaaaccagcattcaccattaaatacatatatgaacctaaagactcaaatattcctgaaaggataaaagaacttgttttatcaatagataagattgaggatctaaaatggcaactgtttcctatcgatacttatgaatatgctattgtaaccacatcaaatgataaatctgtatcctacgaaaaactgaaaaatcttgtagctaatatcatcggagcagaaagagatgatttttcagactctccagccatgagatcaaataatatcttaacgaaattattaatcaacgaattaagtaccatagaaaaagaaatcattaacttggcgtacaatgatttctttacgaaagttgaaagcgcaggaactttccaacgattattaaattctgatgcagcttttgataatattaaagaacatttaaaagatattggttgcatccctaacctaccaaatttaaaaaacattctttcaaatattacattaagctatggaaatgaattcttatatcaaaaaggacttggggagagaaatctcgtatttatattcttattttttacttattttaagaaaaacaacagtgaattcaacctatgctgtgtcgaagaacctgaggctcatttaggcgtcaataaattgagattaacaattgattttctagaaaaaagtgtaaatgaatcaaatactctattacaaacaattgtaacgactcacaatcctgcgattataaataaattaaaaattagtaatgtagttgctttttcaggaaataaggcagttagtttatcttcatttggtgaagaactgaacgactatcttcgcaaaagacccaatttcgatattctaaggttgatatatgctgacaagctaatattagttgagggtccatcagaagaaatgctgatcagaacacatatacatttaaaccaagataacttatatgatgttgaagtgatcagtgtcaaccaaaaaggatataggtctttcctagatatttggttactagtaaatgcacataatcacaataaaaaaatagctgtcatccgagattttgacgatcaagaaaatgcacaaaaagaacatgaatcatataaaggaaagcatcctcatatcacagtggaaacgacagtttgctatacactagaagatgatttagtgcatcacggtaataacattcataacattgctgaaagctttaaaattgcattagatgacgatgactctagtgacggagaaatcatttcgatgtttctcaaagatgataaaactggtggaatgttgacactttgtgatgcaatgcttagtaacgaaaatcctttgatcatcgagttgccgccacatattaacaatgtgctgggagccatgcaatga

SEQ ID NO: 192434 - DNA, 159 bp, Klebsiella oxytoca
atggcaaatgctaccaaaagcgccgcgacaaagcgcaacaaccgtaaaattcatgcccgtaaattcctggctacgccagagggtaaagcctggcttgctaagaagcaggaagaagaggcagagattaaattagcgcgagcggctaacgctatgttttaa

SEQ ID NO: 192435 - DNA, 261 bp, Klebsiella oxytoca
atgcagatcactgtcacatcccagaacgtagacacgcataagaaaaacatcagacgtgatgacctgaaagggttaacttgtttcatgcaaatggcacatagtgtgcgtgtgaccgcatcgcaagatcaccaagctatcgttcagagtgttttggggaaacctgatagcgataaccatcatcagttaccatcttattgggtctggaatgatgtggatgccgtgaagctggttgatgtgctgtacgcagtcgctaacgcatga

SEQ ID NO: 192436 - DNA, 474 bp, Klebsiella oxytoca
atggaaatgttaaaatacgcagtgttctcagattgcaaacagtatcgctattcgatagccagaacttgggatgaaacaaagccctatgcggtctttataggtctgaacccttcttatgctgacgctgaacaagatgatcccacgcttgggcgctgtatctcgtttgctcaaaggtgggggatgggcggtgtacgcatcgttaacctctttgcattcgtacatacaaaccgctttgagatgatgaaagctgctgatccggttggtgctgataatgatctctacatagttgaaacggtagttaatgctggcgtagtggttgctgcatggggcaatgagggacggcatttgcaacgttctgctgcaatacgtgctttactgcccgctgatacaaaatgctttaaaatcaatgcaacaggtgagcctaaacaccccctctatgtacatggtgacacagcgctaattccctttatttaa

SEQ ID NO: 192437 - DNA, 189 bp, Klebsiella oxytoca
atgggtatgattacgtgtgaagagtgcggggctgagtacaacgaagaagatggttactgcgtagcttgtgatgagtctacaccaccaccaggtgaacagtgtgaattttgcgataaccctgcaacttcttatgtacaagatcatccggtgtgtgatgattgttttgatgatgcctatcctattgattga

SEQ ID NO: 192438 - DNA, 204 bp, Klebsiella oxytoca
atgaaacgcttactttacgtgctggtactgctgccgctggcggctcatgcaggacaaattacgatgactcacccagaggaggaacagacggagaacggaaaaacgctatgcacgtatcagaacagcaattacctgttcacctacgtaactgaggggaaatgtccctatacgaaaaccttcaatacagaggattcggaagagtga

SEQ ID NO: 192439 - DNA, 168 bp, Klebsiella oxytoca
atgatcgagaagaaaaccaaattaccgccgtccacatcgttaatgatcccggatgacacattccagattctgttcaaagaagcaaagcgccgaaaaatgagcgtaagcgcacttcttcttgaggaatgccaaagtctggcggtcaaatactcgaaggctggcgcgtaa

SEQ ID NO: 192440 - DNA, 762 bp, Klebsiella oxytoca
atggcaaaaaccctcgcccagattaaggcagattaccagtacacagacaaagacggcgtaacgagagatcgcacactcaacattccgcattacttcaaagaaatcccatttatctattcccctcttcttgaaaaaggaagagtgaagttcagcgccagcatgcaaaaattgtattgttacgtagcagactgggagaaatccggcggtgtttgttacgaggaacaaagcgatcttgcaaaagtttgcaggttatctcgaccaaagacaaacgacctgatcgaacagatggaattaattggactcattaccagaaccaaaatcgaaggacggagaaataaggaattacgagcactcccgctaattgatgctcacattaccccaccagaagcgctaacagcgcagcctgtagtagtgtctgacgaagtgccagcccctgaaccagttaaggccgcagaggaacatttagttcctgatcgggatgacattccatgtgtctgggatgaccctgattatcaatcaacaccaacgatcctcattcagcaggacaagccagagcttccctggggcggtgtagctatttacaaaacgaatggcgatcccactgatgccgctgtggcatgggggctaaaagagacaatgggcgatgaggaagcagcctaccaacttctttccagagtggtatctgaatacaccggaaggacagaagtatttacaccgcgaacaacggcaatctacgacgattgcgacccaataccattttaa

SEQ ID NO: 192441 - DNA, 282 bp, Klebsiella oxytoca
atgaccaatctttatctactgaacgaagatacaaactttcaatttggctgcaatgacgtttgcagacgtatttacaatcaccttgccagcctacaccgtgagaatggaaaattccgttccagcgtcaaaaccctggcttctgccctgggctactcggaaagcggaatccgttactggctgttcctgatgcgagatgccaaagtgatcacgctaaccaggcgcagcaatcactatgattttgacgtgaatcacaacgttgctttcatcacctcgaaccactaa

SEQ ID NO: 192442 - DNA, 399 bp, Klebsiella oxytoca
atgagtaaaaaggaacggaacaccctcacccgtatagaacgggaaaatgtcaaccggatcggcaaagcctcgcaaatacgaacaaaacgcctttacgtcaaatcccttgaggaaatccctggggagcttatcgaaacagtgacagaagttcattcaacaccgccctctgtggaagagtgggccgcgttaaatgatctcctcgaatgttcaagcggcgttttttaccgccctcgcaagcgcaaagtttacacctacgatgatagccaacttcgccgctggcaatgcctcggattcacatcactacgccactacctaacatacaacgcaatgaacaacaccgtggcgggagttaggggctttgatgaactatttaacattggagacagctatacagaatga

SEQ ID NO: 192443 - DNA, 207 bp, Klebsiella oxytoca
atgatcacaaaaataacagaacaagaatactttcaagagcgaatgcagtacatgcaggatttagttaagcaagctgaatgggctgaacaggcacaagatgttaataaggtggaatacctcctcgatgtgctggcaacggaaatagcgccgtttcaagtggcgctgaacatcgtcaaagcaacaaagggacggctaacaaatgactaa

SEQ ID NO: 192444 - DNA, 303 bp, Klebsiella oxytoca
atgactaagtatgaaattgatgatgccctggacgaattccacgaacagctacacatgccacttcttgacgcagtgaacgccgtatacaaagcatgccctgagaacgtgcctgaaagcctttctgacgctggtaaaatgctcacccttgcagcggcagcactggaagggatcatcctctctgtggagcgtacagacagcctacacgaggatcagacactggtagaggatgttacacaattggcgctgtccctggcagcgtgtaaggatgaactgagcgatctgttacaaaaccaatccgcataa

SEQ ID NO: 192445 - DNA, 216 bp, Klebsiella oxytoca
atgtttctacttaataacaaatcgcgtgtactcaagtataaaaatgatgtgcttaccgtcaatcctcagatgattgagatggtggcgcagtatgctggttgtgaagtgtccgacgtgatcaaagcaatggaaacgtatttccctgacgaatcaccagaacaaaagccaaccattgacgatttgatcgcacgcaaagtaaaggactcaaccaaatga

SEQ ID NO: 192446 - DNA, 369 bp, Klebsiella oxytoca
atgattattgatcttgatacgctgttcccacagcgcctgtcactaacggatctggttagctattcaactgaccattttgcctctatcgagagcaagatttttgcctctcttcctgctgatgttgaatgcggcgatgtggtggacgctacaggcgctctctacacctccggcgctgatgcctttgtggtggtcagtgaatttgtcactgctggctctaataaggctgtcaacgtcctacgctctccggcgcgtggctctcttgtctgcatcaaatcggacaacctcaccgctgctgatggcgcacatgatgccgctgtagctgctctggctgctcaaggcttccagatgcgcgaattcttcaccagttaa

SEQ ID NO: 192447 - DNA, 1032 bp, Klebsiella oxytoca
atggctattttaggtcaaaactacgtggatctttctccactgttcaatctgaacccaacacgcaattatctgcttgcctcgctggggctgttcgatggcgtgggcgtttcttctcataaagtggcggtgagccgtcttgttgaggataaccgttctctgctcaattcgcctactgcaaggttctccagcgaacataacaccacggcacggcagaacgggaaagaatggctgatcgagcttccgtatttcctgcgtgaagaccagatcactccggcagacattcagggcaagcgcaagcctggcacggacacacaagaaaccctcaccgatttattcacggattacactcacaagcacagtgtagcgtttatgcgtactcgtgagagctatcttgcacgttctctgttctccggtacggtgaatacgccgaaaactgatgatgtgctgatcgattttggcgagctattcggcgtagcgccgatgaacaccacgcttgatctcactgctacagacaacagcacactacgtgcaattgatgacatggtgagccagattaccgaagcggcacaaagccaggcggcggcagtggagcgaatcattgtctttgctaagtcctcgttctatagcgacctgcgtttcagtcctgcgatggaagcggctttccgctacgtgtctccactggatgaaagcaacgttgtttaccagcgtcgtgacctcctgccaggtgtaagcaccttctcgatccccggctcaaatgtagacgtgatcaaggtgacagatccgctcctaatcgcacagatgggtgatgctgatgctatcgctatcccgcaatttgcggctggttccggtgtttaccaaaacatctacggtgctccttcgagttccttccagcttctggacgctaccccagcagaaacctatagctggagctatgaaagcgaacgtggcgatgtagtgaacgtgatttcggaaaattccgcgttaagcgttaaccacggattgggcttctctgttcacatcaaagcggcttaa

SEQ ID NO: 192448 - DNA, 1872 bp, Klebsiella oxytoca
atgcttgagatttctacaagtgttataaaaaataccgtcaccttcgttgtggacaagcagagtattgcggaggctaaaaaatccgcagatgaccttcaacgtcatttttctaagattaaagacccgaagattcgttttcaggctcaaaagcaacgtagaactaaagcgcgggaacaagtggctgatgcaaaatctgctttgcctaaaacgcccagtgacttgaagcagcagcaacgccaggcagaaaaggcagggaaagcgcaagccagggaagcggctaagattgccaaacgtaatgagacagccgacctgaaacggcgctcagccaacctccaaatgaaaggtatagccggaaaatacggcgttgatgccgccacacaacaccagtttgctaaattcgctcaccagcagactgaattgttccgtagcggtcagatcagtagtcagaagatgaactatgagctacgcgagagaattgccctcatgcgccgtgaggcggctttacaggctaaagtgacggcatctactcaggcacaggcggcagcactcaaacacgctaaacgcacggattacaaaggcgcggcggctggtatcaaagagaaggggctgaatgtgatcggcggcggtgctggttttattggtgctactgctgcccttgcggggggcgctggcatcctgtctcgtatccgtgacaaagggaatgagaatctggaacttgtccgtatgtccgaacgtaccaaactgaatcctaatgctgttaaggcgattgtcgcctggggacagcaacacggcgtagacagtgccagcgtggacaaaatcactgacggcttcgggaaagatacgcgcgagaaaatcagtgaaactctgatgaacagccaattcgatcagaagagtggtaaatggaaggggggcaactctaacattgaagaaatcctcaacaagtttggttggaacaagtcgcagctttcacaatacgaagacaaccctctggacttcctccaggccagtgttaacgaagggcaaagacgcggatactctgacggtgaactgtcccaccttctggaaaacattttcgacgatggcgctcattacctcgatctcttcaagaataacggtgaacaatttatttcgactctgaaaaagctggttgatagcggtcagacgctggacgacgagcagatcaaacaagcctacgcttacggcgatctgtccgttgcaatgggtaatctggtgaatggtgttgataacagtctattcactggctttatgaaaggcttcgctgacggtggcgacgagcttgttaaaaacacgcaagttatcaccgaatcggctggaatgcttggagagggattaggagatctggctaaacaggtgacgggctttgttggtgagatttccggcgtagtgtctgatctgaatgaagggcttcgctcccgtttccctcagtggttcactaatagcgataagccagcggcccaggcgctctacgatggtgctgtgggtggttctgcgaatgctacagcggattggattaaatctaagacgggcgtggacactcgcgattttggccctgcaatcatggattggttgggcgttggtggtggtaatgctggaacagcggcaaatcaatacagcctaaatggtgattctcttcgtggttctgcaatgtcactaaccagcggtaacgcgccagcgtacaaccttgcaccagtgtttaatctgacagtagcgccacaagtaccgctaacaattcagagtgacgcttcgcgccttgctgattatgtcgatttccaggcgagagcttcacaagccagcttcatgcaatcgctcacgttgtcagcattaagcggtcaatcatcaacgggtggctaa

SEQ ID NO: 192449 - DNA, 1284 bp, Klebsiella oxytoca
atgaaagtaaacaaagatgatcgctatctgataacagacgcttacggcgtgtattactgccggatagtgcttccggcgtatttgcatgacgctttcggaggaaagaagactcttgttcgaagcctcaagacaagcgatctccgtgtggcacgacgcaagcgggatgcaatagtgactgaatacgaacgagtgagagagttagccgcgccgccaaagcctgacagcattcaggatacgatcagctatctccaaagcgtggcgaagtatgccagagcgtcaccagtggcacaaagtgcagaaacaagaaatagcaggcgggaaccttccgcaacacccaataataacaaggctaacaagctcgcgccctcctgcccttcactggtaggtatgctggatgtgtatctgttacaaaatgccgatgttaagaagattggcacactgtcaaaagataaacgagccgttactgtgtttctgtcttatctaaaacgctccgacattcagctaagtgacattacccgtactaccgtaagcggatggtgtgactacatgaaagagaatggtagagccatacaaacacaggctaatttcctctcttcaatggctggaatcctcgatcttgccgctgcccgttatcacgatgccccgccgcttgaaaaaaaccctttcagaggacataagctcaacacagcaaagagcagagaaagttatgaagcattcaccgatcaggatgtgatcgcccttctgagaggcttacaggaagccggagagggggaattattcgatgtggcaagcattgccgcttacagtgggatgaggcttaatgagatttgctctatgaacggtcacagcatagtgcagatcgataatgtatggtgtttcaaaatttatgaaggtaagacttcaaatgcctgtagggttattcctatacattctaaaatcctgcctatggctttatctcgaagagataacccctacaacggctttttgttctatcgtgccagtatcaccaatcgtgaggacggcaagcgctctacgtggcacacacagcgatttacacgcattaaacgggctattctgcccgacgatgaaaacaaagtgtttcactcgtaccgccacacctggatcagcaagctaaacgccgctggagtaccggagagccgtgtggcaattttggcgggtcacgcaccaggacaaacggagagtttcaagacgtattctaagagtgttcctgatcgtattgtgaaagaattgcagagttatgttgagctaataagctacaaatga

SEQ ID NO: 192450 - DNA, 948 bp, Klebsiella oxytoca
atgaaaaccaaaacctccgatgctttactggctgctgaggtgagccggcgtggtttaatgaaaaccacggcgattggcgggctggcgatggccagcagcgcttttaccttacccttcacgcgcattgcccaagccgcagacaacctcaaccccgccagcgaaacggtcacctggagcgcctgtacggtgaactgcggcagccgctgcccgctgcggatgcatgtggtgggtggtgagataaaatatgttgaaacggacaataccggcgacgatagctacgacggtctgcatcaggttcgcgcctgtctgcgcggccgctcgatgcgtcgacgcgtctacaacccggaccgcctgaaatatccgatgaagcgcgtgggcaaacgcggcgagggcaaattcgagaaaatcagctgggaagaagcgttcgatactatcgccagcaatatgcagcgcctgataaaagagtacggtaatgagtccatctatctgaactacggaacgggaaccctcggcggaaccttgactcgctcatggccaccggggaaaaccctgattgcccgcctgatgaactgctgcggcggctatctcaaccattatggcgactactccaccgcgcaaattgccgcgggtctgaactacacctacggcggctgggccgatggcaatagcccgtcggatatcgaaaacagcaagctggtggtgctgtttggcaacaaccccggggaaacccgcatgagcggcggcggggtgacctactacctggaacaggcgcgggagaaatccaacgccaggctgattattatcgatccacgctataccgataccggcgccggacgcgaagacgagtggatccctatccgcccgggaaccgatgccgcgctggtctccgcgctggcgtgggtgatgattaacgagaacctcgttgaccagcctttcctcgacaagtaa

SEQ ID NO: 192451 - DNA, 222 bp, Klebsiella oxytoca
atgaaaattatcagtaagcgtcaggcgatggcgatataccgccagcatccacagtcccggttgttccgcttctgtaccggcaaatacgcgtggtccggcagcatctgccactatgccggtcgcgaggtggacgatatcagcggtgtactggccgtattcgcagagcgccgccaggaccgcaatggcccttatgtcgtattgcgcagcgttacgttgaattaa

SEQ ID NO: 192452 - DNA, 390 bp, Klebsiella oxytoca
atgcaaaccaaatcatcccctttaatgcgggcggcatcgtcacgtccgtctcccgtgagtgtctggcagaccctgctgacctgcctgctggaacagcactatggccttacgcttagcgatacgccgttcattgatgaacaggtgattcagcagcatatcgacgcgggtatctcgctggccgatgccctgaattttattgtagaaaagtacgaactggtccggactgaccggccaggcttcagcatcctgacgcagtctccgtttatcacacccatagatatcctccgggccaggaaagcaacggggctgatgaaccgtgacacgtataaagaggtgacggctattaccagagggcaacatccgcaggtcagcgctccaggcaagcgatga

SEQ ID NO: 192453 - DNA, 858 bp, Klebsiella oxytoca
atggccggaaataatgttaatgaatccgaagtgttaaccgggcacactgatgtgatttgctccaccagcattgaacgtattgttacaggccgtaatgctgcgctgacacggattcaaagccttatcagtgaacttgatgatatctccattctgacccacgatatcggcggtggtacagcacaggagtggggaatgcgggagggctatcgctacgattgctggttcacggaaaaaaccgataaagcaatgaaagcgatgacccgcaatattgatcgccgcatctggcgagagctgatgaataaatcaggcatgctgagcctgatggatgctgatgcccgtgacgagtggcacaaaagcctggagaaagacgatatccccgcgatatctgaagacaatatcctcagtactttccggcaactgcaccagagtaaagatgaggtatttgaacggggagttatcaacgtcttcaaaaatctgagctgggattacaaaagcaacaacccgtgcaagtttggaaaaaaaatcatcattaatagtctggtgaagtacgataaatggggctacagcctgagctggggctggcagcgcgatcgattagctgacctggagcgtgtactgatgctcctgaatggaaagcccatccccgacaaccgcgccgatgttacctgccgtctaggcgattatattcatgagaacaggaacagcaccagctatgaagatgagatgttttctattaagtactttcagaagggaacagcgcatatcacatttaagcgggcagagctggttgataagctgaatgacatcatcgcccaccactaccctggcacgctggcatccatgcagtattcaggatga

SEQ ID NO: 192454 - DNA, 183 bp, Klebsiella oxytoca
atgtcagtaaataaaatcgaagtcgataatctggttcgtgacttaaaggcccttgttcaggctgggattaatccatctgaagcaatcaatgcgctgaaagtgatcgagatgcgccgcatcaattccaaccttgaatacctgggatcaatcatggagcacgcaccgtggaatattaaaagttaa

SEQ ID NO: 192455 - DNA, 183 bp, Klebsiella oxytoca
atgaacgctagtgatttcatggaagagccggagctgttcgctcttctgggtaagaaaaaaacagccatatggcgtttacgcaaagatcatggattcccaaacccgatactcacctatccctctcgctatagccgcaaagctgtaatgaaatggcttgaagatggtggaattaaccggaggtaa

SEQ ID NO: 192456 - DNA, 318 bp, Klebsiella oxytoca
atgagcaacatcacatggggcctgcagcgggatattacgccacgcctgggagcccgtctggtgcaggaggggaaccggctgcattatttagctgaccgggccagcatcaccggtaagttcagtgacgccgagtgccggaagctggatgaaacattcccgcactttatcagccagatggaattcatgttgaccacaggtgaaatgaatcctcgccatgcccactgcgtcaccctgtaccacaccggttttacctgcgaagccgatacccttggcagttgcggctatgtatacatcgccatttatcccactcaacgctaa

SEQ ID NO: 192457 - DNA, 222 bp, Klebsiella oxytoca
atgaaaattatcagtaaacgccgggcaatgacgatataccgccagcatcctgagtcccgaatctttcgctactgcaccggaaaatatcagtggcacggtagcgtttgtcattacaccggcagggaaattccggatatctcaggtgtcctggcggtatacgccgaacgccgccaggaccgcaacggaccgtatgcctgcctgatgagtatcatcctagactga

SEQ ID NO: 192458 - DNA, 459 bp, Klebsiella oxytoca
atgacaacagcgacacagtacgaccttgtacccgctaacgaatccgatttcaaactcacagtaacgcaggttcccgacgaacagcgtctcgatttctggacgcagcactttggcgctatcccacaatggataacgctggaaccccgtatttttgcctggatggaccgcttctgtgatgagtacaacggtggtatctggtccttttacacgctcagcaatggcggtgcgtttatggctcccgatgctgacagtgacgataaatggcatctgctcaacagcatgaacggcaatgatgcggaaatgagcgcggaagccgccggtatcgctgtctgcctgattgaatacagccatcacgcctgccgtacagagtgtgacgcaatgaccgcgtactattaccgcctgcgggactatgccctgcagcatcctgaagctcaggccattctgcgcatcatcgactga

SEQ ID NO: 192459 - DNA, 240 bp, Klebsiella oxytoca
atgcctgaatccccgttactaccgcccggttctttcacccggcagcaggccgaagccattatcagtcggtatcacaatgtcaccatcgaagatgaccatcacacgcattttcgtctggttgtgcgcgacgatgatggcggcatggtctggcgcgcatggaactttgagcccgatgccggtgcaggacttaccccatatatccgacgctatggcatccgcaggtcgttactcaccgactga

SEQ ID NO: 192460 - DNA, 474 bp, Klebsiella oxytoca
atgaaaatcataacctgtttgccagccctgctgtctctgctggccccggcctacactcatgcaacggtgaccgaacaacagtggggcgaatggtacggcaatacgggtggtatggagtttgcgctcagcagcggcaatcaggccggagagaagctgactatcagttgcagcaacaaaaagatggttgttgcctggcagcttccgaaggaggattaccgcgccacctctgatgaaggaatgaacgaggtgtatcttctgataaacaatgaaaaatactcgcttgagaatgaaactttgcttcctggcgaggccgttccggctcaggtggcttttgaagcgctgaagcacacaggagcaaaagacaaactggccttcaccgctttacagtcaggagaatcgaaaccgttcagtgcccgtggtcttcacgacgcgctgaaagatatcatctggcaagattgtctcgatcaaccctga

SEQ ID NO: 192461 - DNA, 579 bp, Klebsiella oxytoca
atgaaactgattaaattattacctctgctggcaatggttgctggctccagctttgctgcatcaccggagagtacggtcaaagcatcaggctgtctggcagtaaacgatatgcttgagaatctcaattcgcgggagtcctgtgtttcagtagatatcaccagaacattatcagaaggccgttatctggcggttgctaacctgagtaatggcaatatctacccggtccgcatgaccctcagtgacggtgtcattaccgcacgtccggatacggatgaaattgataagctcaatcagcagcaggcgcagaaacgaagggaagagcagttgcagaaaaagctcgattattacaaagcccacccacagaaagagagcgggttcgacaaagcgaaaaaggcacatctgaatcttactcaatatcactcagccgcctgccgggccattggcgaaaaagtatgggattccattcatgaaaatgtgtcatgccagatgattgaaaatgcgcagcaggtcagtgatacagagcaaacgggaacggccattctgagcgggcaggcgcaagcaaatttaagataccggtga

SEQ ID NO: 192462 - DNA, 702 bp, Klebsiella oxytoca
atgacacaggcagaacgtcgccatgaccgactggcggtcaggctgtcgctgataatcagccgcctggttgccggggaaacgctgagcgtgcgtaagctggcggcagagtttggcgtatctgttcgcacgctgcggcgtgattttcgtgagcgactgatgtatctggacctggagtatcagtccggatattgccgcctgcgcaccgctggcagtgagatgcagatggtgcctgatgtgcttatctttgcccaccgcagcgggctggccgggctttttccgggtcttgaccgccgactggtcaatgcgttgttgatgtgtgatgaagctccctgcgttataccacctgccagtccggcgacctcaccgtcagagccgctgtcattctggcgactggttcaggcaattactgaccacagaaaagtcatgctgcttgctgacggacagcgctgtgagcgactggctccgtgccggttactcatccatcagcagacctggtatctgattgccgagcataacggacatattgccgtgttcacgctggatgaaattcatctggttcaacccctgcaggagtctttccggcgtaacgacagtttatgtcgtctggctgaagacccggtgttcattcaggctttacctcattttcgatttattcagcagtcactgcttgcgtttgttccggctgataacaggccggaatag

SEQ ID NO: 192463 - DNA, 864 bp, Klebsiella oxytoca
atgagtaaacaagaaggtatcaatgctatcagcgaggtgatggccgtgctgcccgcgcaattgtctgacacaatcctgcaacatatccacctactgaccggctacgaaccagtaattggcattatgggcaaaactggtgcaggtaaatccagtctgtgcaatgccctctttgccggagaagtgtcacccgtcagcgatgtgaccgcctgtacccgtgagccactgcgctttcgcctgcaggctggcgagcgcaatatgacaatcgtggacctgcccggcgtgggcgaaagtagctcacgcgatgcggaatatgctgcactttaccgtcagcaacttccccgactcgacctggtattgtggctgattaaggctgatgatcgggcgctggcggtggatgagcatttttaccgtcaggtgattggtgtggcataccggcaaaaggtgctgtttgttatcagccagtcggataaggtcgagcccaccagcagtcacggtcaattatccacagcacaaaagcagaatatcaaccgcaaaatctgcctgctgcatgaactgttccagcctgtccatccggtatgtgccatttctgtccgggctaagtggggattgcggatgatggctgagcggatgatcaagtgtctgccgcgcgaggccagcagcccggtggtcgcgcaactgcagtcttcctttcgcacaacagcagtccaggaaaaagcgcgtgacgattttagtgaaacggtcggtgcggcgctggatgcggtgagtgccctgccgctaataccggctccggtgcgggcagtcatacgcgcggtacgagatacagtggtgtcggttgcccgtaccgtctggaattttttcttctga

SEQ ID NO: 192464 - DNA, 507 bp, Klebsiella oxytoca
atgagtacatttgataaagaaaaagatggtattcggcagacaaggcataaaccagcggaactggacgccattgaccgaaaaatattaggtgccttagcggatgacgcaggccgcagctatacggagttgagcgagattgtgaatttatcggcccccgcagttcacgatcgcgtaaaacgactgaagcgtgatggggtaatcaagggtaccgtggcggtactggatggctgcaaactgggacggacccttttaacgttccttgttatcgataccagcagctatcatgcgacacgtgcccttttgcagttcaccaaccgcaaggaagtggaagaattacataccgtcgccggtgacggctgcgtctttatcaaagtgcgggccgccgataccgaatcgctggaaaatttcctgatggagattcagagccttgagggtgtacgctctgtgcgcagctatatcgcgctttctacgttcctggaacgtggcccttcacctgattcagcttga

SEQ ID NO: 192465 - DNA, 1176 bp, Klebsiella oxytoca
atgcctatcgcacttttcgcccttgctgtcggagcattcggtatcggtctgactgaatttgtcattgccggaattctcccgcaaattgccgcagaatttagtgtcagtattcctaaagcgggattgatggcgacttcctacgcgcttggcgtctttgtcggcgcaccgctgttaaccgtgctgggcgcaagagttcctcgtaaggctatgctgatcgcgttagcgggaatttttactctgggcaatgttattacagcacttgcgccgacgatggcggtagcggttgtgggtcgtattatcacctcatttaatcacggagcgtttttcggtataggttcaattattgctgcatcgctggtcgcgcccggtcgtcaggcaagtgccatcgcctttatgttttcggggctgacattagccaatcttctcggcgtgcctgccgggacgtggcttgctcagacatttagctggagactggtattctgggtaattgctggtatcggtctgctgacaatggcaagcgtagccatactggttccacacattgcgaaaggtaagcctattgctttacgtaacgagcttcgggcctttgttgatccgcaggtgctgctggtcatggggattactattttcggcccggcagcctttttcacgtctatcacctatattgcgccgatgatggttcaagaggccggtttctccgaaggcggcgtggcggggttaatggtgttgtttggtctcggacttgccgttggcaactggattggcggacgatttgccgatcgctccttgtttggcacgcttttcgtcaccctcgcggctcaggggctagtactactggtattttgggtgggagtcgaacatcagtggattgccggaatttcagtattcctgatggcggcattcggctttgcgacagtatcgcctattcagaagttggtaatggaacgggcaagccaggcgggtgcccccacgatggcagcatcggtcaatattggcatgtttaatctgggaaatgcgctgggcgcatgggctggcggggtaactattgccgcagggtttggtctggcctcaccgaactgggcgggcgctattctgtcctttattgctctgggcttagcttatcttgcctggctcagtgctcgtaaaggatatgtattaaatgctgattcttactga

SEQ ID NO: 192466 - DNA, 255 bp, Klebsiella oxytoca; identical to SEQ ID NO: 178776

SEQ ID NO: 192467 - DNA, 1122 bp, Klebsiella oxytoca; identical to SEQ ID NO: 134384

SEQ ID NO: 192468 - DNA, 867 bp, Klebsiella oxytoca; identical to SEQ ID NO: 134385

SEQ ID NO: 192469 - DNA, 726 bp, Klebsiella oxytoca; identical to SEQ ID NO: 134386

SEQ ID NO: 192470 - DNA, 624 bp, Klebsiella oxytoca; identical to SEQ ID NO: 78775

SEQ ID NO: 192471 - DNA, 219 bp, Klebsiella oxytoca; identical to SEQ ID NO: 134388

SEQ ID NO: 192472 - DNA, 549 bp, Klebsiella oxytoca; identical to SEQ ID NO: 78777

SEQ ID NO: 192473 - DNA, 228 bp, Klebsiella oxytoca; identical to SEQ ID NO: 78778

SEQ ID NO: 192474 - DNA, 2112 bp, Klebsiella oxytoca
atgagcgacaagtacgtgatggaatccctccttcgcccggcggttgaactgtattccgctgcggcggcgggtagcgcaacctttatttgccttacggccccttgggctgtcgcgctcgcaccatcggtcagttgggtgaccgccgcggggtttggtgtactggcgctgaagcgtacatctgaggggatgaaaatactccgttaccgccaaaacattcgccgtttgccccgatatgtactgaccagcgagcagatccccgtcagccagcggcacttgttccttggcaagggcttccagtggtctccccgccatacgcagcgtcttctggaagcgaggcgtccggagtgtgaggtctacgtacaaccttctgttatttatcgcctggcacgcgatctggaaaaaaagatggagtacagcttgccgtggttgtgcaggctgacacgaactgattcggcgctcaacccgtttcgcccgttgcctcctgtaggaggaagccccatttaccatggtgtggaactggatgaaactacggtcacctatgatctcggagaacgtgtagggcatacactggttatcggcaccacacgagtcggtaaaacccggcttgctgagttacttatcacacaggatattcgccgtaaaaacgctgcaggcgagcatgaagttgtcatcgtgtttgacccgaaaggagatgccgatctgttgaggcgaatgtatgccgaggcacaccgtgctggtcgtcaggataacttctgggtgttccacctcggatggccagatataagcgctcgctacaatgccgttggacggttcagccgtatctcggaagtagcatcacgtgttgcaggacagctctccggagagggcaattctgctgcatttcgggaatttgcttggcgatttgtcaatattattacccgtgcgctggtcgcacttggccagcgtcctgattacggtctcatactgcgttacgtgacaaacataggtgaactgtacgaaacctatgttgagaatatgctgagtgaaaaggcaccacagttgctgagtacagtcgaagcgctgttaggtagcggtataagcgagaaggatctgccgcgtcacatgcagggcaggcctaatggcatgaatatctgggctattgagcaggtactggccagcgaagaaggaaaaaaactgtgggacccggtgctggatgggctacgtagcgctgtgcaatatgatcgaacgtatttcgacaaaattgttgcgtcactgctgccgctgcttgaaaagcttacaactggtaaaacggccgcattgctggcacctgactatacggacctgaacgatccgagaccgatcctggactggcataacattataaaatcgcgcggcgtggtttatatcggcctcgatgcactatccgaccctgttgtcgcagcagcagtcggcaacagcatgttcgctgatctcgtttccgaaggtggacacatctataaattcggtctcggtgatgaggatggcagaaaaagttcgaaagtggcgataaatcttcactgtgacgagtttaacgagttaatgggtgatgagtttattcctctcatcaacaaagggggtggtgcgggcttccaggtgactgcatatacgcagactctttcggacatcgaggcccgtataggcagcagtgctaaagcgaatcaggtagtggggaacttcaactcattgataatgctccgtgtgcgtgaaaaaaacactgccatgctcctgaccgaccaattaccggaagttgacgtctaccagaaaacccttacatcgggtgtcactgacgtatcccggccgggagagggtactgattttaacagtaacgttcaggaccaggtcagtctggttaaagtcccgatgctcaacccttcagacgttatcaacctgccgaaagggcaggcatttgccctgcttgaaggagggcgcctgtggaaaatcaggatgccgttgccggctgataacgacgatccttacatgcccgcgagcctgaagcagctggctgacaacatggagcagaattaccgaactggagaatcctggtggacaggcggtgatgcggcatattcgggggggcaaaatgtctcagcatga

SEQ ID NO: 192475 - DNA, 690 bp, Klebsiella oxytoca; identical to SEQ ID NO: 134392

SEQ ID NO: 192476 - DNA, 318 bp, Klebsiella oxytoca; identical to SEQ ID NO: 78781

SEQ ID NO: 192477 - DNA, 246 bp, Klebsiella oxytoca; identical to SEQ ID NO: 78782

SEQ ID NO: 192478 - DNA, 366 bp, Klebsiella oxytoca; identical to SEQ ID NO: 78783

SEQ ID NO: 192479 - DNA, 381 bp, Klebsiella oxytoca; identical to SEQ ID NO: 134396

SEQ ID NO: 192480 - DNA, 660 bp, Klebsiella oxytoca; identical to SEQ ID NO: 134397

SEQ ID NO: 192481 - DNA, 900 bp, Klebsiella oxytoca; identical to SEQ ID NO: 134398

SEQ ID NO: 192482 - DNA, 1527 bp, Klebsiella oxytoca; identical to SEQ ID NO: 134399

SEQ ID NO: 192483 - DNA, 264 bp, Klebsiella oxytoca; identical to SEQ ID NO: 134400

SEQ ID NO: 192484 - DNA, 417 bp, Klebsiella oxytoca; identical to SEQ ID NO: 134401

SEQ ID NO: 192485 - DNA, 2817 bp, Klebsiella oxytoca; identical to SEQ ID NO: 134402

SEQ ID NO: 192486 - DNA, 408 bp, Klebsiella oxytoca; identical to SEQ ID NO: 134403

SEQ ID NO: 192487 - DNA, 408 bp, Klebsiella oxytoca; identical to SEQ ID NO: 134404

SEQ ID NO: 192488 - DNA, 972 bp, Klebsiella oxytoca
atgaaatctttctccttccgcccacgtcgactggcgatcgccacattgctggtttgttccggcaccatggccagcgtcaatacagcgaatcttctggccagcgcggcaagtacagactgtatcagctggcgtgtcagtggtatctgctactggttattgtgtactccatttggttgcacggtgaaaacctcggtaaaagtgacgcatttcattccggaggctgtggtatcggcttacctcaatcccggagataacccctggactgaaatggccacagttagtgacgccgccagcggtgctgaaggttccctgctggaaagtgtgacgggcgtgagtacggggggcggtcgtcaggagatgaaagctcccggggaacgtaagcagaacctgcatttctattacggcgacgcctggggccatccagctacgaaaatcattggcggtatggtgccgggctattcatgcgacagcgctgctactcctttcatgccctatttcaacagctcactggatgctctggtctggcgaacgggcgtcccggagaccctttatcccgaagcactcatccccgggcaacgagaaatcggggaaaccacatccggcaatatgtgggggaacgtttatccacgtagcgggtttgtcacccagacagacagttacaaatcagcagcggttgtagttcagcgtgtcgctgacgtcattacccgctccggccagctccatgtctacaacccccttacgggacagaagtccccgggttactggccacccgagccggtaaaagaaaataccggcacgaaaaaccacaaatggcagcgactttcgcctcagttgtcccagacctgtgcagtgtttcccgacaccaatggccagattgcccaggacggtaactatgcctgggcattgtggcaaccgtacagctgctgcaaacgtcgcggccagacgttcctttccagcaccgatttctcataa

SEQ ID NO: 192489 - DNA, 1395 bp, Klebsiella oxytoca; identical to SEQ ID NO: 134406

SEQ ID NO: 192490 - DNA, 339 bp, Klebsiella oxytoca; identical to SEQ ID NO: 134407

SEQ ID NO: 192491 - DNA, 1542 bp, Klebsiella oxytoca
atgacagcaaacagttttctggaatattttctcgttctctttggctgggtaatgaacaatgccatgtggagcattctcagcaatacgggactttttgcattgccactggtggtcagggttcttggcgtctggctgaaagtgagggaggagggggctgacgaggggaacaaagggctccttgcccttccgcgaatcgaacatgcactgtatgtgtcttatcttgtgatgttcttttgctgtattccgctgttgccggttgatatcagcacaatcaagttcgacagctcgcgcgctaaacagtgtggcgtcagtgtgccgacgccacagaattccggctacaagggactcgttaatgattttgacggtcgtacggccgaggttccagtatggtggtatctcctgcatatgatgtcgaagggtacaacgcaggcaatgattgcatcaatcccatgcggtacgaatttgcggcagatgcgttttgacgttcagaacacgaagctgcgtgatcctgtgttgctgcaggaggtccaggaatttgcagatcaatgttactcgagagcatatttcaggttgaaaaacagcaacagccagctcagtgatgccaccatcaactctgtgggctggataggtagcagctactttctgaatactaccggatattatgactactacacggctatgacgccacgtagccagtggccttacaacagcagccgggacagtggctatccagatactggcgcaggtggatatccaacatgtaagacgtggtggtccgatggtacttccgggcttcgcaaaagagttctggccagctttagtgataacacacgtaaggagatgcaacgccagttccccggacagcagtgggaagaaatcgccctacgctggcttgtcagcccacgtaacgcagatctgtccgggggcggtaccacttatgctgttggcagtagcgatacaaccaccggagtagttggtaatcttacacgccttacctcgtctattggtcttggactgaaacaggccgaagcgttacctggttttgatgcattgaaacaggcattgccaatgattcaggcattattgttgatgatggtaatcacggtcataccggcattactgatgttcagcgcctacgatccgaaaactatttttactatctccttcgcgttattcgctcttcagttcatcacgttttggtgggagctggcaggctggcttgatgacagattgatcaccatcctctatgacaatatggctgagcaggggattgcaaacagctcggtgcctttcgcggctttctttagttcaacggctgatggatggattatgaacctggttctggggatgatgtacttggtatttcccgcgttttgggtaggaatgcttagctggattggcgttaatttgggaacagcaataactactggattagaaaaaggtggttctcaaccacagcaggcgggagccgaggctggaagaggagctcagcagattgttacagataaagtcgggggagctataaaaggaagcttcaaatag

SEQ ID NO: 192492 - DNA, 291 bp, Klebsiella oxytoca; identical to SEQ ID NO: 134409

SEQ ID NO: 192493 - DNA, 3120 bp, Klebsiella oxytoca; identical to SEQ ID NO: 134410

SEQ ID NO: 192494 - DNA, 285 bp, Klebsiella oxytoca; identical to SEQ ID NO: 134411

SEQ ID NO: 192495 - DNA, 819 bp, Klebsiella oxytoca; identical to SEQ ID NO: 134412

SEQ ID NO: 192496 - DNA, 792 bp, Klebsiella oxytoca; identical to SEQ ID NO: 134413

SEQ ID NO: 192497 - DNA, 1275 bp, Klebsiella oxytoca; identical to SEQ ID NO: 134414

SEQ ID NO: 192498 - DNA, 1188 bp, Klebsiella oxytoca; identical to SEQ ID NO: 134415

SEQ ID NO: 192499 - DNA, 216 bp, Klebsiella oxytoca; identical to SEQ ID NO: 134416

SEQ ID NO: 192500 - DNA, 891 bp, Klebsiella oxytoca; identical to SEQ ID NO: 134417

SEQ ID NO: 192501 - DNA, 429 bp, Klebsiella oxytoca; identical to SEQ ID NO: 134418

SEQ ID NO: 192502 - DNA, 762 bp, Klebsiella oxytoca
ttggtactcaatactgaagagcctgaaggttcctgtttcgccaatcttttcgatcgtggtgaagattttgcggtactgcttgtagagatctcacgtgcacagggagccctgaccggggggaatgtccaggaaacactcaggctggttcgcaaactgcgaaaatcgtttaccggtcttgctgacatcgacttctttccgggagaggcgcagcgccaggcggacaatgcactacaggaactggagatggcctgctcgcggatattgtcacctgatgaacctcatatggtgatcggtaccatcccgaagttacgcataagtgactatcaacagcgagtctgggcaacacgacggcgtccctgggtggacagactggcctgtgcgtggttaatccggcgctttattgatccccgggcaaaatttctctggatgagcaatccggcggaatgtccggccggagctatcgggtttgacttcgatggggccacattcagtcatgtggataacagggtaacttttgaagtgctgctggctggtttttctctggaacaggaggggctttcacgcaccgggatactcgtgcattaccttgatgtcggcggtgcccagcccccggaggctgccggggtggaaagtattctggcgggattacgtgaaacctttaccgacgatgagcaactgctgaatgcggcctgtcccatttttgacagccttctgctgacctacagcaaaagcgcctccagcgacgataagccgggtcattaa

SEQ ID NO: 192503 - DNA, 1434 bp, Klebsiella oxytoca; identical to SEQ ID NO: 134420

SEQ ID NO: 192504 - DNA, 759 bp, Klebsiella oxytoca
atgacaacattactgccgggggaaaccctggcagcctctctggcggaaagagtcagtaatacatggcaaaaaataatcactcgtcgctctgctcaggagacgataacaccgggctggatcttgcagtctctcgggcttcagagtggctcaacggaattgcggagagccatttttgaactggtcaggcgaatgccctatcagctcggttcatggaatgaccaaagcatgagcctgtttgagcagggttttggcgattgtcgtcataaagccgccgcggccgaacgactgctggttgccggtggtattacggcaaggcgaaaactggtgcagtttgactgggctgatttacccattcctccggaaatactggccattttgccgcaaacacaggggtttcatgacaccgtgacttttgagttagacgggaaaacattcctgtttgatgccacctgggatatcgctttgcgcggtgcgggcttccctgtgatgccttcctgggatggtaactctgatacctggtcagtgacttcccggatgtcgacacagcaaactgtacagatgccgcagcccgggcaggacatttacagcgcgaaccagatgagctggccgcagcgcgagaaaaccatggcattcaatcaggccctgaacagctggctggaggatattcgggctaaccgtgacgactggtgcaccatcatccacagcgatgttgaagccacccgtttgagcctgaaaacctgccttgggcaattgagttaa

SEQ ID NO: 192505 - DNA, 690 bp, Klebsiella oxytoca
atgtataacactgatttacctacccgtgcagaattgccgtcggcattcaaactgatgcaatcaaccatcctggcggcgattgttgcgctgacactgctgatcactatcgtcatgccttccgaatatggtatcgatccgacaggcgtaggacgtttgctgggtctcaagcaaatgggagagataaaaacacaactggctgctgaagccgttgcagataaacaagcaagtataggtcaatgggggcagtcaacgaccccggaaaatgaacgcccggtgccggataatccgccgacgatcacacaaaacaactacccggaacttagcgcaccagtgacaacccgttcgccggaagtatcaacaaccggttctcaacgcaatcagttgctgattacgctgaaaccgaatgaagcggctgaagtgaagatggaaatgcgtaaggacgcccgggtggcttttcagtggatgagttccggccctgtaaacgttgatgcgcacggcgatccggttaacgcaccgaaagggttttaccacggctatggcaaggaccggcagataacctccggagatggggtattgcaggccgcctttgacgggaagcacggctggttctggcgaaatcgaggttcgcagacgatcacgatccaactggataccaacggggagtacatgagtatcaagcgcgtcatctga

SEQ ID NO: 192506 - DNA, 738 bp, Klebsiella oxytoca
atgaataccagccttgatatgcagggccggttgagcggtggcctgctttctgctcaggcgcgttcagcttgtctgttttttttgttgttattgctgttctacagccagggcgcgtctgcccacggcgtggcggagggcgacaaagggtacatccaggaaatcaccgggattaacatcattccgtttatctatcttggcgcgaagcacatggtgaccggttacgatcacctgctgtttctgtttggcgtgattttctttctctacaaaatgcgcgatatcgggctgtacgtcagcctgtttgctgtcgggcactcaacgacgctgcttatcggcacgttcttcaatatcagcgtcagcgcttatcttattgatgccattatcggtctgtcagtggtctacaaagcacttgataaccttggagctttccagcgctggtttggttttcagccaaacacgaagctggccacgctcatctttggtttcttccacggctttggtctggcgaccaaaatcaaggagttcgaaatctctcccgatggccttttcgtcaacctgattgccttcaatgtcggggtggagataggccagctgctggcgctcagcgccatcctgatcatcatgagctactggcggcagacggcgggctttttccgccatgcctacaccgccaacgtcgtcatgatgagcgccggtttcctgttaatgagttaccagatttgtggctacattttagcctga

SEQ ID NO: 192507 - DNA, 372 bp, Klebsiella oxytoca
ttgactgtgtttatcagccgtgaagtcatttccagaatcgtgcttatcatcatggctgttgccgtgctgagcagttcgcttatggcaaaaccacaggctgtctacaacgtccaggatacaacgtccatcagtgaccatcagcacgacagcgatgaaccgctgaatgagcacgatccgttgctgttccactcgcacggtaacgtgcatcacctcaatgccgatcattcccacgatctgaacaaactcttcacactgactgctttgcaggcctggaacgcaggcatgcgggcgatgtttgcgctgagttcagaacaaatcctgcggatgcccctggccgcccccgaacgccctccgagatccctgattgcctaa

SEQ ID NO: 192508 - DNA, 417 bp, Klebsiella oxytoca; identical to SEQ ID NO: 134421

SEQ ID NO: 192509 - DNA, 366 bp, Klebsiella oxytoca; identical to SEQ ID NO: 134422

SEQ ID NO: 192510 - DNA, 309 bp, Klebsiella oxytoca; identical to SEQ ID NO: 78834

SEQ ID NO: 192511 - DNA, 624 bp, Klebsiella oxytoca; identical to SEQ ID NO: 134424

SEQ ID NO: 192512 - DNA, 993 bp, Klebsiella oxytoca; identical to SEQ ID NO: 134425

SEQ ID NO: 192513 - DNA, 954 bp, Klebsiella oxytoca; identical to SEQ ID NO: 134426

SEQ ID NO: 192514 - DNA, 684 bp, Klebsiella oxytoca; identical to SEQ ID NO: 134427

SEQ ID NO: 192515 - DNA, 279 bp, Klebsiella oxytoca; identical to SEQ ID NO: 134428

SEQ ID NO: 192516 - DNA, 648 bp, Klebsiella oxytoca; identical to SEQ ID NO: 134429

SEQ ID NO: 192517 - DNA, 546 bp, Klebsiella oxytoca; identical to SEQ ID NO: 134430

SEQ ID NO: 192518 - DNA, 1218 bp, Klebsiella oxytoca; identical to SEQ ID NO: 134431

SEQ ID NO: 192519 - DNA, 1017 bp, Klebsiella oxytoca; identical to SEQ ID NO: 134432

SEQ ID NO: 192520 - DNA, 561 bp, Klebsiella oxytoca; identical to SEQ ID NO: 134433

SEQ ID NO: 192521 - DNA, 1539 bp, Klebsiella oxytoca; identical to SEQ ID NO: 134434

SEQ ID NO: 192522 - DNA, 954 bp, Klebsiella oxytoca; identical to SEQ ID NO: 134435

SEQ ID NO: 192523 - DNA, 783 bp, Klebsiella oxytoca
atgagtgaatttttgctgaaaccccggattcgctttggtcaggatgcgcttgccatcctgaacgagctgcccgcccgcaacgtgctgctggtcaccgaccaggcgatggttaagtttggcctcgccgatcgcgtcacgcagatcctcgatgcgcgcggcatcgctttccaggtctgggacgacgtggtggccgacccggatatcgccaccgtggtgcgcggtatgaagcggatggataacagctatccggatctggttatcgcgctgggcggcggttcggtgattgatgcagccaaagcggttattttcgccctggcgcaaacccgtccggacgctcaccgcgagccgccctgctttgtggcgatccccaccaccagcggcaccggctctgaggtcaccgccttttcagtggtgaaagcccacgccgagaagctggtgctggtggacccgtcgctgctgccggatatcgccattcttgacccggcgctggtggcctcggtgccgccggcgatcaccgccgataccgggatggacgtgctgtgtcacgcgctggaagcctatgtctccctcgccgccagcgacttttccgatgcgctggcggagaaagtggtgcagcaggtatttcgctttctgccgacctgctggcgcgggaaaagatgcacaacgcctcctgtatggcgggcatggccttcaccaacgcctcgctgggcatcacccacagccttgcccacgcgctcggcggcgtatttcgcgtcccccacggccgcgctaacgccctgctga

SEQ ID NO: 192524 - DNA, 474 bp, Klebsiella oxytoca
atgattgaactggataacgatttgcagtcccggcagaacgcccgggagctggtgcgcaatgccaaaaaggcgcaggcgattctggccaccttttcgcagcagcaaatcgacgccatcgtgaagaacgtggcccaggaagcggcgcatcatgccgaagcgctggcgaaaatggccgcggaagaaaccggttttggcaactggcaggacaaagtgctgaagaaccgcttcgcctcgctgcgcgtctacgacgccatcaaagatatgaagaccgtcggcatcattcatgacgatccgctacaaaaagtgatggacgtgggcgtgccgctgggggtcatttgtgcgctggtgccgtcgaccaacccgacctccaccgtcatctacaaaacgctgattgccctgaaggccggcaacgcgattatcttctccccgcatcccggcgcccgccagtgcagctggaaagcattgaaatcgtga

SEQ ID NO: 192525 - DNA, 279 bp, Klebsiella oxytoca
atgaaagaagcgctagggcttatcgaaaccaaagggctggtggcctgtattgaagcggcggatgcgatgtgtaaagccgccaacgtggagctgattggctatgaaaacgtcggctccggcctcgtcaccgcgatggtgaaaggcgacgtcggcgcggtgaatgccgcggtggattccggcgtggaagcggcaaaacgcatcggcgaagtcgtcacctctcgcgtcatcgcgcgtccgcataacgacatcgaaaaaatcgcggcgcagcacaaagcatga

SEQ ID NO: 192526 - DNA, 279 bp, Klebsiella oxytoca; identical to SEQ ID NO: 188767

SEQ ID NO: 192527 - DNA, 210 bp, Klebsiella oxytoca
atggcaggtgtattggcaagcacggcggcagcggtcgggattctcgataaagcggtgagcatcacccagaaactggcgaataacagcgatgaactggacaaggctacgctcaaacttgagcaggctaatctgatggtcgaacttgctaacgccaaaatcgaagcgataactacgcagactttgcttttcgacgctgaacaaacatcttga

SEQ ID NO: 192528 - DNA, 468 bp, Klebsiella oxytoca
atgaagcaatacaccaacgagctaaccaccgaaattataaaatcatgcgctcaaccaccattcacaccagaagagatcgccacatttgacgaaagcacgcagcaagaagttttaaacctgatcacacgtttagccacctaccctgtcaaactaatcttcaggattgcaacggtcgggagccttacccgtcatggtggcattcttcaaaaagcatcaggtaagtgcactgccgggggatttcaggttgcaagggtaggagataaggttgtatacgctgacggaagtgaagccactattatttccggtgctggtgcagcacgagtaatgcaaggagcatccgccgcactggttggaagtatgcttgataatggcgatgaaataatctcaacgccgcaatctaccaatcgactggtatttcgcgaaggtaacgaactcccgaatggatttttaacaatgccaaggagttag

SEQ ID NO: 192529 - DNA, 1377 bp, Klebsiella oxytoca
atgggagctaaaggaaactatctgttcaggggtgataaaactgtttgcggtggcaggattcttgaaggattccccgaccatcaatttttcgataaagacatggcatgtgaaggccataaagtgacctgtggtaaacatccagggtattaccgtatttgtggcggtcttaataacgatgacatacatggaaaaagaatagctggaacactgcacagctatagctcctgcccctgcaaatcgaaattcgttccttcaaacttagtggatgattatgaacttgagagccagtcaacaacaaccacagacaattatcacaaggtagagtttcctgttctgcctggcccaattgagccagaaccagatcagcacgcccagatagcgaaaaagaaaacaggtatagatgcaggttttgccgttctcccttatggcggtactacagaagcgtggcaacgtctgctattcaccgaaaacccaccagcaggagccaaagagctattcgctacactgaacggtgcagacgaaagatacaaagccggttctattatgcttctggttgatcctgataagcaggacgacgaacagatcgcccacatgaaagccgcgaaagcgcgagtcgatgcagcattggccccattgacgcatgaggaagctaacttactgcacaaacactacgctaccatagctaatttcaccagctacgctgatacaggaattggccttgctgctgatcctgttggaaaatactttgagagtatcgaaaaaatactcaaagagatccaggaaacatataaaaacacctacataacacgtggtgcattaattggtgaacaattttatgtccgacgtagccagttgtttaaagagcttgaatccatactcaaagtctacttcctgaataaggctatgaaattcggagagtataccaaaataaaaaatgcactcggcctgtccagtagctctattacccacaaatggaatgaaacggggatcagtgatattgaaggttatgctacccacatcgaacgggcagctaaatacgtaaaagcaatgcgttacactggttatttaggcattggttttagcggactccattctcttaacgaaatccatgaggcatgttctgttggtcgcgaagctgaatgtaccaagaaaaagtatactgagataggtagttttgctttgggtacaggtggcggtgttctcgctggtggcggggctataccattatgcgtcgcaatcggcgttggtacagctggtgttggtgggcttgtttgtaccgttattgcaggtgttggtttagggtatgctggtagcacagtgggaagtgctgttggggaattaggcggagaacagttgtatgacgttttcggcaattaa

SEQ ID NO: 192530 - DNA, 423 bp, Klebsiella oxytoca
atgacgttttcggcaattaattttctgacaatacatcgagttgaaattgctgggatctttttgattctcggcataattaattatgtttcttacgtcatttatgacaaattagccaagagaaaattcatgactctttgctcactatttgtcgataaatttggagcaagaccagcagaagttttaatttatcaggatggtgggttctttttctcgtttatgcgtgatgcattctttattaaagcattatactttaaagaaaactcattccatacgcgaggaatggataatgaacaaattcgatttattaaagaacttcctaatcagtacaccgattggttacgtgtaaaagtgcgactttccatcatcggtattattttcctattcatgatgttatcagtattttatttgccatcatttatttaa

SEQ ID NO: 192531 - DNA, 345 bp, Klebsiella oxytoca
ttggtatccgcattggcctgcgggatatccgagtcgctgtcagagtcggagtcactgtcggagtccgaatcgctgtccgaatccgagtcactatccgagtccgaatcgctgtccgaatccgaatcgctgtcagagtcggagtccgaatcgctgtcagagtcggagtccgagtcgctgtcagagtcggagtcactgtcagaatccgaatcactgtcagagtcggagtcactgtcggaatccgaatcactgtcagagtcggaatcactgtcgctgtcggaatccgagtcactgtcagaatccgagtcgctgtcagaatccgagtcgcttgaatcgccacgggtttaa

SEQ ID NO: 192532 - DNA, 159 bp, Klebsiella oxytoca
atgcttttggtgccgaaggccggactcgaaccggcacgtatttctacggttgattttgaatcaactgcgtctaacaagtcattgattatcatcactaacttgttacgcacctacggttcgtacagccaatttcgccaacagattgccccagcaaaatag

SEQ ID NO: 192533 - DNA, 1242 bp, Klebsiella oxytoca
atggttcacaagagggcaaagccgaaggacaaacgcgatcgttatctgattctcgatccgtgtggtgtgtacatggtacgcatagctgtcccggcatacatggcggcatacttcggcaataaaacatacttcatgaggtcaacagcgactcgcgacattcgtcaggcacgtctattccgggatgccatcgcattggaatggtacaagctgcgcgatcagcttaaacctgtacgttcaggttcacgggttgagcagatccttgatgaacttcgaggtattggcaaacaagcaaaggacacaccgcccacacaattgaacttccccgctcaagtgcaggcttgcccttctcttctggcgatgcgggatcagtacattctgcaattcagcgagaaacgtaaactgaccaccctgtcaaagacgaataaagccgtcgaggtcttattgtcccatcttcgaaagcgcgatattccgttgaaagatatcaaccgaaccatagttactggctggctggataagctgaaaagcgacagagcgccccagacgattcaaaactatatcagcgccctggctcaaatctgggatctggcccgtaaccgatatcacgacgcaccacaggataacccctggcgtggtcatggtctggaagctaaaagcagcaagataagctacgaagttttcacccatgctgagttggcgaaggtcttcgctgcaatggatggtgatgaagagatgcaggcggtgacgctgatcgggatgtacagcggcatgagattgaatgagatctgttctttgtgtgttgggaacattcgcgagattgagggtgtactttgcttcgaagtgacagaggggaaaaccaaatcagcggcccgtatcatcccggttcatagccgcattatcgatctggtggagtcccttctccacaagccccataacggctttcttttctaccgtgcgtcaatcattgaccgtgcagacggaaagcggtctacgtggcatacacagcgtttcacgagggctaaacggcaggcgttgggtgaggaagaaacggagcggaaggtctttcatagcctgcgccatgaggtggcccagcagttagaccgaagccaggttccagaggacaggatcgcgttattgatgggtcatgagcgaggcaagacggagactttcaaaacgtattcaaaacacgcggcgtcaccagtggagctatcaaggtacgtcgagttgttgggttacaagttgtaa

SEQ ID NO: 192534 - DNA, 375 bp, Klebsiella oxytoca
atgggaaaccatccggtttttttatgtcagaacatcaaaaaaagttacattcatcacaaaattgctcctgcacgcgcacaatatatcaatatctgcccagtgaatgggggcattctattaatagaaaagcatatgaccttattacatctgttcgcaattaaggggggtatgcaaatgaacctgcaaaatttaaacgaggtacagaattacgactttctcgcgcagagcttcgcccatatgtatgcgactggtcacactatagatatcgaaacgatcacaggtaacatgccagaggaagtaaggaaatggtttctggaacgatacgagcattactgcaagcaggcactgagcgagggagtaccagaggcacattaa

SEQ ID NO: 192535 - DNA, 210 bp, Klebsiella oxytoca
atgcaattgaaaatccttggcgtgggaaactcgccgctactatcggtcaaagtcaaaacactggacgatgccgggttgctgaatatatcagcgcttgccagggcgttgggcgtacaccgcagcacgtttctctcacgcgtggcgacgcatggccttgaggctgcgatcttgtactacgcgacacagcagaaattgaaagatgtaagctaa

SEQ ID NO: 192536 - DNA, 336 bp, Klebsiella oxytoca
atgctcatgcacgaagaagacttatccccgcaggatgtgatcgcgtatcgcgatgatccagtgttttcacacaagacccgcactttcaccaccttggctgtggataccgtacccggtacgctgctgacctcagagggtgaggcatacgccagcggtagcgatgttctgatcgcgctggatagccacaaggcgggcgataacgtccctgtaattgtggttgatcgcggctgcatcctgaaacgtaacggcctccgcgctgctaccccagcggctctggctgctgcaattactgcgattgagaacgacggtaaaaaccgcgtttcagtctccgaataa

SEQ ID NO: 192537 - DNA, 411 bp, Klebsiella oxytoca
atgaaaactacccttgagaaggttcgcaatttgattgcggcgagcatggcgggctggttgcctgaggagtacgaacagcagcagcgcgaagagaaattaaaaggtgcggttgatcgcttcctggagaatcacccggaatatatcgagcgttacacctcaaaaccaacaacagcgcccgccgttgcgccagttgccaacaccaaacaaaaggccaaacgtatcatgaagacgctgggcgctggggcaggtgtctttactccccctgttgtggacgaagcggcgttagctcgtgctcgctccaaatgccgggagatcgtcgccgccgatccggctgcgtactcctacgtgatcccgtcagagccactgcctgaccaagataaaccgggcggggcgggtataatacagggctaa

SEQ ID NO: 192538 - DNA, 543 bp, Klebsiella oxytoca
atgaacaatgatgaccgcaacggcgtaaacgccgaaccagaacaaaaaccagaacaaccagcaaagatcgacctacccgatttgacccgtcagagaaaattgcggagccgtaccgactccataatctccactgctaaaaaaatgttggtgtccggtatcgggccaaacgaggttgcttgcagactcaggttagatccggctgtagtgctcgacctctataatagttcatggaatccgacctgtcggaaggtgactccccccaatgcctggacatgccaaaagctggcgatccgatgcttcgggagtggtgctccgctcgatgaaatttgccggatcacagatcgaccactattttctgttatcaagatgctgaccgctgagggcgtgagcctttccgtgttgagtcaatatctgcccgcagaaacagatccgctgatggttgaatatcgtaagacgctggcacgccatgaggcatcaccgaagcgtagaccgatcaagatcaacccggttcgccgcagccagacagcaagcggcacagcctga

SEQ ID NO: 192539 - DNA, 651 bp, Klebsiella oxytoca
atgacagaagcagcaaaaaataaaccctacgaatcaatgcctcagccaaatgaggacaaaccgatcaccattgatacgttttcatactggtcaatcccggtagcgcggatcaaatgcttcaacggagtgaaaaatgatccgttgatcatggcggtatacagtcatcttcttggatggaagaagacgactggtcaaatccgtccctctcagcagtacattgcagattgttgttgcatgggcctctcaaccgttcagaagaaggtgaaactgctcgaaaaaatggggtggattaaaaccaaaccagtttataaatcaggtagtaaagagatcctttatatggattataccgttaaagatcctgaggttatcttagccgaactgaacgctgcacttgttcagcagggagatgaaaagataataattgctaaaacgaagaaatctaactcaacgtcggcggagtcccctgctaatggtgacaaggttgtacatgtcgatttcaaaaaacaggctgaaacaccagatccgcagtcaaccacgtgtgaaaccgggcacaaaacaccatcaatcgaccgccgttctactggccccagcagggagcagatggatgaatgggacgctgaacaaaaggcgaatggcggcatacctttttaa

SEQ ID NO: 192540 - DNA, 177 bp, Klebsiella oxytoca
atgaaactgacgtttagcaattcaacgatggacacgctcatgcaggagtgccgccgcaccgggacacctgttgcaacgctcatcaataaacttgtggatgcagaagccgaacgcatccaaacaaatatgaagaaatccattgaaggagaaccaaatgacagaagcagcaaaaaataa

SEQ ID NO: 192541 - DNA, 444 bp, Klebsiella oxytoca
atggcaaaacctgcactgctggattttaccagcgctacagcaacagaaatcgcttgggccgtacttaacggcgtcacctcatatcagaatctccgtgccttccggtcacgtgctgggggaaccgcaaaagcggataaactttacccccaaactcgcgaagcaatgctgctcatcaatgccgagaagaagaaagcccgcgaccgtcgagcaatcaaggatttaatccgagcgttctcacagagttacgccaaaggtgcaacgctgaccgagattttagctccggtgcttgaaggctaccgccagatgtaccttgataaattgggcctcgacctcacccatgagcaaatcatcatgctgattgtcgcgactgatggtgtagaacagctcgaaaaatctggatactgcgttatcggtgatttttcgacaactactacgaccgcgtga

SEQ ID NO: 192542 - DNA, 360 bp, Klebsiella oxytoca
atggaaataattcaaggcaaagacagtttcaacgagatggcaaccggaactctggtgaaacttttcgcggattacccttcccattcagaatttgattattcggaatggggctggaacgacaagcgcagcgagctactgcgtaacaccttactggccctgagggatatgggttacattgatataatctcatcaaccgacatggactacgccgctaagttaactccaatcggcttgaagttgctccagcagcaagcaccaggcgcgagcgataccataatcaacgtcctcaaaagtgcagcaggtgagacccgaacggcggtcattggtgcgatcatcggttggatttttggcgggaaataa

SEQ ID NO: 192543 - DNA, 561 bp, Klebsiella oxytoca
atgacatcaatcatcggatatgtgcgtgtgtccactaacgaacagacagtagagaatcagaagcaacagatcgctgaggctggttaccaggttagtaagtggtactgcgatgaagccacaagcggcagcgtgaaggcggcagagcgtaaaggattcggtgaccttctggcttacattcgcgaaggtgatacgttgattgtggttggtatagaccgcttaggccgtaataccatcgatgtgctttccactgttgaggcactccaggctaaaggagtgaaggtcatcagcttgcgcgaaggtttcgacctgtccacccctgttggcaaagcgatgctcaccatgatggctggattagccagccttgaaaaagacctcatagcagagcgtagaaccgctggcattaaacgtgctcaaaatgatggcgtccactgcggcaggcctaataaggcaactgtcgaagatgtgcaattactgcttgaaaaaggcatggcccccaaggatgtgatggctgaattgtctatcagcaaggctaccttctaccgtttaaggccagcggtgtaa

SEQ ID NO: 192544 - DNA, 219 bp, Klebsiella oxytoca
atgaccaaccaagccaggcacaatcaagtcgtcaaaaatgatgtcgaggctaacaatcgttatgagtctgcaaactcatggtggtcatgcttcataggccggattcgcacacgtgagtccggtttttttatgcctaaaattcagacgcgtgtactacatgtggggtgggttgatcgttcgtacccccacatatccgtattctataaaggattcttctga

SEQ ID NO: 192545 - DNA, 267 bp, Klebsiella oxytoca
atgactatttgttacaaacagcaccgctacagccataaattcattagtttaccggacgatcagggtggtgagggtcgccataaatgctgcggctgcgcttacgagcaaggttacaatgagggcctgactcgctcagggcaaccttgggttgatctctctgcccttcctgatagccaggcgggaacagttcgccataaaagccctcaagcagcctttgcggaaggctaccgcgatggtatgcaagattcttaccgccgtgtggtgtaa

SEQ ID NO: 192546 - DNA, 996 bp, Klebsiella oxytoca
atgaagcaaaaattagtttatttccctaaaagtggtggggcaaatgcttatccgcttaggatgcaacaaatattagcgtctttttcggatgttgaaagccttaatctgaaaagaacaatgcgtgaaatattaaaatttaatttttctaagaaagatgtgctgattttgaattggattgaatcagatataatagggggaaatgggcaggtgtctctaactggtattttaaagatcttgctcaaggtatttgttttcaaattaaagtttaagaagataatttttgtaaggcataatatttatccccataaagcaaataaggaaaacagtaacaaggcaaagagattagtagataaactcgagggtttatttgatcataaagtcgttcattctccagtttatgcgaaagagggatatgagtatataccccaccctttatatagataccctcttgtaattgataataaaaaaatcgataattgtgacaataataagtttattatatttggaaggattttagaatataaaaaatttgaagttataattgagagtttccccactgaacaacaattattgattgtcggtcattgtgaggattatgactatctaaataaaataaaagctcttattcttgaaaagaaaaatatcactattctcccgtcttatcttgatgatacaacagcaaaagaattaataagatctacaggtgggctgatcattagtcatgccgatgatgatatgattgttagtggttctttcttttatggcttaactattgggattaagatgtttgcagtctcaactccttttttgaaatgggcagaagcgcaatttggtgctgacataattgaaacttttcctgatgtcgaaagcctatgtaaacgaattaataaaagaccaattcgtgaacatataagcaatggaacaattagtgacatcaataattttttttcagatgaaactattgcaagttcttttagccgattatgtcaaaaatga
